United States Patent Application Publication US 2005/0228172 A9 - sequence listing, part 66

SEQ ID NO: 285556 - DNA, 558 bp, Homo sapiens
ggcttctccagatctccaggattgtgcacattctaggtcacactgttgcaggacttttccttaattcagttaaagatggggtgctttgtcccacagccatgaaaattcaggctcacagacaatttgaatgatgagtgagacagggttttattgggtgaagaggaagaaaagggggaaacagggactcttgctaggtcagagtcccttctagagcacttcacacccactgttcaaatcccaggctccacacaggaagaggaggagccagactcctccctactacaaacatcgtaaacttcayaaggctccacctcagtgggcaagctggctggagtttctctgaggaccccctcccacctggctgtctcagtactgcctggtcataaaatcagaagccacagaagagaaatctccctcttcctggaggacctatttagttctgcattaaataattttaattattaattttgtattcaaataaaaacacagataatagaaaagaatgcaaaattttaagaaatttaatgtaaattacacgattttcaaaaaattgaaggt

SEQ ID NO: 285557 - DNA, 444 bp, Homo sapiens
  misc_feature (1)...(444): n = A,T,C or G
actgtttaatgggcaatgctcatctgaggcatccatcttgtagggttatatacaaagaacccaaacaaatgtagcttctcagctatccagtttcaaccaaagaactccagagaaatgctcagttcctcagtcccatttagtttcaagcaattagaattccatttctgcagattagagagttgctaacaactttctcttctccaaaggccatttagaattttaggaggttgtacctttaccaggtcaataccagttggagctggtactgagatctgcagayattggagtcacagacattgcattgactcctggtcttccatctgatctcatccagaaacatcactttgccttgtgtctagcagttcctacattcttttaagactgctgtaaaatttagcttgttaattgtgttatatggnnnnnnnnnnnnnnnnnnnnnnnnnn

SEQ ID NO: 285558 - DNA, 407 bp, Homo sapiens
atgcccagacgcctcagagcaggagtgttcagggtagttaggagaatgcttccctgagacagaagggaaagacaggacaggtgggtctcccttactctgaattcctctgcagtgttcttctcctttcatacacatggattgatttaagactcttataagcctctgggaaaaagcactggggaaacaaaagtatcctcaaaagttcaccagctggtaaagaaagcaggatgtagcccccacttatggaccaaagccaaggcccaarcaaggcaagaggaaggccaaggtcccatatctattgcagctgggggcagttagacctcaagccttttctcagtgtgatattctcagtcctctccaaacggccttatggtggtgatggtgaaccaaatggctgagccatgagt

SEQ ID NO: 285559 - DNA, 407 bp, Homo sapiens
atgcccagacgcctcagagcaggagtgttcagggtagttaggagaatgcttccctgagacagaagggaaagacaggacaggtgggtctcccttactctgaattcctctgcagtgttcttctcctttcatacacatggattgatttaagactcttataagcctctgggaaaaagcactggggaaacaaaagtatcctcaaaagttcaccagctggtaaagaaagcaggatgtagcccccacttatggaccaaagccaaggcccaagcaaggcaagaggaaggccaaggtcccatatctattgcagctggggrcagttagacctcaagccttttctcagtgtgatattctcagtcctctccaaacggccttatggtggtgatggtgaaccaaatggctgagccatgagt

SEQ ID NO: 285560 - DNA, 553 bp, Homo sapiens
ctattgtttcaaagaataatgcttttaaaaatcacttgggaaatttctcttgcaagtgcctgcttctaatgcttcctctacccagactccaatcttctaggtttccctccagtgagcgaaccagccagctgtgtcagtgccattcggaagtgcattcctggatatggcaacagtgatcaacatccccatgatatgagagatctgtggttaagcaatgtacaaggaggctgccaggaaaagagatggcactagttggagctgaatatttcctgaggcttgtaagtatacagccagcccctgagcctgcgaccatagccaaaaccaaatcagtcagagaccctccctattcctgtacagccaattggaagagataggtttcccattgcctttyagttttttgttctgtttttgctttggtccagtttttacctcattttaagagaaaaatggtaaagggaccaacttcaggttttgcccctagccatagaaattataagaggacctccactttgaccactttctctgttcaaagagttcttacatgatacatttc

SEQ ID NO: 285561 - DNA, 581 bp, Homo sapiens
  misc_feature (1)...(581): n = A,T,C or G
tttattctctaaactgcttttgattaccctaaagaaggaacggtggtaataactactggaaggctttggagaaattaacaaaactaagagagtagtgactgtgggacccctaaatgatagtaaaaggtgagggtttctaagtcatcgtatgctctgccagagagataacatttgatcagtaatccactrcttaacaaatggaacaccagcagacatcaattgactctcagcagaatatgtagagggaggggaagttgaaccaaattcccagcactcacatgggtctatctgaagccaagtgaattctgtgaccttctatcaagggaagcaagagtgggaaattcctttggaattactcaataaagctcttatacagacagcctaatttggtcaaatgccacctgcatatataaatataatgaatcctatatagttttgggagagaactaaagaggcagtcagcatccagttttgaaaaaggatgctgcgattattctacatgctttccatttcgttgtaacctgccatatttccgnnnnnnnnnnnnnnnnnnnnnnnnnnnnnnnnnnnnnnnnnnnnnn

SEQ ID NO: 285562 - DNA, 581 bp, Homo sapiens
  misc_feature (1)...(581): n = A,T,C or G
tttattctctaaactgcttttgattaccctaaagaaggaacggtggtaataactactggaaggctttggagaaattaacaaaactaagagagtagtgactgtgggacccctaaatgatagtaaaaggtgagggtttctaagtcatcgtatgctctgccagagagataacatttgatcagtaatccactacttaacaaatggaacaccagcagacatcaattgactctcagcagaatatgtagagggaggggaagytgaaccaaattcccagcactcacatgggtctatctgaagccaagtgaattctgtgaccttctatcaagggaagcaagagtgggaaattcctttggaattactcaataaagctcttatacagacagcctaatttggtcaaatgccacctgcatatataaatataatgaatcctatatagttttgggagagaactaaagaggcagtcagcatccagttttgaaaaaggatgctgcgattattctacatgctttccatttcgttgtaacctgccatatttccgnnnnnnnnnnnnnnnnnnnnnnnnnnnnnnnnnnnnnnnnnnnnnn

SEQ ID NO: 285563 - DNA, 510 bp, Homo sapiens
cagctatgtctattccactttccatgtgcatccatagggatattttaaactgcaaatttaatcttatacttaaaaccttccaaaggcttcctacggctccaaaatcctttatacgacatacaaggctattcataatatggcccctgcttacctctatagactgcacgtttctcactatttcccatcttacactctggtcatactttattctcctgcctctgggctcttgtacatactcttctctttggctttaacaggaktatcctttctctttttgtggttccagcatagaagccatcatttccttaagcaatacccggacactcaagagctccatatgctcccataaaacccagaagatctattactagcagtgatcatgctaatgttttattttgtttgtggtatacatcaggggttgctaaactacagcccataggccatgtacacatgctatctgtgtacagtccacaagctaagaatagttttcacatttttatatagttgaaa

SEQ ID NO: 285564 - DNA, 472 bp, Homo sapiens
ctgattaattttactagaaatttacatgctacaacaattcttccagataatataagaaggaggaatagaatacttccaattcaatttaggaggcaaatattatccaaataccaaaatatagacaaagacattacaagaaaagaaaactataggtcaagatttcttacaaacatagatgcaaaaatccttaaaaataacatgacaaaatggaatccaggaataaataatgataatgcatcataaccaagtaggatttatctgagaaatgcaagrttggttcaacattgaaaaatcaatatataaattcattcaaacagacataaaatctaccaggttagtctttagaaattgataaactgattctaaaatttattttgaaattggaaatgtcaagaatagtccaatcgtgaacccaattctcaaagaaaaagaaaaccaaagactaacaatgccagatggcaaaattacagta

SEQ ID NO: 285565 - DNA, 518 bp, Homo sapiens
tgggcagataatagtaaaacttctcaaacaaggtgaaaaaaatattctgccatcagccaagatgaggaaactgtgactggatttacccttctgcctaaaacagctaaaatcccagaaaaaatctctgaaacagaaattttttagacattggaccttaggccgcatgggacagttatacctgggagaggaaaagcaaataaagtgaacattatgattgcaccaggtaactgtctagagagtttccatgctgcagcatgaagagaagataccaggcaaagcctgsaagtccctgagttgaggagacagagttgggtgtcctcagaaaccacgatataaagtatataaagaatatccaaaataaatgtccaaagataaaaattacaatgtttaatataaaaaatacattggatgagattaatagcatattagacaatgcagaagaaagattaatgattcatgtgtaaatagaaactataataaacagtattaaaagattgaaaaaatatgagtattacatt

SEQ ID NO: 285566 - DNA, 629 bp, Homo sapiens
ttgaaaaaatatgagtattacattagtgagataggggacaactttaattggccaaatatccatctaattggagttcccaaaasagaagagagaaaaaatagtgtaaaaatactgatagcccagtccatgctctagaataattgaatcagaatacctgtgggtggcatctggagatcaagagttggacaggaatggtatatgcgtgctgagaacaggataaatcaatggcctagcctggtgaaagtggctttccaaaccaggatatatgttattgaccaaaatggaagtggaatctgacatagtgggtttttggaaggagcagaacctgtgacatgaaggagaaagccaaagctacgggaatttacataagggcggtcttttgtgagacttggcaaggagacagcaaaacattgatctgattggtggttaagaaggtgattatttcagagaacctgtaataagatcataggatcctattataagataatttctgctcctcactgctctgagttgatagattttcaggacccagtcttgccatttccaagtaatgtaattatattttgtgagcaagagatatgatcctcaaaagatatcttggtggctggagcaacatcccaaatggaatc

SEQ ID NO: 285567 - DNA, 574 bp, Homo sapiens
agttcaagataaaggctgggctctacatggatgaatgtgagtttgcacaaggagytgtcagtggataattaccgtttccgcaatctacatcagtaactcctaaagcctcacctaagtagccatacaaatataagtaaaaatagaatgcttgttactttgatacaacttccaggcaggttgcccatcacttagcacctccccaaaatccagtgtcttctctagacttctctatatagaaatgtgacctaagtagaatttctgcataatatttttaagggaggagttttgagaaagagaaaagttatctcagaaactaggacttaaagtataattttaaaaaagaggaaaaaaaggtaggaatgaataaaaagatactatgtttctgctagcaaacaatttatattttaactaagtagataattattttaaaaagcaattaataagagacagttagacaagaccctttggtttaatgctctgctgctgccatcttgaaattcttaatgatttttaaacaaagggtcccatgtttccttgtattgggctccacaaagtatgtctctactcttgcctg

SEQ ID NO: 285568 - DNA, 1006 bp, Homo sapiens
agttcaagataaaggctgggctctacatggatgaatgtgagtttgcacaaggagctgtcagtggataattaccgtttccgcaatctacatcagtaactcctaaagcctcacctaagtagccatacaaatataagtaaaaatagaatgcttgttactttgatacaacttccaggcaggttgcccatcacttagcacctccccaaaatccagtgtcttctctagacttctctatatagaaatgtgacctaagtagaatttctgcataatatttttaagggaggagttttgagaaagagaaaagttatctcagaaactaggacttaaagtataattttaaaaaagaggaaaaaaaggtaggaatgaataaaaagatactatgtttctgctagcaaacaatttatattttaactaagtagataattattttaaaaagcaattaataagagayagttagacaagaccctttggtttaatgctctgctgctgccatcttgaaattcttaatgatttttaaacaaagggtcccatgtttccttgtattgggctccacaaagtatgtctctactcttgcctgwccatttccaggtttcttatatgacttacttccaaatcagaagattatctctgctcagaawataaaagttgatagcttcccaagagaatagaaacatcaaagacagaaagccttactttgatctggattcctcaagggtagggaagggaggatgagttcacccaagaataaaacaaaactttacaccatgcagcccccatctgacttgtaaagaaatttttctctcaggcctcatttattcactctttcattcatttggccaacatttatcgagcacctactatgtgccaggtactaggccaacatcaggaattcaaaagcaaataagctatgttccttctctcaaggagctcatcattaatcagccatgttagcaaataattacagtgctccattcaggctgatatctacagtaaatgcttatgtaattca

SEQ ID NO: 285569 - DNA, 611 bp, Homo sapiens
cctgaagaacattttatattctgtttcagaaacttgttaataccttgcttattaattagaaaatagtgtgggtgccttgtattcgggctaggaaagagactcccattgccccgagtctccactaaaacagagcacagagccaaccacctttaacatccaaaaatgagcctcttagacatatcaaagtaagtctagctgagagctgtgtagcagacagccacagggccccatcatgattaatggtgtcagtatgaagtcccatgtctgtcatctgggtgcaatgtttgtgatgatggcatattccgcctttcaattctcactttcctcttaaggaagactgctcatttttatcctctgagcatgttcctaacaagacggatgtaccatcacacrtttaaggaggaagaaaaaagggcaactgcaggagttcaagtaaaaaatgaaagctgaatcattctcagtaatatcccaaatttatatcccttagtatcacaaactgaattacctctataaacattagtttagaaaaacaacttttcacttacagctgcatggtaaagaaccacatcacctccatacaggaaggatcttattttcaatctaatgtgcca

SEQ ID NO: 285570 - DNA, 462 bp, Homo sapiens
gtttattggtcttacagttccatacggctgggcaggcctcaaaaccatggaggaaggtgaaaggcacatctcacatggyggcaggcagacaagagaagagagtttgcgtggggaaactcctgtttttatataaccatcagatctcgtgagacttattcactatcatgagaacagcccgggaaagtcatgctccaatgatcccattacctcccattggatccctcccacaacacgtgggaattcaagatgagatttgggtgcggacacagccaaaccatatcatcactctagagtggagagtgaaacaatgacagattttatattgttatttctactagtttgacatgagctggataaaaaatattttcataagtaatgaacattcattcattatctcttgaaagtaggaatctatcatccattttctttatatactcagtatctgatacagtgtctggccta

SEQ ID NO: 285571 - DNA, 462 bp, Homo sapiens
gtttattggtcttacagttccatacggctgggcaggcctcaaaaccatggaggaaggtgaaaggcacatctcacatggtggcaggcagacaagagaagagagtttgcgtggggaaactcctgtttttatataaccatcagatctcgtgagacttattcactatcatgagaacagcccgggaaagtcatgctccaatgatcccattacctcccattggatccctcccacaacacgtgggaattcaagatgagatttgggtgcggacacagccaaaccatatcatcactctagagtggagagtraaacaatgacagattttatattgttatttctactagtttgacatgagctggataaaaaatattttcataagtaatgaacattcattcattatctcttgaaagtaggaatctatcatccattttctttatatactcagtatctgatacagtgtctggccta

SEQ ID NO: 285572 - DNA, 462 bp, Homo sapiens
gtttattggtcttacagttccatacggctgggcaggcctcaaaaccatggaggaaggtgaaaggcacatctcacatggtggcaggcagacaagagaagagagtttgcgtggggaaactcctgtttttatataaccatcagatctcgtgagacttattcactatcatgagaacagcccgggaaagtcatgctccaatgatcccattacctcccattggatccctcccacaacacgtgggaattcaagatgagatttgggtgcggacacagccaaaccatatcatcactctagagtggagagtgaaacaatgacagattttatattgttatttctactagtttgacatgagctggataaaaaatattttcataagtaatgaacattcattcattatctcttgaaagtaggaatctatcayccattttctttatatactcagtatctgatacagtgtctggccta

SEQ ID NO: 285573 - DNA, 541 bp, Homo sapiens
ggcatcacctcgaagctggttatcctgatgaaagatctcagggagtcgcagctgtaagcaactgtgaccctttgacatcttacatggagacaggtttggagagagaagggaggcagcatgttcacccagctkcggctctgatatgaatgctgacagcgttgctgggattattttttgtttaaactctgcatcccattagttctgatatgaaaagctgatcttgtgactgtaatgtatgcacgtttctgccaccaggaaaaagcacagtctgattgagcaaggtagaatccaacaccattcagcccaaataacctaaaaccccaaccctgattgtgtcatgtcatatattttaagaacccagtccaggctgttacatcaagtaatatcgaatcaacagacagttaaaataatgacaatggggctatctgaaaaaataaaagccatttggcccctgtaactgtcaggctattaatgtagaaaatgaatgtctggggttgttttcctgacactggagaaacattccaatgagcaatgataaatt

SEQ ID NO: 285574 - DNA, 559 bp, Homo sapiens
cataaaagaaattcctacaattgaatttacagtcaaagctgtgcatgtttgaatatatattgcaaattgctctccagaaaatgtgtactaatttacatggtcaccagcaacatttgaacatgctctttttaacaccttactagtttgcttaataagatatcttatatacttattgctgctatagctccaaactaagtatatttacacctatacttggaatggcaaatgcatcgcacatgccaccccactcctcacagaaggagagatttctaatcaagcacaaacaaaatcatctgctgttgaaatggagctcaccttccaaatccttcccaaggtgactgattctctagacagccactcccaatcagtgtgagttggtgctaggatgaaactattcaccatccctggtatttgagtcctcagtacttctcatgtgagctgctcccactccattgggagatgaagckgtgagttgatgcagcatgaatcaagctgcgttcacccgctgtctgaacaacttcctcccaatagatccccactacttcacctgaaaacccag

SEQ ID NO: 285575 - DNA, 495 bp, Homo sapiens
aaattcctttcatacaagaccttccacagtcactgagaaagacctccaaaacataaggcatgcctaaggctgaggctaatccaggacaataaggggatgcccctctcctatctctatcaccaggctagcaagcactgagaaacaaatgacacagtctatccctgaaacagggacaagagaatggagagagatatttatctattccaaaaagatatatttaagccctaacgccagtacatttgaatgtgacctcactcagaaataggatctttggagatgtgatcaagttgaggttactgcattcaaatgggctctaatccaatgactggtgtctgtctaagatgggaaaaatttggatgcagacacagagtgaagcacatcttgtgaggacacagagacatagaagacagccacgtgaaggtggagacagagactgggacaatgctkccacaggccaaggaatgcctggggctataagaagctagaggaggcacg

SEQ ID NO: 285576 - DNA, 1146 bp, Homo sapiens
tcgttcttgagatatgcttcgcttacggctgtcagatgcctctgccatacaggaggcctagttcaatagctggctcaaggttacgtatcgagtgagtaaaataataggggttcaaagcaggatctctctgaaattaaaggtaagaatcttctctattatggataaggtgaccatacaattaattttactaatcaggacacttgtgaaagggacattattaataactacttaataatcactctgggaaaattggtatagaccaatattgttcagatacctggcaccgtgggacacctagtactgcctcccacaaatctgtgctcagctcacacttcatacgtttctgttggtcacacagattacatggtagggcagcacacacacacacacacacacacacacacatatatatgtatatgtatatatacatatatgaatgtacatatacatgcatatgtatatacatatgyatgtatatgtacatatgtatatatctatgtacatatatatgtacacatatacacatatgcacgcatacacacgtgtgtatatgcacgcatacacacgtgtgtatatgcacgcatacacacgtgtgtgtatatacgtgtwatgagaacaccagcaaaaatggcaaatcaacgttttaagaactcagcaacattaacwcaatctagatggggaggagaaatctgatttcctgagttgccacattgtattatttaaaatttccatttttgatgaaaacaaatacaaaacatgcaaagaaatagtacattatgacacatgtacaggaaaagctagtaagtcgaaactatccctgaggaagaccaaagttcaggcttactaaaaaagaacattaaatcacctggttcaaatatgttcaaaatctaaaagcaaccatgtctaaaaaactaaagtaaaatataagagcactgtttcactaaatagaaattatcttttaagataggaagtagaaaaatgtaccaaatagaaattctagagttatgtacaataacttaactgagatgtttattagaggctcaacattagatttgaggtggcagaagaaaaatcagggaactttaaggtaagtccatcaagattgtccaggcttaggtacaaaactaagaaagaatgggaaaaaat

SEQ ID NO: 285577 - DNA, 565 bp, Homo sapiens
ctgactcccacccaggcttgtctctccaggctgccacacactgggagctttagtctctctacaataggaggctccctaagggcaggacgtctgaccctttcttcactggcaccccggccctggaagaggctggaatcactgcacagacccatgcaccctcgatgaatcgygcatctggagccctcagctgggagtgagatagaatcgaggagcagagctgccccgtggccttggccagaggtgccaggagctcaggtggaggggggctaccgggcaggatgccctggccactggcctccagtgccctggggtggggttgctgcagggtggcatagttgctgctccccctgccacattctgagagcttccctgctactggtagactttgcagtcagtggaagccttcaaggaaaatataagaagtcctttaactctgtgcttttctaaaatacacagtctcaaagatcttattctgtatgaaaacaatgtagacattctttgcggcaggagagctaattgttatcaatgacaagtccaaaagatttaccatgaatgaaggaaatgc

SEQ ID NO: 285578 - DNA, 565 bp, Homo sapiens
ctgactcccacccaggcttgtctctccaggctgccacacactgggagctttagtctctctacaataggaggctccctaagggcaggacgtctgaccctttcttcactggcaccccggccctggaagaggctggaatcactgcacagacccatgcaccctcgatgaatcgtgcatctggagccctcagctgggagtgagatagaatcgaggagcagagctgccccgtggccttggccagaggtgccaggagctcaggtggaggggggctaccgggcaggatgmcctggccactggcctccagtgccctggggtggggttgctgcagggtggcatagttgctgctccccctgccacattctgagagcttccctgctactggtagactttgcagtcagtggaagccttcaaggaaaatataagaagtcctttaactctgtgcttttctaaaatacacagtctcaaagatcttattctgtatgaaaacaatgtagacattctttgcggcaggagagctaattgttatcaatgacaagtccaaaagatttaccatgaatgaaggaaatgc

SEQ ID NO: 285579 - DNA, 594 bp, Homo sapiens
actggcttatttccttgcttttttattgagttgataaagaaatttgacgctcatatggaaatctgaaatctgagctactgggttatgaattaagtagatgattttctaaaatatcttctttatattctatataaataaatagtaatgagtaaataaatacagtttaacgtctcagccaatggaacaatgtctgctacagccaggcccarcttcacggaatagaactaggaacaaacaaatggcctctgagattttcagtatgtttgctgatgagagatgtataattctataaaccagggctggttcgaggttttgttttgttttgtttcacctccttctcctctccctccttctcttccgcctccatatttcccttcatctcccagctcccctccgttttcaagccccctcctaatggagaagatgaggagggtgagtccaggcatccaggttctaactgtgagagcagggctggggtctgcaatgatgaatggtgggtgccaaggtggctgagaattcccctttactgagaccaccatgtgccaggcactgggctggggtgtcccacgcctcatttaccatatacaaacagga

SEQ ID NO: 285580 - DNA, 594 bp, Homo sapiens
actggcttatttccttgcttttttattgagttgataaagaaatttgacgctcatatggaaatctgaaatctgagctactgggttatgaattaagtagatgattttctaaaatatcttctttatattctatataaataaatagtaatgagtaaataaatacagtttaacgtctcagccaatggaacaatgtctgctacagccaggcccagcttcacggaatagaactaggaacaaacaaatggcctctgagattttcagtatgtttgctgatgagagatgtataattctataaaccagggctggttcgaggttttgttttgttttgtttcacctccttctcctctccctccttctcttccgcctccatatttcccttcatctcccagctcccctccgttttcaagccccctcctaatggagaagatgaggagggtgagtccaggcatccaggttctaactgtgagagcagggctggggtctgcaatgatgaatggtgggtgccaaggtggctgagaattcccctttactgaraccaccatgtgccaggcactgggctggggtgtcccacgcctcatttaccatatacaaacagga

SEQ ID NO: 285581 - DNA, 573 bp, Homo sapiens
ggaaggctggaggtaagttggatatgtaacaaaccagaacagtcatgagaaatgggaaaaatgaaagaagaaagtttaaagaaggattttggaaggcgcgttcaaaggacctggatatagatgaaaaaagaaagatgaagtaagaatttaaaactgcagaaaatgccaagatttgtgataaggagagtaggataaagcacgaaatcttctttttgtgtgttcttggagataaatcattgagaatattggtgaaaattacattttakcccttatgttacatggtctaaaacatggatatgagacattgacaaaaatcagaattcatttattctttgctcttttcctattctaatttttagatcaatctactgtgattgctttagcttactgtgagttttgaggtagtggtgatttggtaaatgcacactcctctgtaactatgataatgtagctttggaaatgatatccagtttgttcacaggtagcaagcacttctgaaagaagaatagcatatacattatgacgtgaatccttcctttagaatgaagtggcacaacttctatttcaacacac

SEQ ID NO: 285582 - DNA, 625 bp, Homo sapiens
ttaaataactttttaccaggactattctttgatcaagtggatgaagtgaggttaatacyttggaggagcaagtaatcagaatgctgatatcaggagcagacatacagggtaagggaggagtgggtacagagaatatgcaaggaaagaaggaagaatcatcctcatctctattctcccggaaaattgactaaggattagcaaaaatagttataagaaatccttacatagcatattattttatgagtacaaacctgctgttcacatttctaatttcattctcaataattcccagtaagtcattttctggtcttcagaaagtgtcaaacagttgtctagttcctgttacctgcaaacttacatgcgcgtgccctcacatgcacaccggtatgtcattttagaaaggcgatttatgtctgcacatgcacgagggatctaaaattgcatctccctgtggagggggccatgtatccccttccttcctgtctcagctgcaggcaagaactgatcctggttcaactaaatagatgatgcctactcacattgtggagaataacatggaccaggagcaggcaagaactccatatggggtaacaaatttgctcctctaggagtttggaatcacgtt

SEQ ID NO: 285583 - DNA, 545 bp, Homo sapiens
ttactcaccagttgctgcctgtatggtcttcatcatttaaaaatcagattctattttttttttctttgctcaatatttttatggagaagatttctcaagaggaaaatctaaattctttatgatggtgaccacactggctggtcatttgctgctccttgtcagttgcattttaatctagatatcrtagatgattttagagctcagactatatcaacctggcaggttgttactaaaataaacgaaagtgtgagagatcaggaccaaaagagctttgatccctggcatggccatctggagggactgtgaatgtacacttagtgcatgcactgcaaaggatgggaaaattggtgagtgtaaattcagccaaaaagccagtgtggtggacgacatgaggtagggagatgtcctagctgcaggcagaaggacatagtgaggactctaaaccaagtgacatgtagaagtttatatcaaaaagcagcagacattgggaaagtctatccttaaacagtggagctcagtcttaggcagagtccaggtgcaggtag

SEQ ID NO: 285584 - DNA, 503 bp, Homo sapiens
aaataaaaagaagtttattagtaaattgtatggaatcccagtaaagattaacctaaagcaraaaaaaaaatacagtatttttctctttatttttcctatttttccaacatctctgccaccaaaaccgtgtaggacattgtattttgaaaaattcgacacagaactacaacaatatgttttccttaaatttgagtattcttggtatcttactgacatattaccatcagaaaagtccgtgagcaaccaagaagttgaatcaaaagtcatttatataattaaatagaaaatattactctggaaaaaccacaaatgcctagaacatacggaaatacaatttattgaataatatatctttgctcaatgatttgaagcaccatttgaatatacatttcactctcttatatgtctaaatcttcatgaatccatggcgttttgcatatgtatcttcctagtgcatctcctgaactgtgtaggaacagggaatcttacggctgcactggggc

SEQ ID NO: 285585 - DNA, 503 bp, Homo sapiens
aaataaaaagaagtttattagtaaattgtatggaatcccagtaaagattaacctaaagcagaaaaaaaaatacagtatttttctctttatttttcctatttttccaacatctctgccaccaaaaccgtgtaggacattgtattttgaaaaattcgacacagaactacaacaatatgttttccttaaatttgagtattcttggtatcttactgacrtattaccatcagaaaagtccgtgagcaaccaagaagttgaatcaaaagtcatttatataattaaatagaaaatattactctggaaaaaccacaaatgcctagaacatacggaaatacaatttattgaataatatatctttgctcaatgatttgaagcaccatttgaatatacatttcactctcttatatgtctaaatcttcatgaatccatggcgttttgcatatgtatcttcctagtgcatctcctgaactgtgtaggaacagggaatcttacggctgcactggggc

SEQ ID NO: 285586 - DNA, 212 bp, Homo sapiens
ggtctgttcagagtttccatttcttcctgatttaatcaggagtgttgtatatttccaggaatttattcatcttctctagattttctagtttgtgtgaataaaagrtgttcatagtgaccttaaatgatcttttgtatttctgtgatattggttgtaatagctcccatttcacttctaattgagcttttttgaatcttctctcttcttttctt

SEQ ID NO: 285587 - DNA, 212 bp, Homo sapiens
ggtctgttcagagtttccatttcttcctgatttaatcaggagtgttgtatatttccaggaatttattcatcttctctagattttctagtttgtgtgaataaaagatgttcatagtraccttaaatgatcttttgtatttctgtgatattggttgtaatagctcccatttcacttctaattgagcttttttgaatcttctctcttcttttctt

SEQ ID NO: 285588 - DNA, 549 bp, Homo sapiens
tttatgctctaaggaggttctatttttgcctattttgaggttttatttcaagatttagaatcccagctgggcgcagtggctcacacctgtaatcccagcacttggggaggctgaggggggtgcagatcatttgagatcaggagttagagaccagcctggccaacatggtgaaaccccatctctactaaaatacaaaaattagctgggtgtggtagtgcatgcctgtaatcccagctactcgggaggcagaggcaggagaatcacttgaacccggaaggtgaaggttacagcragctgagattgtgccactgcactccagcctgggcgatggagtaagcctccatcttaaaaaaaaaaaaagaaagaaagaaaaaaaatttagaattccttttagcatttcttgtagtgctggcttgtggcaaattctctcagcatttgtttctctgaaaaatactttatctcttatttatttatgaagcttagttttgctggataaactattcttggctgccaattattttgcttaaggaggctaaagatagtacccca

SEQ ID NO: 285589 - DNA, 549 bp, Homo sapiens
tttatgctctaaggaggttctatttttgcctattttgaggttttatttcaagatttagaatcccagctgggcgcagtggctcacacctgtaatcccagcacttggggaggctgaggggggtgcagatcatttgagatcaggagttagagaccagcctggccaacatggtgaaaccccatctctactaaaatacaaaaattagctgggtgtggtagtgcatgcctgtaatcccagctactcgggaggcagaggcaggagaatcacttgaacccggaaggtgaaggttacagcaagctgagattgtgccactgcactccagcctgggcgatggagtaagcctccatcttaaaaaaaaaaaaaraaagaaagaaaaaaaatttagaattccttttagcatttcttgtagtgctggcttgtggcaaattctctcagcatttgtttctctgaaaaatactttatctcttatttatttatgaagcttagttttgctggataaactattcttggctgccaattattttgcttaaggaggctaaagatagtacccca

SEQ ID NO: 285590 - DNA, 549 bp, Homo sapiens
tttatgctctaaggaggttctatttttgcctattttgaggttttatttcaagatttagaatcccagctgggcgcagtggctcacacctgtaatcccagcacttggggaggctgaggggggtgcagatcatttgagatcaggagttagagaccagcctggccaacatggtgaaaccccatctctactaaaatacaaaaattagctgggtgtggtagtgcatgcctgtaatcccagctactcgggaggcagaggcaggagaatcacttgaacccggaaggtgaaggttacagcaagctgagattgtgccactgcactccagcctgggcgatggagtaagcctccatcttaaaaaaaaaaaaagaaagaaagaaaaaaaatttagaattccttttagcatttcttgtagtgctggcttgtggcaaattctctcagcatttgtttctctgaaaaatactttmtctcttatttatttatgaagcttagttttgctggataaactattcttggctgccaattattttgcttaaggaggctaaagatagtacccca

SEQ ID NO: 285591 - DNA, 277 bp, Homo sapiens
gttagacaagtctgagctcagactctccttgggcagggcttgctatggccactgtaggggatgctgggtggttcttgggctaatggggttatgttccagaggggattatggccacctctstcactaagaaagtgggggaaagccagtaacaataggcctaactcaactcccacacagctggtgaggctggtcttgctcgctctgtgccctcctaacagtggcaaattaatctccaggaagcccagggagaactcagaccttgccccaggctataagc

SEQ ID NO: 285592 - DNA, 277 bp, Homo sapiens
gttagacaagtctgagctcagactctccttgggcagggcttgctatggccactgtaggggatgctgggtggttcttgggctaatggggttatgttccagaggggattatggccacctctctcactaagaaagtgggggaaagccagtaacaataggcctaaytcaactcccacacagctggtgaggctggtcttgctcgctctgtgccctcctaacagtggcaaattaatctccaggaagcccagggagaactcagaccttgccccaggctataagc

SEQ ID NO: 285593 - DNA, 277 bp, Homo sapiens
gttagacaagtctgagctcagactctccttgggcagggcttgctatggccactgtaggggatgctgggtggttcttgggctaatggggttatgttccagaggggattatggccacctctctcactaagaaagtgggggaaagccagtaacaataggcctaactcaactcccacacagytggtgaggctggtcttgctcgctctgtgccctcctaacagtggcaaattaatctccaggaagcccagggagaactcagaccttgccccaggctataagc

SEQ ID NO: 285594 - DNA, 394 bp, Homo sapiens
tcctgttcaacacctggattctgctcaagagagtttatgcccaataaaattattataaagttcagtttgaagcttcccttctcttcctagcagatatctggggtatgtgagagagagaggaaagagcgtcctctttccctcttctgtccttccatccccgagtccaggcgaccttggcagtcaccaccatrggtgttaaaatgacttacactcatgaagcagggggtttagggggtgaaaatctgccattcttacccacatatgccctatctcccttattgtcagtagccttgaattccctagacctcatttatgccatggacactaacgtggcctttatccatcaaacaggaagcttgggcatggcttaattggcaggaatcagccacgatca

SEQ ID NO: 285595 - DNA, 394 bp, Homo sapiens
tcctgttcaacacctggattctgctcaagagagtttatgcccaataaaattattataaagttcagtttgaagcttcccttctcttcctagcagatatctggggtatgtgagagagagaggaaagagcgtcctctttccctcttctgtccttccatccccgagtccaggcgaccttggcagtcaccaccataggtgttaaaatgacttacactcatgaagcagggggtttagggggtgaaaatctgccattcttacccacatatgccctatctcccttattgtcagtagccttgaattccctagacctcatttatgccatggacactaacgtggcctttatccatsaaacaggaagcttgggcatggcttaattggcaggaatcagccacgatca

SEQ ID NO: 285596 - DNA, 611 bp, Homo sapiens
agcttgtttctttatgtgataatggggtagagatttctctaggattattttcctgatggaaaatgctgcattttttgcttttctcttattgaataacttayatagtaaaatgcacaaatctgatgtgtatagctcattaaaattttacatatgtactaacatatccaccaactagatcaagatgtagaagatttgcatcttcctagcagactccctcatgccttctctttgtcagttacccgccaagtaaccacaattctgacatttatcattataaattaattttgcctgttttaaaacttcatgttaataggaacacagtgtatactcttgacgtctggcttcttttgctcaacattaaaaacatacttcttttgggatttatttgactatctttccaatttgttaagttggattcttagctcattaattttcaaatttccttctttttttggtattttttacaactttaaaaaattgtgtcaaaatatatgtaacatgaaatttgtaactttaaccattcttttaaagtttataatttggtggcattaattacatttacaatattatgcaatcattatcactatttcaaaattttttcatcatcctcc

SEQ ID NO: 285597 - DNA, 605 bp, Homo sapiens
tccaagacttagggtagggatcttgtccatcttgttcctagtactgtgcctgacacacattatatactcattcaacaactattgatttgttatataccatactaggcactrgagatgcaatggagaagaaaacagacctgatcctcgtcaccttggtactttgttgctagtgtttgctgaataaataaataagaaaccatctattttcatgacatctgcatcatcacaagttgataattgctctatatggtaattttgactccatacattgcataccataattgtagtcattacttagagaatctctcagtctctctctctctctctctcaactcaaaggtgaaatgtattaaatacagtaatcaagtgagtatatgttatttaagaatgaggttggtgattttccaggtgtttatttctagactttttgccaggtaagctggccatttcattcccaaaaggattattcaaatatataaaatagtattttcaaacactattatatattccagaaaaacaagcatttgaataacaaaaacaatagaacttagcaaacatggtgaaactcccatctctattaaaaatacaaaaattagcccggcatg

SEQ ID NO: 285598 - DNA, 606 bp, Homo sapiens
gctttcccaacctttagaaatctattcatttyccccactttccatcctctttctcttgctatctctttatcgctcctcctgccttcttcctttctttccttcagtaaacgttttttgaaacgatgatgagcaaaaaacgcctgatccagtctatggcgcgtttcggtgggaagatgaacacgccttcccagcagagtaaaacgtgattacaccaaggaccggtaccctctcccttccctcggccaggtccacgtccccaggcgtcggagaaggggttggaccgcgcagcggggcgtcagagttgccaggcgcccggggcaaataccggcagcggtggttgtgcggtgtcctagcaacggggcggcagcagggcacacacaccgcccaagcccggacggtggccgcgaagctagggccaccatggcggaccgcaggcggcggctccggccggggacgttggccccggtgcgcgagggcgtgaactgcaggtccaggtaaacactcagcgcccgggccgagggcgcatcccacgcgggccgcgcgggggcgcctggagacccgcgcttgctggggcgggggcgaggggagaggtccagcctgccttcc

SEQ ID NO: 285599 - DNA, 606 bp, Homo sapiens
gctttcccaacctttagaaatctattcattttccccactttccatcctctttctcttgctatctctttatcgctcctcctgccttcttcctttctttccttcagtaaacgtttttygaaacgatgatgagcaaaaaacgcctgatccagtctatggcgcgtttcggtgggaagatgaacacgccttcccagcagagtaaaacgtgattacaccaaggaccggtaccctctcccttccctcggccaggtccacgtccccaggcgtcggagaaggggttggaccgcgcagcggggcgtcagagttgccaggcgcccggggcaaataccggcagcggtggttgtgcggtgtcctagcaacggggcggcagcagggcacacacaccgcccaagcccggacggtggccgcgaagctagggccaccatggcggaccgcaggcggcggctccggccggggacgttggccccggtgcgcgagggcgtgaactgcaggtccaggtaaacactcagcgcccgggccgagggcgcatcccacgcgggccgcgcgggggcgcctggagacccgcgcttgctggggcgggggcgaggggagaggtccagcctgccttcc

SEQ ID NO: 285600 - DNA, 589 bp, Homo sapiens
aggtaattgcagaaggggaccagaccgaaaatcaaagaaaattaagttgtattgaagtcttaaagttcttgaattctgatgtgtcatgggtactggttttttaaagtagaattctggaatttttttcatgattaatatttgttaaataaatgcatgtttaatacctataacaaagtcagttatacaaatgaggcatgtcatttgggattatttttartacctgaatagtcattttcagagataatttgttaggtgttttatatgttggaatactaaaagtcagtagaaatatacatgaatggttattattgcaagagcaaaatgctgcaattaattattatgaatgctgttaatattatgtccaaagaattcttaaatttttgctggagtcttattgaccacaaaccatcattcttgaccacatgcttgcctaatgattaacaagtttcctcagcaccaagtttctgtaaagatggaagaacaaggtaacagaaaggagaaataacatgccatgttccaaagggaagtattgtgggcccctaaagtactatttacttttctacagtgtgtcactgcaaatatatataca

SEQ ID NO: 285601 - DNA, 595 bp, Homo sapiens
cttaaatttttgctggagtcttattgaccacaaaccatcattcttgaccacatgcttgcctaatgattaacaagtttcctcagcaccaagtttctgtaaagatggaagaacaaggtaacagaaaggagaaataacatgccatgttccaaagggaagtaytgtgggcccctaaagtactatttacttttctacagtgtgtcactgcaaatatatatacacaagtcaagttatgtgagtcaacaacagatttaagttcctaagttggaggggagagcccttccctgaaaatgaaaaacaatattttatctctaattgtcttctgccttttacacataatctttgatattatacttcaatatttgggacatattaattttgtcctttacagttgaacacatttgccaacctattttggcacacattatgtttctatcctttactccattgcatacggtttatgaaaactatgcatttcatcatgaatatcagcacttttatttttccattctcctttcatctttctaaaaggtaaaatgcaaaatggtattagacaggcaaattatgtccatcacacctgaggcctgaaccactgctt

SEQ ID NO: 285602 - DNA, 595 bp, Homo sapiens
cttaaatttttgctggagtcttattgaccacaaaccatcattcttgaccacatgcttgcctaatgattaacaagtttcctcagcaccaagtttctgtaaagatggaagaacaaggtaacagaaaggagaaataacatgccatgttccaaagggaagtattgtgggcccctaaagtactatttacttttctacagtgtgtcactgcaaatatatatacacaagtcaagttatgtgagtcaacaacagatttaagtkcctaagttggaggggagagcccttccctgaaaatgaaaaacaatattttatctctaattgtcttctgccttttacacataatctttgatattatacttcaatatttgggacatattaattttgtcctttacagttgaacacatttgccaacctattttggcacacattatgtttctatcctttactccattgcatacggtttatgaaaactatgcatttcatcatgaatatcagcacttttatttttccattctcctttcatctttctaaaaggtaaaatgcaaaatggtattagacaggcaaattatgtccatcacacctgaggcctgaaccactgctt

SEQ ID NO: 285603 - DNA, 595 bp, Homo sapiens
cttaaatttttgctggagtcttattgaccacaaaccatcattcttgaccacatgcttgcctaatgattaacaagtttcctcagcaccaagtttctgtaaagatggaagaacaaggtaacagaaaggagaaataacatgccatgttccaaagggaagtattgtgggcccctaaagtactatttacttttctacagtgtgtcactgcaaatatatatacacaagtcaagttatgtgagtcaacaacagatttaagttcctaagttggaggggagagcccttccctgaaaatgaaaaacaatattttatctctaattgtcttctgccttttacacataatctttgatattatacttcaatatttgggacatattaattttgtcctttacagttgaacacatttgccaacctattttggcacacattatgtttctatccttkactccattgcatacggtttatgaaaactatgcatttcatcatgaatatcagcacttttatttttccattctcctttcatctttctaaaaggtaaaatgcaaaatggtattagacaggcaaattatgtccatcacacctgaggcctgaaccactgctt

SEQ ID NO: 285604 - DNA, 595 bp, Homo sapiens
cttaaatttttgctggagtcttattgaccacaaaccatcattcttgaccacatgcttgcctaatgattaacaagtttcctcagcaccaagtttctgtaaagatggaagaacaaggtaacagaaaggagaaataacatgccatgttccaaagggaagtattgtgggcccctaaagtactatttacttttctacagtgtgtcactgcaaatatatatacacaagtcaagttatgtgagtcaacaacagatttaagttcctaagttggaggggagagcccttccctgaaaatgaaaaacaatattttatctctaattgtcttctgccttttacacataatctttgatattatacttcaatatttgggacatattaattttgtcctttacagttgaacacatttgccaacctattttggcacacattatgtttctatcctttactccattgcatamggtttatgaaaactatgcatttcatcatgaatatcagcacttttatttttccattctcctttcatctttctaaaaggtaaaatgcaaaatggtattagacaggcaaattatgtccatcacacctgaggcctgaaccactgctt

SEQ ID NO: 285605 - DNA, 584 bp, Homo sapiens
actctcggtcctgtcatctcaattcagagagtccattgggctcctcctgggctctccctgaaggcagtgagctagggcagtcgtgaggcttatcttgtttgtcactcaaggatcactatccttggttacccaatgtcttgtgtcttgcacagtattaattcatgtattttttcttgttttttgattgttgaaggtggcagggtaaatctggtccccattctgaagtccctgtctttgttttctgggcatccctgtctttattttctgactccacataccctcaggcctgctaaactgtggtctttggtgtatgagctttcctgccaccttagccttgctcatagtattctcgctgcctggagtgcccctcctctccatgtccataggttctatcttcctttagacacaggaagtatgctgatttttccatggagctcttctaggtygcttggttgacattaatttgttcttacttctaatctctcacagcaatctgtgcctctattttatatatctttctttgccgtctatattaattcatcaatttgtgtatgcatttattcaaaaacagtagtaggtttttg

SEQ ID NO: 285606 - DNA, 582 bp, Homo sapiens
atattccagaattcaagttcttcagtgtggcagtaatgtagattccattcctctccttctcccctttctaccccaatctctttccttccctttttcatttcagtggttcrcatctgagggcaatttgccccccttcctccacctcagggatatttggcaatatctaaagatgacatttttggttgtcaccacttgggggatgctattagaatctagtgggtagaagccaggaatgctgctaaacattctatgatgcatgggacagacagacagacagacagacagacacacacacacacacacacacacacacacacccctcccctacatacaaatagttctccagtaccaaatgtcaatagtgccaaagttaagagacctgactttcattcaacaaatacttattaagcacccattatgtcctaagtatttttctagatgctagggagatgtagctgggaataatttccgaagcttatattttagagaacaagaagagagacagacaaacgatcagaaaatatatagcatagaaatggtgatgagggtcattaagaaaagtgaagcagagaaagaaggcaa

SEQ ID NO: 285607 - DNA, 1052 bp, Homo sapiens
atattccagaattcaagttcttcagtgtggcagtaatgtagattccattcctctccttctcccctttctaccccaatctctttccttccctttttcatttcagtggttcacatctgagggcaatttgccccccttcctccacctcagggatatttggcaatatctaaagatgacatttttggttgtcaccacttgggggatgctattagaatctagtgggtagaagccaggaatgctgctaaacattctatgatgcatgggacagacagacagacagacagacagacacacacacacacacacacacacacacacacmcctcccctacatacaaatagttctccagtaccaaatgtcaatagtgccaaagttaagagacctgactttcattcaacaaatacttattaagcacccattatgtcctaagtatttttctagatgctagggagatgtagctgggaataatttccgaagcttatattttagagaacaagaagagagacagacaaacgatcagaaaatatatagcatagaaatggtgatgagggtcattaagaaaagtgaagcagagaaagaaggcaawtaagagacagtaactatgacaacatgactgtctttctgggaactcgtgagttttgactattcttgatagatttggtttggaaggtgaaatggttttaaagtactgaattgaaattatgtaaacttatgcatccaatttttaaattaaaataaatgtaaagaaaaactaaaaagatgcataaatattgtagatgttgggactgatcaaatcatwtttgattgtcctgtcctttgaagttaagatctatgatttgtggacatactgttaatcttaactaggttagattccagacatcataggtcaataattgtctaattgctaaaatgtgttgcccatccttaatatggggataaggaaaaggctaggggaaggagagaaagctggacatctttaaaagccttcatattcatcaactcatgaacattacacacatattcaaaaacaagaaggatatgggttaaaatgagat

SEQ ID NO: 285608 - DNA, 612 bp, Homo sapiens
ggtgcccccaaaagcagatatagcttagagcacaatacccaggttcttttaaatatttggaaagccttcccaagaaggacagctgcaaataaacccagacagtgaagactacaataaatacctaactcttcagtgcctagacaccaaagaaaatctactagcttcaacaccatccaggaaaacatgtccgcaccagataaactaaataagccaccagggaccaatcctgaagaaacagagatatgcgacctttcagacagataattcaaaatagctgtgtttgttgagaaaactcaaaraaatttaagagacacagagaaggaattcaaaattctatcagataaatttaacaaagaaattgaaatacctaaaaagaatcaaggagaaattctggagatgaaaaatgcaactggcatactcaaaatgcatgagagtccttcaatagcagaagtgatcaagcagaagaaagaattagcaaccttcaagacaggctatttgaaaatacagtcaatggagaaaaaaaagaataaaaaacaatgaagcaagcctacaagatctagaaaatagcctcaaaagggaaaatccagggttactggctttaaagaggaagta

SEQ ID NO: 285609 - DNA, 618 bp, Homo sapiens
ttgaggacaagtaagagaaaggggcaaagagattattcaaagaaattatgaccaaaaacttgccaaatttaatgaaagacatgaatataaatatccaaaaagctcaatgaactccaagtaggataaattcaaagacacaccaaaagtattaccatcaaactattaaaagctggagacagaaaattttgaaagccgcaagagagaagtgatcatcacatataaggaatcctcaataagattatctgcagatttctcatcagaaacttcagaggccagaaagcagtaggctgatataaagtgctaaaagaaagaaactatcaactaagaatcctatatccagcaaatcttcacttcaaaagctrgaggattcacacttctttgtttcaaaacttaccacaaagttacagcgatcaaaacagtgtggtactggcacaaagacagacatatagaccaatggaatagaacacagtccagaaaaaaaccctcttagcacaagggtgctaagattatccaatggggaaaagatgatctttttgacaaatggtgctgggaaaattgccacatacaaaagaatacagttggacccttacctgataccatttacattaaattaatgca

SEQ ID NO: 285610 - DNA, 642 bp, Homo sapiens
cactgctgaatatatacacaaaagaagtgatagcagtatcaaagagatatctgtacatctgtgtttatagcagcattattcacagtagttaaaatgtggaagcagaccaagtgactattggtggatgactgaataagcaaaatgtggtaaacacatacaatggcatattattcagccttaaataggaaggaaattttgatatatggtataacatggatgaatcttgaggacattatgttaagtgaaatgagacaataacaaaaaggcaaatactgtattattccacctatatgaggtacttagagtagtcaaatggtggttgcctggggctgagcagagggaagaatgggagttattgcttaatgaatacagttttgcaagatggaaagacttctggagatgggtagtggtgatggyagcacaacaatatgattgtacttaatgccactctactgtacacttaaaaatgattaagatagtaaattttgtgttatgtatgttttaccacaattaaaaattgtggtaaataaacaataaagtttttttaaatgttgtctctgtacctaacatgactaagcaccctcctattctccttcccatcacatctctcctagattatcttgggcatctgaacctaagcag

SEQ ID NO: 285611 - DNA, 642 bp, Homo sapiens
cactgctgaatatatacacaaaagaagtgatagcagtatcaaagagatatctgtacatctgtgtttatagcagcattattcacagtagttaaaatgtggaagcagaccaagtgactattggtggatgactgaataagcaaaatgtggtaaacacatacaatggcatattattcagccttaaataggaaggaaattttgatatatggtataacatggatgaatcttgaggacattatgttaagtgaaatgagacaataacaaaaaggcaaatactgtattattccacctatatgaggtacttagagtagtcaaatggtggttgcctggggctgagcagagggaagaatgggagttattgcttaatgaatacagttttgcaagatggaaagacttctggagatgggtagtggtgatggcagcacaacaatatgattgtacttaatgccactctactgtacacttaaaaatgattaagatagtaaattttrtgttatgtatgttttaccacaattaaaaattgtggtaaataaacaataaagtttttttaaatgttgtctctgtacctaacatgactaagcaccctcctattctccttcccatcacatctctcctagattatcttgggcatctgaacctaagcag

SEQ ID NO: 285612 - DNA, 642 bp, Homo sapiens
cactgctgaatatatacacaaaagaagtgatagcagtatcaaagagatatctgtacatctgtgtttatagcagcattattcacagtagttaaaatgtggaagcagaccaagtgactattggtggatgactgaataagcaaaatgtggtaaacacatacaatggcatattattcagccttaaataggaaggaaattttgatatatggtataacatggatgaatcttgaggacattatgttaagtgaaatgagacaataacaaaaaggcaaatactgtattattccacctatatgaggtacttagagtagtcaaatggtggttgcctggggctgagcagagggaagaatgggagttattgcttaatgaatacagttttgcaagatggaaagacttctggagatgggtagtggtgatggcagcacaacaatatgattgtacttaatgccactctactgtacacttaaaaatgattaagatagtaaattttgtgttatgtatgttttaccacaattaaaaattgtggtaaataaayaataaagtttttttaaatgttgtctctgtacctaacatgactaagcaccctcctattctccttcccatcacatctctcctagattatcttgggcatctgaacctaagcag

SEQ ID NO: 285613 - DNA, 541 bp, Homo sapiens
caattaaaaattgtggtaaataaacaataaagtttttttaaatgttgtctctgtacctaacatgactaagcaccctcctattctccttcccatcacatctctcctagattatcttgggcatctgaacctaagcaggtgcaatagtttcatttgattgccccctttaagtccgctccttgttggactcayagttacctttacctgcttacttcttgatgatcactgggctgagctaggaattctgcctactgctagttcctgtgctaaagataaatgtagtatgaggaaacaaactcaccagcaccctggcaggatccttcagccagcccacagagcagttgttgcccatttgtcttggaaactacacactcatatttttagaaagggacaaacagtttccctgagctagatcaaaattcaacagggaagcggaggtagagaaaaccccgttcctagctcctgaagactgtgaaccagacttggaaacgccaggctaacccaaagtaacctgggaacattcagcctgacctgggtcaaccgt

SEQ ID NO: 285614 - DNA, 541 bp, Homo sapiens
caattaaaaattgtggtaaataaacaataaagtttttttaaatgttgtctctgtacctaacatgactaagcaccctcctattctccttcccatcacatctctcctagattatcttgggcatctgaacctaagcaggtgcaatagtttcatttgattgccccctttaagtccgctccttgttggactcatagttrcctttacctgcttacttcttgatgatcactgggctgagctaggaattctgcctactgctagttcctgtgctaaagataaatgtagtatgaggaaacaaactcaccagcaccctggcaggatccttcagccagcccacagagcagttgttgcccatttgtcttggaaactacacactcatatttttagaaagggacaaacagtttccctgagctagatcaaaattcaacagggaagcggaggtagagaaaaccccgttcctagctcctgaagactgtgaaccagacttggaaacgccaggctaacccaaagtaacctgggaacattcagcctgacctgggtcaaccgt

SEQ ID NO: 285615 - DNA, 541 bp, Homo sapiens
caattaaaaattgtggtaaataaacaataaagtttttttaaatgttgtctctgtacctaacatgactaagcaccctcctattctccttcccatcacatctctcctagattatcttgggcatctgaacctaagcaggtgcaatagtttcatttgattgccccctttaagtccgctccttgttggactcatagttacctttacctgcytacttcttgatgatcactgggctgagctaggaattctgcctactgctagttcctgtgctaaagataaatgtagtatgaggaaacaaactcaccagcaccctggcaggatccttcagccagcccacagagcagttgttgcccatttgtcttggaaactacacactcatatttttagaaagggacaaacagtttccctgagctagatcaaaattcaacagggaagcggaggtagagaaaaccccgttcctagctcctgaagactgtgaaccagacttggaaacgccaggctaacccaaagtaacctgggaacattcagcctgacctgggtcaaccgt

SEQ ID NO: 285616 - DNA, 609 bp, Homo sapiens
agtcagtgtgagtgatgtaagaggtgcctaaacaagtagtaatcaagataaatagtttaatgcactatttattaaaaccaaaatttatgccaaaaatttatgatgaacaaaattttaaataaaaacagaatctgatcttttgttcatcaaatgcctcacactagccctagccctagccctgcctggtacatagtaggtgttcaataaattccagtgacttttgtttctttccctttgcttatctttccttcttcctaaaccagctagggttattatgtctgacatggtagccactagtcacatgtgactactgagtacttaaactgtggctaactggaattgagatttgctgtaagtgtaaaatatatacagaatttcaaaaacagtgccaacctttttttatattgattayatattgaaatgatgctatttcagttataatgggtaaaattaaaatatattatcaaaattaattttacctgcttccttctactttttaaaaaatgtggctactagaaaatcttaaaatcttaaattacacatgtggttcatgtaatatttctattgaacagagctaatttaagagcacaggttaggaaggcattggcc

SEQ ID NO: 285617 - DNA, 588 bp, Homo sapiens
cagtcaggggcttataaataaaactcccatctccctgggacagagcacctgggggaaggggcagctgtgggcgagcttcagcggacttaaatgttcctgcctgcctgcctgctatgaagacagcagtggatcctgacaaggaggattctcccagcacggcactcaagctctgctaagggacagactgcctcctcaagtgggtccctgatccctgtgcctcatgactgggagaaaattcccaacgagggttaacaggcacctcatacaggagagctctggctggcatcaggctggggcccctccaggatgaagcttccagaagaaggagcaggcagcaatctttgctgttctgcagtctccactggtgayacccaggcaaatagggtctggagtggacctccagcaaactccagcagacctgcagcagagggacctgactgttagaagaaaaactaacaaacagaaagcagtaacaccaacatcaacaaaaaggacacccacacaagaaacctcattcaaaggtcatcagcctcaacggtcaaacatagataaatccatgaagataaggaaaaaacagtgcaaaaaggc

SEQ ID NO: 285618 - DNA, 588 bp, Homo sapiens
cagtcaggggcttataaataaaactcccatctccctgggacagagcacctgggggaaggggcagctgtgggcgagcttcagcggacttaaatgttcctgcctgcctgcctgctatgaagacagcagtggatcctgacaaggaggattctcccagcacggcactcaagctctgctaagggacagactgcctcctcaagtgggtccctgatccctgtgcctcatgactgggagaaaattcccaacgagggttaacaggcacctcatacaggagagctctggctggcatcaggctggggcccctccaggatgaagcttccagaagaaggagcaggcagcaatctttgctgttctgcagtctccactggtgatacccaggcaaatagggtctggagtggacctccagcaaactccagcagacctgcagcagagggacctgactgttagaagaaaaactaacaaacagaaagcagtaacaccaacatcaacaaaaaggacacccacacaagaaacctcattcaaaggtcatcagcctcaamggtcaaacatagataaatccatgaagataaggaaaaaacagtgcaaaaaggc

SEQ ID NO: 285619 - DNA, 562 bp, Homo sapiens
cctaggtgggatctcagctcactgcaagctccacttctttggttcaaacgattcccctgtctcagcctccsaagtagctggggccacaggtgcctgccaccacacccagctaatttttttgtatttttagtagagaaagggtttcatcatgttggccaggctggtctggaactcctgacgtcaggtaatctgcctgcctcggcctcccaaagtgttgggataaccatcgtgagccaacgctctgggcccacgacctaatcacctcttaaagatcccaccgcctcagtactgttgcactgggggttaagttacaacacatgaactttagggggcacattcaaaccatagcatatttccactatggttactctcttccacggctatctccccatcttccaccacttcttggcatcataaactagctggctaaagccatgccttggacaccacactcatatctggctctgttaatctgagatggaaaactaaatagattagaaaagcattagactgcttttgacaccaatgtcagttggtaatcagtatattgggaagagtgctt

SEQ ID NO: 285620 - DNA, 562 bp, Homo sapiens
cctaggtgggatctcagctcactgcaagctccacttctttggttcaaacgattcccctgtctcagcctcccaagtagctggggccacaggtgcctgccaccacacccagctaatttttttgtatttttagtagagaaagggtttcatcatgttggccaggctggtctggaactcctgacgtcaggtaatctgcctgcctcggcctcccaaagtgttgggataaccatcgtgagccaacgctctgggcccacgacctaatcacctcttaaagatcccaccgcctcagtactgttgcactgggggttaagttacaacacatgaactttagggggcacattcaaaccayagcatatttccactatggttactctcttccacggctatctccccatcttccaccacttcttggcatcataaactagctggctaaagccatgccttggacaccacactcatatctggctctgttaatctgagatggaaaactaaatagattagaaaagcattagactgcttttgacaccaatgtcagttggtaatcagtatattgggaagagtgctt

SEQ ID NO: 285621 - DNA, 570 bp, Homo sapiens
tagctagtgatatacaaatttaaaattttactttagcttatctttaaaaaatttccgattaaggttcttaatgtatatattagtacagtaatacatgtgtatgccatgtatgtgttcaaaatttttattaatagtagtacaataaaaagtcttggaatccatttgtctagaagaatgaatataaatgaattattatagtaaaatgcttaacttgtatgtatagctataagtggaattaagtgaaagcacagagggtacagtgactttgcaagaatcaagaaaagtttcacaaagtttgtctgaccttggtcttaaaagagtagttaaccttctgagcctgcttaaaaaacaaaaaaggtagtagtaggttaccaaataaaagggcactttgagtcagaaagaacattatgtacaaagatgtaaagtaatgatgatgcatatttaagtttcttgggaccaagggtgaaaattcaattggtctggggcatygatatgcatatgtgtataagcacttaaatgtcttgagaaataatggaaatgtgtgcatgcgctttatgataagaaccttac

SEQ ID NO: 285622 - DNA, 539 bp, Homo sapiens
cctctgtgacccagtttcctcatctataaaatgggcgtaagaatattatttacctcacagatttattgtgagaattaactttgtttcaatatttaaagtgcttaaatagtgattggaacataataaatgttacctaatttttgcctaggatatttcctcatttataaaatgkgacagtttaaaagaaattgtcacattggtcctttctagtaatcaaatttttgattctgtgaagatattcttaataattattggaaaagaaaaaaatattctttttgaaatcagatttaaataatgtgtcaacatcatttggcttaaaaaaaaaaaggaagtagaatctatgtatagaaaagtgcatgaattgagaataaacagattatatacccaaacccagatttcacagccactcatgtcaagaaactgaatattactagcaccaaaaatgctcccctcattacctgtttccatatacccacctgccatagtttcacctgttcttgatataaatggagcagaaaatgcatttttattgtgcaata

SEQ ID NO: 285623 - DNA, 539 bp, Homo sapiens
cctctgtgacccagtttcctcatctataaaatgggcgtaagaatattatttacctcacagatttattgtgagaattaactttgtttcaatatttaaagtgcttaaatagtgattggaacataataaatgttacctaatttttgcctaggatatttcctcatttataaaatgggacagtttaaaagaaattgtcacattggtcctttctagtaatcaaatttttrattctgtgaagatattcttaataattattggaaaagaaaaaaatattctttttgaaatcagatttaaataatgtgtcaacatcatttggcttaaaaaaaaaaaggaagtagaatctatgtatagaaaagtgcatgaattgagaataaacagattatatacccaaacccagatttcacagccactcatgtcaagaaactgaatattactagcaccaaaaatgctcccctcattacctgtttccatatacccacctgccatagtttcacctgttcttgatataaatggagcagaaaatgcatttttattgtgcaata

SEQ ID NO: 285624 - DNA, 377 bp, Homo sapiens
ccaaccatgaggtggttctggccagtttaagaggactgctcacttgagtgcctttgtgtcctaaaaaaaatttagacataatagggcctaattgtaatgcaattaaatgttaagtctccagcccaaaatgaacaygggtcatatgttactgtttgttcaatatacatgcatcagaactaccttcataaatattcatagctcctcctatatcctataaattatgtatgtttagccaacttttcagcataaatctcctacctcaacatccctccttcaaagtacctgcctctttaggcttcagttggaggcacactcccagcttgtgggatggccctcctttcaggctgtaaccctttcctctcctttctagattcata

SEQ ID NO: 285625 - DNA, 539 bp, Homo sapiens
ttggttctttgctagcacagaaaaactgtttttctctgatagaatattttaacaagagccagacttcaacragatgtctaggtattaaaagtgacaactcggcagtaaagaaaagtgcaacttcctttcagggtgcacagggccaacatgaggttgaggggaggaagatgctttggcttaagtgagaagcaaggaggagacagttctgttctctgtttgacatgtttgaagtctcatcacgacagcataaagaaaatcacaaatgtaatgtttgtaatgttctgacaactatatagtcttcaatttaaccaaatgattttctactttctttatatataagtataatagtatagtatgtttcctgctgaattattaattattaatataaagaatcctgctgcttttgtatcatttcaaatatggtattcaagtttaaaaaaattagatggctggttaaattttgtttttttatacaagctgtatggtaaaggtaggagttccataaaaaaaacactgctaaatacctgtccaaaagaagg

SEQ ID NO: 285626 - DNA, 536 bp, Homo sapiens
ttgaatattttgatacatcagaatttaatatttgattctttagtcattcttctatttctatatatgtaactaaattattttggtattgtgatataattatttcagatatacaagaatccatttgcaaaaacccatccatcaaaaatactttacaaataataccacttctggtaagtatttgaagaagctctttttttcttgttttaggaaacttctgattttatgtacacatcaatacaggtaagaaccccgtattaatattaatatttcttgggattggtttatagaggttttctcctcaaytggctttttattataagactgttcattagaattatgcaaatatcctgtcatttaaaaaaatccttaaaggtcagaatatgaagtttttttaacgtttaggttcaggggtacatgtgcaggtttgttaaataagtaaattgtgtatcgcaggggtttgatggacagattatttcattgcccaggtaataagcagagtacctgataggtagtttttcaatcctctccttcctccc

SEQ ID NO: 285627 - DNA, 590 bp, Homo sapiens
atttgtttacccacaccagtgcttcaaacagcctgctcagtcatcctttctctgatcctgactggcacgccacagtagagcaggctacatttttatcccttgccccatatactctgatccttcaattttccttttccagaccctcattttcccagctcctatatttggtaaaatgtaattcctgtgataagtaccttagtcccataattcttataatgkctttgttttcctgatggatacggtctgatagaggaaacataaaaataagcggtctcttataaatcagtgtaaaaagcactaacttcacaggcatatgaacatatgggaaatgaacaacattctgagttctgaaaaaagcttcagagttagccaaatgaatattatttcagagactgaaaaggagaaaggaacttccaaggactaaatgaaacagattcaggatgaagagggagagaaaaaactggagagggaagcaggggctaatgttcccataggtttccttctggcgtgcctaactatgtgggttccaggccctttcatcattagttccgtcggacattgttttcacaagctcacccccaagaactccc

SEQ ID NO: 285628 - DNA, 578 bp, Homo sapiens
taactgaataattcttcagaccaaaactcaaatacaaaaagactaatagctaacatgctggtaataagctagtaggacacttttaaataagtctagccacttaaagaggtttgggtgtaagagtatatctggttatggattactaaaggacatttggttattgattgtagaagcataatcattaaccctgttaggtgtcattttgtgtacaggaaaaggcaaggactaggatcatttctcttttaaggaatgtggtgacttaggtaagagacttggagcctgtttttgtttccaaagcatcttttcggagaactgcaggtcatcacagagtcaggggctttgtgaaattatgctggcaaacagaaatgagcaaatatggcttcttacatttgcttctttgtctcacargctcccccttttggtcacaaatcaatcacctggttgtatttataagaccaatgctaattattccacatagttaggaaggctcttttccaggaaggttgatagtcttcagttgcggttatacggaatgaacattgagcccagtgtgcatacttgcctatttattgaaaaac

SEQ ID NO: 285629 - DNA, 578 bp, Homo sapiens
taactgaataattcttcagaccaaaactcaaatacaaaaagactaatagctaacatgctggtaataagctagtaggacacttttaaataagtctagccacttaaagaggtttgggtgtaagagtatatctggttatggattactaaaggacatttggttattgattgtagaagcataatcattaaccctgttaggtgtcattttgtgtacaggaaaaggcaaggactaggatcatttctcttttaaggaatgtggtgacttaggtaagagacttggagcctgtttttgtttccaaagcatcttttcggagaactgcaggtcatcacagagtcaggggctttgtgaaattatgctggcaaacagaaatgagcaaatatggcttcttacatttgcttctttgtctcacaagctcccccttttggtcacaaatcaatcacctggttgtatttataagaccaatgctaattattccacatagttaggaaggctcttttccaggaaggttgatagtcttcrgttgcggttatacggaatgaacattgagcccagtgtgcatacttgcctatttattgaaaaac

SEQ ID NO: 285630 - DNA, 1151 bp, Homo sapiens
acaggtggtaaagattcagtacatgcaaaattacatcaaagtttgggagtaagagtacatctggttatagtttactaaagtacatttggttatagattgcacacacataatcactaatcctgtcagatgttatgtgtaaggaaaggcaagrattagaattatgtatcttttaagggatgtactgattcagtccagagacgtgggcggctgtgtgttctatcctgttttgccctccaagcatgtttccagagagctgcatgtcatcacagagtcctggctttgtaaaattattcaagcagaaatgagcacacatggcttcttacatttgctactttgtctcccaggagtcacagagaacagatcaagtgactacctcatagatctagatgtttaagtgcttcaagcctgattcagtagttccatcattgtgttgagaatgattttaataataacccatcagtgtaacaatccatgtaagttcagtgggctgagaacagtggacccattcctataaacctctctgttcaccataccaaatactagtagcaaagaaaaaaagctacctgagaatcaaccaatactagagcagaaggacwgggccatatttggcctgtgggccacaatttacaaactgctgattttaaccattctcacatctggactcaaacctgtctggggaaataaatactaagtctagtgtgggcagacctgaatgggcccacatgggagaatctagaagacttctgggcccaagttctcaggaaataaaaagaatgaaggcagattatcagagagttgtcaacttctctagcagctgtcacaagacttatcttccagccaagatgcttgggaatcttagaacaagattttgttcccccaatctcagacatcctgctgccttgtatatgagctcatttctgagaccatgcagtgaaaacaactatctaactcataccaatgggtggcctagtcaacctgataaggtaacaattcttgaactctgacatatggatgwcagacaacatagtgaaaatgtcatatttgttatctctcttagtttggatttatcgaaaagtaaacccaaaaacaagaatttgagtacaggtaacttacttaggtgcaaaaagattgataatccttagaaatgagct

SEQ ID NO: 285631 - DNA, 611 bp, Homo sapiens
aataacttttccggtatctcttcagatgcccttgattcagatcaaatggaggatatggtttacaaagatgagaaaataaaccaagcaagagttccctagataaaggaaacagaagacccaacacagaataaaggtaagtaggagggtttaaaatcaaaatggatgattgaatggttaattaaaatattgtttaacataggatacatgtgaaagatatatttgttccttagacaattattgactaaagcatacatatgtatattcacactaaattttatttagatgcataaattaggatttacttaacatagaagaaaatgrttgtaagcccaggtaatatttcttgcatagatgacacccataattcacttataatgtatgacttcaatttcttctgagggagaaaatacacttatcacctgagtaaatatattcatactttgaggttttttttcatttgtttgtttttgtttctttttgagacaggttcttgctgtcacccatgctggagtacagtggtgaggtcatagcttactgcagcctccacctcctagacgcaaggaagcgttccacctcagcctcccatgtaactagcacatgccatcacatcc

SEQ ID NO: 285632 - DNA, 611 bp, Homo sapiens
aataacttttccggtatctcttcagatgcccttgattcagatcaaatggaggatatggtttacaaagatgagaaaataaaccaagcaagagttccctagataaaggaaacagaagacccaacacagaataaaggtaagtaggagggtttaaaatcaaaatggatgattgaatggttaattaaaatattgtttaacataggatacatgtgaaagatatatttgttccttagacaattattgactaaagcatacatatgtatattcacactaaattttatttagatgcataaattaggatttacttaacatagaagaaaatgattgtaagcccaggtaatatttcttgcatagatgacacccataattcacttataatgtatgacttcaatttcttctgagggagaaaatacacttatcacctgagtaaatatattcatactttgaggttttttttcatttgtttgtttttgtttctttttgagacaggttcttgctgtcacccatgctggagtacagtggtgargtcatagcttactgcagcctccacctcctagacgcaaggaagcgttccacctcagcctcccatgtaactagcacatgccatcacatcc

SEQ ID NO: 285633 - DNA, 611 bp, Homo sapiens
aataacttttccggtatctcttcagatgcccttgattcagatcaaatggaggatatggtttacaaagatgagaaaataaaccaagcaagagttccctagataaaggaaacagaagacccaacacagaataaaggtaagtaggagggtttaaaatcaaaatggatgattgaatggttaattaaaatattgtttaacataggatacatgtgaaagatatatttgttccttagacaattattgactaaagcatacatatgtatattcacactaaattttatttagatgcataaattaggatttacttaacatagaagaaaatgattgtaagcccaggtaatatttcttgcatagatgacacccataattcacttataatgtatgacttcaatttcttctgagggagaaaatacacttatcacctgagtaaatatattcatactttgaggttttttttcatttgtttgtttttgtttctttttgagacaggttcttgctgtcacccatgctggagtacagtggtgaggtcatascttactgcagcctccacctcctagacgcaaggaagcgttccacctcagcctcccatgtaactagcacatgccatcacatcc

SEQ ID NO: 285634 - DNA, 599 bp, Homo sapiens
gtgtagtaaaaatatgggaataaaatgctttttaatatgttacataattaataaaaaatctttttactagataaaagtctcatttctgcctacatattttacttcatatactgtaaataagattaccataatacagtagtggattctaaaaaagcaaaagtattactccattttcttgatctcaaaaatagcattatacaaattaaaaaattatttttatgtaaatattaaattaattttttaactgtactttcagaaattaaaaatacattttggaagaaaactaataatggaaaaaagatataacaataagacacttactttataaagatatttagaatccatttatttcttcatcatagtaatttaaaataatatttgaggacttaacgagatgacctttagtgatactgctaaactttttatttttctattctagttatatgctcttgagcaaaaagttggatgcattttgtaaaaatcaacyctttaaataaagattcactttaagaaaaaggcaagacagaatttgatttccaggagaaccccaattttctttcagtatctgatggagagtacatcagctacttgtaacagag

SEQ ID NO: 285635 - DNA, 569 bp, Homo sapiens
tatcatcagggaaatgcaaagtaaaacaacaatgatatgccactaagaacttattaaaattgccaaaaccataatattgacaacaccaaatgstagtaaggatgtggcgcaaaagcaattctcatccattgctggtaagaatgcaaaatggtacagccactctggaaaaggctttgacagtttcctacaaaactatataaatgcttatcctatgatccagcaatcgtgctccacggtcttcctcaaaaggaattgaaaacctatgttcatagaaaaacctgcacttgaaagttgatatttattcataattgaaaaaacttggaagcaaccaagatgttcttcagtaggtgaacagataaatacactggtacacccagatgatggaatattatttagcattaaagataaataaaatatcaagctatgaaaagatatagagaaaacttaagtgcatattactaaatgacagaagctaatctgaaaagcctacatactgtaagattccaaatacagcataccaacatttcagtcaaggacagacagcacgtatgatagttgcctgtcctatc

SEQ ID NO: 285636 - DNA, 485 bp, Homo sapiens
tatattatacatgtttatatacatttatatgagttttatgttatctacgtattacatactatatgtatataatatatacttttctaattgcagcaaacattrttcaggtaaaaggctctccaaacattctataaatagagtggtagtggttccttccaccttcattgcctttatagcaacacacaggtcattgaagcataatatgataatgatgagttctgaccacattaatggactaattcttaagcagaaggaatagcctactgcaatgaatattttattcacactcttggtgttaaagaacaattgcttaaagtcaatgaaatctcaaaataactatatatcaagtaaattatgatgtaaaactagtgtatgagaaaaatgtgtcttatctttagtaatcattccaagtctaaatgtgtggagaacaaaggctttccagtatttgaccctgaatgttgtgttctgctgtactatttagaggc

SEQ ID NO: 285637 - DNA, 485 bp, Homo sapiens
tatattatacatgtttatatacatttatatgagttttatgttatctacgtattacatactatatgtatataatatatacttttctaattgcagcaaacattgttcaggtaaaaggctctccaaacattctataaatagagtggtagtggttccttccaccttcattgcctttatagcaacacacaggtcattgaagcataatatgataatgatgagttctgaccacattaatggactaattcttaagcagaaggaatagcctactgcaatgaatattttattcacactcttggtgttaaagaacaattgcttaaagtcaatgaaatctcaaaataactatatatcaagtaaattatgatgtaaaactagtgtatgagaaaaatgtgtcttatctttagtaatcattccaagtctaaatgtgtggagarcaaaggctttccagtatttgaccctgaatgttgtgttctgctgtactatttagaggc

SEQ ID NO: 285638 - DNA, 503 bp, Homo sapiens
ttacaggtgtgagccactgcacccggccatgaacccgggaggcagagcttgcactgagccaaaatcrcgccactgcactccagcctgggctacagagtgagactccgactcaagaaaaacaaaaacaaacaaaaaaaaaaaacaccttagaggatttgaggacagacacaatggaactattgtcaacattgttgctacaaagaaaagggaaagtgaagagagaattcaaccacaaagaagggtaaagatgagaaaactatttagcaacagagccaaaataccgaaaacaaaagaaaacaaaacaaaaaagccaaaaaaaaaaaaaaaaaaaatcatacccttcctctggactttacatttccttgcatcattaaatctcctttactatttaaactggttttcgcagggttttctcttatttgcagctgaacgtttcctgtgttaatcattagaacgcatttatcaagtgttatttccactagctatttattatgtttataaat

SEQ ID NO: 285639 - DNA, 517 bp, Homo sapiens
ttttaaatgatcagatctcttgagaactcactcactatttcaaggacaatacaaaggggatggagctaaaccgtttatgagaaatccacccccatgatccacaatcacctcccaccaggtcccacgtcaaacattgtggattacaattaaacatgaaatttgggtgggaaagtaacccaaaccgtatcaaaactgaaatttgtggaatgaatagaatagcaccatataggtttattgtaaactacacattttattttcaaaccaattttgcatatttatagctatactatcaggaactaaagatcagttcaacataatatgctycatttagctacttctgtacaattagtttatcttttttcttgtaaatttaatcttaaaaatgagctgttttaattactttgaacaatagtagtttcccacacatttttactcttatcttttaactaaaagaaaagaaatagtttccttaaacaaacttgaattaaggttttacgttggtgtttttggtgtagga

SEQ ID NO: 285640 - DNA, 517 bp, Homo sapiens
ttttaaatgatcagatctcttgagaactcactcactatttcaaggacaatacaaaggggatggagctaaaccgtttatgagaaatccacccccatgatccacaatcacctcccaccaggtcccacgtcaaacattgtggattacaattaaacatgaaatttgggtgggaaagtaacccaaaccgtatcaaaactgaaatttgtggaatgaatagaatagcaccatataggtttattgtaaactacacattttattttcaaaccaattttgcatatttatagctatactatcaggaactaaagatcagttcaacataatatgctccatttagctacttctgtacaattagtttatcttttttcttgtaaatttaatcttaaaaatgagctgttttaattactttgaacaatagtagtttcccacayatttttactcttatcttttaactaaaagaaaagaaatagtttccttaaacaaacttgaattaaggttttacgttggtgtttttggtgtagga

SEQ ID NO: 285641 - DNA, 504 bp, Homo sapiens
caatttttgtttcttgttcccttttcccacagtactctgcagatgactctaatatgtttcaaactctatcatcattatgagtttgcatttctatctcctgcaaaagaatacaagctcctcaaacataacaggagtgcttctaattcatttgtttttttgttggaggctacataacttttggtctgcatatactagttgatcagtaaatggtgataaaatacatattttgcattaaaaaatattaaacctattgaaacaaatgggagaagacattattaatacaattgtacaaacattgaggagatatatctaggattgttctgatgtcagtgttatttaatgaaatctcacaagttatgaaaagccaacagtaaagagtatcacagtggtaagtatcacactctaacgaaatgaaagaacaaatggtgctatyataatcttgtaaaaacggcagaatacttgctttgtttgtttgagatctggaataaccacaagtcccaatca

SEQ ID NO: 285642 - DNA, 524 bp, Homo sapiens
cgaaattatttaccatttatttctttattttcttaaaattctttacagtaggccgagtgcggtggctcacgcctataattccagcactttgggaggccraggcgggtggatcacctgaggtcaggagttcaagaccagcctgatcaacatgaagaaaccctgtctctactaaaaatacaaaattaactgggtgtagcattatgtgcctgtcatctcagctacttgggaggctgaggcaggagaatcagttgaacccaggaggcagaggttgcagtgagccaagatcaggccattgcactccagcctgggcaacaggagtgaaactccatctcaaaaaaaaaaaaaaaaaattctttacagtcaaattccaagtaatatttcagtaacttaaaatgcaactgtatggggaaagtgtgcagctgttaggatgcaatatatttataaatactgacaactaagaagcttccagaaagtataattctatttatattacgaaaacacaatttacatctatgcatgtatat

SEQ ID NO: 285643 - DNA, 471 bp, Homo sapiens
cacaatggaaagtttttctcaggtgacagtaggtgttgtgaatgaatagcaaattgagacagatgccacattgacatggaactctgaaagcccctttttttccaaaatggaagcgttctatctacttctaatagagattgcatgaacatttatacatactgaatattcatttcttttgagtattgaaaaatagctgggattaaatcctgtgagtgaaatttaactatgggatatggagtcatgaataaatctccatgaacctcaaatctccatggacctcaaaacagtaaaatctacagagtagkccattacaaaatgagacagaaaggacataggatcacatccttatactgccacttactagtagtgtactttggcaaatcattcaatctcactaagcctcagcttcctcatatgtgaaatggaaataataattcccactttacaggtttgctgtgaggtaaaggggtt

SEQ ID NO: 285644 - DNA, 507 bp, Homo sapiens
accaatagattatggctgaagtgattatatctgacttcccaaactaaraaattaaaaatatcacaagttttggcttggtctcttgattaacttgcactgcggcaaatcagttgccatgttatgagaacactcaagcatttccactgagaagcctgcatgcagagaagtcaattttccagcactaatttattggacagatgagtatgccctttgaaagtgcatccaccaaggccggtcaagccttcaaatgattgcaattcagctgccatccgaccctaacctcatgagagaccctgagcctaatttgcttacggagttgcttccaaatttttgatctacaaaaattggaagaaatgattgctttaagccactacgtttttatttgttaagcagaaatagatattcaatgaaaaataaattatggtatataatataaaattcaaaatcaactgaagtgaaaatattctttaacgtgcataggtattacatagaactttagaaagcaat

SEQ ID NO: 285645 - DNA, 507 bp, Homo sapiens
accaatagattatggctgaagtgattatatctgacttcccaaactaagaaattaaaaatatcacaasttttggcttggtctcttgattaacttgcactgcggcaaatcagttgccatgttatgagaacactcaagcatttccactgagaagcctgcatgcagagaagtcaattttccagcactaatttattggacagatgagtatgccctttgaaagtgcatccaccaaggccggtcaagccttcaaatgattgcaattcagctgccatccgaccctaacctcatgagagaccctgagcctaatttgcttacggagttgcttccaaatttttgatctacaaaaattggaagaaatgattgctttaagccactacgtttttatttgttaagcagaaatagatattcaatgaaaaataaattatggtatataatataaaattcaaaatcaactgaagtgaaaatattctttaacgtgcataggtattacatagaactttagaaagcaat

SEQ ID NO: 285646 - DNA, 507 bp, Homo sapiens
accaatagattatggctgaagtgattatatctgacttcccaaactaagaaattaaaaatatcacaagttttggcttggtctcttgattaacttgcactgcggcaaatcagttgccatgttatgagaacactcaagcatttccactgagaagcctgcatgcagagaagtcaattttccagcactaatttattggacagatgagtatgccctttgaaagtgcatccaccaaggccggtcaagccttcaaatgattgcaattcagctgccatccgaccctaacctcatgagagaccctgagcctaatttgcttackgagttgcttccaaatttttgatctacaaaaattggaagaaatgattgctttaagccactacgtttttatttgttaagcagaaatagatattcaatgaaaaataaattatggtatataatataaaattcaaaatcaactgaagtgaaaatattctttaacgtgcataggtattacatagaactttagaaagcaat

SEQ ID NO: 285647 - DNA, 607 bp, Homo sapiens
gcccaaactaaaagaagttaaaacttgaagtggtaatttagtgttctcttcaaaggttgtttaagtacacacattattaatatacacttagtttatgcttttgacatagcagatcagactttacacctggaaaaattgtaaagacaaaggttaagtttgggcatggtggctcacccctgtaatcccggcacttagggagattctttgaggacaggagtccgagaccagcctgatcaacatggtgaaaccttgtctctactaaaaatacagaaattagccgggcacgctgatgcatacttgtaatcccagctactccggaggctgaggcacragaatcgcttgaacccgggaggtggaggttgcagtgaaccaatatcacatcaccgcactccagcctgggtgacagagggaaactccgtctcaaaacacgaacaaacaaaaaaagcagagatcaaaaaatatctgtatgttcatctatagccatagctgtacctatgttctttaacttaattatacaacaaacatgatagtatttagtttgccaaaatgtaaatattttccacttctattcactcacctaggctggcttctttacaatagaccccaa

SEQ ID NO: 285648 - DNA, 648 bp, Homo sapiens
gtggtttcctgtgtagaacattaggactgcttgaacaattggagggtctgcattattcattttactttttctttttcttgttttttttttctctaccttcttctttatcaaaagcaatttcattaggtctccttttttttaattaagccaaattgttctcatattttgcccttttttgatatattaggctcaatatataagtgaaattttccattgaacgagtctaatcagttaaatstatttcctacttgtacctgattttgcttaatcaggtgtaagcaggaaataaagaacatatttttctacatttgcctaaggcaaacaagtttgcaactccacctatgacttaactcaagccattttttattaatgcaaattaaaataataaagatttatctaaaatgaatatatatgcatgaattaataataaaaatcaataaataacatgtacatatgcccttgaactgccacaatgtatttaagtatattctgattaagtacacattaattaggttttaaaaagtataaaagagcaaaacataactatttgttgagttctgcaaatggaaaaaaaaaagatgccctcctcatcaaattttgcaacttcagtaaaataaatattaagcatatgtctcaaaccatctgttg

SEQ ID NO: 285649 - DNA, 641 bp, Homo sapiens
atgggttaaattcagcaatacataytgagaaaaaataatgtgtaataacaaggaacaaaaccttttgataataatatgtcaagatatgtcattttaacctatctgataaggaaagtgctttgttataatgccatttaaaccttttttagctaaaatgtcttgactagaatttggggaaaaataacttacattaaactctgctatactggaagtgtatgaaaaagagtattgattttataacctgttggtgagacacatttccttgtgaatgaaaatacagtgggctgtaaagtttgaagtaaggtgtcaacgtgtcagagtaagggccacatgccgtgaaaaatgtgtataagagatttgaaaggcgcatgtagttcagattcacttgtataaagttcaagtgaaagtgtagctggaaattttaggtcaacactcaagttaaaagcaagattactgctggcttaagttataaccaaaataatgagaaaatatactaaataacctgtgagagagggaaatatgagtgctataaaagtttaagtctgttactttttacctaattgtatattcctccccaatatttttaagtttagaaattgagaaattatactcatttttgtcagaggaagagatagttttaa

SEQ ID NO: 285650 - DNA, 641 bp, Homo sapiens
atgggttaaattcagcaatacatattgagaaaaaataatgtgtaataacaaggaacaaaaccttttgataataatatgtcargatatgtcattttaacctatctgataaggaaagtgctttgttataatgccatttaaaccttttttagctaaaatgtcttgactagaatttggggaaaaataacttacattaaactctgctatactggaagtgtatgaaaaagagtattgattttataacctgttggtgagacacatttccttgtgaatgaaaatacagtgggctgtaaagtttgaagtaaggtgtcaacgtgtcagagtaagggccacatgccgtgaaaaatgtgtataagagatttgaaaggcgcatgtagttcagattcacttgtataaagttcaagtgaaagtgtagctggaaattttaggtcaacactcaagttaaaagcaagattactgctggcttaagttataaccaaaataatgagaaaatatactaaataacctgtgagagagggaaatatgagtgctataaaagtttaagtctgttactttttacctaattgtatattcctccccaatatttttaagtttagaaattgagaaattatactcatttttgtcagaggaagagatagttttaa

SEQ ID NO: 285651 - DNA, 641 bp, Homo sapiens
atgggttaaattcagcaatacatattgagaaaaaataatgtgtaataacaaggaacaaaaccttttgataataatatgtcaagatatgtcattttaacctatctgataaggaaagtgctttgttataatgccatttaaaccttttttagctaaaatgtcttgactagaatttggggaaaaataacttacattaaactctgctatactggaagtgtatgaaaaagagtattgattttataacctgttggtgagacacatttccttgtgaatgaaaatacagtgggctgtaaagtttgaagtaargtgtcaacgtgtcagagtaagggccacatgccgtgaaaaatgtgtataagagatttgaaaggcgcatgtagttcagattcacttgtataaagttcaagtgaaagtgtagctggaaattttaggtcaacactcaagttaaaagcaagattactgctggcttaagttataaccaaaataatgagaaaatatactaaataacctgtgagagagggaaatatgagtgctataaaagtttaagtctgttactttttacctaattgtatattcctccccaatatttttaagtttagaaattgagaaattatactcatttttgtcagaggaagagatagttttaa

SEQ ID NO: 285652 - DNA, 641 bp, Homo sapiens
atgggttaaattcagcaatacatattgagaaaaaataatgtgtaataacaaggaacaaaaccttttgataataatatgtcaagatatgtcattttaacctatctgataaggaaagtgctttgttataatgccatttaaaccttttttagctaaaatgtcttgactagaatttggggaaaaataacttacattaaactctgctatactggaagtgtatgaaaaagagtattgattttataacctgttggtgagacacatttccttgtgaatgaaaatacagtgggctgtaaagtttgaagtaaggtgtcaacgtgtcagagtaagggccacatgccgtgaaaaatgtgtataagagatttgaaaggcgcatgtagttcagattcacttgtataaagttcragtgaaagtgtagctggaaattttaggtcaacactcaagttaaaagcaagattactgctggcttaagttataaccaaaataatgagaaaatatactaaataacctgtgagagagggaaatatgagtgctataaaagtttaagtctgttactttttacctaattgtatattcctccccaatatttttaagtttagaaattgagaaattatactcatttttgtcagaggaagagatagttttaa

SEQ ID NO: 285653 - DNA, 543 bp, Homo sapiens
atatgggctgcgcatggcagctgcaaaatccagatgccaagctttggaatgtatttttacggcagcaccatctggggctctggccagccttctttattgtctcttgaatgtttacactaatagctttgctgggctgtggcactacctgtgggacacgctgagggtcaggccgtttatgagctcatcttgtcattctagttagaatttccctttaaatgtctctcacctgctatcaacttattccttttaatgtatctacaatgtctgaygaaagtaataaaacaggtggtcatcgagactaggaaagaaaaggactgttttcacagcggtgggtccatgttattcatgggttctcagcagcccatttgtgagttttggggggaaataaaatactttttcaatttactgaatatattattttgcttatatttcattgaaatagaagatatacattattatagcccttaacccaacttactggagtagcatattgatctctaagggaggtgataatactccacagcacaaatgaacagtatttta

SEQ ID NO: 285654 - DNA, 963 bp, Homo sapiens
cttggtgttctcagatgtaaaataaactgttgtgagaatttaatgaattaattatttagagtggcacttggttcatagcgaaactcaataaaggttagctatcaccttcatcatcacattcatcatattcaccaccatcatcaccatcatcgttatcaagttaccaacctcatctgccaatttttaaccccactgccatagatgccactctaaatactttgtaatttttaaattcagtgcttttaacaaatggaaaaaacagccgtgattttcttctaaaagatttttaaacaaaaattatataagtagttataaaaacaggagattgttcataaatcttgatctaggtaaaaacttaaaaagacccagagaaatttcacttttcacctttgttggtcttatttttttaacaacycctgactttgttcattgttcgccgaatccatctcggcttctttgatttcacaccacactggttttgtgcgattgwaatcagtgctctgcgtctaggtaatctagtggggacttggagaacttttacatctagctagaggattgtaaatacwccaatcagcactctgtgtctagctcagggattgtaaacgcaccaatcggcaccctgtcaaaatggaccaatcagctctctgtaaaatgggccagtcagcaagatgtgggtggggtcagataagggaataaaagtaggctgcctgagccagcagtgggaaggcgctggggtccctttccacagtgtggaagctttgttctttcaccctttgcaataaatcttgctgctgctcaccctttgggtccgcactgcctttatgagttgtaacactcactgcaaaggtctgcagcttcactcctgaggccagggagaccacaagcccaccgggaggaatgaacaactctggacgggaggaacgaacaactctagacgcgctgccttaagagctgcaacactca

SEQ ID NO: 285655 - DNA, 1061 bp, Homo sapiens
ataaccccttttcaccattcagccaagcgtgaaggagcaaaagagattcaaaacttcattaattgctctcacacaacgttacaggccacctgcacttcaaagaatttacattggagcagatggattgctgaatgcgatatcaaagaatttcagaatgtttgttttaaaaataacctggattctaaggcaagcaccagcaaagcatacaatttacaaagatgacaaagcttttcttattaaaacttctaaaacgtataagtraaggcacatttttatctctaaaataagagtatacataccaactactctttaaaatgatcaaagttacatatttaaatatataaatgaaatatattcatgcattatttgaggcttttgaacatacctaactggtttcctttagtaactcctagatcagtgaaatctagctttttcccagtataagttttwacctaactggtttcctttagtaactcctagatcagtgaaatctagctttttcccagtataagttttcacatctctctgattattcaatcttttgaataaagatggtccatatggaaaatgagattttwaaaaaagtttaagagtaactttttttgcagaaactcctttcacttgtcatttgattctgacttgagctcggtactttgattgataggtcctactcgcaatgcactgacagaatccacattggaatagctagttaagatgaatcagagctaatctaaatgcatcttggatcagattatgctttacttttggaacatattgtaatttttgtattttacagaagtttctatagctttacccacaaattaagttttacttggaatttgcatcacaatattttcattctttaaatattgatgtatcaggggtcagaaaacaacaacagctagagggctgaatctgaccttgtacctgtttttgggaaataagattttattttagcacagtcatacccattcaattacttattgtctgtggctgcttttgtgctacaacaatagagctgagtagtcaaaatagacagtatggcttaccaagccctaagt

SEQ ID NO: 285656 - DNA, 583 bp, Homo sapiens
acaacaacagctagagggctgaatctgaccttgtacctgtttttgggaaataagattttattttagcacagtcatacccattcaattacttattgtctgtggctgcttttgtgctacaacaatagagctgagtagtcamaatagacagtatggcttaccaagccctaagtgagatatttactatttgcctcttcacaggagaaatttactaaccctgatgtgctagcacatgttataaccttgggtaagttttcttaagctctctgagcattaggttcctcatctgtaatataaagacaccgatggtgtctacccagatgtccctgcgtgtggtaataataatggtacctagccgtgatgattaaatgggataatataagctgttaggaaaaggcctcgttcacaataggtctgatacaaatgtcacccaacatcaacatcactgtcattttctcaggaataatgctaggtcatggagactgagaagagggtttcaaactacattactgtagtctgttcatcttcactagtcaaacaataaagtgggtagcgtggttttgtattatgatcatagaatttgaag

SEQ ID NO: 285657 - DNA, 568 bp, Homo sapiens
tgaaggtggaagccctgggtatgatgacaatttgccttcttctttgctgtttaataagacctgcagtgagtaatgtaaacactctaatcctctctttcttacctgtaaaattataataatattattaataataatatcatcccccaataggctgtatattgtaaagggccaattaaattagaaatatgaagtagggtaacttgtaaggttgcaatacaaatcaaaggtttcactgcctcattaaccgtacctcacttccatgctttgaactttggggtaatgaatatgtgtaattatttagctaagagggctcaagattaacgcttttgtgtcgagtgttgccacacacatcaacatggatgatcttacaggctaatgagggaaagaagccagaagccgaaggccacagacagtattatcccctttatataaagttctacacctagaaaattaatctttgrtgatagaaaagagaatcggttacctttcagggtgtgtggaaggggcatagggtattaatggtagagattgtaggaggcaggtgatgttaccggtcttcttgtgggta

SEQ ID NO: 285658 - DNA, 580 bp, Homo sapiens
ctagtttcgatggcaagaatcagaggaacsgttgttagtgaaaatgtgtttggaaaggatgatggtagtgggtaggagagaatagaggtagagaggtgttaacataaggcaaaaacattaaactgacaaacacttctctgtagagtagttgatgtgttaagccagcacacttaaaagcatacaagtttttggatagaaaagtcttcattgttctgactgtttttctggacatgtagctggaaaggagactcaaatcttcatatggattttgtgtcttatggtcactgacactgcaaagcaattagccttcatgatggctgtgcttatgcaatactaattaacatgcctgttgtgctgttttccctgtttgaccatgtgacagcccacaggtctgacactctctgtgaaccaacagctgaggaaatttccaacatggcagattttttttacaaaacacacccaaacaaaaatggaatcacacttttcctgaacaactgcattaacagaatgtgttacaacggatctacaattagaggattgcattcatatgtactggggaaaaaaaaggagacgagaccct

SEQ ID NO: 285659 - DNA, 392 bp, Homo sapiens
gtgaaccaacagctgaggaaatttccaacatggcagattttttttacaaaacacacccaaacaaaaatggaatcacacttttcctgaacaactgcattaacagaatgtgttacaacggatctacaattagaggattgcattcatatgtactggggaaaaaaaaggagacgagaccctactcaagcatacggatacaaaytgattatacctgggtccagaatttcaaagtgtgataacactgtattatagtatcatggagaatataatttaccagtacaatcacatctagtaaaattatcattgaaagttagaagtaaagttgtcaatatatttacggcaccatgtgagacctctatattgaagggctaatttagtaaatttgtatgtgttat

SEQ ID NO: 285660 - DNA, 1133 bp, Homo sapiens
ttaatactatcttaccctacaaagttgttataagaataatgaagtcatatagcttcactagttaggtcagtgataatgatgaacacctagtaggagcttcatatatgataactagaaagaacaggagcaatgacagaggtagcaagtttaataattgcattcgaattatatataatcctttcagccaaaagacttgtgctactgtgtacttatgcattgcctggaatttgaggccttggtgggcaaaaggtgtgcctggcctatggtgtctgtggtaaccctcgcttgccagttggtatgttattcagacacaatgtgcttaaccatatcagccctccagttactggtaactaacacaccatataccatctcagamaataaaatggcttttaggtatttctcctattaagaacattctcattgtgattgttttcattttcattgtccaaagtcatatggtgactaagaaaggagctgaactatagcccttctgataaagctttacaatggaaagaacagctggtctgcctgtagactaggagcattgtctttatgcaagacaaaagwttaatactatcttaccctacaaagttgttataagaataatgaagtcatatagcttcactagttaggtcagtgataatgatgaacacctagtaggagcttcatatatgataactagaaagaacaggagcaatgacagaggtagcaagtttaataattgcattcgaattatatataatcctttcagccaaaagacttgtgctactgtgtacttatgcattgcctggaatttgaggccttggtgggcaaaaggtgtgcctggcctatggtgtctgtggtaaccctcgcttgccagttggtatgttattcagacacaatgtgcttaaccatatcagccctccagttactggtaactaacacaccatataccatctcagacaataaaatggcttttaggtatttctcctwttaagaacattctcattgtgattgttttcattttcattgtccaaagtcatatggtgactaagaaaggagctgaactatagcccttctgataaagctttacaatggaaagaacagctggtctgcctgtagactaggagcattgtctttatgcaagacaaaag

SEQ ID NO: 285661 - DNA, 526 bp, Homo sapiens
cacacagcaccatgtctggctaatttttttgtatctttaatagagacagggtttcaccatattggctaggctagtctmgaattcctgacctcagatgatccgcccacctgggcctcccaaactgctgggattacaggcatgagctactgcgcctggccgtaaataaaatgtctttctaagaaatattttggggcctggctgaaaaagccatgtacaatctgaactcattcctttggtcctcaagtgtcccactattgggacattgccacaatgaccttctaacctcccattagttaactctagcctttgttcactgctctccagccaccggaccttctttcattgctttaaatcagccaactgctttttcatctcaggaagtttaagcaggtggtttttgctgtctaaaatttccttcccctaggtctttataagactgagtctttctcatccttgagtttcaacttaaatgtttccttctcagtgctgaccaccctgaccaggccttcctgctattctctatcaa

SEQ ID NO: 285662 - DNA, 526 bp, Homo sapiens
cacacagcaccatgtctggctaatttttttgtatctttaatagagacagggtttcaccatattggctaggctagtctcgaattcctgacctcagatgatccgcccacctgggcctcccaaactgctgggattacrggcatgagctactgcgcctggccgtaaataaaatgtctttctaagaaatattttggggcctggctgaaaaagccatgtacaatctgaactcattcctttggtcctcaagtgtcccactattgggacattgccacaatgaccttctaacctcccattagttaactctagcctttgttcactgctctccagccaccggaccttctttcattgctttaaatcagccaactgctttttcatctcaggaagtttaagcaggtggtttttgctgtctaaaatttccttcccctaggtctttataagactgagtctttctcatccttgagtttcaacttaaatgtttccttctcagtgctgaccaccctgaccaggccttcctgctattctctatcaa

SEQ ID NO: 285663 - DNA, 526 bp, Homo sapiens
cacacagcaccatgtctggctaatttttttgtatctttaatagagacagggtttcaccatattggctaggctagtctcgaattcctgacctcagatgatccgcccacctgggcctcccaaactgctgggattacaggcatgagctactgcgcctggccgtaaataaaatgtctttctaagaaatattttggggccyggctgaaaaagccatgtacaatctgaactcattcctttggtcctcaagtgtcccactattgggacattgccacaatgaccttctaacctcccattagttaactctagcctttgttcactgctctccagccaccggaccttctttcattgctttaaatcagccaactgctttttcatctcaggaagtttaagcaggtggtttttgctgtctaaaatttccttcccctaggtctttataagactgagtctttctcatccttgagtttcaacttaaatgtttccttctcagtgctgaccaccctgaccaggccttcctgctattctctatcaa

SEQ ID NO: 285664 - DNA, 572 bp, Homo sapiens
taacccccaaggtaatggtatgaggaggtagggtcttcaggatgtgacaaggtcatgagcgaaragccttcatgaatgggattggtgtccttataaaagaggcctgagggagccttatacttcttcaccatgtaaggacacagcaaggaggtgtcctctataagccagaaaacaggccctcaccagacactgaagctgccttaatgttgggctttctagcctccagaagtgtgaaaaataaatttctgttgtttgtaagctacccagtttatgatattttgttatagcaacctgaatgcactaagatagcaatgatttataaacttgtttgtaacatcggaaacctgtactcaaaggaaattttaaattaaagactaatttataaaaagataaaaatctgagttgctatggtgaaacagaaaaataggacccaaagcctcccagttttgcctcttccctattccctttcacttcctcatgagtccctacctggaatcccagttagaaaatctctatgcaaaaccatcagtaagctgatgcagcaggcagcaggaatgcagcatcccaggcca

SEQ ID NO: 285665 - DNA, 530 bp, Homo sapiens
tacaggcatttggtaaatacaaccattccaaatgggagaaattggtcaaaacaaatggactacaggccccatgcaagtctgaaatccagcaaggcagtcaaatcttaaagatccaaaatgatctcctttgactccacatctcagatgcgagtcaaactgatgatgggttcccatggtcatgagcaattccacccccatggcttkgcagggtactgcctccctcctggctgctttcacaggctggtattgggtgtctgcaacttttccaggtgcacagtgcaagctattggtggatctaccattctggggtctggaggatggtggttgtcttctcacagctccacaaggcagtgccccagtgtggactctgcatgggggctcccaccccacatttgccttctgcactatcctagcagaggttccccatgagtgccctgctcctgcagcaaacttcagcctggtcatccaggcatttccatacatcctctgaaacttaagcagaggttcccagacctcaattcttgacttct

SEQ ID NO: 285666 - DNA, 621 bp, Homo sapiens
aagcagagttggctaaattaatttggtgttctggtttcctggagatgtggtccctccatgatccagctcaaagggataatcttaaaagcttccttttcattctgtgatttaatttttgtaaatattaatcaccagtcattaaagtatatatattgttttgaaatgaagttttgtggctatttctttgtctcttgatattagaagaatcactttatcctcctagagtgagtgatagcagctggttgacaggacagaacagttctgcagactgtgcmgaaagggaggggaaaagaccatatctaattaaagcagcagggaatgatttttagcaaggcaaattgtaatctgttatctggaagttggccagggcattagggttaacaacgctttttgtgaaaaataataatacaaatatatatacctgccatgtttttaatgtatcacaagtacctggaatgtccaggtttacatctcctttaaaagctttcttacattcagtgtcctttaatacatgccaaaaaaatatggcaaaaacatagcagttatagaaagacatagttagcttcaaaagtgctggtgaatcttacttgtcttgaatattttaacaagaattctaactat

SEQ ID NO: 285667 - DNA, 446 bp, Homo sapiens
gtgtaaatgcgttcatcatgcccaatttaaagcttacaacatgactcactgtaaatgcagagttgggaagaaatgcaaaacagcacaccattacataataggttatagaaataacctcaaaatcacaagtaataataaaatggagtaaaataattaggaaataatgagttttaattatttattgtatatattttaatatgatgtatttagttgtcagtttaaatatatttatataatctttaataatggcagtctttaccagtcagctcacaaaatcctccaaagtttaaaaatcagtttttgcaaggctgtacaartgagctctgacaaaccaccacctctaatacatactaatatgtgaactataatagatattggaaaagaaaataggcaccatggaagcatattaccttctttcctcctgaaaaccacttcatagaggtgat

SEQ ID NO: 285668 - DNA, 446 bp, Homo sapiens
gtgtaaatgcgttcatcatgcccaatttaaagcttacaacatgactcactgtaaatgcagagttgggaagaaatgcaaaacagcacaccattacataataggttatagaaataacctcaaaatcacaagtaataataaaatggagtaaaataattaggaaataatgagttttaattatttattgtatatattttaatatgatgtatttagttgtcagtttaaatatatttatataatctttaataatggcagtctttaccagtcagctcacaaaatcctccaaagtttaaaaatcagtttttgcaaggctgtacaaatgagctctgacaaaccaccacctctaatacatamtaatatgtgaactataatagatattggaaaagaaaataggcaccatggaagcatattaccttctttcctcctgaaaaccacttcatagaggtgat

SEQ ID NO: 285669 - DNA, 592 bp, Homo sapiens
gaggctataaaaactcccagagatctcaatttgccccttcctgagtaagccacagatctgaaccagatcactgccacatgactcccattcactgtcattaccaacaagtcttttaaggatcatcctagaaacaaaaaaaatataaatatgggaactattttttaaaaaggattttaattattgacatatctatatttaaaagttgtccatgctaatcgtcactaatcattgagctgatttccctttaatgatgaagcttagaataatatttcacacagaagctccctgcattattaactaataaacattcaccaagcacttaccttatattctgcttgagacataagggcagcaaaaggaatacaagctttgatgtctacactcaagaagctttcagtcttattgatccccaaaatagcaaaaacataaagcaagccaatttattttaaataaaattactaacttggagtgtgacgaaaaattctagcaagtcagagaatgctcaagaygttgtgtttgatgaaggagagaagactagagttggaccttcaaaaatggataagtgtctgtcctaaagggagaaaaaaattat

SEQ ID NO: 285670 - DNA, 575 bp, Homo sapiens
tggttaaagcagagtcatagtcttttttgttttattttgctttttgtcttaattttgttttgtttcttgtgttccacctttgcctgttacacatgggctttctgtatctgcattttgtcttgctttgttttaagttgacaaaaacagctatttttttttaktcaccctatttatttattatttagtcaccctattattattattatttagtcaccctattattcccaaatcaaagtaaaaataaaaataaatgatgatattcagcttcgggctggagtcaaattgggcaatgttgcattttctgtatctttctagttccctttaaactgaaatatattatgtgtaacaagagagaaagattaataataaagtagaaatcaagtaaaggaaggtcaaattgacttatttatcacagtctgtcaaagtagtgattgatataaaatttggaaagactgttagaaatttgtgagggaaaccagaatatatttcaagatagaattagaaattagtgaagagaaatattaggcttgtaacatttcaaagggtcattttattgttgttcttctttctttcac

SEQ ID NO: 285671 - DNA, 564 bp, Homo sapiens
tttgatattactattgtaattttttggcagtgccatcacccacacctatataagacagtgaacttagtcagtgaatgttgtgtatgttctgactgcttcactgaccaaacattctctcttctgtctcctgctcctcaggcctccctatttcctgacacacaaaaatactgaagttaagccaatgaataaccctacaatggcctctaagtgaccaagtgaaaggaagagtcacatacctgtcactttaaatcaaaagctagaaatgattaaacttggtgaggaaggcatgtcgaagctaagataggccaatagctaggcctcttgcaccaaaccattagccaagttgtgaatgcaaaagaaaagttcttgaaggaaatttaaggtactatttcagtaaacaaattaataataagaaagcaaaagagcyttattgctaatgcagagaaagttttagtggcctggatagaagatcaaaccagccacaacattcccctaagacaaagcctaatccggagcaagaccctaactctcttcaattttatgaaggctgagagagaggaagaa

SEQ ID NO: 285672 - DNA, 563 bp, Homo sapiens
ctgaagttaagccaatgaataaccctacaatggcctctaagtgaccaagtgaaaggaagagtcacatacctgtcactttaaatcaaaagctagaaatgattaaacttggtgaggaaggcatgtcgaagctaagataggccaatagctaggcctcttgcaccaaaccattagccaagttgtgaatgcaaaagaaaagttcttgaaggaaatttaaggtactatttcagtaaacaaattaataataagaaagcaaaagagccttattgctaatgcagagaaagttttagtggcctggatagaagatcaaaccagccacaacattcccctaagacaaagcctaatccggagcaagaccctaactctcttcaattttatgaaggctgagagagaggaagaagctacagaagaaaactttcaagttggttcatgaagcttaaggaaagaatccatctctacgrcataaaattgcaaggtgaagcagcatgtgctgatgtagaagttacagcaagttatccagaagatctagctaagatcattgacaaaaggtggttacaataaacaga

SEQ ID NO: 285673 - DNA, 519 bp, Homo sapiens
catcccatagatatagttataaactattttgagtaataagtatttcacattggcatttttttgggtatgatrctctgtttacacctgagcacaatgggattctgtgattagtctctctttattgcaacccttttctttccctaaaattaacaattgtctttcttgtttgtttgtttgtttgcttacctgtaggcttatcactaatgcatcccttaaagtctttgaaaccagtgttaatctaaactcgatatgcctaaagattttaggtatttcactgaattcatctacttaaaggaatatctttaacgaaagtattaagagaaacacatattttagaaagaaatttgctcaattctttctgcctttggtcatttgtatatacagcataccaccatatggtatatataccttatattagtcatttgttaaggttgagtatgtcataccaaattatgattacattttacctattcctctttgaatatttattgttaattgcttgtgaccagcactcaataa

SEQ ID NO: 285674 - DNA, 404 bp, Homo sapiens
atcactctcttcagggcctcctcttgcatccacagctgatttcttagttttcttcatggcctgttcttcttttactcactcctcacacattagtttcctccagagtttctcacagcatctgctttccctactccaaattctttcctgaggctatctcatccaagttcattagttatagatygcatttggcacatagggaatttgaaaagagaggtgtgcacaggacaggcttttatttttctttcgtatgatggaatcctgaggtcagccttcctgagctgggatgttgggggctgctgactgttggcatttcttttgtggactgctgcagctctaacagcccaatctacagatactcaggctcagaaacataggaaaagtacaaacagtagttgaatctgtca

SEQ ID NO: 285675 - DNA, 595 bp, Homo sapiens
tgtaaagctcttactcccttgctttaaggtgggacaaatataaaaaactgtcccagcttgacagctcactatgggatcacccgagacttatgaagtgatggctccaaatttgactcttcyctctgttcaatcttacctcactcatgcacccacaggtgtggcccctgagagggatccccagtgaacttcctgaatgcaaacctctatataagtctgttttccaagaaacctgatatgcaatagggtatcaggagtgacattaggagggagaaactaaatggcattttggaactggatgattggcaatatacatcccatcacctagtaagtggggtagtgatagctctggcatgctgtagtggtacaactgttacagctttcatagctggcaaaccaggtttggggaagtgcttataaaagaattatagaattagaaaattgttgctggggccaagtgatgcattggagaaagataatgacaggctgaggatgatgaatcaacaattcaagatgaagtgtgaaaaccagatggtctccttggcagcaaacaaagagatcttcatctgcaaccagagagcagagaaaggtgaggatc

SEQ ID NO: 285676 - DNA, 602 bp, Homo sapiens
agtgtagcctgaaaaggccttaaagaaaaacaaactccacaaacgaatgctgtggaagatgtgaggagaggtgtttccatacaatcctactacagaaatgtgcccagttctcccagaaaaaaagtgtttatttagcttgatttaaatagagattaggtagtgagcagatggagcttatttgaggccgtttggcaagcttgcctgtgagactgagtaaatgaagactgaatggggaggtggcagggaaggatggctggaaggaggaaagcagggtattccaaacagaccagctgtttccaaaaacccttcactcccatataatatgagagcccagaactgaatctgaatctggatgtcaagaaaccaaaattataaaatatgtttgttcttgttstattacgtaagaagaaagaagtagccaaaccaatatactagaagaatgtcagagcacagtcacaaagatctacaccaagaaaatctcctaaacaaaatctacctacttttgactacaattcagctggtgactgtgcaaaatttataagttcttttcttcttctctaactcctcactcagtaattgtaggtagaaaaaagaaaattaat

SEQ ID NO: 285677 - DNA, 518 bp, Homo sapiens
cagcctgaccaacctggagaaaccctgtctctaytaaaaatacaaaaaattagtgggagtgctggcgcatgcctttaatccctgctactcaggaggctgaggcaggagaaccccttaaacctggaaggcggaagttgcagtgagatgagattgcaccatttcactccagtctgggcaacaaaagcaaaactccatgtcaaaaaaaaaaaaaaaaaaaaaaaaaaaaaaaaaggacctttggggaaagattttctaaagttaggtttaataacttttttggtgctaaggtttcctaccctttataaaattatggtgagagtagatggcaactttttaatgtccttagttggcaaaactcaaagttgataaccctattatatttagcatcctattacattgctactggataatgaaatgtaaaaatctgagaaacactaatctagtttacaaagaaggaaattgagtaccaggaaggatgagtgacttccttcagcccgccccactccccccatcaacaa

SEQ ID NO: 285678 - DNA, 570 bp, Homo sapiens
gattttaagatgccaaacatatcacttcttgcattgtatttaaacactattatttaaattcagttcaacaaacatctttgtatccttactgtgtaagtaagactttgttcctgcctttgggggctttgtgcagaagatagtcagactatcaaaaaatgacctttggggctacactgagctttcggtcttctgtctctttgtcagctttatcctaaataatcccacactctgaggcatttgggggaatgcacatacatagtaaggagagaggctctcttcctttgaaagagcaagcagaatggacattcctgaaaagattatattctttgtagtacgctttcctgcaaactgttcatttgaggagcagaggaatctagtgcttactttattaaaatgaagttttgctatctgatttggttgagtaratatcgacacctgattttaaggtggagaacttataattttcatttccaacaaatctcaagtaatgctgatattgctgctgcaggaccacattggagagctctagacaagcaatatacaaactgagatgtatgtacacgcagggat

SEQ ID NO: 285679 - DNA, 1152 bp, Homo sapiens
agctctagacaagcaatatacaaactgagatgtatgtacacgcagggatacataaaaacgtatccaggggtacccaggagtagatagaggcactgagagcactttccagatcctcaatttctatgttattatttcctaattaataaaataatccatctgagaatttagccatggctttacactcccacctccctttctgcgattgattattttctcccactttgcacaagagaagcataaccctccccatgaggaaaaagtttgaagaattgagtgagaatgctattaaaaaattccttccatttgtatctayttatttatgtgaataaggcttcttagtgcctctttttaaacaaaatagcaatagtagtaaggctgaaatctgtcttactctagcagcaagtaatatttatttatggatctatgaatccattaacaaaataaaagttacactcctcattaagtaatatagttcagtaaaattttcctccttataactatgtgttcagtattttaacatatttattgcgttttgattaactgtgtataaaaatgcttataataataactaaacacagaagaaaawgataaaacccaatttatcaatttatccttttaagagtcatgctgttaacatcatacctaaaaaatttttgctcaaccaaagtctacaaatattttctcctatattttcttcactaagttctataatttttttcattttgcacttaggtttatgatctatttgggttatattttgtatatgatacaatatatattgaagttttaaaaaatttgaatataaatatgtaattgtttcagtawcattgattaaaataattctccttttttcatgagttgtcttgcctttctatctttgtcaaaaatgagttgtccatatatgtgtgaaaatatttttggactttctagtttgttccattgatctatttgtctgttattttacagcaatatccagtcttaatttatctagcaatatattttaaaatcaggtagtgttcgtcttccaagtttattcttcccttttcatgttttggctattctagagcctttgaatttccacacgaattttagaatcagcttgtcaatttctacaaaatgtgtgctgggattttaactgggattgagtctata

SEQ ID NO: 285680 - DNA, 615 bp, Homo sapiens
cctcactgcagcctcgaactcccgggctcaaaagagcctcccacctcagcctcctgagtagctgggactacaggcatgtgccaccacacccggctaatttttgcattcgttttagagatggggttttggcayattgcccaggctggtctcaaattcctgggcccaagcaatctgcccgcttcaacccccaaaagtgctaggattacaggcatgagcaaccacacccagtctctttttaaaaatcaaattaaacattttttaaatgaaattttaagttgtttttcccttttatgagcaaaagagttgaatatcacttccccaagtcttccactaagaaacctgttgctactcactctggactatctggcagggaaactatttggaggagtgtctcaaccacttaatcctttagagcccttggttggaggtgaggtactgggagctaaagcaatacacttactagtcaggactgggtgaaaatggagagatagggcagtgccaacaatagtaaaaacagacttatatgtagctcacctcattactcttgcatactgccatagaccatgcctactagactttcctaatggtatgaaactgatatttcccccatttaca

SEQ ID NO: 285681 - DNA, 550 bp, Homo sapiens
agtgtaaggtgaggtctggctttcctgaagggagactttttttcttactgttacctcgcactccaaggttgaatgtattttcttagacaaaattgcttattttttaatgtattcacttagggtcatattaaaaataccctagtttctttacttattttctcaaatgtagttaattgttctatttttatagttttttatactccctcacccaaccccaattctatgttcaactagtactgcatttccaactcttggctttagatgagcgatgagcatagccatggcttatctcctccattctgctggagtgggctagagggaaaatgacagggttatactagttttgctgtttatttaataaacacatatttattaaagacytaggatgcgccagaaaccaggccagatagttggttataatgaggaataaggcatgtatgttcctcttatgctgcaatgtaccctatggtatgaaaagtaccatagatccagataacaggaacatctaactcaatttgtagagtcagtaggaaaatatctgaatttatga

SEQ ID NO: 285682 - DNA, 550 bp, Homo sapiens
agtgtaaggtgaggtctggctttcctgaagggagactttttttcttactgttacctcgcactccaaggttgaatgtattttcttagacaaaattgcttattttttaatgtattcacttagggtcatattaaaaataccctagtttctttacttattttctcaaatgtagttaattgttctatttttatagttttttatactccctcacccaaccccaattctatgttcaactagtactgcatttccaactcttggctttagatgagcgatgagcatagccatggcttatctcctccattctgctggagtgggctagagggaaaatgacagggttatactagttttgctgtttatttaataaacacatatttattaaagacctaggatgygccagaaaccaggccagatagttggttataatgaggaataaggcatgtatgttcctcttatgctgcaatgtaccctatggtatgaaaagtaccatagatccagataacaggaacatctaactcaatttgtagagtcagtaggaaaatatctgaatttatga

SEQ ID NO: 285683 - DNA, 556 bp, Homo sapiens
cagctaggcctgaaccttataagccatgcgaataggtttgagcatgattataagagtaatgggaagccacaattttaagtcaatttttgttgtttaatttggaaaaatagcagcggttgtattcctttcatcccttcttctcttatcaagaccttttctctaacttaaacartaaataacagcaatacaaatgaattgacatgatattttctcctgtctcaattttccagggaatagccctgtgatggttaatactgagtatcaacttggttggattgaaggatacaaagtattgatcctgagtgcgtctttgtgggggttgccaaaagagattaacatttgagacaatgggctggggaaggcaaatccacccttaatctgagaggcacaatctaatcagctgccagcgattataaagcaggcagaaaaacgtggaaaggagagagatgggcctagcctcccagcctgcatctttctcctgtgctggatgcttcctgcccttgaacatcggactccaagttcttcagttttgggactcggactggttctccttgct

SEQ ID NO: 285684 - DNA, 403 bp, Homo sapiens
tctcttggctgacagcttcattttaggactttgtttgtcaacgacatccagacctatgcagctggaagactgacttcaacaaatctaaatgtctctttaagagtctaagcaacctattcctttttttccaggtacccatttatctataattaagtcagcattaaagggatttcccaccracttctatctaaagctgcaaaaaggatgactagctactgcctgaagtgggtttaacagatcctggggtgagcactaggaaagccttccatagaaaaatggctgggtatgaaacatgaagaaagatgtcattcacattgtccctcattactgaattgattattttgatttgaatttctgaattctgttcctttggacagctctgttccttaggattctgttcctt

SEQ ID NO: 285685 - DNA, 534 bp, Homo sapiens
ccattctccccatgatcagtcaccacctcaatatacttgaaacatttatgcaaggccagggtaaacgtcatctaccttagctgaatctggagctaggtctttgacttctccaaattccacacagtaattatcacagtcatgcccatagtaaatattggatgaaaactttcacagatttattttatcccagaacactgactctttttccctccaatattctatgccttgcaggaccaggaccataattatcatctatctcaaaggtgctcaggaggcagatattagagggaatatttactatgaatgttctcataaaaggccaacaggatgagggtgattgtccaggarctttgagggcactaagtgaaaagagagtgatttctgatctactcaggtgcggcagggaggccatgtgtgaagggagtgcccagggtctgtggtagcagctccatgagtaaaaaccattgcctcatcatctaaagaagccaaaagcaaggggtgaaggaagaaaatagttttgttagtgtacctgta

SEQ ID NO: 285686 - DNA, 584 bp, Homo sapiens
tgtgattgtgtcttacttagggccgaaatgcgttgaggaaaggaataatactattgtaacatctgttactttatgaaacacaacatatgtaatttctaagtgtgaaccataccaccaacgtacacaacaataagcatgtgcacattaaccaaaactacttatttaaaataccaaattttttgctaatgagaaatggaagactaagaagactgcggtatttaaaatgatgattcttaataaaattttggtatttcaacatgaactctctttagaatctggttgtaggttttatragaatgagcttttgaaactgattctcatttctaaatacttgggggaaatgcttacagaaatgaagactctctgaaagatggtgttatggagtgttccactttactggcaacagccttattattgtactgccgactgtaaaatcagattacccctcttaaagagtattactgattttgaccacattctctcttaaacctatttaactttaaacctactgggaggtgcagaaatatacaaggttagcatatcaactgtttatgtacccgaatatcatgtaattacactaataa

SEQ ID NO: 285687 - DNA, 594 bp, Homo sapiens
tgatcctccttcactagaaggctggggataaggcagaggcaacactagcacaagtatgcattccctgatcccatcatgaaacactgaagcatgccaccacgagctgaggctctattttaagtacctgagatagttaataaaacagaacatcctgccttgaaggagtttctgttcacatggttgcatcaacacagaccatgacatttgcaaaggaacatctcttgggtcatcgggaaggcagctggtcctgtagctcatatgccttcaagttagtttaaaactatttcaatctattcyaatttgtctagttgtttcatgatctaacaagaattattagaaccttcagcaatgcctggcttggaattccaactgtcctctttaagaacaagcaagcagctttttgtggcttcatttcctcaagcttgagctctgcaacagcatgggagtcaagagttcagggcggtcacaggagatctttggcctttgagggcagggcctagagaggctgagatggggaagtggcgcctgactcttcccacccacattcacaaatatgtaagtgttctactaagtactgtggcagtgacaatgatg

SEQ ID NO: 285688 - DNA, 549 bp, Homo sapiens
agtaatttcagaatgtgattagtgctattggtagtggcagaagacaaattcctaggcaaatagggacaagtcccyggtgaaacccaactttctagctgaagacagtttaaagcctgaaaaccaagcaacgagtctcagataaatccacaaaccagactgagaacctctcttcccatttggcacactttcctctgattaatccccagccttcgcctattttacatgtaatctaaccttccctaaatggttttttacactgttgtgcccacctttgagtagtgtctttatttatttatttatttatttatttattttggctttttgcatactcacaaaccaatcagtactcactcccccattctgagcccataaaagccccgggatcagccacatttgggagaggtacccaactttgggtagggggttgccccctttgagtcccctctctgctgaaaactgttccattgctcaataaagctctctaccctgctcacactctggttgtcagcacaacttcattcttctaggacacggtacaagaacttggga

SEQ ID NO: 285689 - DNA, 1151 bp, Homo sapiens
agtaatttcagaatgtgattagtgctattggtagtggcagaagacaaattcctaggcaaatagggacaagtccctggtgaaacccaactttctagctgaagacagtttaaagcctgaaaaccaagcaacgagtctcagataaatccacaaaccagactgagaacctctcttcccatttggcacactttcctctgattaatccccagccttcgcctattttacatrtaatctaaccttccctaaatggttttttacactgttgtgcccacctttgagtagtgtctttatttatttatttatttatttatttattttggctttttgcatactcacaaaccaatcagtactcactcccccattctgagcccataaaagccccgggatcagccacatttgggagaggtacccaactttgggtagggggttgccccctttgagtcccctctctgctgaaaactgttccattgctcaataaagctctctaccctgctcacactctggttgtcagcacaacttcattcttctaggacacggtacaagaacttgggawgaataccaaacaactatctgaaaggtccacttgaagaatctcctcaccagctttgggwttagattgtagcaaattctcttctccttccagaagacaggggagtacaggcaacagctctctctatcacagcactgttcaatagaaattcagtgtgagccacacaggtaattttgactttctcgtagccacattaaaaagaaatgggtaaaaatgtgttagtaatatattttatttaatatgtccatatatccaaaatactatttcaacatgaaaccaatatataaaaagtattaatgagataatttataatatttttaccccataagtctttgaatccagaaagtattttacacttaaagcacatctccatttggactagccacatgtagctagggggtacaatattggacagtgaagatctattgaaaatctcccctactctctccatttttaaaaacagacttaataaaatattaagacttaataatgccccttaataaaatacaatttacatactatcaaattctctcattttgcgtgtacaattaagtgttttttagtaaatttgcagagttgtgcaaccttcaattcaattttagaa

SEQ ID NO: 285690 - DNA, 476 bp, Homo sapiens
aaactgccaaattgttttccaaagtggttgtaccatttcccttcactttctgattcctttttatgtatccttgattttataaggatctaagagccaggaaaccggtcttccatgacttcctttgaaaattgtgcatgtggagtcctgcatctttcatattagtagttatcagatggtcatatctatagatatcaagtctgcaagagtcccattttaacatctycttataatatagagattgattcttagcacaagaacctcttaggaaaagttaagcacttcttaaaaatgatctcctgtgactctttaaaggacacacacctcaaaagtattggaaaacaaggtctatgtgcacagcatttctagcatgtggctcttgcaaacaattaattagtaaaagatgcacttaggcagagaattttcaatttgtgtataacaaaacaggtgatcctaacagctctcctacatcgtgggag

SEQ ID NO: 285691 - DNA, 612 bp, Homo sapiens
tggttttgtgatatatggcttttattattttgaggcatgtgtcttctatgcctagtttgttgarggttttcataaaaagatactggattttattgaatgtttttttctgcagctgttggattcaatctgctggtattttgttgaggatttttacatctatgttcatcagggatattgatctatagttttccttttttgttatgtcctttgcttgctttggtatcagagtaatactggcttcatagaatgagttagggaggattccctctttctcattattttggaatagtttcagttgaattggtaccaattcttctttaaatgtctgatagaattcagctgtgagtccatctggccctgtgcttttttttttttttactgggaatttttttttttgttactgattcaatctcactgcttgttattgggctgctcataatttctatttcattcaagctagaagggctgtatttttccaggaattcatccatttcctctagattttctagtttatgtgcacagaggtgtttatagtagtcccaaatggtcttttgtatttctgtggtgttggttgtaatctctccattttcatttctaattgagcttatttga

SEQ ID NO: 285692 - DNA, 597 bp, Homo sapiens
agttttgctggatacaaaattcttggtggatggtyattctgtttaacaaggctaaagataggacctgaatcccttccaggtggtaaaaggtttctgctgagaaatctgctgctagtcttataggttttcctttatagaatacatcatatttttgtctcactgttcttagagttatttccttcacattgactctagacagcctaatgactatatgccttggagatatcctttttggaataaatctcctgggagttttttttttttttttttttttttgtttaatgaatttggatgtctaaatctctagtaaggccaggggaagttttcctcaattattctgtcaaataaattttccaaactttttgctttttcttattcctcccaagaaacaccagtgattcttaggtttggctgttttacatagtcccatatttcttggatactttgtacacttcttttaaaaattttttatttttgtctgattggattaattcaaaagccttgtctttgagctctgaaattctttatcctacttgatctagtaaactgttagaacttgccactgcattttgtaattctgtaaatgtgtcttttact

SEQ ID NO: 285693 - DNA, 597 bp, Homo sapiens
agttttgctggatacaaaattcttggtggatggttattctgtttaacaaggctaaagataggacctgaatcccttccaggtggtaaaaggtttctgctgagaaatctgctgctagtcttataggttttcctttatagaatacatcatatttttgtctcactgttcttagagttatttccttcacattgactctagacagcctaatgactatatgccttggagatatcctttttggaataaatctccygggagttttttttttttttttttttttttgtttaatgaatttggatgtctaaatctctagtaaggccaggggaagttttcctcaattattctgtcaaataaattttccaaactttttgctttttcttattcctcccaagaaacaccagtgattcttaggtttggctgttttacatagtcccatatttcttggatactttgtacacttcttttaaaaattttttatttttgtctgattggattaattcaaaagccttgtctttgagctctgaaattctttatcctacttgatctagtaaactgttagaacttgccactgcattttgtaattctgtaaatgtgtcttttact

SEQ ID NO: 285694 - DNA, 599 bp, Homo sapiens
ggtaattgatttataaagatgataaattgactttcttttctatgccaccaaattcttgactttgtaaaatatttaatggctcacttaagggaaagttgtgtgtgggattatttctacttggcactcctcagcctggcaacatcattccttcttcttcttcttctttttttttggggggggggggcgtgctgtgggggagagagtcttggtctgtcacccaggctggagtgcagtgatgtgaacatggctcactgtagcctcgaactcttggcctcagcctcccaagtacctagaactataggcacataccagtacacctggcttatttttaacatttttktacagaggagatctcgctgtgtagtctaggctggtctcaaattcctggcctcaagtgatccttctgcctctgctcccaaagtgctaagattataggtggtgccaccatgcctggccacatatatcttcttgatctcattctgtgaaaaacacagagtttaactattttagatatcttagaatagaaatacagaatttaaatattttagaacttccatatgttggaagtttttttttttttaatcaaacttctacacaag

SEQ ID NO: 285695 - DNA, 599 bp, Homo sapiens
ggtaattgatttataaagatgataaattgactttcttttctatgccaccaaattcttgactttgtaaaatatttaatggctcacttaagggaaagttgtgtgtgggattatttctacttggcactcctcagcctggcaacatcattccttcttcttcttcttctttttttttggggggggggggcgtgctgtgggggagagagtcttggtctgtcacccaggctggagtgcagtgatgtgaacatggctcactgtagcctcgaactcttggcctcagcctcccaagtacctagaactataggcacataccagtacacctggcttatttttaacatttttgtacagaggagatctcgctgtgtagtctaggctggtctcaaattcctggcctcaagtgatccttctgcctctgctcccaaagtgctaagattataggtggtgccaccatgcctggcmacatatatcttcttgatctcattctgtgaaaaacacagagtttaactattttagatatcttagaatagaaatacagaatttaaatattttagaacttccatatgttggaagtttttttttttttaatcaaacttctacacaag

SEQ ID NO: 285696 - DNA, 617 bp, Homo sapiens
cttgcggaatgaagctgacttaattgtggtggataagctttttgatgtgctgctggattcggttttaatttaagagattgcatactactatagaaagagtgatgagttagaaagactagagtctgaagctcatctttatcttcactagtaataacctaaagaagttatggcgtcacttccagtcctaattttcttatgagtaaatatggggacattaatactttcatgatggcttgcacaggggattaaatgaggtgaactgtgaaaaaatgactgccacatgttaggaatactccagaaaatggttccattcctgctatacctccaggytggcattcaaaactgaggctcagacaaattaaaatgttttttcaaggtcagagattgagacaggcttgaacctgcaccttctagtactaattcagtcctctgaaatctgtagtattttctaatgaaggtcaggaattagaagcatcacaaatgacatttccacttgctctttgcctcatagctcatgtttctaggcagtttaaatagcaccaaacaattaaaatatttattccttgacattcaatgacatttttttttttttttggcaatagcctacaaccaaatgg

SEQ ID NO: 285697 - DNA, 617 bp, Homo sapiens
cttgcggaatgaagctgacttaattgtggtggataagctttttgatgtgctgctggattcggttttaatttaagagattgcatactactatagaaagagtgatgagttagaaagactagagtctgaagctcatctttatcttcactagtaataacctaaagaagttatggcgtcacttccagtcctaattttcttatgagtaaatatggggacattaatactttcatgatggcttgcacaggggattaaatgaggtgaactgtgaaaaaatgactgccacatgttaggaatactccagaaaatggttccattcctgctatacctccaggctggcattcaaaactgaggctcagacaaattaaaatgtttttycaaggtcagagattgagacaggcttgaacctgcaccttctagtactaattcagtcctctgaaatctgtagtattttctaatgaaggtcaggaattagaagcatcacaaatgacatttccacttgctctttgcctcatagctcatgtttctaggcagtttaaatagcaccaaacaattaaaatatttattccttgacattcaatgacatttttttttttttttggcaatagcctacaaccaaatgg

SEQ ID NO: 285698 - DNA, 511 bp, Homo sapiens
ttattgctttagctgcccttccgccttccaaagatcaggtgactgttttcaratgtagaaaggagccagcccataaatcacagggaaaagaactcactttgaacaagctaagctgccttgtagaacaagtgctggaagtcacattgctcatggcctattaattattgggctgctctcacttctcccaggacaagtcatttccagaattcctctctttaaataagacttagaaattcaatagtgatactatcttaggatatgaagaaagatgtgatgccgaggcatgttttaagcaggaagccaacaccagtatccttccttaggataagtagaagttgtggttgtttatagacatgattataaggaagcactatgggtccaaacataaaaaaaggttcacctgggataatcagtaattctttgaaagggcaaacagttggaaattgttatcaaaggaggtcagactgtcagtgttctattacaaaccatgaaataggttaacaaatgtttg

SEQ ID NO: 285699 - DNA, 1092 bp, Homo sapiens
  misc_feature (1)...(1092): n = A,T,C or G
tttatgcattttcccattgtaacgtttgtggtataaacaccaatttattcttttatcattccagaggctagaagtctgaagttaagatgttataagggccatgttctctcagaagcctccgggagacaacccctccatgcctcttcagagtttctggtggtttctgacagtccttggtattcctggatttgcaatttcatcacttcaatctctgcctctattatacatggcccttcttctctgagtgtctgcctctgngtctctcctcttattagaaagatgtcaatcatattggattaagggcccatcctatcccagcatgacctcatcttaatttatatcttacttacatctgcagaaaccctatttccaaataagaccagattcacgggtaccaggtacagtattcragtaggtgctcagtagagatgtggtggaagactgagctatacttcccaacttgataagacagagccctctgtgttctgactccatcagatwtgaattttagaatcaactcatcaatttatctgaagaaatcagctgagactctaataaggcctgcactgaatctgtagaccacattgggggtattgtcatctcaacaatattcagtttttaaagtcatgaacattggatgccttttcaattatttaagttgtctataatttctttcaacagtggttttttwgtattcagagtatatattttgcacttatcttgctgcattaatttttacatactggattctttttgatgctattgtaaattgaattttttgctaattttatttttgtatcatttattctaagtatataaaaatacaatagatttttgcccattgattttgtagcttgcaaccttgatgaactcatttattagttccaatagcttttttagtggatttgttgggattttccaaatacaggatcgtgccatctgcaaatagaaatagtactatttcttcctttctagtctggatgttccttatttaatttacttgcttaattgctctcattagaacctccatcccaatattgactaaaagtggcaagagaaaataacctgttcttcttcctgaccttagaggga

SEQ ID NO: 285700 - DNA, 591 bp, Homo sapiens
tgaattttagaatcaactcatcaatttatctgaagaaatcagctgagactctaataaggcctgcactgaatctgtagaccacattgggggtattgtcatctcaacaatattcagtttttaaagtcatgaacattggatgccttttcaattatttaagttgtctataatttctttcaacagtggtttttttgtattcagagtatatattttgcacttatcttgctgcattaatttttacatactggattctttttgatgctattgtaaattgaattttttgctaattttatttttgtatcatttattctaagtatataaaaatacaatagatttttgcccaytgattttgtagcttgcaaccttgatgaactcatttattagttccaatagcttttttagtggatttgttgggattttccaaatacaggatcgtgccatctgcaaatagaaatagtactatttcttcctttctagtctggatgttccttatttaatttacttgcttaattgctctcattagaacctccatcccaatattgactaaaagtggcaagagaaaataacctgttcttcttcctgaccttagaggga

SEQ ID NO: 285701 - DNA, 610 bp, Homo sapiens
gtatcctaagtgaattaacacagcacaggaacaaaaaagcaaataccacatgttctctcttatragtgagagctaaacattggatacatattggcataaatatgggaacaaaacaatagacatttgggactactagatgggtgagagagagagagcaaaagttgaaaaattacctattaggtactatgctcactacttgggtgataagatcattaataccccaaaactccacattcaaaatatgctttatacagctatacatgtaacaaaactgtatatgtaccccctgaatctaaaataaaatttgaaattataacaaaagagaaacatagaatctttattgtatttactgcccacagtctgcggacgcagaatggagaggattcagtgtcatgctacacatggcttaacctattcaatttacaacactcctttaacataaggatgatcacaaaccccattttatgaacgtaaaactgagacacagaccagttgaatgagttgtcagctatcacgtcataatctaatagatgacatagcccatgtggacgctacaccatttggttccagaccccaggtctcaattactacagtagattaccttagtaaa

SEQ ID NO: 285702 - DNA, 618 bp, Homo sapiens
taacttttttgctacatgttttgatgacagaatgtttcaatgctagtcatgaacttaaataaacaatcctttcactaaagagacagcaacccaaatttctacagtctaactctgtgaagcatgacattctattttatggtttcctaacaggataatggcttggccatttctagagtggacatgattatatttgctgattgggtttgttaaaaatgcactcaaatttgacctctgctaacatgaacataaagtacattgcagacattaatgattccagatagtctacccattaggacattaagaaacagatctgattaaaaagacatgtaatctgtaccttacaggcaaactcattcatacttctttggattaaccaaatgttaaggactacagacattaagctcttctgggaagacagctttctcttctatttctctatagtaataactagaacagtaagggcaaaatgaaagctgagtatctaaccagtatttctacatggactatttttgctctctattgatgtgccaggcacttagctaggcactttacacattcctctttttaattggtttgatgactcttatayctattattagtttttacataaatgaggaa

SEQ ID NO: 285703 - DNA, 536 bp, Homo sapiens
gtgagccaagatagcattactgcactccaacctgggcaacagagtgagaccctgtctcaaaaaaaaaaaaaaaaaaaaaaaaaaggaggtccttctggttccagagccaagactctcatccacacaacctctcagtctattgctctgcaggaaaccttggagtctcagcaccctcattctgttggaaagaaaactgaggcattcacagatgaagagatttgtctatatctggtaaacagttgacccaggattcaaacttagttgcatctggctccaaatccagggcttttcctactctcctatctcaccccagccattttgtttaagcctggtcactgtaaggagttgtgtattttctttcccaacagtacygctggcctataaaataggagcttctacccttttgcaaatactgagttgatattttctgctcttctctttacctctgatgaattttcctccaaaagagaaattagagattttaaaaacagtcactttatgacttctcttggctctcttttatgggatctggttgc

SEQ ID NO: 285704 - DNA, 488 bp, Homo sapiens
tagaacactaaaacttattattcctatctagctataacgttgtgttatgttgagaatcaactaaaaaattttggggcatacagatatgaaaatgtttaaggcaaaaacttacggtacttctaagtaaatgacaaatattgacataatataaattatttcaatagattaggatacatttcatacaaaataaagctatgaaggatttacctaactaaacctacaaatttaaatcctaatgaaaaamaaacactatctctttttagaagactccaaaatttgtctcttgggctgaaactccactctctggctccaattgcctacttgagaactccttttgagtgtctcaacaacacattaaaattagtaaaattaaacatatggctgaggcctggcatttgttcttcccacagctttccctgtctcactgagatttgtttactctcatgttgaaaggttaacccctatttctcttttctgaacatcaagtc

SEQ ID NO: 285705 - DNA, 1049 bp, Homo sapiens
aatgagaaaacttctcattcttggagaatgagaaaacttgtttttgaaaaattatttttctatatgtgtttgctgagtgcacttatttcacatatttagtatttttattgtttgataattaactaattttaaatgtgaatctatttcttctattagcgaatatttgtcattcttctttaatagtaataatgcccttcctctttatctaaaattggatgatgctcaatttttaaaagagaaataagatatcttactcctcatttttttattgtgtgtgtgtgtgcacatgcacgtgtgtgtgtgagagagagattgaaataaacctttctcactatacytaaacagtttttgtgcttattcatgatcctttattcttttagagcatttttacttcatttttttcttttaaatatttttaaatggacagatcaaaattatatgcatttatcatatacaccatgatgtttgaaagtatgtatatacattgtggaatatttaaagtataatctggagttagggtgcaagggatgwaaactacaaacccagaaacgatgctgctaatcgttatactagctccttaattatgttggtgagtatgtgtgggctgtagaaactgtagagttggtgtctagctctttgcttccataacaacaatgacaaaggtaatcatacatagccaagactacactgggcacaaatgttcagcagatgggcctgttccaacawagtaaccaatagtctatttcacatgggatactggcttggaaacctaactctgcagcaagagatgattgtatatattcaaatatcttccaatccatgaattagtcaacattagattataccacctggggctattctgtatttattaccagagctccaaattgttggttttctggtaacactgaatcactcccaatgccaagtctcaaaaaagaaaaaaattaaatcaaattttaaacatatttgggatataaaataagttttgacatatttttagctggaaggtttacacattcataaacacatatttatgaatatgtacagag

SEQ ID NO: 285706 - DNA, 530 bp, Homo sapiens
caactggttattacaccaagmaaatcacacagatcacttaacagcatgtctgtctcagtcagttggaaagcaacttcatattctgtggattattccataagccagcatagttatgctacacatttttagatgctgtttaaaatagtttactaagcaaaggaatatagatggcagttccttctcacgggtcaaattttctgtaacgttatccacccatttctgcactgagcagtctctaaacctttttgcaatatgcatatgaaatgaatcattattgtaatgaaattcaaaacaccctagagtaatggagaggaaagggaaaataaaacaaaacctgctgccctggtactgaagacagccaaaagaaggggagtgcttcagtgaacaagtggttttgtgatttcatagtgttgctgcaggagctctgctggggcgattggtggagttaggtggtctctactggatgctcaggagtggcattaagtgcctggtgaggagcattaaggctttggtgtccagaatagtacata

SEQ ID NO: 285707 - DNA, 530 bp, Homo sapiens
caactggttattacaccaagaaaatcacacagatcacttaacagcatgtctgtctcagtcagttggaaagcaacttcatattctgtggattattccataagccagcatagttaygctacacatttttagatgctgtttaaaatagtttactaagcaaaggaatatagatggcagttccttctcacgggtcaaattttctgtaacgttatccacccatttctgcactgagcagtctctaaacctttttgcaatatgcatatgaaatgaatcattattgtaatgaaattcaaaacaccctagagtaatggagaggaaagggaaaataaaacaaaacctgctgccctggtactgaagacagccaaaagaaggggagtgcttcagtgaacaagtggttttgtgatttcatagtgttgctgcaggagctctgctggggcgattggtggagttaggtggtctctactggatgctcaggagtggcattaagtgcctggtgaggagcattaaggctttggtgtccagaatagtacata

SEQ ID NO: 285708 - DNA, 562 bp, Homo sapiens
ttaaataaccaatgaaatggatagtacctgccacatttttcagttgaataagattctccattgtctttaagaaatatgcagtacaaaatgtgtaattataataacatttattacatctctgtttcttaaaatccctaaggtaaaataggtgaataatctyaatttccatttttatgaaaaaatatgcatagtgtttatcaatgaaattgttcattcttttaactatcctgtatgaatcaacagccttatatgtgcctgactgttcacaacatattatattgcagaggcagtttaaaaggaattcattattttgagaagttttgtctctgtgatattttcatgttcaaatcatttattagaactgtattgatgaaactttgattaatactaactagaattattttttaagggcagactaaaacaaataataaacagctctaagaaaaaaaaaacctgattaataaattctatgtacagttgacctgtttagaagttgtattgccatttagttatatttcctcccacacttaaagacactttagttaaaaacaaacaaacaaac

SEQ ID NO: 285709 - DNA, 562 bp, Homo sapiens
ttaaataaccaatgaaatggatagtacctgccacatttttcagttgaataagattctccattgtctttaagaaatatgcagtacaaaatgtgtaattataataacatttattacatctctgtttcttaaaatccctaaggtaaaataggtgaataatcttaatttccatttttatgaraaaatatgcatagtgtttatcaatgaaattgttcattcttttaactatcctgtatgaatcaacagccttatatgtgcctgactgttcacaacatattatattgcagaggcagtttaaaaggaattcattattttgagaagttttgtctctgtgatattttcatgttcaaatcatttattagaactgtattgatgaaactttgattaatactaactagaattattttttaagggcagactaaaacaaataataaacagctctaagaaaaaaaaaacctgattaataaattctatgtacagttgacctgtttagaagttgtattgccatttagttatatttcctcccacacttaaagacactttagttaaaaacaaacaaacaaac

SEQ ID NO: 285710 - DNA, 562 bp, Homo sapiens
ttaaataaccaatgaaatggatagtacctgccacatttttcagttgaataagattctccattgtctttaagaaatatgcagtacaaaatgtgtaattataataacatttattacatctctgtttcttaaaatccctaaggtaaaataggtgaataatcttaatttccatttttatgaaaaaatatgcatagtgtttatcaatgaaattgttcattcttttaactatcctgtatgaatcaacagccttatatgtgcctgactgttcacaacatattatattgcagaggcagtttaaaaggaattcattattttgagaagttttgtctctgtgatattttcatgttcaaatcatttattagamctgtattgatgaaactttgattaatactaactagaattattttttaagggcagactaaaacaaataataaacagctctaagaaaaaaaaaacctgattaataaattctatgtacagttgacctgtttagaagttgtattgccatttagttatatttcctcccacacttaaagacactttagttaaaaacaaacaaacaaac

SEQ ID NO: 285711 - DNA, 607 bp, Homo sapiens
agattttcaaaaagccacaagattactctccacttgcttaataatatatcttaacctttctgcaatttgaagaacgtacatagattaatattttttaaataaccaaaaactgatagttaatcctgaacattcagaaattctataacattttctttcttgaattcacatattagtttgtgtagagttctgcttgattttgaaagcagattttccccttaatcctcaaccaaataaaatgataaattctgacactctggtaatttgcataacaattgrctacaaagagtaattcattaatattcaatgaagttctaatttgcacaatgcctgcagcaatatgtaaacttcattttgctttaagatggaaatttgttacagggcaaatatcagtaagtgtaattttattaatcagtctcaatgagcatttgattctctgaccttggcaatgcctatacttttgtcctagaacacacaggaaaaaaggaagttaaggtaaccttattttctattggtcactacttacattttacacgtagttctaggtattccagcacagtacagtgaaaggagctttcattattcaaaataatgttattgcttaaccttc

SEQ ID NO: 285712 - DNA, 602 bp, Homo sapiens
agaaacattgctttatgtttgctttttctcaatatcatctcaaactaaaacacagttacacttttatttaatttttcaaaccagagaagccaactartttgaggaagctgtcactatcagcagaaaactggggtactgcttaaatgactggtcctaattgaacaaaagagactaattaggtataagtaacaccactgcattaatgagaatatccccttgacatgttgttccatggtaggcttccatgttttacagacaagggtctgcaactttgctttttccccagcctctgtacacatgacaaaaatgtcacaatgctgtatataaatggagctggctgaataaataagctttcttcacacacattcaaatggatcaggaatgggcatgacatataagtgctagccaactgcagatgatagccacaagtgccccctaagccaagggatagtgaaaactggtagaaaatgcttccaaacaccgtgctaatttttacggaaatatcatccttaagcaaaatcctaaactatctattttgttgaaaaatcatgggttaacttgctaatattgcctataaaatggaggaggcagcgtgcagacag

SEQ ID NO: 285713 - DNA, 602 bp, Homo sapiens
agaaacattgctttatgtttgctttttctcaatatcatctcaaactaaaacacagttacacttttatttaatttttcaaaccagagaagccaactaatttgaggaagctgtcactatcagcagaaaactggggtactgcttaaatgactggtcctaattgaacaaaagagactaattaggtataagtaacaccactgcattaatgagaatatccccttgacatgttgttccatggtaggcttccatgttttacagacaagggtctgcaactttgctttttccccagcctctgtacacatgacaaaaatgtcacaatgctgtatataaatggagctggctgaataaataagctttcttcacacacattcaaatggatcaggaatgggcatgacatataagtgctagccaactgcagatgatagccacaagtgccccctaagccaagggatagtgaaaactggtagaaaatgcttccaaacaccgtgctaatttttayggaaatatcatccttaagcaaaatcctaaactatctattttgttgaaaaatcatgggttaacttgctaatattgcctataaaatggaggaggcagcgtgcagacag

SEQ ID NO: 285714 - DNA, 622 bp, Homo sapiens
tatatttatatacatatctttatatatatatataagcatatattacatgtgcagtattatgaaattttaaaattggcagcaaaagtcaattttaatttctgtttgttctggttcacaaagaatcttaccatgatgtaatccaatcaactaaggtgaaaatattcttcactccttgattcattgttgaaaataagctatttctaaattatttttgtgattatatttaacattttcactatcaatacactatagtaactactcaggttgcttgaatttagtatcgaatctgttttggcacactatccttaagtgcaacacctacatatatatgtatgagtgtgtacatatatttattaggcattcacatgtatagccaatttaatgatcagattttttcaaaggtaatctgtagtaatataacaaattaccacagatttggtgggttttyttggcttggtttttgttgttgttgttttgagatggagtttaactcttgtcactcatgctggagtgcaatggcaccatcttgactcactgaaacctctgccatctgggtccgggtgattctcctgcgtcagcttccggagtagttgggattacaggcatgcgccaccaagcccag

SEQ ID NO: 285715 - DNA, 566 bp, Homo sapiens
ttctaattctgtttcagttattaatcacatttaaatagagtaaattcaactctataaaacgtcatacggcatacatttattataaattccagttctgttgaaaacaaactatgcaatttttatttataatcattaattttttaatcttgaattgaattttgttcctctcagctagcaatgttccctggttgtgctgttattatgtcaaagagaaatttttttaggtagttgattagttactgtcatcctttaactctgaaaactgtagtggcctcctatgttttggtctgtacccaatacaggcacacagctgtaggaaaagacaaagaatgtatttgaaatcatttcccaatgttatgtyccctaaaaaaatgatttataaggaattatgcagacattttggcacttttttttccacagtttttattacacttgtgacttgtaattctataaacagtgttgtcccagatgctgagtgtcatcttcttatactagggtaaaatccatacttaaatgctccccactaattgtaaccccaaaatactaacctggtgactcacattata

SEQ ID NO: 285716 - DNA, 566 bp, Homo sapiens
ttctaattctgtttcagttattaatcacatttaaatagagtaaattcaactctataaaacgtcatacggcatacatttattataaattccagttctgttgaaaacaaactatgcaatttttatttataatcattaattttttaatcttgaattgaattttgttcctctcagctagcaatgttccctggttgtgctgttattatgtcaaagagaaatttttttaggtagttgattagttactgtcatcctttaactctgaaaactgtagtggcctcctatgttttggtctgtacccaatacaggcacacagctgtaggaaaagacaaagaatgtatttgaaatcatttcccaatgttatgtcccctaaaaaaatgatttataaggaattatgcagacattttggcacttttttttccacagtttttattacacttgtgacttgtaattctataaacagtgttgtcccagatgctgagtgtcatcttcttatactagggtaaaatccatacttaaatgctccccactaattgyaaccccaaaatactaacctggtgactcacattata

SEQ ID NO: 285717 - DNA, 654 bp, Homo sapiens
aattgtactctttaataacagtggtcccatcacagcagattgggagatttgtactttgtcagcactcagcacatattaaggaaacaatcaatcaagacattattacaacacagcaatccgtaatccattattcatttctgaaatactagttgtaaggcaaaggttggagctgattactcatcttatgttatcattttgtagtgaatgagagaaatgacatctttctcatggaccaaattcacattattgttaaatacaatagaatcacaaggacatgatccaagggcacagacaagtcatcttcccattagcattggtagcacaatgccaaacccacttttacaccttttataatttcctcatacttcgttacttatgaagtacaagaaaggggaatttagtgttacctaaattttcaaactctgtgtttagatttccatttagaaaggaatgcattcaggtcttgttatatgcaatasttatgttctataaagtcacctcaagcactttatttgtgaattctgaaacgctgctcctaggggagataaagatttgggttcctggaaaactctgattacatttccatatatcaatcaatacagacccttgttttatatacgtttctgtttaaagacaccttatttcacacatact

SEQ ID NO: 285718 - DNA, 523 bp, Homo sapiens
ttacatgttgaataggccctttatcaataaatttatttgtatttctgttttaaagagcttgtgaatctttataatacagacgagaattttgcaattcagtcagaggagattatttttctctaataggttgaaatatttctagatactaacgcttttgttgcagaattcaaaggaaaattgtctaagggcagcatgtattttagaagagtttctcacatgctttcctgtcttttgttatactttatattttcaagttctttgaaagtaggtacattgcctcatattcaaaaggcgttagaagarcctaaactagatttctattggtttaattcaacatttctttgaaaatatgtaagttgtcagaggcagaatttcctcaaggaggtccgaaatttcagttcagaaaagactagcttgtctgtaagtacactatttcaaagcatttaacactgtgatataacttgagaagaacaggagactccatgtaagatatctgaaagatcagctgggcgtattttcaaac

SEQ ID NO: 285719 - DNA, 597 bp, Homo sapiens
tgcatgtgccaggtggcttcttgtacataaagctgtatttctgaagctgatataatattttttccaaattccttatgccagaatgttggctaccttatgccttgtgcttaggacccaattgttccatgtttttgtgaaattttaattatggttaatttaaattgtgrtagtctgctaaaaatagaaaagaaatgtattacgtttgagcttgttgttgttcttttttctaaaaatcaacacatagtccaagatgtctttgcttttctaaaaatactaccataatgttagcacaacatgtctatcagggtctcttttcagtgatttatgcaactttttctcatttaatattgatgataattccatggggaaaattttataagtctcatttataattggaaaactgagaattgaggagataaatcaatttgcctaatgtatataggtagcaaaagttaaagagtccaaaatttgaacctagttcgagttgactgcacaactgatgttctttatcaaaactctatactgcctccttacctcaccgcaggtcgatttattatctgccagtttctgttttaggctttgatgttcattcaggga

SEQ ID NO: 285720 - DNA, 533 bp, Homo sapiens
ttttttcagtccaggtagctaaagcacaaaggaaggaaaataggtaaaaccatccttttctaaagaaaaatttcagatgtctcataaaatatttctgctaatagcctattgacccaaatttaggcatctggtaatacctaaatatragggatattggtaggtgtagtcttttacatctggtggcaatgtaccttgctaaacattatagtactatttgtaagagggaagacaagagaggctctggaggtaggtaaacagcatcctcaacatatttgtgataaatttctatgctaaataatttttatatggctattttttccttaatgaagttgatgtataatctaacttgtttatgaaggttttctcaattatttaatttcatcttaccattttgaattttgggatttattctgctacatttaacccttagttaaaattaaatcatgttcaaggatgtggcaatcattaaaatgaatttaaaagaaacaattatgtgactttgtatacagtttgataatactaaaggtatttta

SEQ ID NO: 285721 - DNA, 547 bp, Homo sapiens
agagcaagctggccacatgggaatctgaaagaatggcatttgagagaatggacctgtttctaagacaggtagcttctggttgcttaaagaatggcaacagcagagtcatgcagtcagcatttgcacctgggttgcttgtgttctttaatactctgcamagcctcatatgaccatgctttccaaagcaagaagcagatgctgatcctagtgaaatataaaaccatgtctttggaaatattttttaaaaaataaaattaggcaaaaaatagatttgcttccatcaacaaactttccttttactctgtaataagttttattgtctacagttaaggtatacagcgtgatgttatgggatgcataaagacagtaaagaggttactataatgaagtaatcatacttatgcatcatctcacatagatacccctttcttgtgtgcctagagcagctaaaacataattgtttacaatgaatcccatacacagtacaattttattacctataatcttcatgttgtatattagatctctagcttgattattctacata

SEQ ID NO: 285722 - DNA, 593 bp, Homo sapiens
tcatctcaaaaaaaaatagtcttattattttgaaaaatgatttaccatacgcttgctttgaatctytctgaatttaaatatgaactgattcattgtgtatataaattaaattttttttctctgagacttgtatcttaatgaatttggatattcacataatatcagctgactcaataacctggtatagtctatgtttcataatatcaaataaatacatttcaatatatacaacctagaaatgatctgtttaggattgagtcgagttagatggtagaataggaacttccagtgattgccattctcccaaccaaaacatcaatttgaacaactatacatgcacaaaactacctgacaagaggtaaggaaaccagctgggagattacagtgcctcgttgttgcataatgacaggaaaaaataaactgaaaagggcaagaatgacagtgttacattacctgtttaattcctccaccaacccaggaagtgcaatgcaaagaaatatatcataagcttgaggaaagatgggaagtgagcacaggattttgccttggtccttaacactgggcccaccacagtaaaacctagcaccaggcag

SEQ ID NO: 285723 - DNA, 593 bp, Homo sapiens
tcatctcaaaaaaaaatagtcttattattttgaaaaatgatttaccatacgcttgctttgaatctttctgaatttaaatatgaactgattcattgtgtatataaattaaattttttttctctgagacttgtatcttaatgaatttggatattcacataatatcagctgactcaataacctggtatagtctatgtttcataatatcaaataaatacatttcaatatatacaacctagaaatgatctgtttaggattgagtcgagttagatggtagaataggaacttccagtgattgccattctcccaacyaaaacatcaatttgaacaactatacatgcacaaaactacctgacaagaggtaaggaaaccagctgggagattacagtgcctcgttgttgcataatgacaggaaaaaataaactgaaaagggcaagaatgacagtgttacattacctgtttaattcctccaccaacccaggaagtgcaatgcaaagaaatatatcataagcttgaggaaagatgggaagtgagcacaggattttgccttggtccttaacactgggcccaccacagtaaaacctagcaccaggcag

SEQ ID NO: 285724 - DNA, 1180 bp, Homo sapiens
tcatctcaaaaaaaaatagtcttattattttgaaaaatgatttaccatacgcttgctttgaatctttctgaatttaaatatgaactgattcattgtgtatataaattaaattttttttctctgagacttgtatcttaatgaatttggatattcacataatatcagctgactcaataacctggtatagtctatgtttcataatatcaaataaatacatttcaatatatacaacctagaaatgatctgtttaggattgagtcgagttagatggtagaataggaacttccagtgattgccattctcccaaccraaacatcaatttgaacaactatacatgcacaaaactacctgacaagaggtaaggaaaccagctgggagattacagtgcctcgttgttgcataatgacaggaaaaaataaactgaaaagggcaagaatgacagtgttacattacctgtttaattcctccaccaacccaggaagtgcaatgcaaagaaatatatcataagcttgaggaaagatgggaagtgagcacaggattttgccttggtccttaacactgggcccaccacagtaaaacctagcaccaggcagwttggagtacctttacttaattaaataaattaggctttaagtaaaaaaaactgtaaaatgaaacaaaggtcattatgtaattataaagggtccaattcagcaagaagatataacaattgtaaatatatacgtacccaacttcagagcagctacatatgtaaagtaaatattgatagcagtaaagatcagagaaaaagataaaatagagattaaaaaatagaaaagattaatgaaacaaagagttggctttttgaggaggtcaactaaattgacaaatctttaactacactaagaaaaaaaagatgatwcatatacataaaatcagagaagaaaagggagatattataattaatgccacagaaatacacaaagttttgtaagagattattatgaacaattacctgccaacaaattggataagcaaaaagaaatggataaattcttgaagacatataacctacaaagattgagttatgaagaaatagaaaatctaaatagatcagtaaggagtaagggggactgaatcagtagtaaaaagtcttccatcagagaaaagctcagaatttgacggcatcactgttgaattc

SEQ ID NO: 285725 - DNA, 577 bp, Homo sapiens
agttgttgaactatttcagttattcaatcataaaaaaytggaagatcttgctctattatacatttgctcagaaattggtatattttcattttctgtgcttttatgtctacatcaaactttggtttaattgataataagatgattaatgctatctcatgcatatgaagatatcgaataattacacctgaatattttatttctatagtagtcagaagttttcccttttttaaggggtgaagtagtaattttcctcatacgttttatatatgtttggctctatatcgtatgtgacatgcttgaattctaatcctacattctgaaaagtagattctctagtctgttttttaccatttacatatttcaggaatttttcaatttttaatgaggacacatagaatttggttgaataaataaatgaaagtaaaaacccaatgatggtaaattaagtaaagctggacctaaattctcagagctatgttactggtggaactaatttaaactaagcccttagcaagatacctaaaaataatttagtcacctaaagaatacaataagagtaaagtgaaacaaagaaatt

SEQ ID NO: 285726 - DNA, 577 bp, Homo sapiens
agttgttgaactatttcagttattcaatcataaaaaactggaagatcttgctctattatacatttgctcagaaattggtatattttcattttctgtgcttttatrtctacatcaaactttggtttaattgataataagatgattaatgctatctcatgcatatgaagatatcgaataattacacctgaatattttatttctatagtagtcagaagttttcccttttttaaggggtgaagtagtaattttcctcatacgttttatatatgtttggctctatatcgtatgtgacatgcttgaattctaatcctacattctgaaaagtagattctctagtctgttttttaccatttacatatttcaggaatttttcaatttttaatgaggacacatagaatttggttgaataaataaatgaaagtaaaaacccaatgatggtaaattaagtaaagctggacctaaattctcagagctatgttactggtggaactaatttaaactaagcccttagcaagatacctaaaaataatttagtcacctaaagaatacaataagagtaaagtgaaacaaagaaatt

SEQ ID NO: 285727 - DNA, 592 bp, Homo sapiens
acatttgctcagaaattggtatattttcattttctgtgcttttatgtctacatcaaactttggtttaattgataataagatgattaatgctatctcatgcatatgaagatatcgaataattacacctgaatattttatttctatagtagtcagaagttttcccttttttaaggggtgaagtagtaattttcctcataygttttatatatgtttggctctatatcgtatgtgacatgcttgaattctaatcctacattctgaaaagtagattctctagtctgttttttaccatttacatatttcaggaatttttcaatttttaatgaggacacatagaatttggttgaataaataaatgaaagtaaaaacccaatgatggtaaattaagtaaagctggacctaaattctcagagctatgttactggtggaactaatttaaactaagcccttagcaagatacctaaaaataatttagtcacctaaagaatacaataagagtaaagtgaaacaaagaaatttatttcataaagtaatggtccaaatgagctattccaggttaatgaatggctgtcattcatgaagtcattcaatc

SEQ ID NO: 285728 - DNA, 636 bp, Homo sapiens
ttaagtaaagctggacctaaattctcagagctatgttactggtggaactaatttaaactaagcccttagcaagatacctaaaaataatttagtcacctaaagaatacaataagagtaaagtgaaacaaagaaatttatttcataaagtaatggtccaaatgagctattccaggttaatgaatggctgtcattcatgaagtcattcaatccaagggaagggcagttctaccrtcttcaacaagaattttcaaagttgctctagaagacagagggacagagcaccgaagaccgcaaatgcaagttggctcagaaatcaaccacatgaggctggggtgttggtggctcatgcctgtaatcccagcactttgggaggctgaggtgggtggatcacttgatgtcaggagttcgagactaggctgcccaacatggtgaaaccccatctctactaaaaatacaaaaattagtagagcatgatggtgcccacctgtagtcccagctacttgggaggctgaggcaggagaattgcttgaacccgggaggcagaggttgcagtgagccaagattgcagccactgcactccagcctgggtgatggagctaggactctgtctcaaaaaaattataataataaaataaa

SEQ ID NO: 285729 - DNA, 636 bp, Homo sapiens
ttaagtaaagctggacctaaattctcagagctatgttactggtggaactaatttaaactaagcccttagcaagatacctaaaaataatttagtcacctaaagaatacaataagagtaaagtgaaacaaagaaatttatttcataaagtaatggtccaaatgagctattccaggttaatgaatggctgtcattcatgaagtcattcaatccaagggaagggcagttctaccgtcttcaacaagaattttcaaagtygctctagaagacagagggacagagcaccgaagaccgcaaatgcaagttggctcagaaatcaaccacatgaggctggggtgttggtggctcatgcctgtaatcccagcactttgggaggctgaggtgggtggatcacttgatgtcaggagttcgagactaggctgcccaacatggtgaaaccccatctctactaaaaatacaaaaattagtagagcatgatggtgcccacctgtagtcccagctacttgggaggctgaggcaggagaattgcttgaacccgggaggcagaggttgcagtgagccaagattgcagccactgcactccagcctgggtgatggagctaggactctgtctcaaaaaaattataataataaaataaa

SEQ ID NO: 285730 - DNA, 522 bp, Homo sapiens
atcctacaaaaggctttgttgacctcactgcaaagattatcctacaaaagactttgttgacctcactgataccaacatcaaagttatggatccatttgccaatatctccttgcagtctttaattgtaaacagtggtgtgtcatctattgaaagtctttaaactatttacattttcagacttratagtcttctatgctaatttacttaataaattaactcagtttacaaaataccaattcatcctaatattattttatttcaaacgattgatttttaattgtactgatatgctggaatttctttaacatgtttgtattcaccttatattcctcatgattttaaaaatgtaattctgaatttaaaagcttttttacctttggcattgaattcactgctttgctcacaataggtacttaattacaagtttgtagatctaaatctaatttcagactatttcaaacagtagccatatcttcactctcttcagaaatgtgattgtttacttggggccttcagtgggtc

SEQ ID NO: 285731 - DNA, 623 bp, Homo sapiens
aaaggaataatatctgcctcataagaatattgtgaggatcaaattaaatttattctgttcccatgattataatgaatatgatcttttatactgcagctctaggctcagcaaaattttggttctatggattaaagtgattttaaaattttaacattgcagttttcagggttatttgaatattggctttggatagaggaagtaaaaagtaaatatccccaaagtgcattacaagctgagtaatgtgagataagtaatttatctcaaattcattccacattgatataattcatataattttttccctgttgataagaggtttcttcacacaaaaataaattctagagttatattcattgcatataaatttcaaccttagactattaacattatgtatgacacatgtatttataaatatatagtatgcatgtaatatctttcctggtgaagagctcttacaaataagaaaaataattggataccagtatgatgtattattttgatctaggaaygactaaagttttaattttagtttcaatacaaatgctagctgtatttctatttataccagtttcatcttgttgacatatttactacattgttatgaagttagtcaatcagcaact

SEQ ID NO: 285732 - DNA, 572 bp, Homo sapiens
gagaacatgcagtgtttggttttctgttcctgatacacacctcttagaacaaagagaataaaagtcaagaaataatttaatgaaataaaaaaatgaaataaaaaaagagaggttcagaaagaaatggctaacaacaatatgctaccagaaattagaagaaaatgaatgattaagttaatttcattaataatcaatgcatttctaactaacagaagaatatgaaggttcagtattaatgttattacaacaaattttgtgttcacaatatttattcatccccatgtgtgtttttgtcacttgatttgattaggtaccttatgtttaaataaatcatggcatatttttgtcttatacctagtacttaaagaagtatagtatcatttctttagaatgatttagcagtgttgagttttggatcaacgcactgaaaygtttttacatgtatgactgagatgaaagtgagaagacagatgatgatgagaaatagagagtagtgtgctatagagagcctgctctgctcaccttatccctccagtcaggatcctctgagtcagttttcttgattgaatgac

SEQ ID NO: 285733 - DNA, 568 bp, Homo sapiens
agttttcttgattgaatgacattacctcattagtatttattttatggatttttcctgtaacacattttttgttaagataaaattttactgctttacattaaaaaataattttcattaacatataaaaattgtgcatatttatggggtccatagtgatgttttgatatgtatatagtgattagatcaagcatttccctcatctcaaacatgatttctctgtcttgggttcatttgatacgcctcttctagctatttgaaatgatttattataytgttaactgcagtcattttacagtgggatagaacactaaaacttattattcctatctagctataacgttgtgttatgttgagaatcaactaaaaaattttggggcatacagatatgaaaatgtttaaggcaaaaacttacggtacttctaagtaaatgacaaatattgacataatataaattatttcaatagattaggatacatttcatacaaaataaagctatgaaggatttacctaactaaacctacaaatttaaatcctaatgaaaaacaaacactatctctttttagaagac

SEQ ID NO: 285734 - DNA, 1190 bp, Homo sapiens
agttttcttgattgaatgacattacctcattagtatttattttatggatttttcctgtaacacattttttgttaagataaaattttactgctttacattaaaaaataattttcattaacatataaaaattgtgcatatttatggggtccatagtgatgttttgatatgtatatagtgattagatcaagcatttccctcatctcaaacatgatttctctgtcttgggttcatttgatacgcctcttctagctatttgaaatgatttattatactgttaactgcagtcattttacagtgggatagaacactaaaacttattattcctatctagctataacgttgtgttatgttgagaatcaactaaaaaattttggggcatacagatatgaaaatgtttaagrcaaaaacttacggtacttctaagtaaatgacaaatattgacataatataaattatttcaatagattaggatacatttcatacaaaataaagctatgaaggatttacctaactaaacctacaaatttaaatcctaatgaaaaacaaacactatctctttttagaagacwccagaggactccaggaaataaagccaaattgtgctcttttgacatggggccataaacgtaatggaatgatttttcccatgaaagatctgagcaaaataacctctactgatttatttgactgagtcacatccagctttccttccttcttaggtgctgttgcttcagaaagtatcatcacaatttcattatctgtctaatactgtgtaaacagataccttatttcaaatggacacaaggaggtagtggagtagagagtaagatcatgggctcttgaaccagactcttggattctaaacttgattcagctggttttagaatgttgggtgagtaacttactttttctttgcctcagtttctttatctaaaaagggagagagggtagataattacctcccwtggccatggagtgtttttgtgaggattaaatttatttatgtaaagtgcatggcagatatgatgatgatgatgatgatgatgatgatgattactgaggtaacaaggactggctgaacattctcttgtggcattcagggaacactgaaggtgaattctgcctagcattaacatttgtgggtggatgaatccttgcacatatagtcagataaatgtttaataagtggt

SEQ ID NO: 285735 - DNA, 1051 bp, Homo sapiens
aaataaatgtgaacagtcagaataattctctataattgaattcttccctgtaattccccacctccccccactcctaccttatcctagttttcstctttgagtagatatagaccttttaaccaggaaaagagagaagagaggtagacgaggcatgcaagagagacctctctcactgtgcctgttccctgctcttcttaatatccatctcaagttgagcgttggggttgtgggagtataaccccctccaccccatttgatttagaaatatgacagtagagaagatttgtgtctggcatcctgggtgaggtttagggagttgtcagatctcatggaggaaatcccggggccatgatagtactgctggatagtagaaacagcactgaggtgtgtctaggctggggcaagtcctgaagatctgtgcacattggaactgtagagcatccaaagttcatgtgactccttccagtgggcacagacacgagctgagagtgtacacttgaaacctcaaaggttcttccagccagcwaaataaatgtgaacagtcagaataattctctataattgaattcttccctgtaattccccacctccccccactcctaccttatcctagttttcgtctttgagtagatatagaccttttaaccaggaaaagagagaagagaggtagacgaggcatgcaagagagacctctctcactgtgcctgttccctgctcttcttaatatccatctcaagttgagcgttggggttgtgggagtataaccccctccaccccatttgatttagaaatatgacagtagagaagatttgtgtctggcatcctgggtgaggtttagggagwtgtcagatctcatggaggaaatcccggggccatgatagtactgctggatagtagaaacagcactgaggtgtgtctaggctggggcaagtcctgaagatctgtgcacattggaactgtagagcatccaaagttcatgtgactccttccagtgggcacagacacgagctgagagtgtacacttgaaacctcaaaggttcttccagccagc

SEQ ID NO: 285736 - DNA, 551 bp, Homo sapiens
gtcacaggttatgagtgttagggcatggagatatctttctgggtccaccattcaacgtaccacactactttactgtaaaactggaagcaaattgtatgtaatatagcttgtaatggcccgagttagctgagaatttttctttaccagaatatttgtggagcctttaatcaagaatggctatggcagcacttggagacgtccttggtctttccgtacctgtgtttttttcttctaagttgtctctgtgccattctctgatgtgccttgtccatagtcatgccccatgccaaaccatgcatcacactggttttgttgctttttaatacagaggytgttgcacaatttgagtgagtcctcagtttctgtttgcattcatttaaaggtcagttttacagaacagaagctgtctgctctaaatttgacaagtatgcttccattatggtagctatttctactcttacttgctatcattgctatcattcatatccatataaatatatgccctccaactctgttatttttttcaaatatgacatcatattaataatttc

SEQ ID NO: 285737 - DNA, 587 bp, Homo sapiens
atgtggttttactgggatcttgctattgaacaatttcttgcctattgactgacttgcaggtagcactttgaatttacacacttgaatttttatgactaaaatttgtaaggcgtttcctctgacagatcttttttatcctatggacaagtatttcctaggattccaactaggtaactagataaccctgaaatggttgcagaggttgaattttcaaggaccggccatagactagaacctacctaggcttggagatctgctatcagaaccaggcactttytaaaatagtttacagcccttacctttaatgtttggccctgatttaggtagttttaagtattttctgtctaaagtaatagtttggccaatttggaggggcattcacattcttacagttctggattatatcacatcagagttggaaaagcaggtgctgtcccaagcccatcctcattcagcaaggcaattgttgttttctgttgaaaaatgtacaaaagaagatgccagtggatttgcatcattgaaatgaaagaaccaagacagatgaaaaagaggctcagaggagctatgtcctatgtgtttaagaaaaa

SEQ ID NO: 285738 - DNA, 587 bp, Homo sapiens
atgtggttttactgggatcttgctattgaacaatttcttgcctattgactgacttgcaggtagcactttgaatttacacacttgaatttttatgactaaaatttgtaaggcgtttcctctgacagatcttttttatcctatggacaagtatttcctaggattccaactaggtaactagataaccctgaaatggttgcagaggttgaattttcaaggaccggccatagactagaacctacctaggcttggagatctgctatcagaaccaggcactttctaaaatagtttacagcccttacctttaatgttyggccctgatttaggtagttttaagtattttctgtctaaagtaatagtttggccaatttggaggggcattcacattcttacagttctggattatatcacatcagagttggaaaagcaggtgctgtcccaagcccatcctcattcagcaaggcaattgttgttttctgttgaaaaatgtacaaaagaagatgccagtggatttgcatcattgaaatgaaagaaccaagacagatgaaaaagaggctcagaggagctatgtcctatgtgtttaagaaaaa

SEQ ID NO: 285739 - DNA, 587 bp, Homo sapiens
atgtggttttactgggatcttgctattgaacaatttcttgcctattgactgacttgcaggtagcactttgaatttacacacttgaatttttatgactaaaatttgtaaggcgtttcctctgacagatcttttttatcctatggacaagtatttcctaggattccaactaggtaactagataaccctgaaatggttgcagaggttgaattttcaaggaccggccatagactagaacctacctaggcttggagatctgctatcagaaccaggcactttctaaaatagtttacagcccttacctttaatgtttrgccctgatttaggtagttttaagtattttctgtctaaagtaatagtttggccaatttggaggggcattcacattcttacagttctggattatatcacatcagagttggaaaagcaggtgctgtcccaagcccatcctcattcagcaaggcaattgttgttttctgttgaaaaatgtacaaaagaagatgccagtggatttgcatcattgaaatgaaagaaccaagacagatgaaaaagaggctcagaggagctatgtcctatgtgtttaagaaaaa

SEQ ID NO: 285740 - DNA, 587 bp, Homo sapiens
atgtggttttactgggatcttgctattgaacaatttcttgcctattgactgacttgcaggtagcactttgaatttacacacttgaatttttatgactaaaatttgtaaggcgtttcctctgacagatcttttttatcctatggacaagtatttcctaggattccaactaggtaactagataaccctgaaatggttgcagaggttgaattttcaaggaccggccatagactagaacctacctaggcttggagatctgctatcagaaccaggcactttctaaaatagtttacagcccttacctttaatgtttggccctgatttaggtagttttaagtattttckgtctaaagtaatagtttggccaatttggaggggcattcacattcttacagttctggattatatcacatcagagttggaaaagcaggtgctgtcccaagcccatcctcattcagcaaggcaattgttgttttctgttgaaaaatgtacaaaagaagatgccagtggatttgcatcattgaaatgaaagaaccaagacagatgaaaaagaggctcagaggagctatgtcctatgtgtttaagaaaaa

SEQ ID NO: 285741 - DNA, 480 bp, Homo sapiens
caatttgtattatcctatgtttggaagctctgaattattgagctaaggcaaggtttatggcctttatgtttgctgtctagcaaagagtattgaataatgaactacatttttaatcaaakatttccttttactctaatcctttatttcccagtggccctaacctgatttattgtgttgagtgctctacgaggagtctatgtaaccttggtgttctcctgagagaagatgtatattgactcaggaagtagcaaagaaaataatagttttgactcctggaagtacttaagttttaggctatcagtccatttatctatccattcatctctccatcaaacatatcattcccccacatacaaaacattaaaggagctacaaagataaagatgatttagtccccatcactgtaatctcttgataggaacagacagaaacagaatgaactaaagctgcaaaagagctccaggaatagtgccagggatg

SEQ ID NO: 285742 - DNA, 525 bp, Homo sapiens
tttgaattttggagcacttcagatttttgaattagagatgcttgacctgcataaggaatcataaggtatggaacttttagttttagtaaccaaagctttggcaggaaggcattttcaaattgatgtatgttgctggccactattaacattatcaatgaaggtcaagtttgttgttctgttttaaacaacttttgtctcattatccagtgtcctgattagaaggacccagagatctaagtaattaatcatatgggcggaaatatggcattctggaaccaaagcatccccccagagcatccatggggctaggagccataaactgtagcatggctgacctaaagccaacaggtggtgatggctgcaaacacctggaagaaaagaggggaaatacagaagatgggggataaaggaamaataaagccaaatgtccagtgatgaggggactgagggaataaatgatggtatattcttatgttgaaaatacctagtagcctgtaagaattatattttaaatgtttatattca

SEQ ID NO: 285743 - DNA, 562 bp, Homo sapiens
agcaaacaaacttaggattatataactacaractttccggggattgatcaaataaggcaactgtataactgtaaccagtgaaatattttctctgcgctacttccatgttcatcctataaaagcttcttcccccttgtcttcccttggtggagtttctgaaccacttttggtttggagttcccggattcatgaatcactatttattcatataaactctttaaaaattatattgtgcctgagtttaccctcttaatactctttagctcaatttaagaatatggtatgctatagaatgcaaatgcctactcctcctggatgtcttctctgttaccctttcttctacaggtaaggttctgatgataaacacatggcagttgagccacaaatcccctcacttccacttctggcagacattactaattgatcacagctccctttttcagtgaaactcaaggaccggagaatcttcaatacagtattccaaagcagtcagtctcaacaaattgactatagttaacagctgacatctatttgaatctctgctatagtaccttgtttatga

SEQ ID NO: 285744 - DNA, 562 bp, Homo sapiens
agcaaacaaacttaggattatataactacaaactttccggggaytgatcaaataaggcaactgtataactgtaaccagtgaaatattttctctgcgctacttccatgttcatcctataaaagcttcttcccccttgtcttcccttggtggagtttctgaaccacttttggtttggagttcccggattcatgaatcactatttattcatataaactctttaaaaattatattgtgcctgagtttaccctcttaatactctttagctcaatttaagaatatggtatgctatagaatgcaaatgcctactcctcctggatgtcttctctgttaccctttcttctacaggtaaggttctgatgataaacacatggcagttgagccacaaatcccctcacttccacttctggcagacattactaattgatcacagctccctttttcagtgaaactcaaggaccggagaatcttcaatacagtattccaaagcagtcagtctcaacaaattgactatagttaacagctgacatctatttgaatctctgctatagtaccttgtttatga

SEQ ID NO: 285745 - DNA, 562 bp, Homo sapiens
agcaaacaaacttaggattatataactacaaactttccggggattgatcaaataaggcaactgtataactgtaaccagtgaaatattttctctgcgctacttccatgttcatcctrtaaaagcttcttcccccttgtcttcccttggtggagtttctgaaccacttttggtttggagttcccggattcatgaatcactatttattcatataaactctttaaaaattatattgtgcctgagtttaccctcttaatactctttagctcaatttaagaatatggtatgctatagaatgcaaatgcctactcctcctggatgtcttctctgttaccctttcttctacaggtaaggttctgatgataaacacatggcagttgagccacaaatcccctcacttccacttctggcagacattactaattgatcacagctccctttttcagtgaaactcaaggaccggagaatcttcaatacagtattccaaagcagtcagtctcaacaaattgactatagttaacagctgacatctatttgaatctctgctatagtaccttgtttatga

SEQ ID NO: 285746 - DNA, 562 bp, Homo sapiens
agcaaacaaacttaggattatataactacaaactttccggggattgatcaaataaggcaactgtataactgtaaccagtgaaatattttctctgcgctacttccatgttcatcctataaaagcttcttcccccttgtcttcccttggtggagtttctgaaccacttttggtttggagttcccggattcatgaatcactatttattcatataaactctttaaaaattatattgtgcctgagtttaccctcttaatactctttagctcaatttaagaatatgrtatgctatagaatgcaaatgcctactcctcctggatgtcttctctgttaccctttcttctacaggtaaggttctgatgataaacacatggcagttgagccacaaatcccctcacttccacttctggcagacattactaattgatcacagctccctttttcagtgaaactcaaggaccggagaatcttcaatacagtattccaaagcagtcagtctcaacaaattgactatagttaacagctgacatctatttgaatctctgctatagtaccttgtttatga

SEQ ID NO: 285747 - DNA, 593 bp, Homo sapiens
tttttcccttatgtttggttgttttaaactttataaaaagggtatcatgcttacacaatatttaggaacttttttcacttaatatattgccatattgttgatgttgctgcaggtcatttagtttgactgccatatttcattccatttatgaatataccacagtttatgcatccactcgccaattgatgagcacctgggctgtctacaggcttttgtcattgtgagcagcagtgctctgaacacttgtgtgcatctctcctgagtgtgtgtaagcttttcaatggggtagaactgcygggtcagagagtataggaataatgaataatggatatggagaggggataacgggtttggataatgccaaactcgaatccaatgggatggcaccaatttgtactcctaccagtagcgaatatgaaatcctgtggttctctatcctttcccatacgtggcattgtcagccttttttacatttgggcccctcaagtatctataaaatggtatctcatctaatcttgatttgtattttcctggtcactaataatactaaaaatttcttcatgcatctgttgcatacatgtgtttatctcttc

SEQ ID NO: 285748 - DNA, 622 bp, Homo sapiens
gctccaaattatacagattatatagcacaattcataatagtgatgtgtaaatgattgaagtttgggagacattaaccatgttctcataaatagtataaatttatattgaatgaatgagttcagttattcattcagtaattcaattaacatatgttgcaaatgattctctcagagtttctatgtttgagaccccagctggatcctctagaaatgtttgctaaaactatttgaagaaactcatctaagaggggtgtgtatgtgtgtgtgtgtgtgtgtctgtgaactgtgggtatgtatagaagatacaaaagtagtagaagagaagcaaaggctatatgakagctaggtgaaaccttaaggatgcttgttttatggtacatatgtgaaaaccaaacctagacttatccaagttcaggaacaggttgcaccagagtgggattagagtattgcttaggcattgactcccagcacctcccctggtgaacttcagccataaggatatgcttctcagagtgagcagtaagtctttgcatttatcagcactgaaggcttagtttgcatgtttttttttccttctctttccatatcaaaaaatatgcaattcctagtcctttgcattaaa

SEQ ID NO: 285749 - DNA, 622 bp, Homo sapiens
gctccaaattatacagattatatagcacaattcataatagtgatgtgtaaatgattgaagtttgggagacattaaccatgttctcataaatagtataaatttatattgaatgaatgagttcagttattcattcagtaattcaattaacatatgttgcaaatgattctctcagagtttctatgtttgagaccccagctggatcctctagaaatgtttgctaaaactatttgaagaaactcatctaagaggggtgtgtatgtgtgtgtgtgtgtgtgtctgtgaactgtgggtatgtatagaagatacaaaagtagtagaagagaagcaaaggctatatgatagctaggtgaaaccttaaggatgcttgttttatggtacatatgtgaaaaccaaacctagacttatccaagttcaggaacaggttgcaccagagtgggattagagtattgcttaggcattgactcccagcacctcccctsgtgaacttcagccataaggatatgcttctcagagtgagcagtaagtctttgcatttatcagcactgaaggcttagtttgcatgtttttttttccttctctttccatatcaaaaaatatgcaattcctagtcctttgcattaaa

SEQ ID NO: 285750 - DNA, 548 bp, Homo sapiens
cataagggttgttctcacttgttgcctattatgaacaaagctgttgttgacattagtcttttagtgggtatatgttttcatttctctttgttaaatgcctaggagtgaaattgcagtgtcatatggtaaatgcatgttkaactttataaaaaactgccaaaatgtttaaaaagaaaaaaagctgtactgttttacacacatagttgcaatgtatgggggggggtcccagttgcatccttgccaacacttgctattattagtcattttagctctagccattctagtactgtgaaatggcatcttgttgtggttcagtgtgcattttccagaaggctagtgatgttgggtatgttttcatgggtttattaactttatatcttctttcataaagtgccttttcaagccttttgcctgttttttttaattgaattgtttgtcacttattattgagtttgggagttctttatatattctgaatcatatattccagatacaagtcccctgtcagagtcgtgtattaagaatattttcctccagtctgtggcttg

SEQ ID NO: 285751 - DNA, 550 bp, Homo sapiens
gaccttggatttggccttaggttcttagataagatacagcaacaaaatagaaaataaataaactagacttcaccaaaataaaaacatttttgtaatttcaaaggccattaccaagaaagtgagaagatagcctataaaatacaatagaatattagtaaatcatatatctgataaggatctagcatggagagtatataaagagttcttacaactcaacaataaacaacaaaccaatttaaaagtacacgaatgccttgaatagacatttctccaaagaagatatatccaaccaagaaatggacaacaagtacatgaaaagacrttttgtatcactaagcataagcaaaatgtaaatcagatacacagtgacagctacttcacacctactatgatggctacaatcaaaaaatagaaaataaaagtattggtgagaatgtggagaaattgaaactcacatacatttttggtatgaatgtaaagtagtgccagacaccatagaaaacaatttgacatttcttcaaaatgtcaaatatagaattaccatgtgatc

SEQ ID NO: 285752 - DNA, 568 bp, Homo sapiens
atcccaacaagtataaactttatttgctgtatttactataaacgaaacattatgtgcttstcttagctcaggctgtcgtaaaaaaaataccatagactgagtgggttaaacaacaggaatttatttattacagttctggaagctggaaagttcaagatcaaggtgttggctgacctggtttcccagggaaggtgctcttcctgacatgcagatggcagccttctcattgtatcctcatataatgggaaggggtgggaaatggggaagctctttagggtatctttttataagggcactaatctcatcatgaagtacccatccttatgatgtcatctaaatctaattatctcccaaaggcactatctccaaataccatcacactgagggctagggcttcaacatatgaatttgggggcaacaagtttcagtccattgtggtacagcaaagctgagctattatataagctattatgagtactgtggattagccttgccaagaactgcataaataaaacaaggcagaacacagagcaaggcagttattcaaaatatgtagagataaatacag

SEQ ID NO: 285753 - DNA, 1127 bp, Homo sapiens
atcccaacaagtataaactttatttgctgtatttactataaacgaaacattatgtgcttctcttagctcaggctgtcgtaaaaaaaataccatagactgagtgggttaaacaacaggaatttatttattacagttctggaagctggaaagttcaagatcaaggtgttggctgacctggtttcccagggaaggtgctcttcctgacatgcagatggcagccttctcattgtatcctcatataatgggaaggggtgggaaatggggaagctctttagggtatctttttataagggcactaatctcatcatgaagtacccatccttatgatgtcatctaaatctaattatctcccaaaggcactatctccaaataccatcacactgagggctagggcttcaacatatgaatttgggggcaacaagtttcagtccattgtggtacagcaaagctgagctattatataagctattatgagtactgtggattagccttgccaagaactrcataaataaaacaaggcagaacacagagcaaggcagttattcaaaatatgtagagataaatacagwatatagtctttcaaactatctgtggtttcaggtatccgctactggtctgggaacatgttcactaaataataggtaactactggatattaaaaatatattatatataattaatatataatattaatatataattatataattgtatataattaatatatcatatattttgtacaatgaaccttataaattgccaaagaacagggtgactgatttattaagactcattattcctgctgtatagtatcatcatcagagccagaaagtcccaaccagccaagtatgtagtatcaggccagcaggatcaaatccaaatgatctcccaagccagtgcttgaaaaggaacagcatttgtgacccaaaacgaaagggggtatagaactgaggcattcaaaaggggccatgtgaggtcttctgcaaactttcagactcccaaagaaagagtwtaagtcattttaaatattggttgtttagattgggatgatactgagaacaacatgctgctattattgcaaagaccgctgcccagaggagagcagctctatctgcctgggctagaag

SEQ ID NO: 285754 - DNA, 583 bp, Homo sapiens
tcttttacatgctgatgtccttcagattataatttagaggggaaattctaactgggagatggtctgcccagaccctcaaccactccctggtctaatcacacctccaaatggacaaagaaaatgtctgaaatggagagccctacaaacaccacttccaaattccaataaaggcagaattctttgctgaacatctcactacaccatgaattcaaaacaaactgtggcttagacaaagttggcatggggtagagtcctgctgaacagattgagacatcagagaatgggcccttgggccatgcctggcacacgctccgaggacatggcccgatgccatggctccctctctgtctcaatgctccatcaacacctggagtggaactcaggagctacggcagcttgtactcaaaaaatgacctcagcattcatggatgggcttgaaaaatgaagagcratgttctgtatctcttgaccccactctagccattaaatctagtaagaactaacacctattgtgtgttgctggaccaagcaaggtactgagtacttttctggcatcagcccctctaacccccctcacaatcct

SEQ ID NO: 285755 - DNA, 606 bp, Homo sapiens
gtttggctgtgtccccacccaaatctcatcttgaattgtagctcctataattcccacgtsttgtggagaagaacccaacgggagataactgaatcatggggcatatggcatcccccatactgttctcatggtagtaaataaatctcacaagatctgatggttttatacaaaaccctttcacttggttctcattctctcttgtctgccaccatgtaaaatgtgccttttgccttctgccatggttgtgaggccttccccagccacatgaaactgtgagtccataaatctctttttctttataaattacccagtctcgggtatgtctttatcagcagtatgaaaaaggactaatacagtgcccttgagaatcacctggggagcttgttacaaatgcagattcctgggatcttttcctgacctactgacccagaatgtctagtgggaaagcctaggaagtggtatttaaccaaatcacccacccattcatatgcacagctaaactggttacccctgatctaatccaactaccaaccctgtgcctcaatctctcaagtatcctcagcatgatagttcagtttccctcttcatacctctaatggtggagaa

SEQ ID NO: 285756 - DNA, 606 bp, Homo sapiens
gtttggctgtgtccccacccaaatctcatcttgaattgtagctcctataattcccacgtgttgtggagaagaacccaaygggagataactgaatcatggggcatatggcatcccccatactgttctcatggtagtaaataaatctcacaagatctgatggttttatacaaaaccctttcacttggttctcattctctcttgtctgccaccatgtaaaatgtgccttttgccttctgccatggttgtgaggccttccccagccacatgaaactgtgagtccataaatctctttttctttataaattacccagtctcgggtatgtctttatcagcagtatgaaaaaggactaatacagtgcccttgagaatcacctggggagcttgttacaaatgcagattcctgggatcttttcctgacctactgacccagaatgtctagtgggaaagcctaggaagtggtatttaaccaaatcacccacccattcatatgcacagctaaactggttacccctgatctaatccaactaccaaccctgtgcctcaatctctcaagtatcctcagcatgatagttcagtttccctcttcatacctctaatggtggagaa

SEQ ID NO: 285757 - DNA, 436 bp, Homo sapiens
agctcataacccttaggctgaatctagaacattggttctcagccagggatgattttgctctctctttctaggggacactttgcactgtctggagacatttttggttgccacaagtggaggaaggtgctaccggtgactatgagtagtggctgctaaacaccgtacaaggaatgcacaggataagtccctgtagcaaacaatcagccagcccaaaatgtctagtgccagagctgagaaactagagttctggtagacagagcactgtctaccagaactttctgtgatgatggaaatgctctactagacacttgaaatgtggctagtgtgactgaagaactataaatktatttaattttaaataacttaaattgaaatagccccatatatccagtgggtattctgctggacaataaaagtgttatttgatatattatta

SEQ ID NO: 285758 - DNA, 559 bp, Homo sapiens
taatcaccaaaaagaaagagcctctatctcccagtttctgtggcagcatagaaccctaaaatagataagtaacaattagcaaacatagatagcctagtcaccttggccaatcgcccccatcacatmctccagtaattttccacttgctcaccctaatgcttaaaaatcctctaattgtttctgtggagttgagttcaatctctttcccctcctgcaacagtcttcaatgtagtcttccttccctactgaactctggagcattttttatttttgatgtctcacgctcaaatatccccacactactgaaaaatgggaggtgcatatctggtattaaaaacgctttcaaatgctctgttcctagaaaattgtactgcagttgtaaaaatgtcctagccattaacgagtcaaagctgttctcccattcttaatgttgaaaggctgcattgtgagaactttttaaaaatggcagaatgtgtctttctaacacatcacaagatgtcattagtaagacatgggtgaggacaaacagtcctgcctttttaaaaggaggattcagata

SEQ ID NO: 285759 - DNA, 559 bp, Homo sapiens
taatcaccaaaaagaaagagcctctatctcccagtttctgtggcagcatagaaccctaaaatagataagtaacaattagcaaacatagatagcctagtcaccttggccaatcgcccccatcacatcctccagtaattttccacttgctcaccctaatgcttaaaaatcctctaattgtttctgtggagttgagttcaatctctttcccctcctgcaacagtcttcaatgtagtcttccttccctactgaactctggagcattttttatttttgatgtctcacgctcaaatatccccacactactgaaaaatgggaggtgcatatctggtattaaaaacgctttcaaatgctctgttcctagaaaattgtactgcagttgtaaaaatgtcctagccattaacsagtcaaagctgttctcccattcttaatgttgaaaggctgcattgtgagaactttttaaaaatggcagaatgtgtctttctaacacatcacaagatgtcattagtaagacatgggtgaggacaaacagtcctgcctttttaaaaggaggattcagata

SEQ ID NO: 285760 - DNA, 557 bp, Homo sapiens
tttgtctacctgcagtgctaatctttagctttaaattcaagataagatttactttattttgtatttgtttcctaccatcyctcttctctcctatttttattttaacaatgtgatggaaaaatgtaactaatcccgttatgacggcatgctttaatatctacttagtttctatcagactcttttaaattatgtttcacagcagtcttatttaatttctggaaactattatagctccccctagcccccccagccccgcttattgaaaacctaaagatcagaatgttgtacacaatctagattttccagtgtgtgtgtctatgtgtgtgcatggctagttttatgtgtaactggttatccatagagcaatatacacatacaaggataaatattcatattttcatacaatgttttatgcatagattggcttgtatggatcgttatttaataacccttggaaagattttttcaactaagcaactgaattatttgatgaaacatagctgattaattttcagtgttttgaagcgttagaagtttaaaatacacttttgaagtca

SEQ ID NO: 285761 - DNA, 557 bp, Homo sapiens
tttgtctacctgcagtgctaatctttagctttaaattcaagataagatttactttattttgtatttgtttcctaccatccctcttctctcctatttttattttaacaatgtgatggaaaaatgtaactaatcccgttatgacggcatgctttaatatctacttagtttctatcagactcttttaaattatgtttcacagcagtcttatttaatttctggaaactattatagctccccctagcccccccagccccgcttattgaaaacctaaagatcagaatgttgtacacaatctagattttccagtgtgtgtgtctatgtgtgtgcatggctagttttatgtgtaactggttatccatagagcaatatacacatacaaggataaatattcatattttcatacaatgttttatgcatagattggcttgtatggatcgttatttaataacccttggaaagattttttcaactaagmaactgaattatttgatgaaacatagctgattaattttcagtgttttgaagcgttagaagtttaaaatacacttttgaagtca

SEQ ID NO: 285762 - DNA, 575 bp, Homo sapiens
tgaggagtgtctgattctcccatttcatgttggaaacmgtttttaaggtttcctttcctggggtttctttgaccaaggaagtttccattcagttggtgatggtcttataattttattctttattttatattccctcttttttggtaaagatatgccagaggcagtattggtggtcaagttttattttattccaaatggatgctggggtggtgtggctacctgccctgagttcatcatgttgttttgtaggacccctatggccaagggacttagagtcaaaagacttagaccaagtaaccattctgagccagataggaatagaagtgggcaggcattaattaacactttgaccccttttaagtaacacaagagccagaaaacaaaagccaaaaagcaggattacaaagttgacttgtctataagtcttatgtattgagccattagctgtttaggcacctgtgtatctgtctttgatttgaagggtctaaagtaattttatccctcagaaccgatccttacaatatcacacgccaaccccttccatgatagtccctgagcttaaacaaagggtgctt

SEQ ID NO: 285763 - DNA, 575 bp, Homo sapiens
tgaggagtgtctgattctcccatttcatgttggaaaccgtttttaaggtttcctttcctggggtttctttgaccaaggaagtttccattcagttggtgatggtcttataattttattctttattttatattccctcttttttggtaaagatatgccagaggcagtattggtggtcaagttttattttattccaaatggatgctggggtggtgtggctacctgccctgagttcatcatgttgttttgtaggacccctatggccaagggacttagagtcaaaagacttagaccaagtaaccattctgagccagataggaatagaagtgggcaggcattaattaacactttgaccccttttaagtaacacaagagccagaaaacaaaagccaaaaagcaggattacaaagttgacttgtctataagtcttatgtattgagccattagctgtttaggcacctgtgtatctgtctttgatttgaagggtctaaagtaattttatccctcagaaccgatccttacaatatcacaygccaaccccttccatgatagtccctgagcttaaacaaagggtgctt

SEQ ID NO: 285764 - DNA, 551 bp, Homo sapiens
tataacaatgtacacagactacttacaacatgcttgaaatttctgagttatcctatactacttcyttcctaaataaccagtcattttactttaggacaaaaatttatcatataagatcttttctcataaaaaatttattctaataatctttcttaccaaaaattcaccttcatattcataactttcttgacacctctgtcttctacttaatggtccatttctaacttctttcatacataacttttaaataacctctaaattatgtaacattattgattttctcaataagaacacaactgatagaattatatgttaactagaattcttactcttaatgacctgaaattttagtgaaatcctaggaagaaagaaatgttgaactatcttggatgttagcattttatagataaaactactgcacaatttttagaagcatatttccccatatcataaaactttcttcactggaaatgaccagacatccaatgagcatccataatgaaattcagaataattttaaaataaattacgcaaaaacttcacctacaacc

SEQ ID NO: 285765 - DNA, 478 bp, Homo sapiens
ctgtttagatatagatatgctttcaataccctgacaggttttggagggcaaaagcatgtctttcctttcttaatttcttacagcttttagtgtgacagccatttccacaaggagaatatttaataaaaacatattatcctgaattcaaaacctgtaaagtcaaatgtagcaaaaggtaaaaagtcagttgttccagactcttgactcattcctgttccatcacttgcttctatrgctactttaggatttcagcactcgctacactagcaaggcaaaaaattacagcatctgggcattcagccaaagctcatatgctgtcattaaaactgaactaccatgtaaataggattgcttaaatgatttttttttccctccctgcaaaagtgacatttttccctgtcttaaatttgtcaagctgtctttatcgtttggttaactatgtaagttcttgcaaatttatttgtacaatcatgtaatg

SEQ ID NO: 285766 - DNA, 478 bp, Homo sapiens
ctgtttagatatagatatgctttcaataccctgacaggttttggagggcaaaagcatgtctttcctttcttaatttcttacagcttttagtgtgacagccatttccacaaggagaatatttaataaaaacatattatcctgaattcaaaacctgtaaagtcaaatgtagcaaaaggtaaaaagtcagttgttccagactcttgactcattcctgttccatcacttgcttctatggctactttaggatttcagcactcgctacactagcaaggcaaaaaattacagcatctgggcattcagccaaagctcatatgctgtcattaaaactgaactaccatgtaaataggattgcttaaatgatttttttttccctcmctgcaaaagtgacatttttccctgtcttaaatttgtcaagctgtctttatcgtttggttaactatgtaagttcttgcaaatttatttgtacaatcatgtaatg

SEQ ID NO: 285767 - DNA, 612 bp, Homo sapiens
cccagtaccaagcacaacttcaccacagcctccgctcaatttcacctgaatccatggaaatctcaaattcaactaatgctgtttacagccatrggaataatacagagactacattactccatgcacacacaatcaaagccaaagtgctttacccaatcaacaccataggtccacttcaggaaaaagtacccccctatgaaagcaaattcaaaacattggaagaagtaactgttataccacttacgcaaatatcaaggtaaggatataggaaacatagaaaaataagaaaacttgataccactgaaggaatacaataatttccccagcaacaaatcccactcaaaaagaaatttataaaatcctggaaaaagagttcaaactatgatttaaggtagtaagacagaagataaaacgaattcaggaaataaatgagaaattgaccaaaaatatagatatcctaaaagagaaccaaaaagaaattctggaattgaagaatgtattgaatgaaatataaaatacatttgaaagcttcaacagtagactagataaagcagaaaatagaaccttagaaattgaagacagatcttttgaaataacccagtcagacaaaag

SEQ ID NO: 285768 - DNA, 612 bp, Homo sapiens
cccagtaccaagcacaacttcaccacagcctccgctcaatttcacctgaatccatggaaatctcaaattcaactaatgctgtttacagccatgggaataatacagagactacattactccatgcacacacaatcaaagccaaagtgctttacccaatcaacaccataggtccacttcaggaaaaagtacccccctatgaaagcaaattcaaaacattggaagaagtaactgttataccacttaygcaaatatcaaggtaaggatataggaaacatagaaaaataagaaaacttgataccactgaaggaatacaataatttccccagcaacaaatcccactcaaaaagaaatttataaaatcctggaaaaagagttcaaactatgatttaaggtagtaagacagaagataaaacgaattcaggaaataaatgagaaattgaccaaaaatatagatatcctaaaagagaaccaaaaagaaattctggaattgaagaatgtattgaatgaaatataaaatacatttgaaagcttcaacagtagactagataaagcagaaaatagaaccttagaaattgaagacagatcttttgaaataacccagtcagacaaaag

SEQ ID NO: 285769 - DNA, 559 bp, Homo sapiens
ataagaaaccaaagcaactcaatagctaaaaaagacccctattaaaaatgggaaaataacctaaatagatatttttccaaagaagacaagaaaatggcccacaggtatataaaatggtacttaacatcactaatcagagaaatgcaaatgaaaaccacaatgagctactacctgacaccttttaggatggccatkatcagaaagagaagagataacaagtattagtgaggatgtggggaaaagaaaccattatacactgtttgtgggaatgtaaattggtacagttatgaaaaacaatatggagttttataaaaaatattaaaaatagaaataccatatgatccagcaatttcacttgtgggtttatatacaaaggagttggaattagtaaattgaggagatatatacacccacatgttcactgcagtattattcacaatagccaagatacagaaacgaaacaaatgtccattgatggatgaatggatacagaaaatttgatacacatataaacaacaaaatattattcagatattaaaaaatcctgccatttgcaaca

SEQ ID NO: 285770 - DNA, 452 bp, Homo sapiens
tttaaacaattcatgatccagaaatgttgcctaattacttgagtagttcaagcctagaaaaataaataaactttgattttgacaaggacctaaaacatgaaataaatattgataataaagcatcagggaaaggttgtggttttacctattctaagtagcagagttttgactaaaattgtcttatagagcaatttcaagtctggtttctaacgtttgtctatccatcattctatgtggaaagattattttatttgaggccatttagaattatcaaaaaggtgaattgaaataggaactatayacatttttggagagccaacttaggtgcatatttttatctatacaataatgcagggcctatagctgaggctaggacatgaatactagactgaactgaggaaacaggtcctaattatgggtctatttcttctgctgattgtctttatgatttc

SEQ ID NO: 285771 - DNA, 575 bp, Homo sapiens
ttcttctcatctggaggtgctgtcacttcttatttttgaatcaactttcatttgggtggggattttcccccttgagggtgtgattgttgcatatgttggataagatcctttggctttgcttctgtgcttttagaaggccaaggttctgtatgaattccttggttatacatagccttaaagtagtggattttcctcaaatgctagttgtttttaggttgtagcagcagtggcttgtggataatgtcagrctcactgtctcctacagagacggggaggtggaggtctcaggaggcttatttcattccccagtgctgtgctcgtctgtcagtggaattatattgggttttacagttcaccctaaaggacagtaggtggtgactctgggtaagatctggctgtggctgtacaatgatgtcagcaggagttgtggtgggccatgcaggttgatcctctggctagtaagtggtacttgcaaaagagtcagttgcagtgatggcagtggaatttttacttggcctttgttgagaaggggaagtaccatgctaactctggtgacgaacaaggcatggggctcc

SEQ ID NO: 285772 - DNA, 575 bp, Homo sapiens
ttcttctcatctggaggtgctgtcacttcttatttttgaatcaactttcatttgggtggggattttcccccttgagggtgtgattgttgcatatgttggataagatcctttggctttgcttctgtgcttttagaaggccaaggttctgtatgaattccttggttatacatagccttaaagtagtggattttcctcaaatgctagttgtttttaggttgtagcagcagtggcttgtggataatgtcaggctcactgtctcctacagagacggggaggtggaggtctcaggaggcttatttcattccccagtgctgtgctcgtctgtcagtggaattatattgggttttacagttcaccctaaaggacagtaggtggtgactctgggtaagatctggctgtggctgtacaatgatgtcagcaggagttgtggtgggccatgcaggttgatcytctggctagtaagtggtacttgcaaaagagtcagttgcagtgatggcagtggaatttttacttggcctttgttgagaaggggaagtaccatgctaactctggtgacgaacaaggcatggggctcc

SEQ ID NO: 285773 - DNA, 615 bp, Homo sapiens
ctcccaggttgtcccattctatgctctgccacgaaggcagctggagggggaaagctgggtatggctgggttgggaaagcctgtaaccaggmtccctgaggtatatgcaagtaccaaccttggtagacatctaggtgcagctcttaagctgctggaacaatactccagggagggggagaggctcctctctggcaccacagagcctgctcagtgttagagggaatgacaagggttttcagcctagcagatgaccatgtggtctacccagctcttacaaccccaactcaatgggtctccatctggcatctggccccaacaacaggtccaatcagttaggctggttccaagccatccatatccagattgctgagccattcaggtttctggactgctaggctccccatggcagaaactgcagttctcctccctggtccagtctcacaaagggagcagcgaccacctccctcatcaccacacaaacccacactacatgcttgtctgtgttctgacagtgagagctctttcccctgttgagataaggccatggctctcatctccatacccctgggtggtgtgctcaaggcctggggaactggaaccaagctagtggattgtt

SEQ ID NO: 285774 - DNA, 1231 bp, Homo sapiens
ctcccaggttgtcccattctatgctctgccacgaaggcagctggagggggaaagctgggtatggctgggttgggaaagcctgtaaccaggatccctgaggtatatgcaagtaccaaccttggtagacatctaggtgcagctcttaagctgctggaacaatactccagggagggggagaggytcctctctggcaccacagagcctgctcagtgttagagggaatgacaagggttttcagcctagcagatgaccatgtggtctacccagctcttacaaccccaactcaatgggtctccatctggcatctggccccaacaacaggtccaatcagttaggctggttccaagccatccatatccagattgctgagccattcaggtttctggactgctaggctccccatggcagaaactgcagttctcctccctggtccagtctcacaaagggagcagcgaccacctccctcatcaccacacaaacccacactacatgcttgtctgtgttctgacagtgagagctctttcccctgttgagataaggccatggctctcatctccatacccctgggtggtgtgctcaaggcctggggaactggaaccaagctagtggattgttwctcccaggttgtcccattctatgctctgccacgaaggcagctggagggggaaagctgggtatggctgggttgggaaagcctgtaaccaggatccctgaggtatatgcaagtaccaaccttggtagacatctaggtgcagctcttaagctgctggaacaatactccagggagggggagaggctcctctctggcaccacagagcctgctcagtgttagagggaatgacaagggttttcagcctagcagatgaccatgtggtctacccagctcttacaaccccaactcaatgggtctccatctggcatctggccccaacaacaggtccaatcagttaggctggttccaagccatccatatccagattgctgagccattcaggtttctggactgctaggctccccatggcagaaactgcagttctcctccctggtccagtctcacaaagggagcagcgaccaccwccctcatcaccacacaaacccacactacatgcttgtctgtgttctgacagtgagagctctttcccctgttgagataaggccatggctctcatctccatacccctgggtggtgtgctcaaggcctggggaactggaaccaagctagtggattgtt

SEQ ID NO: 285775 - DNA, 543 bp, Homo sapiens
tttgtgtttttaccacccttgacaaaaatgatagcatattctttaagatcttaaaacaatgaatcagcattttaaatgaatgttaaatttaaaggtaattatttggcactattataactcattccttatgaacattgaggactcatagataatgacatgataaaaaattagaatttaacaaaaatgtttaccaaaaataatatatttgccaaaaaataaaaagtctattgactggatgtgaaaacttgagtgtattatactgcactgctaatttctttttgttattttagtagtttacaatcaaagccttacatgcaaaagatgatgctcaatggttcatgctcagaaaccagcaagacaagcytaagagagattccctattcacctctacactttcccaacgtcaactcaactgctcattttctaccagtaacactccttacccttggtgtgtgcttatgtatgtaggtgtgtttgtgtgtgggcatgcacacaagtaggcacacaatagtatttgaacttaggtattatcacttacatttt

SEQ ID NO: 285776 - DNA, 583 bp, Homo sapiens
tgggacatccagctgtggaaaggagctaccgaccacagagtctcctctctgctgagaactgaacactcatcaggacaccttggctgcagagagcacctacccattgtgggtcttgtccgagctgttctattgctcaataaagctcctcttcaccttgctcaccctccacttstccatgtatctcattcttcctgggccatggaataagaactcaggacctgccaaatgtcagggctgaaagaactgtaaaacaaatggggctgaaacacaccccttgctcaccacattgcaggtgacatgaaggagaaaagagctgtggcccttcagggaccccagacctaggagctccctgggtcagggctgtgacaacctctctggggctctgcagcttctggtgtctccaagcttccaggtgccatcatgttccccagtgccagccctggaagctgcttatggtacatctggtctagctgcaacctcgcagcatgactggctgtgcgtggtgtccagacctcactctcacttgctcacacaccccttgctgctttgctcccaggcataggatccaggccagtagtgtgag

SEQ ID NO: 285777 - DNA, 583 bp, Homo sapiens
tgggacatccagctgtggaaaggagctaccgaccacagagtctcctctctgctgagaactgaacactcatcaggacaccttggctgcagagagcacctacccattgtgggtcttgtccgagctgttctattgctcaataaagctcctcttcaccttgctcaccctccacttctccatgtatctcattcttcctgggccatggaataagaactcaggacctgccaaatgtcagggctgaaagaactgtaaaacaaatggggctgaaacacaccccttgctcaccacattgcaggtgacatgaaggagaaaagagctgtggcccttcagggaccccagacctaggagctccctgggtcagggctgtgacaacctctctggggctctgcagcttctggtgtctccaagcttccaggtgccatcatgttccccagtgccagccctggaagctgcttatggtacatctggtctagctgcaacctcgcagcatgactggctgtgcgtggtgtccagacctcactctcacttgctcacacaccccytgctgctttgctcccaggcataggatccaggccagtagtgtgag

SEQ ID NO: 285778 - DNA, 629 bp, Homo sapiens
catgcaaaatctaattatattataaaattatgtaaattaattttaatatgtgttttgtttctacatgataactarcattaatctaaaaccttttaagaggtagaaacttataatcatcaggtttgttttttcttaatttaagtaaatagcatttttgtttaaccatactgcttcaaggccaaagtttcactttcatcttactagttctattccatgcatcaagttattttttcttacgtttttaaaaaccaaaagctaacccttgatacacatatctgtcttgatgatacttcttttcctgtttcttgggagataaaatctgttctatttctcaaatttttattaatttgatattttaaaatattagcagtaaatcatgacgttatattttaggtgcatctgtttcacacctttcatcattaaaaattaaaataaacttaaatcacatatttacatgtgtctgtgggagtgtttacaacattaatattaaaaatatgcctgataagtgaattttgcaaaatactgttaaacttcatatttgcttttgtttagagagtaatatttaaatgatattacaaataaacaaaatcagattatgtttttcagaatacaaccatttaacaatttac

SEQ ID NO: 285779 - DNA, 1856 bp, Homo sapiens
ttgcaatccatttattcaataatcactaggccctgctcacatacagaaattcttgtaggattatttaagtgaagttcattgaaataaatttgtataaaattgggtctttctaagtgtacgattcaatgacctcagacaaatatatactgtaacaaccaccaccaatatcacaatatgaaatatttccatcacctcaaaaattatcttctgtcyccttgcagacaatcacctcctgacactcttgagttcttgacaactactgatttgtcttttgtccccatagtttttttttataaatgtgatacaagtggaatcgtaatttatgtatgctttagtatctggtttctttcaacagcataatagttttgagattaatccatgctgatgcatgtattagtagtttgttcctttaattgctaaatagtatcccattgtatagctatcacagcttagttttccattgaccaatcaatagaaatgtgagttgtttaccgttttgtagatattatgaatagtgtctaatctcccatgaacatttatgtatgtatgagtgcctctatatatacgtgatatcttaataatagtgttctgatatattaaatatatatatatttatttwttgcaatccatttattcaataatcactaggccctgctcacatacagaaattcttgtaggattatttaagtgaagttcattgaaataaatttgtataaaattgggtctttctaagtgtacgattcaatgacctcagacaaatatatactgtaacaaccaccaccaatatcacaatatgaaatatttccatcacctcaaaaattatcttctgtccccttgcagacaatcacctcctgacactcttgagttcttgacaactactgatttgtcttttgtccccatagttttttttwataaatgtgatacaagtggaatcgtaatttatgtatgctttagtatctggtttctttcaacagcataatagttttgagattaatccatgctgatgcatgtattagtagtttgttcctttaattgctaaatagtatcccattgtatagctatcacagcttagttttccattgaccaatcaatagaaatgtgagttgtttaccgttttgtagatattatgaatagtgtctaatctcccatgaacatttatgtatgtatgagtgcctctatatatacgtgatatcttaataatagtgttctgatatattaaatatatatatatttatttwttgcaatccatttattcaataatcactaggccctgctcacatacagaaattcttgtaggattatttaagtgaagttcattgaaataaatttgtataaaattgggtctttctaagtgtacgattcaatgacctcagacaaatatatactgtaacaaccaccaccaatatcacaatatgaaatatttccatcacctcaaaaattatcttctgtccccttgcagacaatcacctcctgacactcttgagttcttgacaactactgatttgtcttttgtccccatagtttttttttataaatgtgatacaagtggaatcgtaatttatgtatgctttagtatctggtttctttcaacagcataatagttttgagattaatccatgctgatgcatgtattagtagtttgttcctttaattgctaaatagtatcccattgtatagctatcacagcttagttttccattgaccaatcaatagaaatgtgagttgtttaccgttttgtagatattatgaatagtgtctaatctcccatgaacatttatgtawgtatgagtgcctctatatatacgtgatatcttaataatagtgttctgatatattaaatatatatatatttattt

SEQ ID NO: 285780 - DNA, 494 bp, Homo sapiens
aagtttagtaattggtattgctagtaagttccataggtttcaaaatagtaagtgatgtccaaatatttgcagagaaagtgaagattttattgaggagatgggttatgtgaaggttgagtaagatataggcaagtggagtaaagagataacagctttattgaaagaataaatcttgcagataacatgcccatcacatttttggagacactgaagacccacttttgctgagacagataatttttgagtgggaaaaatgaaagatacaagagccgttgaaggcttttataaaggggatagtatcaaaagagtaagcaggttatataaaagagttgagagcctttatttttaagttattacagaggaagagtctayactgtttggtgacaagaagcatggtaactgatgaaggtatgctcaatgatcatcccagagtgccattgtttatgaatattgctaaaataggtagataatacaattattttaggaggaccagc

SEQ ID NO: 285781 - DNA, 476 bp, Homo sapiens
tatggtggctagtctttcccatccaactctcatgatagtgaataagtctcgtgagatctgatggttttaaaagtggaaccgctttctcttggttctctcttctcttctctgctgccatgtgagatgtgcctttcaccttctgccatgattgtgaggcctccccagccacatggaaccatgagtccattaaacctctttcttttgtaagttacccagtctgatgtatgtctttatcagcagcatgaaaatggactaatacacagaccaaccccaaatcttattgaaatrtcaaccaaaattttaaatgtgcatactcaacacttataaaactcaacatttgtaagctcaacacttgtaaaactcaaaagaataaaatttgtatacttacataccaggacattcaagtattgtttgtattaccaaaagattgaaaaataactggaaatgacacaaataacatcaacaagaaaatggca

SEQ ID NO: 285782 - DNA, 634 bp, Homo sapiens
ttacgcacaataaataaggtaaataatagattatcattaaagcctgaaatatagtaacataattaagccttaaagcaatagaaaaagagccaaggaagttatcattcctttataggctgtaattgaatcaagcacacttaatgataacaaaattatatggggttctacatttataacctctttgcctcttttattgccaaggaatgctcaaaggaagagaggaggcagaaggagtttgaactaattagaggacatactaattactgtgttgatgtttcagcacaactagctcactaatcaataacagagtccaagtgaatgtctacagtttaatgttgcyttaaatatctcagtgaattttcaaaggcacatttagtatccttgtagcttgcctatgaccttgttaatttgcagcaaagcatctcaaatacaattatttaagagttttcaccattaaaaagtaggtttataaagatctgggactttgtaacacacaggctgtttttatctgctggccttgacactttatttcatggctgtttgatgacccttggcattgatacaacagcatttggttttgtttttctttctggggaagtgtctggtattgacctcaatctcttgcttttattgc

SEQ ID NO: 285783 - DNA, 592 bp, Homo sapiens
aatgataacaaaattatatggggttctacatttataacctctttgcctcttttattgccaaggaatgctcaaaggaagagaggaggcagaaggagtttgaactaattagaggacatactaattactgtgttgatgtttcagcacaactagctcactaatcaataacagagtccaagtgaatgtctacagtttaatgttgccttaaatatctcagtgaattttcaaaggcacatttagtatccttgtagcttgcctatgaccttgttaatttgcagcaaagcatctcaaatacaattatttaaragttttcaccattaaaaagtaggtttataaagatctgggactttgtaacacacaggctgtttttatctgctggccttgacactttatttcatggctgtttgatgacccttggcattgatacaacagcatttggttttgtttttctttctggggaagtgtctggtattgacctcaatctcttgcttttattgcctagtaactggtatattcctatatctctctttagataagcatataccaattaacctcaagtatcctaattcaaagctgatacttttcataagctatg

SEQ ID NO: 285784 - DNA, 1164 bp, Homo sapiens
ccattcacaaatactacaaagagaataaaatacctaagaatccaacttacaagggatgtgaaggacctcttcaagcagaactaaaaaccactgctcgacgaaataaaagaggacacaaacaaatggaagaacattccatgctcatggataggaagaatcaatattgtgaaaatggccgtgcagcccaaggtaatttatagattcaatgccatcctcatcaagctaccactgactttctcacagaattggaaaaaactactttaaagttcatgtggaagcaaaaaagagcccacatagccaaggcaatcytaagccaaaagaacaaagctggaggcatcacactacttgacttcaaacttactacaagtctacagtaatcaaaacagcatggtactggtaccaaaacagagatatagaccaatggaacaaaagagagtcctcagaaataacaccacatgtctaccactatttgatctttgacaaacctgacaaaaacaagaaatggagaaaggattccctatttaatagatggtgctgggaaaacaggctagccatwacataaaatgtatttaggcaattttgaaaactgtagtgactttgggtgttgtatgtatagcattgagctcaagtaagcagatcatatagatggaaacagactttaagaagaaaaaaatgaagagtggaagtattttagtaacattacttttttgwaatatttgagaaaatatttttcagaagcagttgattagaaacaaaattatttccaagtggcttaaaacaccatactgttgattttttctatgtagaaaatatcgcatacatttgatgtaaaacatctataagctgatggatggcaataggatatataagcctaattaggtttacaatataaaacatgcatctcaaaattgtttccttcattctacctcaaaacacatatacgcatacacacatatacatgcacacacacacacacacacacgcccacacacacacattacctggctaattgaaatatgttttcacagcttcaaatgtatgttgaattgcttttgatgccagaaaactcctagcatcacttaaattgctatacacactctgtagctgatatctacaattttggcacataaaaccaaaatatccatatttttaccatttattttt

SEQ ID NO: 285785 - DNA, 576 bp, Homo sapiens
ggtgagagcattgcctacctttttgagggggggttattggctaatgttggattagttaaaattggtttgattattttgcaaacagtcatttcccctttaacctactgaagagtctcagttttgttctgatacctatcctgccacctcaggtaacaagaattcttttttttaatgttattaaggtatatttgacaattagaattttatatatttaaggtgtacaatttgacaatttgatacacatgtacattgtgaaataatcaccacaatcaagttaattaacatattcatcacaacagatagtatcaatttttggggggtgaaaacacttaaactctaccctcttagcaaattttaagtatcaataaagtattgttaatcatagtcagattattgtacattatatctttagrgatctaatccttccttccatttattgatcttgatgtgagaacgtgacccagttttagctagtaagacatgagaaatcttcagggtgtttctggaaatggcttcttcacctctaactagagattcaaagaagaaatgattctgtttctcctgctggacattgta

SEQ ID NO: 285786 - DNA, 627 bp, Homo sapiens
tggtttcaagtgctacatttaggtttttatccattttaattgacttttgctcttaatttgttgttgtaggatctgcctcaagttgtcaaactaaacattgctttattgtcttatacacaacagaaataactctcttcaatcaaaacacctgaaaatcttgtcagcaaagtttacctctgatttacttctaccacttaacatctgtgtgatattragcaaaataattaacttttctgtgtgcaacactttcttcatctgtaaaatggtaccccgcatatgggtctgttgtatagagaaattttatatacatatgtgtatgtgtgtagtgactgcaatctaataaacaaaacactcaatgaatgttggcaattattatcattattagttttgtcatcatctccattatcatgatgctgtcatataaaatgtgtaaaggtcatctaagcaaatgaagctataaggaagggaggctattgtgtacaaatgagacagtctaactgatggatggagatgggagaaattaagagcagagcctatggagagaggataatctttttctaagatatttgctgatattcttgctgaacagtgttttctctcactttgcaaggcttcttgatttctcac

SEQ ID NO: 285787 - DNA, 627 bp, Homo sapiens
tggtttcaagtgctacatttaggtttttatccattttaattgacttttgctcttaatttgttgttgtaggatctgcctcaagttgtcaaactaaacattgctttattgtcttatacacaacagaaataactctcttcaatcaaaacacctgaaaatcttgtcagcaaagtttacctctgatttacttctaccacttaacatctgtgtgatattaagcaaaataattaacttttctgtgtgcaacactttcttcatctgtaaaatggtaccccgcatatgggtctgttgtatagagaaattttatatacatatgtgtatgtgtgtagtgactgcaatctaataaacaaaacactcaatgaatgttggcaattattatcattattagttttgtcatcatctccattatcatgatgctgtcatataaaatgtgtaaaggtcatctaagcaaatgaagctataaggaagggaggctattgtgtacaaatgagacagtctaactgatggatggagatgggagaaattaagagcagagcctatggagagaggataatcttyttctaagatatttgctgatattcttgctgaacagtgttttctctcactttgcaaggcttcttgatttctcac

SEQ ID NO: 285788 - DNA, 567 bp, Homo sapiens
acagtgcattgtccttcagttacaataatatgacattggatcatcgtctttaaatggcactaaaaaatgtaaggcatttatgtagaagatactaccagtaacgagtatggcactttatctctttacaaagtacttstatgttattatctcatttgatatttaagaataacaatattattattaaaattacttaacaattgattgatttttcttttattttgccaagccctatatacctatatgtatctcaccagcagttttcaatattggatcagtagcaccatgggtgtcagtaggttcttacatcattatacttattttttattttatttctttttattaataaacaatatgaacctattctgaattatctgaattttcaccttatcattgaacaagtttcagttcctgttttggaattttggtgtgcattcacactatttaccaagagaaacgctaaaataacatttaacattaaacaaaatgttatcaaactgaagcccaaagactgagacatctgtaaatatattcttggaaagatgaatacttggggcccaggcctgcgtt

SEQ ID NO: 285789 - DNA, 609 bp, Homo sapiens
cttttgctgtaaaggcagagaatcactataaatgaggctttgcacttcttgtaatgaaaacacatccagtttgtactctcagggacagttacaactaaatcagggtatttcatgtatgccctgatactcctcacccaagctctcctgtttggaattggcatgacatttctgaactctgtttacaactgttgagcctcaacattctgcttgtatttgtgagtcacagattatgaagaaaaaacagaaattgtaagtaagctacataatttatttttcctctggtcctcccagaaataataatgtctgcttcttctctcagtgtgaacgtttttatgtatcccatctgtaaatgttcacaagaatataaatccaatacaaaaacgaaatgcatcatttcctgaaagcatygtggcaattctcttcagttcctaaggatatatcaacacataaagagaataacggagatccacttctgcccacataagagaaattttagacagaccctttggggcttattttgtcaggtaattgtatccattgtccatttccattcactgtagagtacttgtctctatatatccagagaacaatctaaggctcttaaaaggg

SEQ ID NO: 285790 - DNA, 367 bp, Homo sapiens
caaaattatattaatttttggacataaatgtagcctagttaagagttaaatgagttagctatcataatacaatgcatttcattagaataaaaagtaattattatagaacatataagataaataataacgctatacttgcatcaagttgcaaatccttttaaaatcatgctcgtttttamatgaatcaatgcacacagatatcactagcctacacattcatagcatcccagttaaactatggattggcaggaagaggaaaaactgcaaccagatcagacataacttcctgacttattggccaaggatgcagaaattagcagaagtaagatgacttcagagatggcatgcaggcaacatatctggtctt

SEQ ID NO: 285791 - DNA, 609 bp, Homo sapiens
gtttccagaattattatttatctttgagggctcacagtgtcctaggtgtgccctgccaatctatctaacatagtttgagtcttttttctcccaccctcaccatgcaaactcatgttatgctctaggcaattgtaacaatccccactccttgacattcctcaaatagagcaagttctccacctgcctcagtcccttgaacacctgcaaaaaaacatagccagctctctttgtatttctgtagagcccttcattctttcaagatcatctattgcaattatacatttgcttctttgcctcccaaatagcttataaatcttcaagaaagggaccatgtctttcatttgtgttctattttctttttgtttttcrgacatacacaagagtataaagaatattacaaacaccttgtaaccatcacctagcagaaatgtcatcacaaatcttattgaagcccttcctcttctgtttatcccttctcaatcacagccccctagtctctgaggaaataagtatcttgagtttagtgtacaccattcccatacatgtactttcacatttagtacatatacacacacacacacacacacacacacacacatatatatatag

SEQ ID NO: 285792 - DNA, 609 bp, Homo sapiens
gtttccagaattattatttatctttgagggctcacagtgtcctaggtgtgccctgccaatctatctaacatagtttgagtcttttttctcccaccctcaccatgcaaactcatgttatgctctaggcaattgtaacaatccccactccttgacattcctcaaatagagcaagttctccacctgcctcagtcccttgaacacctgcaaaaaaacatagccagctctctttgtatttctgtagagcccttcattctttcaagatcatctattgcaattatacatttgcttctttgcctcccaaatagcttataaatcttcaagaaagggaccatgtctttcatttgtgttctattttctttttgtttttcagacatacacaagagtataaagaatattacaaacaccttgtaaccatcacctagcagaaatgtcatcacaaatcttattgaagcccttcctcttctgtttatcccttctcaatcacagccccctagtctctgaggaaataagtatcttgagtttagtgtacaccmttcccatacatgtactttcacatttagtacatatacacacacacacacacacacacacacacacatatatatatag

SEQ ID NO: 285793 - DNA, 609 bp, Homo sapiens
gtttccagaattattatttatctttgagggctcacagtgtcctaggtgtgccctgccaatctatctaacatagtttgagtcttttttctcccaccctcaccatgcaaactcatgttatgctctaggcaattgtaacaatccccactccttgacattcctcaaatagagcaagttctccacctgcctcagtcccttgaacacctgcaaaaaaacatagccagctctctttgtatttctgtagagcccttcattctttcaagatcatctattgcaattatacatttgcttctttgcctcccaaatagcttataaatcttcaagaaagggaccatgtctttcatttgtgttctattttctttttgtttttcagacatacacaagagtataaagaatattacaaacaccttgtaaccatcacctagcagaaatgtcatcacaaatcttattgaagcccttcctcttctgtttatcccttctcaatcacagccccctagtctctgaggaaataagtatcttgagtttagtgtacaccattcccatacatgtactttcacatttagtacatatayacacacacacacacacacacacacacacatatatatatag

SEQ ID NO: 285794 - DNA, 584 bp, Homo sapiens
taaagcaatttacatagttaaattgatggatacttggtgtagtaggtaaccccaactctcagtgagagggcactacaaaatgagatgggaaaatgtggctataggaaggggtaaagaacttgagccagtatttcatcattgcaactgaacagactaggcctctgtgagagaaaagtaaaagatgttagtgaatgaataaagagtttgaggtcatctgaaatttcaatgaaagtcacatgagtctaatctcagggaagcaggttggttataacttagtaaatgtaactattrtcaactgtattatacctaaatgaagggtgagcctttaagtggaagcagggtaatcagcttaggacagcggcttacaaagtaaagtgtgtgtatccatttgggtgcaggaagaaaatattagaatctcgatttttatatatcactttaaatataaaaataaatgaagctttataatatggaacgatatagacattattaagagtaagaatgtaagtaagtaaattaaggtcatgtttataaggcattctatgggaagagaaggcacaacagcaggaaatggggtagtgaatgca

SEQ ID NO: 285795 - DNA, 584 bp, Homo sapiens
taaagcaatttacatagttaaattgatggatacttggtgtagtaggtaaccccaactctcagtgagagggcactacaaaatgagatgggaaaatgtggctataggaaggggtaaagaacttgagccagtatttcatcattgcaactgaacagactaggcctctgtgagagaaaagtaaaagatgttagtgaatgaataaagagtttgaggtcatctgaaatttcaatgaaagtcacatgagtctaatctcagggaagcaggttggttataacttagtaaatgtaactattgtcaactgtattatacctaaatgaagggtgagcctttaagtggaagcagggtaatcagcttaggacagcggcttacaaagtaaagtgtgtgtatccatttgggtgcaggaagaaaatattagaatctcgatttttatatatcactttaaatataaaaataaatgaagctttataatatggaacgatatagacattattaagagtaagaatgtaartaagtaaattaaggtcatgtttataaggcattctatgggaagagaaggcacaacagcaggaaatggggtagtgaatgca

SEQ ID NO: 285796 - DNA, 560 bp, Homo sapiens
ataaatgtacttctttgataaatataataattagtccttaaaataaatatttatttttaaatgttcactttggtccatattttatatttttatatattagtgtaaaatataggtatagatatatagatacataaacaaatatagctgactaaccagtttttgtatgttttgttttctagactaaaaagacagggaaagaagacatttcaataaaataatattctttgcatagccactaagtacaagatttccaaataaattattttcatgtgattcccttaaatgcttgtaaaatgcacaatctaagtatttgaaaaggatattcttgaaaagtgcatttaaaattaacttcagactttcatgaatatatactaacagagttattacctgatttgtgttttataagaaatttaccaaaaaaataaaaaacggtctaactccttcatacaaacttaaaggcttagatccatcaactgagactctaaaagaaattaataataaaaggatgaattacacaatgcaktggagaatacacatacaactaaagtgcaaatttaata

SEQ ID NO: 285797 - DNA, 609 bp, Homo sapiens
gcgtatccgcttgccactctttttgtacacattacattattttaagcttgaatttgtcatccagttttgccccatctgtgtcatggctggctccacctgtgtctyagattataaacttccatgagaggagaagagatctggatataattatacatactaagtcactttatacagacctcacaggcagccatgaactgagtagactcttaatatgtgcattctgataaaaatatcctagtctactcccttccgaggcaccctccacccacgtcaacacttcactttctttctcatttgcctggtgagtcatatcagtgctaaaaatttatattaaatgcttcaatcccaatgtcttactttattttttgccagcattttcttaacctgaatagtccttataattgtaattgttcacttcttgcggtataaacatagaggaatatataagcagtcaacagactctttgcatttcaatgcactaaactatatttttttagaattaaacatccatcatgctttaaaaatactccaacagattgtgtttctaaatggtgccttaaacagcagttgtcctttcctttgcaaactcagtaaagggataatatatcc

SEQ ID NO: 285798 - DNA, 564 bp, Homo sapiens
acagcacaaaacagtttggtaattataaataaacataattccaattaatataaaaagctcaatcattcagtgacataaaaataaaaaataacagattactttcaaagaagcttgtttttaaatgtatttaagaatgcctgaaatgctaagactgaactaaattggattctaaaattatgtaacataataactgtaatacaattaactggattgctctatcaaccaggtaatttagatcttttattttaaataagccaaatagtgatggggaaaaggtcaaagaaagatcaaaaaacaaaaatattttcactgctcttgtagtagaaaaaaacacgtcattaatgtttatcatcatgagctaaatgtcttatccattagctgtcagatttgtaattctacacaaacaataacatgaattgttttttgtattatactagacattaatttacaaccattagagtaaactatgtctgggattttgtatccattaaggcaagaatamaaaatagaaaggatattgataaaacagggtagactttgaatgcctactacataccaggtact

SEQ ID NO: 285799 - DNA, 538 bp, Homo sapiens
tagaatacacttacatgtaattgattaaaaatgtaacatccaatcttgtcccataaaaataaaattgctttttctcttgcggaagactcagaaataagatattttgtaggtaaagtgtcacatcaatgccatatcrtattctgtagatggcatgttatcatcttcatgaagtatctattcctacctaataaaggggcatgtaagatcccaagccttggaatcaaagagatctaaattcaattcagagttatacactaataatttgtgaccctatgcatattacttaacttatatgtgcttcgatattcttatctgttaaatgtggcttataatgcctatcttacagtactttgaaataattaaatgagatggtaggtgtaaagtacactatgcctagcacaggttaaacactgaaaaatgtattttaaaaaattagtaacagtagatatgctagttttctattgtttaacaaattattacaaacttaacaatgtaagacaatacccatttattagcacatagttctgtaggtcagaag

SEQ ID NO: 285800 - DNA, 688 bp, Homo sapiens
tagggctaggttaatatactcaaacgtttccttggggcagcacagtacttcctggtcaagcggtttacttgactgagtgacatacactggatagatctctgsctaaatctagagggcacacccctgtaatcagggaagctattaccgaatttcattgagctactgtcattgggaatttcagcttggggtcaccagatttgtcatttttaaaagagaagacagaagttcacattttattggattccaaatgtttcaagttaattatttatttaaaaacaagaataggccaatacattatgttgatacctgtggattagaggatggagattagaagcaagaaactgaataggagtaaagagaatttgaaaaattattttcagatggatatttagttcttgcagcttgacaaatacagataccattagccatgcaagagaactacaggctgaaaaaaaacagttttaggtggcagaattatgagtttagttcctagaaactgaatttgagaaatccatgtatcaaagggcacagttcatcatttgtctatctattcaacatatatgattactgttatatcctaaaaatattacacatagtattggggataaattaacaggcagagtcataagtctttgtatttagaggtcttagattccaatagatgtatgatagaattacaaaactgcat

SEQ ID NO: 285801 - DNA, 602 bp, Homo sapiens
ttaataaaaatatttattaaatggatgctctcatgacagaatactatttaaaaaaagttatatgaaaccattttcaatttttaacatgttttaatactgaaataaacaacaaggaatatagagaaggtgaaatagatttaactcatrtatcaaattaagattgcaccttaaaaaggtataataaaaacacaaaaatagcaaaactaccactaatgctaattacttaaactgcaaaatccagtgaagaatttgaagggatctgtatctgatgataagttgatatccctaatttgatcagcttctgtattaaatcatttaatatttaaacattaattttattcttataataccttatttgtaaatgataagatctgtacctcatgggatgagggtattttaagttaaaaacaaaaatttccagaattctgtgttaacaacactaaaaatttagaagaaataattctcatcatataactcttcataagtttttcattttgctgttcatgtctagtttttttttcttttacctgtagctcaaaacaaataagtttttctaaagaagataattgaggagaatccggaagtttctattggaattaaca

SEQ ID NO: 285802 - DNA, 557 bp, Homo sapiens
agtatcatctgctcaggtttgttttcccatgtggatttggaacaaggtggaattgtgctgttagtgcctgttacaatattctgatccattgaacagatgtatgttacagagtaaacaagttaatttacagtctggtggcaacctgagtctctgtgcattttaggtaccatgattcactcttcagtcttgatcactctttttttgttgtttttgttctttagatggaatttcgctcttattgcccaggctggagtgcagtggtgcratctcagctcaccgcaacctctgcctccagggttcaagtgattctcctgcctcagcctcccaagtaactgggactacagacgcacaccacgtccagctagtttttgtattcttagtagagatggggtttcaccatgttggccaggctggtctcaaactcctgacctcaggtgatccacccacctcggcctcccaaagcactgggattacaggcatgagccaccgtgcctggccctgatcactcttagttgacacaccaaagtctgtcctgactcagagccttcaaaatggcc

SEQ ID NO: 285803 - DNA, 523 bp, Homo sapiens
taaaagttgctcttcctttttctgtgatttctgggtatccagcatgtattcagttggaaaagagaaacatgaaaattttctgcattatgaattaagagttaacaaattatccttaaaataggataacaaacaattaagataacaaactattccaaaatattttggtggggagggagacatttttatagaggctaatgatggtgctctccagcattattgctctccagcaaatattgccagtttccagcatagatgtaagaacagatcaaattttctcactttccttgaaattagagttgctaatgaaaattgctctgaccaatgatagggaagctaaacagacttaggccatttccagatggaaactggacgaatragtgtctgattcaccatgtttactccttctctgttacctgggtatgaccagtgatgctccaaatagtgctggttgctcagtgggtccttgaatgaggatgacaaagttcggaactcttaactgactggcactgaacttatagcatgg

SEQ ID NO: 285804 - DNA, 624 bp, Homo sapiens
ttgtaaatgttgaaaccccattaaagaaactaccagagcattgtcataaatatctcaaatagaagtttgcaagaaaacactgctgttaaataacaataagccttgaaacttacactgtgatgaagccctaaggttgataattcaaaccaagacatttctcttttatgtgatttgctaggatattttcttgctttattttcttgaagccatatgactagttaaaaatccatacatttggtatctaggaactaactaaatttaaaaccacagaaccaatctttcttaatgtgtgtttccaactatttcacaatttgtgaacattggctttaaattggcctgtacatctgagctggttgtggtcattagagaattccaacctagataaaatttttgcaaccatagcccacagtaaaaacactataaattgaacagagatttcttctgcttctcattcttttcttctgactctcaacctattgaaaccatttcttaaggctgatttgggaagaaaatgttamagttttgtactttcaaatttgtatttaaaaacaggaaattattaagtacttcacaatgggccagatatgagagcttacagaaatataaagatgacaaatgcaaagg

SEQ ID NO: 285805 - DNA, 647 bp, Homo sapiens
tgcaatgattctaagccgggttggctatacctatgatgagaaagtcaacaaaatgtcattttaattaataaattaattttgctttcatcagtcaaaaacaagtaaaataataaaaaaaagtaccacatgcctttcaaagattctaccaggaaattcaagactgttgaatagccaaacagactactgtctaaaaaacaggaaaaagacaaagagaaaaaagaaatagaaaacataagacagcccctaaagcctgacaatgattcattaattttctgactttttctgatagactaattatgcactgtgaaatacagaggccactagaaatgtgtggctgtttaaattaaattacattaaatatttcatctcactagctacatttcaagtattcaaaagccgcatgtggctagtggatactggattgggtatagcagatataaaacagttcccacctcaaacttcaaatcagaatctgcattttaacaagatctcccaggtgatctataaactcaaagtttgagagacagtgactaattcattcaataatttayctttggcttcacgattattgcagtataaaatgctgaactgatttttcagtgtagtgaaatactgatgtctgtgtcttgtgagaaaaggcaatatcc

SEQ ID NO: 285806 - DNA, 504 bp, Homo sapiens
agatattattgtcattagctcatagataaagtaatttatattcagaagagttagttgtctgatttcaaacagctaagaagaggtagaactgagaacctatctcagatcttttaattccaaacctgctttattttccactctgcccagagtaacacagactgatttagtctgtggttaacatttcccagaaggtacacaagtgcctgttcttcattttttatcatttatttgccataaagggcaaatgtctctgctgagaagagtgattattatatccaaacagataaaataacaggggatttgctgagtccaagtaactgtccatttaacataccataaataaaaggtgatttatcataagcattcaggggatactttccagagctacagttacaygctgtagttgggttttgctttgacctggaactaaaatcagaactagaaggaaggttgtgggcccctatcctgactctgtcccatctttctgattcccttgacactcgt

SEQ ID NO: 285807 - DNA, 504 bp, Homo sapiens
agatattattgtcattagctcatagataaagtaatttatattcagaagagttagttgtctgatttcaaacagctaagaagaggtagaactgagaacctatctcagatcttttaattccaaacctgctttattttccactctgcccagagtaacacagactgatttagtctgtggttaacatttcccagaaggtacacaagtgcctgttcttcattttttatcatttatttgccataaagggcaaatgtctctgctgagaagagtgattattatatccaaacagataaaataacaggggatttgctgagtccaagtaactgtccatttaacataccataaataaaaggtgatttatcataagcattcaggggatactttccagagctacagttacatgctgtagttgggttttgctttgacctggaactaaaatcagaactagaaggaagsttgtgggcccctatcctgactctgtcccatctttctgattcccttgacactcgt

SEQ ID NO: 285808 - DNA, 491 bp, Homo sapiens
gcaaatatagtgagtttaatgaaaagtaactacacaaagaaacattaacttaaaaaacaaaactttgagaaaagtcagaataacttgaattcttaacacataaaggtatggggtggggagttaggtgactagtaaagctagtttaaaaaaaaaaaaaraagaagaagaagaaaggtgaaattcaaattgaaagaataatgcttaactttcctgggaggaaacataaaagggaaaagatggcatgatcctttttttttttttttgcgatgaaaactttaagttaaataatgcctttgtgtatattctcagctgctgcacaagcattcattctatttcgccttttccctagtaatattttaaaattaaactcagaatttttttcctctcctcttaagaaatgtgtttagtttctctcaagacagttgagcaaatgctggaagattggaagtacccaggttgcaaagctggcgggctattcaccagtagagata

SEQ ID NO: 285809 - DNA, 674 bp, Homo sapiens
ttgcttcctgttcaaatttattcaagaaatttttttaaaagaacctattcttgtcacaaaagctttgctagaaattaacaaagttcgctacttagaaacatttgctagcagtatctatgtcaaaatttaaacttactaatatcattagattttgccattgtgtaggtgttatatgcttctctagggatcacctagaactgtaagaattttaaagtcaatctggtggcagattctaattttaagatcctcaacatgtagaaagggaaatgtttctgtgatatcaaggaatatttctccaaacagatggatttgctatgatgatttggagtaatcttcagcagagcacayggtgagtgttagaggggaagaagttactatttatgaagctgcagctttctttgaaattgtaagtagaaagttcaggaaactttatcttttataataatatcttttggtatcctgagaaagctgtaatgtgtgctgcttagcaattcaaccccatcaattatccttttttgtctattaaacaggaaataaaaatagtttactatagacttggtttgataattatgtttcccatctttgtatctgtgcatccacattttaaaatttctgtagaatgtttctatcaatactttgcccaccctcttaactattaattgaatttgttatct

SEQ ID NO: 285810 - DNA, 619 bp, Homo sapiens
ttcagcaaataaattaggtttatttgcccccagcatttttatgagaacaagtgttttattttccagtgtcaaggcactgcagtaacatctgtttggtataaataaaacctgccaggtagtaaggagtatctcatgatgcctcattcacccattagtagggaatattaagcaaatttggaattaatcatgtggatccatttactttaatgagaaacacattgatgggtttcccctattaaattctggcacaaactattttgggcaatgagataattcaattcgtgtggttgttaatgagaaaccgtccccactgaagayttaatttaggagaagagagctttctgacaatctagtcatggtagttttgcagatctcagctcctagaatccgaagtgaatgtgaaagagcaagctaagaatcaggagtagtgtcaacattcctttcctccttcctccttcctccttttgttagctaaagagctctcatccttaagtagatttacatatacaccttaactctgatttaaaaagtatttttggatattatattttccaaatgtttctgacaatgtttctcatgtcaacatagttttggatattttaaagaggaaacagcatat

SEQ ID NO: 285811 - DNA, 680 bp, Homo sapiens
gctggactggatgaggacttgaaagattttgttcttccttgatagctgttctgctcatcccccagctggaatcctcatcagaaataatatttatgccatgtacattctcctaaatatgactattatttcagccatgtgaccaaggtatccatagatcaataaggagtaaatataaaaaacactttcttgaacagcatactagcagcaatgaacagaagcatagtgtggaaagttttcaaaagaagtttagcatgaaggatgctatatgtgctgttgcaaatgcttggaatacagtgactaaaagacacagttgtacatgcctggyccaacctctggcttgcaactatgctcagtgatgatgatgaccaaggtggggactttgaaggattccatgtcaagtgagaaaaaaatgatgtctgatctccctacatatggaaaaaaatacaccttgaaagtctgttagtaagctgaaagaagtggatattgaagaagtttttaacattgataatgaggttgcagttattcattcattgactgaaagtaaaatagccaaaatggtactgaatcaaagtgatcatgataatagtgatggtgaaaatgactttaacactgtagaaaaagtgcccatacacaacatgataaaaatgtgtaatgggcttattgaaagatgagagcagcgg

SEQ ID NO: 285812 - DNA, 680 bp, Homo sapiens
gctggactggatgaggacttgaaagattttgttcttccttgatagctgttctgctcatcccccagctggaatcctcatcagaaataatatttatgccatgtacattctcctaaatatgactattatttcagccatgtgaccaaggtatccatagatcaataaggagtaaatataaaaaacactttcttgaacagcatactagcagcaatgaacagaagcatagtgtggaaagttttcaaaagaagtttagcatgaaggatgctatatgtgctgttgcaaatgcttggaatacagtgactaaaagacacagttgtacatgcctggcccaacctctggcttgcaactatgctcagtgatgatgatgaccaaggtggggactttgaaggattccatgtcaagtgagaaaaaaatgatgtctgayctccctacatatggaaaaaaatacaccttgaaagtctgttagtaagctgaaagaagtggatattgaagaagtttttaacattgataatgaggttgcagttattcattcattgactgaaagtaaaatagccaaaatggtactgaatcaaagtgatcatgataatagtgatggtgaaaatgactttaacactgtagaaaaagtgcccatacacaacatgataaaaatgtgtaatgggcttattgaaagatgagagcagcgg

SEQ ID NO: 285813 - DNA, 582 bp, Homo sapiens
tatttcaagaaggaggaaataactgtcacattctatggatagaatgagtgatattcggactatcaaattgttatctaatgttgtgtttgcaaagactgtagaggcagtagaatcacaatttaactggtccctatgtcccctgatatcttaaaatctctgccatattgctgctattaagcatcctaaaattagatctaatatagagaatgcggtcagctggccacaatgtggtagcaaggcagaaacagccaaagtgtggtttcagtacctcagcaaattttaaaaggcatggagctatgcagctagtagtgcaggagcttgctagagatacagggaagctggattattattgactctaatattctctacttccyttcctgccctggggtttgtagagctcttctgtgcagttggtggcaagcataggcagggaaaaaaccttggtaaacataatttttttaagtggaaacaaatttttaaatgcacttagaaaaacttcttccagcaaaatgtaaaaccttcctttaaaattttttccaaaggtaagtgtatgattgttctggaatgatttaatgtatatag

SEQ ID NO: 285814 - DNA, 323 bp, Homo sapiens
aacgtcaacagagcttttcacagtaagagtctttccccactcttctaatagtttgaatctgtttctcccctgaaatcccttatttctgtaactgtcatgtcttyctcagtgccattagtcgtaactctactaatttttagttcactgctgctagatcggttcccatacagatttaagtatatttaaatatagctgcatcggaagggtgtcatgtcatacattagtcaactgaaccactctatcaacaccaccaccttgaaataaagagaaatttgattcaagtgcatacctgctacatctacatttatcattcaaacggggag

SEQ ID NO: 285815 - DNA, 323 bp, Homo sapiens
aacgtcaacagagcttttcacagtaagagtctttccccactcttctaatagtttgaatctgtttctcccctgaaatcccttatttctgtaactgtcatgtctttctcagtgccattagtcgtaactctactaatttttagttcactgctgctagatcggttcccatacagatttaagtatatttaaatatagctgcatcggaagggtgtcmtgtcatacattagtcaactgaaccactctatcaacaccaccaccttgaaataaagagaaatttgattcaagtgcatacctgctacatctacatttatcattcaaacggggag

SEQ ID NO: 285816 - DNA, 606 bp, Homo sapiens
tgcgttgtctctgtgtttgtgtgtgcataaaagagagagattgagagagagagacatctggtgcttagtacatcttctattttaactaggattcacctacagagtttccattgaaaagttaccaaaacatttatttctattttagggaaatcagtattgtggtgtatattttctgttactattttcactggaggaaaagccctcaagtaggccacggaattgtggaaagaaagtgtaagaagatttttcccctcatgacaaaggacaatcctcccctacaccttggtgtatggagcacgaaggctgctgagaaagagggtaggcagtttttattaagagccaagaaacttcttgggaagaaagaaatcaagaccctgacacactttgggatggggttggggacaccgagtgtatgttatgaacagttagcccttgtagatcaatagacaggaaaggacaccaagcaaactcaccaaaacccaaagagaaactaaccatgagaaggaagagagtcaagttctrtgtaaacaaaggcttcactagtgcaaaggaggagctagtcttgagctgacagagaaacaccctctgcccactcaacgctggaac

SEQ ID NO: 285817 - DNA, 717 bp, Homo sapiens
tcattcaagttcatcccagtgtggcacacagatataatcttttcctttttcatgtgtgttataagtggaaaatggttggaaggcagtgccacggyccccactgaatgttgatcagtgaggcagaatttaaaattctctagacttctctgtctaaagctgcagacagtaaaccgcctgagagcagatttgtgctgttatgggaagaatcaattgcgcttttcctcttaaaaataattttaaggtgagtaggtacccattgcttcagggggtatatgtaaccgcatctttttgtgatttgacgaagactgtttcctcagtattccttggcatacaagaaacaggcctggggaataagtggatacatctgtgcaaagggtgaggatccttctggatcaagatcccagcgagtttccttttgaggttcactgttattataataaatttctgtgctagattaagatggctccaaataagaccttcatggaaactgaaagaggaattcaccttttaagaaatgaaaatcctaattagtgacttggattcatgaccgcttatgtcatgaagggaagatttatttaggcacagcatttgttaaaagcaagaggtctctttctgatccagatgctttgaattttcagccagtatttgagcataatgaataagttataaattatatatacatatatatgattgcatgtatataatacatatgtattt

SEQ ID NO: 285818 - DNA, 717 bp, Homo sapiens
tcattcaagttcatcccagtgtggcacacagatataatcttttcctttttcatgtgtgttataagtggaaaatggttggaaggcagtgccacggcccccactgaatgttgatcagtgaggcagaatttaaaattctctagacttctctgtctaaagctgcagacagtaaaccrcctgagagcagatttgtgctgttatgggaagaatcaattgcgcttttcctcttaaaaataattttaaggtgagtaggtacccattgcttcagggggtatatgtaaccgcatctttttgtgatttgacgaagactgtttcctcagtattccttggcatacaagaaacaggcctggggaataagtggatacatctgtgcaaagggtgaggatccttctggatcaagatcccagcgagtttccttttgaggttcactgttattataataaatttctgtgctagattaagatggctccaaataagaccttcatggaaactgaaagaggaattcaccttttaagaaatgaaaatcctaattagtgacttggattcatgaccgcttatgtcatgaagggaagatttatttaggcacagcatttgttaaaagcaagaggtctctttctgatccagatgctttgaattttcagccagtatttgagcataatgaataagttataaattatatatacatatatatgattgcatgtatataatacatatgtattt

SEQ ID NO: 285819 - DNA, 717 bp, Homo sapiens
tcattcaagttcatcccagtgtggcacacagatataatcttttcctttttcatgtgtgttataagtggaaaatggttggaaggcagtgccacggcccccactgaatgttgatcagtgaggcagaatttaaaattctctagacttctctgtctaaagctgcagacagtaaaccgcctgagagcagatttgtgctgttaygggaagaatcaattgcgcttttcctcttaaaaataattttaaggtgagtaggtacccattgcttcagggggtatatgtaaccgcatctttttgtgatttgacgaagactgtttcctcagtattccttggcatacaagaaacaggcctggggaataagtggatacatctgtgcaaagggtgaggatccttctggatcaagatcccagcgagtttccttttgaggttcactgttattataataaatttctgtgctagattaagatggctccaaataagaccttcatggaaactgaaagaggaattcaccttttaagaaatgaaaatcctaattagtgacttggattcatgaccgcttatgtcatgaagggaagatttatttaggcacagcatttgttaaaagcaagaggtctctttctgatccagatgctttgaattttcagccagtatttgagcataatgaataagttataaattatatatacatatatatgattgcatgtatataatacatatgtattt

SEQ ID NO: 285820 - DNA, 717 bp, Homo sapiens
tcattcaagttcatcccagtgtggcacacagatataatcttttcctttttcatgtgtgttataagtggaaaatggttggaaggcagtgccacggcccccactgaatgttgatcagtgaggcagaatttaaaattctctagacttctctgtctaaagctgcagacagtaaaccgcctgagagcagatttgtgctgttatgggaagaatcaattgcgcttttcctcttaaaaataattttaaggtgagtaggtacccattgcttcagggggtatatgtaaccgcatctttttgtgatttgacgaagactgtttcctcagtattccttggcatacaagaaacaggcctggggaataagtgkatacatctgtgcaaagggtgaggatccttctggatcaagatcccagcgagtttccttttgaggttcactgttattataataaatttctgtgctagattaagatggctccaaataagaccttcatggaaactgaaagaggaattcaccttttaagaaatgaaaatcctaattagtgacttggattcatgaccgcttatgtcatgaagggaagatttatttaggcacagcatttgttaaaagcaagaggtctctttctgatccagatgctttgaattttcagccagtatttgagcataatgaataagttataaattatatatacatatatatgattgcatgtatataatacatatgtattt

SEQ ID NO: 285821 - DNA, 1181 bp, Homo sapiens
tagcaaactatgcatctgacaaaggtctaatatcaaggatctataacraacttaaatcaaccagcgaaaaaaaaatgtaattaaaaaataggcaaagaatatgaacagacgcttctcaaaagatttacaagtgaccaacaaacgtgaaaaatgctcaacatcactaatcattacagaagtacaaatcaaaacaataataagataccatctcacaccagtcaaaatggcaaataataagcagccaagaaaacaatagatatgggcaaggctgtggggaaaaggggatgcttatatgctgttgttgggaatgcaaatcagttcagccagcttagagttttctaaaagaacttaaaatagaactcccattcgaccaggaatcctgctactaatgaaaataatttattctatctaaaagacacaggaacttatacattcattgcagcactattcacaatagcaaaaacaaggaatcaacctaggtgtccatcagcagtgagtagattgaataaagaaaatgatacacataccattggtggcatacatatgccatggactactatacagccataaaaaagaacaaaaatgtacwttgaaaaaccccttattgggtgctatgctcactacttggatgatgggatcacccataccccaaacctcagcatcccacaacatattcatgtaacaaacctgcacatgtgccctctgaatccaaaataaaagctgaaaacaacaacaataaaacaagaagwtttgactgcaaggtgaagggcatcaacctaattatacaatggtagatatatataagaggcatttttagaattaaggtccacattggaggagagtgagtttctttaaatttcctcattggagggatttctaacttcagaggcaaattaggaaatcaataactagaactttagaaaaatatttgaaggatgctataaataggagctttgaacagtttctgatacaaaaatttaggatggatatcttcacaatttgaccacatactctaatgcaggaaagtaaatgttaggatgcagaatagcaagagatgggagagttgacacacttaatgcaaaaggtgaatgatgtataaccaaaaaaaaaaaaaaatctttggaaaatctgggacaggtactttgttgaacatgtctgaagatggatttgagttaatactc

SEQ ID NO: 285822 - DNA, 592 bp, Homo sapiens
ttgaaaaaccccttattgggtgctatgctcactacttggatgatgggatcacccataccccaaacctcagcatcccacaacatattcatgtaacaaacctgcacatgtgccctctgaatccaaaataaaagctgaaaacaacaacaataaaacaagaagatttgactgcaaggtgaagggcatcaacctaattatacaatggtagatatatataagaggcatttttagaattaaggtccacattggaggagagtgagtttctttaaatttcctcattggagggatttctaacttcagaggcaaattaggaaatcaataactagaactttagaaaaatatttgaaggatgctataaataggagmtttgaacagtttctgatacaaaaatttaggatggatatcttcacaatttgaccacatactctaatgcaggaaagtaaatgttaggatgcagaatagcaagagatgggagagttgacacacttaatgcaaaaggtgaatgatgtataaccaaaaaaaaaaaaaaatctttggaaaatctgggacaggtactttgttgaacatgtctgaagatggatttgagttaatactc

SEQ ID NO: 285823 - DNA, 1099 bp, Homo sapiens
tgttaataatatacttaattatagagataataaatatataattaaataagattaaaggagaaagaatcatgtaaaataattgaaaataaaacccacttgacccccttcttctgggttgcattgcaggtcccagaaacttgagtatatgatagacaaattgcaaaaatgtcctaaagttttttatccctccctttatccatatcatttgcagtgtgattttgcagttcttttaatcaagaggtggtctatttccccaatccttattagggtgcccttgtgtaatagttaatttcatatgtcaacttgactgggctaagggatgcccagaatggaaatatttttgctgggtgtgtctgtgagggtgtttctgaaagatagcagcattggaatcagtagactgagaaaagatmtccctcaccaatgcaggtgggcactattcaatggctgaaggaccttaatagaagaaaaaggtgaaggaatggtgaatttgctttctttgattgagttgggatattcatcttttcttgtccttggatatcaaggctcctaagtctcaggcwtggagaaagaaccatagaaactgcacatatgtgtatcaatctaattaaatattaaacattgacagtgaaaaacaatgataacaaattaagggctttaaaatatatagaaaactaaagtgtaagaagacagtagcatgtaagttgagagtgggataacttggattgatgtagtcaaagttcactgcattttctgggaggagggcacatataactctagaatttaataagttaaaaatgaaaattgtaatctaaggtaactactaaaatagtcatcaagcaaattaaatttctgaagcatcaggaggataaatcaattttttaaaatttaaccctcwctaaaggcaaaaaagaaaaacataaactagacaattagaaatcatattgaaatgtggcatgtgtatctgtgtgtatatatacgtatgtgtatatacacagaatttatacttcaatactacattgatgtaaatgaactaaatgctgaagttaaaagacaaagattgtcagataagattttatttacaaacttaactataacccat

SEQ ID NO: 285824 - DNA, 552 bp, Homo sapiens
tatacctatgtaacaaacctgcacattctgyacatgtatcccagaacgtaaagtaaacaacaacaacaaaatctacatcttcttatctctggtcaattattgggtctcttattttataaagtctttaaaagaaaaatcttaaaacctaaacatgcttattttgcttcttattgtaaaacagctttatctgcactgatggcttcatattttgaaattgcattttttcaatatgtgtagatatcatttctgaagctagttaatgtgtttcatctcaaatttactctgccctttgaaactataaattcttcagtgtaatcagggaaattgttcagaaatcacggtgtgatggttcattcattagcccagatcatgagttccagatttagtaaaatcgtcattcacactgatagacatcagcattgatggtgtaggtaactgttggagtgactggtagccagagacattgccatagtaacatggggcaggaaagctggggaaatggggaacatcatctgtgaaacaatgcagccagtttgcagacattctcgggac

SEQ ID NO: 285825 - DNA, 552 bp, Homo sapiens
tatacctatgtaacaaacctgcacattctgcacatgtatcccagaacgtaaagtaaacaacaacaacaaaatctacatcttcttatctctggtcaattattgggtctcttattttataaagtctttaaaagaaaaatcttaaaayctaaacatgcttattttgcttcttattgtaaaacagctttatctgcactgatggcttcatattttgaaattgcattttttcaatatgtgtagatatcatttctgaagctagttaatgtgtttcatctcaaatttactctgccctttgaaactataaattcttcagtgtaatcagggaaattgttcagaaatcacggtgtgatggttcattcattagcccagatcatgagttccagatttagtaaaatcgtcattcacactgatagacatcagcattgatggtgtaggtaactgttggagtgactggtagccagagacattgccatagtaacatggggcaggaaagctggggaaatggggaacatcatctgtgaaacaatgcagccagtttgcagacattctcgggac

SEQ ID NO: 285826 - DNA, 632 bp, Homo sapiens
gtggtggcattcacctgtggtcccagctacttctgaggctgaggtaagaggtatcctttgggcccaggagatcaaggctgcagttcactataattgcaccactgcactctagcctgggccacagagcaagaccctgtttctaagtaaataaataaataaaactaaaaagagagaatgggatggacacagataaagttggtttataggcttggtctcagggaaacaggcatgctcctatctaataagttmtgtattctctacaaagttagagggtgagtaattcatctactgagaggggagtagaaaggagaatgatcagaatttcgaggtaaggggaaggtttggaatagtcattgttcagtgttccaggaaaaaaattccagcctgaccaacatagcaaaatcctgtctctattacaatacagaacagtaggcgggcatggtggtatacatttgtattcccagctactctagaggctgaggcatgagaatcacttgaacccaagaggaggcagaggttccagtgagccaagatagtaccactgcacttcaaactgggcaacagggcaagactccatctcaaaacaaacaaacaaaagtattttctctgttgaaaagagaaacagagtagaa

SEQ ID NO: 285827 - DNA, 1265 bp, Homo sapiens
gtggtggcattcacctgtggtcccagctacttctgaggctgaggtaagaggtatcctttgggcccaggagatcaaggctgcagttcactataattgcaccactgcactctagcctgggccacagagcaagaccctgtttctaagtaaataaataaataaaactaaaaagagagaatgggatggacacagataaagttggtttataggcttggtctcagggaaacaggcatgctcctatctaataagttctgtattctctacaaagttagagggtgrgtaattcatctactgagaggggagtagaaaggagaatgatcagaatttcgaggtaaggggaaggtttggaatagtcattgttcagtgttccaggaaaaaaattccagcctgaccaacatagcaaaatcctgtctctattacaatacagaacagtaggcgggcatggtggtatacatttgtattcccagctactctagaggctgaggcatgagaatcacttgaacccaagaggaggcagaggttccagtgagccaagatagtaccactgcacttcaaactgggcaacagggcaagactccatctcaaaacaaacaaacaaaagtattttctctgttgaaaagagaaacagagtagaawgtggtggcattcacctgtggtcccagctacttctgaggctgaggtaagaggtatcctttgggcccaggagatcaaggctgcagttcactataattgcaccactgcactctagcctgggccacagagcaagaccctgtttctaagtaaataaataaataaaactaaaaagagagaatgggatggacacagataaagttggtttataggcttggtctcagggaaacaggcatgctcctatctaataagttctgtattctctacaaagttagagggtgagtaattcatctactgagaggggagtagaaaggagaatgatcagaatttcgaggtaaggggaaggtttggaatagtcattgttcagtgttccaggaaaaaaattccagcctgaccaacatagcaaaatcctgtctctattacaatacagaacagtaggcgggcatggtggtatacatttgtawtcccagctactctagaggctgaggcatgagaatcacttgaacccaagaggaggcagaggttccagtgagccaagatagtaccactgcacttcaaactgggcaacagggcaagactccatctcaaaacaaacaaacaaaagtattttctctgttgaaaagagaaacagagtagaa

SEQ ID NO: 285828 - DNA, 578 bp, Homo sapiens
agaatctacaagaatgctagtaacacaacacagcagattagatcctctataaaaccaacagtttcacaactcattctctccccagcctacccataatgcctatttcagacctttcccctctcctcagagttctatccttcttttctcattaccctctcagaagatgagagcccctcttactttatggaaaaaaaacatatggttcaatagaaattacccattttcctaagatgaagcattcaaacgagattatcatggattctgagcttgatgaagaggagagtgaagaaatgacagggttgatggattgggtgttcccttccccacatattttttacagaaatattcatgatttcattaagtttctatgaattctttctaatctaaacattctatagttttgaagaattagaaaattcctctactaatacggtcacctgtttgatctttcactgacttttttttttcatgagttttcrtggtgaataaagaaatgcttttaaatatagatagcttttcacatagaaatagcttagacccctctttcatgtcctaaggacatgacagtgcctgcttag

SEQ ID NO: 285829 - DNA, 498 bp, Homo sapiens
gtgctgcctaattatcttcgaaccaagctctttgtctcttatttatcagaaggcccctttcttccttaatataaatggtgccttatgggttctacctgactaattctctgagtttgcaaagaagaccttgagttctagacaaaacacagcctaagtttgggttgacacctcttatacatgtattcatagagaaatatgtgtgtgtgtggagacattttaaagatgtaaagccttataagaacaatgtagtaacaacccatcattatygtcatgactttaaccttggtgtggtggacagattttaaggtggcgtccatgatcttcaattcctagtgttcgtgccgttgtgtagtcccagcccctatgacttgcttttaaacagtagaatatgaaaggtgatgggctgcccctcccatgattgttattacataagattctatcttgcttgaagacccactagagcaatttcctttcactggttttgcagaagcaagccaa

SEQ ID NO: 285830 - DNA, 645 bp, Homo sapiens
acatgcccagtgcatttctgaccctcctgccttggactaatgaagctagggtggttttcccttttgctttagaccacagttaattcctggagcagataagctggtccccaaggggtagaatgagccggtctacccttttagcacagtgtccatcctccacaaatacacttcatttgttctgttaggcagtttctgaacattttttctccctttcaaaactaacactaaagtgcaaatgttctatgagttctaagtgttttctttctatggtatctacaatctatttaatagcagacagaattaaagaaatcagagagtgagttattgttaaaattattgttgaatttcaaacattagaaatggacagctgagatataatgggcttttataagtttttcaatcatctcatattgatatcctttctttcttaagacaagcctttctttcccttttctattccaggcatttctagctctatattaaataaaaaaatacatgtctatcataccttatctgaaaccatggagcctgatgttttatagaagtcaactttttaaaaaaggtaatgtaatacrtaagccatatgtattataacataactagcagagtctggagcaatacccagtaatcaaaataatattgcag

SEQ ID NO: 285831 - DNA, 546 bp, Homo sapiens
attaacagtttatgcctaatggaattataaaggtgtattttaaggcatgtgaccttcatagtaaagaattagggatttccagttaaacatgattaagtgaacatacgtttttatgtctgcttaatcaagaaactcactgaaatagtaataaaaataaaacaggcataaatctaaaaggagctaaagaacagggaaagcagcagtactagatgaagattccaattacaatttttgatattggaaatgcaaaaggacaagtggcaaggcaactgacttgaaagagggaaggaagttcacatttaactgcacatagaaccccagaaacacttaggagtttaacacggcagaaacctttgaacatgggagcacagaatagtgttaaaaataagaggttctaagtctcagtaaaaagcaattaagtcctcttatgtcctcatctcaagcaacacaattaacctcttcctgtattaacagaaatagaarttttctatatagagagagtgtatcttgggggttctagatttggggacataagcacctgaaggc

SEQ ID NO: 285832 - DNA, 542 bp, Homo sapiens
tcatgctatgcagggacacagagaaggcatgggtgtctgtcagamggcagaaaggagcaaagagaaagcattagaccacaggctttattgggttttccataggaaaaacagggcagagcaaacaatttagaacagggcttgctttaaaaattccggctcgactttgggctatagggatggcctccacttgagtgatacttggccctgggataatttaaggcagggcaaacattggcttagtgtgtgagagttagataaggaagtaattaatggattggttggtttgcatatgaaaggcctgcgttcataggcaaattgttattatctttaggaattagctagccctaggaggaggagtttctccatggtctacaaggctcccaaatgccagagcaacaagaatatagataataataaaatattataaattcagtattggccctgtgaagaatcgatgccaaatagacaaatacagaatctaagaaaacacaattagaacattaagtcatgaaatacaatttttaatatttttgtggatgaag

SEQ ID NO: 285833 - DNA, 533 bp, Homo sapiens
tgtttttttcttgcagaagaaatgtcaagttatacttctttactctgcaggtttcagagaatatttgttttcagataagtagcttggagtttacccttcagatattcaaataaacacagcaccattttcaacctttcaactttcttctcaaaaactttcaggagctcagcagcagaaagtcaccagtttttggagaaagaacttgaatattttaaatattcttaaagttttgaaatcacmaaggccactgtgtagaaaggattactgattctttctctagaaaattgcaatttgcagtcaattccaatggggcaatgagtgagggtagcgaagaaagaaaaaaaaaatgttatgactttatctcaatgaactattaggaaagtgttcgagacataccactagctaaaaaaatgattttaagaaaaacagacaacttgtcttcaccaaaaatttcttccatgcaataagattacaggaagagaaagaggaaggtgagtagatgaggcagattagaaagtaggtagtgtaaataa

SEQ ID NO: 285834 - DNA, 558 bp, Homo sapiens
agactcagtgattagggaggttcagtttttaggaaccagcccttcaggggatcagttggtagtatctctctcttaccgtgttctctctctgttttgcagtgtatcattactttgtggatattataacatggaacaagaatgtaagaagaggggacattaccatcaaattgagagacaaagctggaaacaccacagaatccaaaatcaatcagtaagttgagttacaattgtttgcagtgygctatttccctttttgctcagagaaattaaatcacaaatccacctactttcttatttatagatctatgcttttccttgttctataaaagatataaggggaactattgcttagttgcttccctggttcttgatctcccagggtctttacaaatgggattggtgcaagggttttctttccttccctcattctcttcttcctttctttgcttcctccctttttccttcctttcctccctctttccctctctttctccctttgttcctctcctccttacttcctttgattaaacatgtaatacaaaagttatccttgttttc

SEQ ID NO: 285835 - DNA, 287 bp, Homo sapiens
ggcttcatcctcaaatagtatcagaattgaggaggctgtaaggcagaaagcatctgactctatccccttgcttctccatttgaaccagggattccttcacatttaccatgctcacaaccccaacaccaatggctatttaccaaatagctcagagcttacaattgcttttgaataccatcctccatgccctggktttgcacgtaatatgtaaaatttatataacttaggagttttgatttaacagtgttagtcttagtgaaaatgcataaggattaaaatattatggg

SEQ ID NO: 285836 - DNA, 508 bp, Homo sapiens
gcatcaaacagtgacagtttaaattcctctttactgatttggatgccctttgtttctttctcttctctgattgctctggctaggacttccagtgctgtgttaaagaggagtggtgagagtgaacatccttgtcttattccagttcttagagggaatactttcaatttttccccaatcagtattatgttgtgggtctgtgggtttgtcagggatggcttttattgtattgagatatgtcccttgtatgccaattttgctgatagttttaatcataaagggatgctggattttgtagaatgctttttctgctgcatctattgagatgatcatgtgatttttgtttttaattctgtcartgtggtgtatcacatttattgacttgcatttgttaaaccattcctggatccctggtatgaaactcacttgatcatggtggattatctttttgatatgttattggattcagttagatagtattttgttaaggattttagcgtctatgttcatc

SEQ ID NO: 285837 - DNA, 630 bp, Homo sapiens
aagtgaccatatatgacactgagagtctgtataaaaacagtctacagtcctaccattataaagatactagatggcaacccttgattttctcagtcttacacttcactccactgcctccccctttcatcagcaagacaaccaattaaaagagtatggggaaaaaatgagaccaaatggagcaaagtttctgtgagattcttgaggctgtttaaactaacaaacttgtacatgatgtagagtaatatttttaatgtgtaaaaatagagttcaggttgagaagcagcattctagagtgtatctattaattctgtcatgttcacytcctcttcagttaaaataactcattttcttgcagtgtatcatatttttattatagagtgtcatatatagtgacatatacagttatatgtaactaaagttaaagtacataaaatcgtcagaaaacagatggatgttcaactttccagaactgattagaatttttaatcagagttcagaaaagggtactatcatagccaagataatggttacatatattcttaggagttttcccaacaatataacaaaccacaaatccctgagcttatcagagataagtttagattatgttcctaccatttaacatttaaa

SEQ ID NO: 285838 - DNA, 1246 bp, Homo sapiens
aagtgaccatatatgacactgagagtctgtataaaaacagtctacagtcctaccattataaagatactagatggcaacccttgattttctcagtcttacacttcactccactgcctccccctttcatcagcaagacaaccaattaaaagagtatggggaaaaaatgagaccaaatggagcaaagtttctgtgagattcttgaggctgtttaaactaacaaacttgtacatgatgtagagtaatatttttaatgtgtaaaaatagagttcaggttgagaagcagcattctagagtgtatctattaattctgtcatgttcacctcctcttcagttaaaataactcattttcttgcagtgtatcatatttttattatagagtgtcatatatagtgacatatacagttatatgtaactaaagttaaagtacataaaatcrtcagaaaacagatggatgttcaactttccagaactgattagaatttttaatcagagttcagaaaagggtactatcatagccaagataatggttacatatattcttaggagttttcccaacaatataacaaaccacaaatccctgagcttatcagagataagtttagattatgttcctaccatttaacatttaaawtcatttgctcatcaattaaaaaataaaatattttttactctttggttgaaaatctgaatgtcataccttttttctgcagtgtgaaaccatgaatctctactgcatcatattatcctgaatttaaaaggcatcacattagtagtaatcaatagtataccaggttttcacttcccccaaaatacccagaaatttctctcatgcttttctgagcgatcccaggaaatggctctcatgctgtcaagaacaaatccttttaacctcaacaagacaaggtcacccacttttgggtacaaagttatcagtgcctctagtcatagaatctaagcaaaaacaggggatcagattatgccttctgcatttccaagatctgtgtctgtgttaagttgctgctctggctggggccacaacactacaccatactgcaggaaaagactagaacattggccatccaaacacagttggatcccttaactaagtatcwttgagcaagacatgaatatagccactccccgctagaagtttggggctgaatcttccaaacacctgctgcattatgaggtgattacaacccatgatgcttgcaggaaaattctcccggggaagatgatttaatga

SEQ ID NO: 285839 - DNA, 566 bp, Homo sapiens
tcatttggcatgtgtatttctagataaaagaaagaaagaaggctgatcttcaaagactctttatcttttctaaaaatggcattcatcgttgcccttttatatggggtgaataaaaatgactctttatattttcagcacatacagcttctttggtacagaattatcctgtgacacaaaagaccaaagtacataatacttgaaaataatgagcaataacagtttcctccaccaagataatggctttattcttctttagctccactaatccaatgacaaaagtctcagcacgtacaaaagaatgaaattcctcttcattgtcccatttgaacaaacctggagagattctaarggacaggagcggatatcatcaaaggtaatgcaaaggattctataaggaccatgagagagccttccatttaatcttgaaagtagcagaacctcctcaggaagtggaacaacacattaaagagatagactcttaacccagagagcaatttctaagaatagacatagttcccattcattgagtgtttattagatgacaggcactttgctactcattccga

SEQ ID NO: 285840 - DNA, 561 bp, Homo sapiens
cattgatcttctgctggaagcaacacagtgtaagtctaagctttctttgaaatgatagactttcaaatctttcaggtgagttatatttctgtastagctaggctctttttcaggcccctcttctctagttctgcccacatttacccccaggtttctcaaatattacttaaaactatagttattttattcttacattatttaacacaagcaactatattccatctgatctgtggctttgaagataaaaaggtctaagagagacaatcttcagtgcttcgttatctatgctgcatatggacagagttccaagtcctttgccatttcagttgtgttctcagtggcctctggattgtcaatgatgttcttaaaatgtgttatccaggactgagaaaacagtacatgagacctgaccttgtgctcaacttatatttctattaaaatagtggttgagcctgtaggccatgaaatcagatgactggtttcaaattcaggctcagttattttccagctatctgatcttaagcaagttacttgttactgcctcagtttcttcattttaga

SEQ ID NO: 285841 - DNA, 612 bp, Homo sapiens
tgcgtttagtaggtgatatagtttggttctgtgtcctgcacccaaatctcatcttgaattgtaatccaaattgtaatccccaggtgtcaagggagggyccggtgggaggtaatcggatcataggggtgatttccccatgatgttcttgtgatagtgagtgaattctcatgagacctgttttttttggtaagtatggggttcctcccccttggtattctctctcccacctgccaccatgtaagacatgcctgcttcctcttctgctatgattgttaagtttcctgacacctccccagccatgcagaactgcgagtccattaaacctctcttgtttgtaaattacctagtcttgggtagcatctttatagcaatatgaaaacagactaatacagtaggaaatttaggaacagtttcatccaatcacttttttttaaggttggtggatctgaagcccagggaggtgaaatggcttactgaagggcatcaactggttaggccacaagtctcttgactcaaagtcccaagtgtattccactgaaaagtttcttttttctttaaaattttagatttaggaggtacatgtgcaggtttgtaacatgactatattgtatg

SEQ ID NO: 285842 - DNA, 624 bp, Homo sapiens
aatggctcaagttgctggaagggatggttttccaaataataatcttagcactttagttattttctgtttttaacaactctattaatacaaggtaaaattgcccattaaaggaaaataaattggcagcagtaaaatcctaaagtctttgatatgaatctcaacataataaaaacagaaagttcactttttctaagacattcatatggcaatagtgactttgtgaatgccttagtgactattaagaacacactatgtacctcctgcacagtgttcctgtactgccactgttatatataccagtggggaaaaagaatgattagaatcatgtctaacatctgggcaaactgcacttcatatagacttccaaatggatatttatgcatttctgaaaaatcttaaaatataaaacaatattcattcctcacaatgaattccagggtcttttaaccatattgaagaacatttatactatttactcagaaaccaccttgcaataatttaaagacattctttcttgtttaatagcaaaaggatattcacgtttgactgttagtcacacaatatcctttctaaagatatraaacctccttccaccttaccttcatgtaaaaaaaaaaaaataac

SEQ ID NO: 285843 - DNA, 604 bp, Homo sapiens
tgtttataacaatataaaaccaccatatagagttggagttaatatcttcctttgataggtgagactgagtttaaggatgccctaagtgcctcttctcaaaaatatcacagctgtgatttgaaccctgatctgtctgactctatgggcaaagttctttccactgtatcatrtaacaagcatggtttaagcatgtgccgcaagcacaaaaggttttcctcctaggacatagcttttatctgttgcccaaggctgacttctgccttgctttcttatggatggcaattaatcattaacattcagttcgtgggtagattttccagttttctctgatgttttatccatgaattctccttcatcagccagtgatgctgatgaactctgctgccatgatgtcctctgtgtgtggttgatactagatacaaatcaattgttcatcactgccctggacaacttttcaaatgttagccaagggaaggccagcatttttcttccacagtgatccttaaggaatatggggagtggaataattttcttttggtaagatggcttcccctttaaaaagtctgccaaagtattttaccgcttctcagtaaaaacctcatta

SEQ ID NO: 285844 - DNA, 604 bp, Homo sapiens
tgtttataacaatataaaaccaccatatagagttggagttaatatcttcctttgataggtgagactgagtttaaggatgccctaagtgcctcttctcaaaaatatcacagctgtgatttgaaccctgatctgtctgactctatgggcaaagttctttccactgtatcatataacaagcatggtttaagcatgtgccgcaagcacaaaaggttttcctcctaggacatagcttttatctgttgcccaaggctgacttctgccttgctttcttatggatggcaattaatcattaacattcagttcgtgggtagattttccagttttctctgatgttttatccatgaattctccttcatcagccagygatgctgatgaactctgctgccatgatgtcctctgtgtgtggttgatactagatacaaatcaattgttcatcactgccctggacaacttttcaaatgttagccaagggaaggccagcatttttcttccacagtgatccttaaggaatatggggagtggaataattttcttttggtaagatggcttcccctttaaaaagtctgccaaagtattttaccgcttctcagtaaaaacctcatta

SEQ ID NO: 285845 - DNA, 619 bp, Homo sapiens
ggcaaatataactcagggacactgaaagatgttgctttttctcaattgttctcacattaccacttttgtgattggtatatgaaagacccctctgaagttatgacatgtctgcagctacatttttttgtacatatttgaccatactttggtgccttcagagggagcacagctttgctgacaacttaatttttaacttctgacctccaaaactcagagggaataaatttctcttgttttaagacactttgtggtaatttattagggcaaccataggaaaatagctacctcctaaagttgttcttttgaatttaatctatagttttggatattcacaaacattatcagtcactcagtcaaccttatcatttggcacttcttcttatctgtagcattttggtacttagcatttagattcttgaatttttggtcctgtgyacaatacagaatttatcatgccccttcctttagtgtggttaaggagaaacaacaaatacatatcaaataccatcaatgaaaagtatttatacatatatttagaaatactttttcagcacatattttggagtagagatagttttaggtgctgaggatgcaacaataaacaagacagaaaacttct

SEQ ID NO: 285846 - DNA, 619 bp, Homo sapiens
ggcaaatataactcagggacactgaaagatgttgctttttctcaattgttctcacattaccacttttgtgattggtatatgaaagacccctctgaagttatgacatgtctgcagctacatttttttgtacatatttgaccatactttggtgccttcagagggagcacagctttgctgacaacttaatttttaacttctgacctccaaaactcagagggaataaatttctcttgttttaagacactttgtggtaatttattagggcaaccataggaaaatagctacctcctaaagttgttcttttgaatttaatctatagttttggatattcacaaacattatcagtcactcagtcaaccttatcatttggcacttcttcttatctgtagcattttggtacttagcatttagattcttgaatttttggtcctgtgcacaatacagaatttatcatgccccttcctttagtgtggttaaggagaaacaacaaatacatatcaaataccatcaatgaaaagtatttatacatatatttagaartactttttcagcacatattttggagtagagatagttttaggtgctgaggatgcaacaataaacaagacagaaaacttct

SEQ ID NO: 285847 - DNA, 606 bp, Homo sapiens
atatcttccctctgtagtgtaggctcccttagggatggaattatattttattcactgatgcttcctagcatgtaactgatggttggctcatagttactgctctcaagaaatatcttctgaattagtacataayccaggcaaacaaaacagccatttcaaggagggggtatggtgatagagtctgcttctgtgatagctaagtttttggcccagagctatctttacagggctaggcacttgttaacacaaattcatgaaatgattttttgtgcaaataaagacttatatttacttggatttacctttaagttagtgagtggcatgaatctctagagaagaagttgagtatcaaagaaattaagcactctcgtgctagcttaaatgtaattaataaagatatcaagtgtttctgagaaatgtttgccagcttcagaaaaattaaaaaagacatacaacttcataaaataatacaggtatgtgaatgagtgcaagatgaaaggggcaaataagaataaggcaagaaatgaatttcatagtccataaaatataacgtgcataatgactacttatttccccagctgccaaatttacaaaatgtgaatgatc

SEQ ID NO: 285848 - DNA, 1116 bp, Homo sapiens
agttactgctctcaagaaatatcttctgaattagtacataatccaggcaaacaaaacagccatttcaaggagggggtatggtgatagagtctgcttctgtgatagctaagtttttggcccagagctatctttacagggctaggcacttgttaacacaaattcatgaaatgattttttgtgcaaataaagacttatatttacttggatttacctttaagttagtgagtggcatgaatctctagagaagaagytgagtatcaaagaaattaagcactctcgtgctagcttaaatgtaattaataaagatatcaagtgtttctgagaaatgtttgccagcttcagaaaaattaaaaaagacatacaacttcataaaataatacaggtatgtgaatgagtgcaagatgaaaggggcaaataagaataaggcaagaaatgaatttcatagtccataaaatataacgtgcataatgactacttatttccccagctgccaaatttacaaaatgtgaatgatcccacccctagccatggttgataagactaggagaaaatatctgatctaagtggagawaatatcactataacataatgtttagtactacaatttttcttcattcactgtctctacttatctagtctcctatgtcagcagcattgtcactgctaaatcttttggaacatatagtggtaaattagtttggctgttaagttaggtgggaaaataaaaggtatacatttactaattttttccttgggattwctgattagatactatggcttactggtcctgtattattattgttgtaattacaatatctagtacttttctttgggcaagtgtattagtccattcttgcatctttataaagaactacctgcgactgagccatttgtaaagaaaagaggtttaattgactcacagttccacaggctgtacaggaagtatgattggggaggcttcagggaaacttacaatcatggcagaagggcaaggggaagcaggcacctcttcacatggtggagcaggagagagagaaagaagggggaagtgctacacacttttaaataaccagatctcatgagaactcacacaccatcaggagagcagcaagcggg

SEQ ID NO: 285849 - DNA, 614 bp, Homo sapiens
atattagctggagaattcaacacccactttcagcgtttgatagattttccagacagaaaatcaacaaggaaacattggacttaatctccactcccctgtggcccagggctggtctagaaatgccatccatgagccaaggtctggaactggggactctgagagcctgcctggtgctttacctcgctgcagctgaactggtacctaagctgcaaggcaaaatcccctttactctttcctctgcttttctcaagcagatggagtctctcctcataatcaccacagctgtgaatattctgggtcacacctgaacccagcatgtctcaagagtctcactgaaagtccacggcatgtactcctagttacaggtactgattattcaggatccaacagctctttaatcaacagttgataaatcatgccagggctaggtccttcctctcaaggcagcaggttcccttctgaccmattgtgtctagagatgtcatccaggagctagggtctgcagtggggtcctcatgactctgcccagtgccctattctactgtggctgagttgatatccaggttgcaagagtcctttttactctcccctctcctcttctgaagcagaagaaa

SEQ ID NO: 285850 - DNA, 1160 bp, Homo sapiens
tttgttccttctggtacttcaattccaacaacgttttgacccctgcaggaccaacaatcgattggtcctaccagcttctcattgtgtcttatctcatacatgttctcacttccctctatgcccagcttcaattctatgctcagacattatgatcactcctttatatacattgacagctctcttaccagtctctctcttttttgaattacttcggctagagtataaccctggttaatcaatatatctgcctatcccatatgtacatccaggtggccaaaagtagctggagaaaaacaataacaatgtggattgattcacttgaaattcatgactacaaaatgggcttgattatattgactgacaacattttttttctctgtctagactaagcaccgtccctgtcttctggatgactcttttgtatcattcytccaacattgaacatttccttccaattttaactctcagctgatgatttagcaaactgttcacctaggaaatagaatacattaaaagagaacttgcacatgctcgcagaccacatacacctacccatctgcttctgtcccatgtccttcaccttgtgtccwattatattttatttattcagaaattgttaaaattaatagtctctaatagtgcttagtatccctattcaagattttagaacaaaaataatgcaggggaaatgccacgatgtaaaaatagttaccttaaatggaacagccagacttcagaatcaaacacaaatgcttatatgaaattgaaaatctgtagatccctgagagacttcccttccgctgcctaaatttaatgtggataatttatcattctataaatacatttcagctacagttcattcatatgctttgcagtctctgtgtgcatttcagctcttggcattagtgagtgtataagctataagattaaaaaacttatacatattttctattggaattgagtgggtcaaaaacctggagcacataatgtttaatatatattatttctcagaaaagagttgctgtgtcctaccattaataggtattcttttataagctctgcattcctctcttcctgatggwttcttaatgacacatcatttgagtcatggttcaagtgggtaaggaaaacagagagcactttggaactggaataagcag

SEQ ID NO: 285851 - DNA, 613 bp, Homo sapiens
attgttaaaattaatagtctctaatagtgcttagtatccctattcaagattttagaacaaaaataatgcaggggaaatgccacgatgtaaaaatagttaccttaaatggaacagccagacttcagaatcaaacacaaatgcttatatgaaattgaaaatctgtagatccctgagagacttcccttccgctgcctaaatttaatgtggataatttatcattctataaatacatttcagctacagttcattcatatgctttgcagtctctgtgtgcatttcagctcttggcattagtgagtgtataagctataagattaaaaaacttatacatattttctattggaattgagtgggtcaaaaacctggagcacataatgtttaatatatattatttctcagaaaagagttgctgtgtcctaccattaataggtattcttttataagctctgcattcctctcttcctgatggtttcttaatgacacatcatttgagtcatggttcaagtgggtaaggaaaacagagagcactttggaactggaatragcagtgaaccaggccttcaatatatttctgtcatcctgacggcaggaaattatgcttattttgaaatac

SEQ ID NO: 285852 - DNA, 613 bp, Homo sapiens
attgttaaaattaatagtctctaatagtgcttagtatccctattcaagattttagaacaaaaataatgcaggggaaatgccacgatgtaaaaatagttaccttaaatggaacagccagacttcagaatcaaacacaaatgcttatatgaaattgaaaatctgtagatccctgagagacttcccttccgctgcctaaatttaatgtggataatttatcattctataaatacatttcagctacagttcattcatatgctttgcagtctctgtgtgcatttcagctcttggcattagtgagtgtataagctataagattaaaaaacttatacatattttctattggaattgagtgggtcaaaaacctggagcacataatgtttaatatatattatttctcagaaaagagttgctgtgtcctaccattaataggtattcttttataagctctgcattcctctcttcctgatggtttcttaatgacacatcatttgagtcatggttcaagtgggtaaggaaaacagagagcactttggaactggaataagyagtgaaccaggccttcaatatatttctgtcatcctgacggcaggaaattatgcttattttgaaatac

SEQ ID NO: 285853 - DNA, 414 bp, Homo sapiens
aatgaacgtttagattagatcaagttagttccagcgaaattcaaattacattatgtatttctctatggaaactaatcaatgcctaagataaaatgaattatacgaagttagaacaataataaacatattttaaaatataattttggggtctataatagaaagtttgaataaattatacaaaattaccttttcaaccatagcatataacacgttacagaaaaataagccaggcaaaattctgattagtggtcatcctcctccaaagaccagcattttgtctgcagtrtaaagaaactaacaaataacattttctaacacttgatatcagcacatttctcttagttaaaaataagataaaaaaataaaaataagaaaaaataaatttcatattttcttttatttatgccctttcta

SEQ ID NO: 285854 - DNA, 535 bp, Homo sapiens
ggactactattcagcctaccacagcctgagtggcaaagggaatggaacagttatcagaacccgaaaagagctgtatagaaaaggtacctggcgtgaaatgtggacttttaatataaagcaacacagccagctacgcagatcctccaaggagagatctggaaaaataagtactctgtcctcatgctcttccacctctgatctcctgcctgggtctcccattggccaaacccaaccagtagccacagcgggaggccactaacaacatccatgcacttcagtcttccaggtgccgagcaagggaggagaatggtaagagacagtctgtgaggcacagaagacagccagccccagggctgggtgtggtggctcackcctgtaatcccagcactttgggaggctgaggcctttggatcacctgcggtcaggagtgataccagcctggccaacatggtgaaaacctgtatctactaaaaatacaaattaaaagtttgcaggcatggtggcatgtgcctgtagtcccagctactaggaaggc

SEQ ID NO: 285855 - DNA, 603 bp, Homo sapiens
agatctgttaatcaccatgaaatatttcagcacaaattaatagttcatgccaactttgttttacccttccacagaaatttcttccagtaaatgcatgcgtagtggatgaggaatatgcaaccatgaatattgatcatccaaaaatatcaagcattttattttctttaaatagggttaaatctaacttcaaccccccaccagtgtactggctgtgaattccactttatcatgaccagatctactcccactatccagggatgtacaacaatgcaaggattatatccattcattcatcaactatttattaaacccttgctattaaacatagttctaggtattgtgaatacagtgagtagcaaagccagaaaaatctctgttctcaagaacttatatttctgagtggggaaataggtcatcaacaataagtgaaatagatgtgatactgtcaaattgaaatgaacactgtggagacaaattaattagtaaatatgaagtgctggattagtaaatatgaartgcaagatggtgagggctataatttaaaataaggtatcaaggaatgcctatgaatgaaacatttgaaaacctagttttagctaccca

SEQ ID NO: 285856 - DNA, 513 bp, Homo sapiens
aaaataacatcagggtgggtcaggcataagatagacattcttattccaaatggagaaatcagaaagaagaaagaggtcttgggtcccaagtgtgtcaaatatgctacctccagaattgaaagaaaaaaaaatgcttaccaggtactttcttctgtttctcgttggtgagaaatgcaagatgtaataatctctttaattttggacattatgtctttgcattctagattaatagatacttaacatatggttgatatggtagcactctggatctttgtatgtctatcastcatcttctggaggatatgtgtcttaccaaagtctccaacatagttgctacttgttactaattaacatgacaccgaaagtaggactgggcacagggagaagttgaactgtgagacagtggcaacaggggcctcagctaattctgcaggatgatctcgagctctcagagttgtttgtatcctcccgtggtgtggagccataattagattcccttgtgatggagcaaaa

SEQ ID NO: 285857 - DNA, 373 bp, Homo sapiens
aaaaatggcagaagatgaaattatccctgaagaagtacagagttaataatttgacagaaatactggtgaaagtcgacaatggagatgactcaagattaggrattgtcaagttggaaactatggtacaattttttgtgttacttgcgtggtactgcaagaacagctactcatgtttccaagcttggaaaatgatatggtttggctctgtgtccccacccaaatctcatgttgaattgtaattcccaatgttaagggagggatctggtgggaggtgatgggatcatgggggcagatttcccccttgcttgttctcatgatagtgaataaattctcacaagatatggttgttttaaagtgtgtggcacttcatttt

SEQ ID NO: 285858 - DNA, 373 bp, Homo sapiens
aaaaatggcagaagatgaaattatccctgaagaagtacagagttaataatttgacagaaatactggtgaaagtcgacaatggagatgactcaagattagggattgtcaagttggaaactatggtacaattttttgtgttacttgcgtggtactgcaagaacagctactcatgtttccaagcttggaaaatgatatggtttggctctgtgtccccacccaaatctcatgttgaattgtaattcccaatgttaagggagggatctggygggaggtgatgggatcatgggggcagatttcccccttgcttgttctcatgatagtgaataaattctcacaagatatggttgttttaaagtgtgtggcacttcatttt

SEQ ID NO: 285859 - DNA, 540 bp, Homo sapiens
tgggactaggaatacagggggctgacaccatgttggttttacttttctctttttgaaagaaactgtttaaatcaactaaaaaatggcagaagatgaaattatccctgaagaagtacagagttaataatttgacagaaatactggtgaaagtcgacaatggagatgactcaagattagggattgtcaagttggaaactatggtacaattttttgtgttacttgcgtggtactgcaagaacagctactcatgtttccaagcttggaaaatgatatggtttggctctgtgtccccacccaaatctcatgttgaattgtaattcccaatgttaagggagggatctggtgggaggtgatrggatcatgggggcagatttcccccttgcttgttctcatgatagtgaataaattctcacaagatatggttgttttaaagtgtgtggcacttcattttttttctgtctctttctcctgctctgccatagtaagacgtgcttgcttcctgttcgccttctgccataattgtaagtttcctaaggcctt

SEQ ID NO: 285860 - DNA, 569 bp, Homo sapiens
catcactgttctccaaactcagtagccatgtttctacctccaggccctggcctttactgttcttagtgcaggtaatgcttctccccagagatatccatcaatatagcttatatcctcacattatccaggtctctactttagatcaatttatggcacttgcgctctctaactactgaatgtagaacaacactcttatctgactgccagtttcttaccctggggtggtgttcttcacagaaatcatgacaaccaaatacatactatatgtttctttgcttattggttctctcatcactgctatgtcatctccataatagcacagactttgtctactttcttcaagagtatccccatcatttagaataatggccactagtagtaactgatcaatatatacattgtgaattaatggataaagtgtacatttgtgttacatagaaaaataaccatggccaccatattratacagtaaatcctcacacaatattgtgcataggttcctggaaactatgactttaattgaaattacatactatagaacaattttactacaggcttattagtatgaa

SEQ ID NO: 285861 - DNA, 569 bp, Homo sapiens
catcactgttctccaaactcagtagccatgtttctacctccaggccctggcctttactgttcttagtgcaggtaatgcttctccccagagatatccatcaatatagcttatatcctcacattatccaggtctctactttagatcaatttatggcacttgcgctctctaactactgaatgtagaacaacactcttatctgactgccagtttcttaccctggggtggtgttcttcacagaaatcatgacaaccaaatacatactatatgtttctttgcttattggttctctcatcactgctatgtcatctccataatagcacagactttgtctactttcttcaagagtatccccatcatttagaataatggccactagtagtaactgatcaatatatacattgtgaattaatggataaagtgtacatttgtgttacatagaaaaataaccatggccaccatattgatacagtaaatcctcacacaayattgtgcataggttcctggaaactatgactttaattgaaattacatactatagaacaattttactacaggcttattagtatgaa

SEQ ID NO: 285862 - DNA, 616 bp, Homo sapiens
ctgtctgttacttcaaggtatcacctctatagaaaggggatagtagcaaagaaagaatctggagaactcataaaataaggtttcaaggctgaaagattaacctgaaaacgtgcaactaacctaaattagtaaagtaattacgggtttctaaaatgtgaatatgtccaaaaaatcattacaggaaaaattaaatcttcacttggttagaaaatttactgttgctgacaccatttcttaatccttgatatgttattgaagaaaatttattctaacagaaaattcggtgagtgtaaaatgaaaaggaaagtctagacaaaagtgctttctgyctcaaagaacaagagatttcccaaaaaggaaaaggcatcaagaataacatcttaaaaacttaaaatatattcagaatcagaaaagagacaaataggaagaagctgaacccaaaggaaaataaactagttattctattagacataaagttcaagaaagcagtataattataatagttttaaagtattcctgttgtcagagtaggcatatgatagccagcatatcaaatcccagtttttgtcttcttccttcattcgttaaaaacaattagtcagtatcaatgccatgc

SEQ ID NO: 285863 - DNA, 401 bp, Homo sapiens
gtatatagtttaatatatataaaataaaatgggcatgaagttgtaaatgttagaattaaaactgaaatgacctaatggtgktttttttgctttattgttacaatgcataacaccataacaaagactgatacaaagaaagatctttagagtaaaaggaaaagagtaagaatggctctcacaaatgatatgaggtcagaaaaaataacatgagtttcaaatctaaatactgaatgtccttacaatcaaaggaaaattagattgctaaatggcaaataataaaactaaaaaacatactgagaccatttaaaaattgaacccaaggtctctgtatagacaaaactgtatattacatagaaatgtgcctaatacttagtatctaattgctcagataatattatttc

SEQ ID NO: 285864 - DNA, 614 bp, Homo sapiens
cactcaggtgtctgctttgctttctcttcactcctccttgttgtattaccccatctcycactgcagaaatttactttactttttgatatacaagatactgagactgcatctgtcaaattttcactgccaaaattattttgcaaaactcagttttatatactcgtgtggttgtttctctttgtttttcactaacattgaaagcaaatctacaggaaatacttttttttgcttggaagaggaatagagattataatctaatttggtaagtacatttatgaaatactaggacgctaaatattctgcattaatttggggaggtggccttttaaattttaattgtcagaagctacatttcctactgacttatttaacagcctgaagtctttctaaataaaagcaaattttagtgcaatatatagacaaccttaatccagacaacaatataatagttcagcagccaatcctgaaaagattattcaggatgcaatccagtgctactggtaactgtatacctcactggagataaacccagaataaataacatgcttgatgcttctaattccttaaaatcaacataaaaaccttgcgaactatttcatgccaggtttgacagg

SEQ ID NO: 285865 - DNA, 602 bp, Homo sapiens
aacaacaacttccaaaataaaacatggaagttgttattttccaactatctacatctgtcgtattaaaaataataaatattaaagtttgggtcttctccaaacatgactattttcttctttttgtctgaatttttgtgattttaatttcttaaactgagacaactttatatggtatataytgaaaatcaagtaccttaatacaatttttataaatctctatataaaagtaaataatattctttacttggatcaattataaaagataaaacctaacattctcaacagataacatcctattattattaaaatataaactaaattttatataataactcattttaatttgtttgctaaattgaacttagcatttcatgctttttggtgatacatgattaggagacttgtgcgtgtgtatggaagcccttgtgttagacagtactaatatggcctcaatgatcctcacctgctggtattcatgatcttttctaattcccttccgttaaacgtgggctaggcttactgacttgtttctaacaaatatgatgtggctgaagtaatggaaggtaactttttggcaaaggttacaaagagattgtgacctc

SEQ ID NO: 285866 - DNA, 454 bp, Homo sapiens
gtttttaattgtcttgccagaattatgagtttgaaaaaccaaacttggttattataaaccattttggcaattttgaaacaatcaccccaccatttttttcatgatttggatcattttatcttttccatgatgaatcatagagtgcagagcttccataataatggaagatttaaggactcaagaaggaccaggtggccatccaggctctacttgagtccacrttaatgttaaatttgcatcctattaaataaaaaatttgttcctccaagtgaatagttctgtttttaaataggttaacataggttaacacaggttatttgactgggatcaatgttcaaatcttaacaatttcagtactggctcacttagcatccaaatctgccaaatcatttccttagtatttaatcaattattgttctgcttgacattgggttagaagttttataaattagtt

SEQ ID NO: 285867 - DNA, 454 bp, Homo sapiens
gtttttaattgtcttgccagaattatgagtttgaaaaaccaaacttggttattataaaccattttggcaattttgaaacaatcaccccaccatttttttcatgatttggatcattttatcttttccatgatgaatcatagagtgcagagcttccataataatggaagatttaaggactcaagaaggaccaggtggccatccaggctctacttgagtccacattaatgttaaatttscatcctattaaataaaaaatttgttcctccaagtgaatagttctgtttttaaataggttaacataggttaacacaggttatttgactgggatcaatgttcaaatcttaacaatttcagtactggctcacttagcatccaaatctgccaaatcatttccttagtatttaatcaattattgttctgcttgacattgggttagaagttttataaattagtt

SEQ ID NO: 285868 - DNA, 557 bp, Homo sapiens
catgactcaatcatctcccaccaggtgcgtcccacaacacatggggattatgggagctacaagatgagatttgggtggggacacagagccaaacaatatcagtcacctaaaataagcaaacatctgtagaggaagcatcttcattccagatctcaaataatctcaatctacacaaatatttccccmatgaaagataaagtagcagacaaattctacaaaaacacaagaaatcgaggccctgtgagtgaaaaagtaaatactagagggagcaaacatatctcctgtcccacccccgcaaaaattcagattttacaattttcagtaataatatagaaaatgaactttcccatgtttttagtaaagaaatatagcttaaaaatgcatttaatgaaactaaaacaataacaacaatactgttagcaataagcagatctgaagaaaagattataatagaatatcttaaaatgtatgcattccatttttcaaataagagttcagtgtatagaatcagagcagaagacacaaatgaagagataattagtaaacagagatagacg

SEQ ID NO: 285869 - DNA, 580 bp, Homo sapiens
aacaatactgttagcaataagcagatctgaagaaaagattataatagaatatcttaaaatgtatgcattccatttttcaaataagagttcagtgtatagaatcagagcagaagacacaaatgaagagataattagtaaacagagatagacgtgaagaaattatctaactgggtatatatcttttctaaagtccactttcagtgacttcacattaataactttgaacgracatgaataaatattcacaccacaataaattagcaaaactagatattaaggcggcttcttcagagctctgctttaccaactcacactgacttgaattacacaacagactgacagcagaagcaaatgtgagaattccgcttttttcaattaagccaggcaggaaagagaattgccaacatgcaaaataaggtcacactttgtattagtgtttttgtgtttctttgttttgaaaaccacaattatttttcacatgtatattttcaaaaactaaacttctttatgttaataatttcattactgttattactttctatgtactgtatcatttaacttcagtgaggttctagaatgg

SEQ ID NO: 285870 - DNA, 580 bp, Homo sapiens
aacaatactgttagcaataagcagatctgaagaaaagattataatagaatatcttaaaatgtatgcattccatttttcaaataagagttcagtgtatagaatcagagcagaagacacaaatgaagagataattagtaaacagagatagacgtgaagaaattatctaactgggtatatatcttttctaaagtccactttcagtgacttcacattaataactttgaacgaacatgaataaatattcacaccacaataaattagcaaaactagatattaaggckgcttcttcagagctctgctttaccaactcacactgacttgaattacacaacagactgacagcagaagcaaatgtgagaattccgcttttttcaattaagccaggcaggaaagagaattgccaacatgcaaaataaggtcacactttgtattagtgtttttgtgtttctttgttttgaaaaccacaattatttttcacatgtatattttcaaaaactaaacttctttatgttaataatttcattactgttattactttctatgtactgtatcatttaacttcagtgaggttctagaatgg

SEQ ID NO: 285871 - DNA, 580 bp, Homo sapiens
aacaatactgttagcaataagcagatctgaagaaaagattataatagaatatcttaaaatgtatgcattccatttttcaaataagagttcagtgtatagaatcagagcagaagacacaaatgaagagataattagtaaacagagatagacgtgaagaaattatctaactgggtatatatcttttctaaagtccactttcagtgacttcacattaataactttgaacgaacatgaataaatattcacaccacaataaattagcaaaactagatattaaggcgkcttcttcagagctctgctttaccaactcacactgacttgaattacacaacagactgacagcagaagcaaatgtgagaattccgcttttttcaattaagccaggcaggaaagagaattgccaacatgcaaaataaggtcacactttgtattagtgtttttgtgtttctttgttttgaaaaccacaattatttttcacatgtatattttcaaaaactaaacttctttatgttaataatttcattactgttattactttctatgtactgtatcatttaacttcagtgaggttctagaatgg

SEQ ID NO: 285872 - DNA, 538 bp, Homo sapiens
ccaaactgggaagcgcatcagtggaagagcttttctttcatattctttttctctcattccgattgaacaattttatgtagttttgtcctgtttttttttcctcctcctcaaccaatacccactccatctagacccaaaggcagaatattctacttgagacaacactttatctctaggaatgattttttttaataaagctttcctcatttgtmctccaggaaaataaagcaccttttaaaatcccatttagaaggaaagcagtattactatataagaatattgtactcatcagatagctgaggataataactcctctaacctctctcttctcttattttcctccttctcctcatcttctgctttcaatattttggctaaatgttgtaagtagaagaaagttgattatgtattgtgattgtgatagggtgaattcttctacctcttaatacaacttgaatgagaattatctggccccagatacaggtggcttgctttagaatgcagataattggtgtccttggttttcttttacctaaag

SEQ ID NO: 285873 - DNA, 616 bp, Homo sapiens
gttatgcttttaactgcatactacatatattatatatatttaaatatatgtatagtaatttacaaayatgtaacgtttgagtaatgttgtaatttaatcctcaaaggatataaacgtaaatgtacaccttttacaaaagttccttacattcatcaatcaatagtatcatatttctttcctaaagggaatgtaataattcctcatttaaaaataaactttttattattttagaggttattatacatgatttagaaatcactgaaacattaaaagaagtaaaaatctcccataaaatcctaacttcatcatccagagataaataatattaatagtgtggtgtataattttttagttctctctctctctttctcaccatttatccgtataaggtatattttaaaagaaaatggttatgtttttaacatacctttttatataaaatatatcaacattgtttcatgtcatcatatattactttgcaactttattttaatcataggattatgttgtaccttataaagcagctttaacaaatcatttaaatttatttccattttgaataaaacttattgtctgtgaattaaatccacaagataatgttatggagaaatgataa

SEQ ID NO: 285874 - DNA, 512 bp, Homo sapiens
tggggcagacagttaaatggtgaattgtgcatcccaggcaaactgcttgttaatggcagagaaaacgaatgaaaggcatcaagagaaaataaattgcagaatkacagagctagtgccacttgctccacctactttatttctggaaatccttcctgtgttaaacataagaaaatgtaggtttgattttattaatagaggcagcctacccttgcacagcctcaaggattgaaatggacagcagaagcatgtggggatacataattttaagcatagcattttataacatatttgcatttttgaaatggtatttacagaagattaatgaaaatgtatatatattttggctttataataattattagaaaatataggactctcgtagcatttttaacatctctgtatttaaaacaatgactgacaaggcataggatattataatttaattggccacattaaagcaaattcaaatagaaaagcctatttttgtgatcttgcttttttttttttttcca

SEQ ID NO: 285875 - DNA, 556 bp, Homo sapiens
ttaaatgttacctgcactagaagaaaatatgttcaaaacatttttttttacttagcaaattttctatttctgtttatatgtatatatggaagtgtctgtgtgtgtgtgtgtgtgtgtgtgtgtgtgtgtgtgtgtgtatttaagattctaggatgactaacaaagatttcctgtatcaaccattcatgaaactatataaattcttttatatacttagagtagcaagttcaatatgattgcatcagtatgagttctagataatatcaattttcagctgtgaatatggttagactacctacagcttcacatccggaaaatgttgcctcttgtcttttgtaattaatctgytccataagtaggtgctatcaaagttcatgaaatcaggatgctttctcaaattacattgccaatttgaatagtcttagtaaaaaagtttaatattttcttgtttaactcaatgaataattgatttgtaaacagggatacattttcaatctgagttgtaatatttgacatcaagtaaaacttataatttaattataatttttttgaatga

SEQ ID NO: 285876 - DNA, 572 bp, Homo sapiens
ataaacaacattcttggcagaaaaaaaaaaagaatatctaaacctgggaagatgctttattctgtctttttattcttaaaatgtttaaactagggaaagcataagttgggtaggtacagcatataaaaattccaaaaagctcaatgtactttggacataagacacattgaaaaagagggaaacatatgtaaagaaaagaaaaagtagtaatttcagcaagtacttgacatggaaaggacctaatctgaagtggccagagactgagtagatcttcaaactcattttcaatgatcaagatggcaaagggattctacactttaggaatctgaatgagaacttcagtctttttcaaaatttgttgcacatctccttgcttcaagatgtgcctctttttttccatcagaaaatgattctttcyggattttaaatgaagatatagggtattttatgtttctttctctgctccacatgcaatgatgaaaattttcagtcttcaaaacacaatcaaacagtaagtaatatttctacttttatatttgggcatgtaaataaacatatacatacattaaaaa

SEQ ID NO: 285877 - DNA, 632 bp, Homo sapiens
  misc_feature (1)...(632): n = A,T,C or G
gtcgatgctggtagattccaaggataataccattatccctgcgggctcagcagtaggattattaacgcttgggatgactgctcctctgacaagtagatgatgaagttttgttaaaagtggattttaaaaaataacagtgctatttttccaatgtgaaaaagtcattaaataaagatggcataaaagaggcatggctttccatgaacctaataacattttcaaaaccttgaaaagctatgaggcccagatggcttatacttggcactggcaaacyggggccagatagtaaatgttttcagctttgtaggccacatacagtctgtcttgtaactattcaactctgttgggtagaatgaaagcaattgtaaataatatggaaacaaacgaatttgattgagatctgacaaagcttatagacaatgaatttgcatttcatgtaattttcagtgtcacaaaataatatttcttttttattttttaaaaaaaccatgtaaacatataaaccttgtctttagctcacttgcctncaacaacagtcagagggctggacgtgacccttggatgatcctggcttagcctggatttaccctggctatatcttgcagaatgagcagaatccttgagagctggca

SEQ ID NO: 285878 - DNA, 571 bp, Homo sapiens
agggcaaaaacctacagtaaccaagaaacggtggtttataattttaagggagaataaataaggagaacaacctgcccagaatccttgcctttttgttctgaaattcaaagaccctttcttgattctgtccttactttttttaactctacaactaatttgttagcaagatctattatttctatctctaattttatacatatttttgagatatttatttctattttcatgatcctggtccataatgtccagyctggtctattaattgttctccctgccatgactctttgtctacctccaatttgtgccacaacgtatagccagagtggttttcttagaatggaatttaatcaaataattctcctattaaaaatctcatttttttaattctcaaggaaatatataaagcctccaattgaatacaactcttttctgatctttgtatagatagcattctgaatatctgaactctccaagttttgagacccacactgagaaaatatgcatgcagaattccttttaagcattttcatttttctttttgctggatatgccatatgttaaataaggaacg

SEQ ID NO: 285879 - DNA, 571 bp, Homo sapiens
agggcaaaaacctacagtaaccaagaaacggtggtttataattttaagggagaataaataaggagaacaacctgcccagaatccttgcctttttgttctgaaattcaaagaccctttcttgattctgtccttactttttttaactctacaactaatttgttagcaagatctattatttctatctctaattttatacatatttttgagatatttatttctattttcatgatcctggtccataatgtccagtctggtctattaattgttctccctgccatgactctttgtctacctccaatttgtgccacaacgtatagccagagtggttttcttagaatggaatttaatcaaataattctcctattaaaaatctcatttttttaattctcaaggaaatatataaagcctccaattgaakacaactcttttctgatctttgtatagatagcattctgaatatctgaactctccaagttttgagacccacactgagaaaatatgcatgcagaattccttttaagcattttcatttttctttttgctggatatgccatatgttaaataaggaacg

SEQ ID NO: 285880 - DNA, 579 bp, Homo sapiens
aggacagaaacaattcagcaaccacatccagttcagtgtttgcccaattcttgtgtttggagtctctctagccctgcagaacctcttcggatgatccgttgaagcactcatctttagccactggaaatgctctggaaggcataaaaataagaaagaaaccaccttaatsgtattcagagctttaactgcactagatgctctaagtctttcaaacccaattcattttactctctatttttcagtctctcacttttgctcattctcctgtttcacgttgtgctttagagttcaatggccctgtctctccatctagaatttggcatccttccaccgctattcaaattttcctacagtctcaaataatatagattgctttgggcaatccacccttcccagctcaaacattccaggaatccttatctcggggccacatcctcagcagacagctctctacctgttttacttctgtctcactggagtgaactagataataacaaaagcttttctataccctatacaaacactgcagagtctgtgtaatctatagcttgtgataaaacgatgtgtagaggacatctg

SEQ ID NO: 285881 - DNA, 579 bp, Homo sapiens
aggacagaaacaattcagcaaccacatccagttcagtgtttgcccaattcttgtgtttggagtctctctagccctgcagaacctcttcggatgatccgttgaagcactcatctttagccactggaaatgctctggaaggcataaaaataagaaagaaaccaccttaatggtattcagagctttaactgcactagatgctctaagtctttcaaacccaattcattttactctctatttttcagtctctcacttttgctcattctcctgtttcacgttgtgctttagagttcaatggccctgtctctccatctagaatttggcatccttccaccgctattcaaattttcctacagtctcaaataatatagattgctttgggcaatccacccttcccagctcaaacattccaggaatccttatctcggggccacatcctcagcagrcagctctctacctgttttacttctgtctcactggagtgaactagataataacaaaagcttttctataccctatacaaacactgcagagtctgtgtaatctatagcttgtgataaaacgatgtgtagaggacatctg

SEQ ID NO: 285882 - DNA, 561 bp, Homo sapiens
catccaggaccagcagtccagtctttcagccttcaggctgtttttggcttgaaggtagggtttcaccagagacccacccctatctgcttaggcatttggctgcctcctgttgctacgaacagaataaagatggtgtcttacatgttgcagtgcttgtaaaacttagtttactgaaacaataaagttatatttaacagaaaaatattttacatagccttggttttaaaatttaaatgtaaactaattaaaataaaataaaattaaattaaaaatttatctcctyagatgcactaaccaataaccagtacccagtaaccatgaaaggaatgcttgctgcagtgtcaatagtcagtactaagagggaagtttataagcgcttacatcaaaaaagaagaaaaacttcaaagaaataatctaatgatgcatcttaaagaactagaaaagcaagagcaaaccaaacccaaaattagtagaagaaaaggaataataaacacaagagaagaaataaaattgaaatgaaaacaatacaaaagatcgatgaaataaaatgttggtttttga

SEQ ID NO: 285883 - DNA, 561 bp, Homo sapiens
catccaggaccagcagtccagtctttcagccttcaggctgtttttggcttgaaggtagggtttcaccagagacccacccctatctgcttaggcatttggctgcctcctgttgctacgaacagaataaagatggtgtcttacatgttgcagtgcttgtaaaacttagtttactgaaacaataaagttatatttaacagaaaaatattttacatagccttggttttaaaatttaaatgtaaactaattaaaataaaataaaattaaattaaaaatttatctccttagatgcactaaccaataaccagtacccagtaaccatgaaaggaatgcttgctgcagtgtcaatagtcagtactaagagggaagtttataagcgcttacatcaaaaaagaagaaaaacttcaaagaaataayctaatgatgcatcttaaagaactagaaaagcaagagcaaaccaaacccaaaattagtagaagaaaaggaataataaacacaagagaagaaataaaattgaaatgaaaacaatacaaaagatcgatgaaataaaatgttggtttttga

SEQ ID NO: 285884 - DNA, 584 bp, Homo sapiens
tgcacctatgtagttcaaacccacattgctcaagggtcaactgtatatgctatctgcaagaaatgcactttaaaaaaacagttcaatttaaaacaatgatagaagaatgttgggattcaatcagaatggtggcagaaatattaaagggaaatattagggaaagttatagggaatagtcacaaaccttttggaaggcagaaaggttacatagcttgtaataattgaacaggctgaaggcagccggttcttaccttagagcattaggtcatagggtaaatactagggacaacagaggcttccccagttaagtctgcttaccctacctccattaaccaacctttgagccagatagccctctcaggaggaggtcgactagggatattgcccccaatagtatttactttagaccaytgtacctgagctttaatcattcgtagacctactctcttaaccatgttaattatccacaagtgtgttgactcagagcttctgttgttaattgtatatgaaattaatgcctggagtgtgagctgctcagggccagctgcagtcacaagactctcttggtgtgcaggctgtcggac

SEQ ID NO: 285885 - DNA, 583 bp, Homo sapiens
ggattgatttgctgaaggataattcagttcccatagtgaaatggaagaaaatatcattgtgggcatttacaagttgcatgcatcatgccatgttttggaagccaaatccaagctgttttgaatgtattgccctattatagtccaagcaatataattaaaagctatggctagtatgtaattgctaattgtacaataaccagcagtttcttctggattttaatatttattcataatttccctcactaaatcaaattaaccattttggatagccaggggctaattctgttgtcattatttttgtcctacaaatagacttcttacattccagctggccaactgatatttgaagamagaactgactcaatcgtgttcattttatgcttagttaaataaaagacacgcaacttggggttaaatattgagtaactagatctatcaagccagcccagcatttcatattcaataaacaatggatgaatctatgaagattgatatattcttcatgggatccaaaccagtgagtaagttaggtgaaatccttctggaatcagttggacaagatagtaatagagatagggataat

SEQ ID NO: 285886 - DNA, 583 bp, Homo sapiens
ggattgatttgctgaaggataattcagttcccatagtgaaatggaagaaaatatcattgtgggcatttacaagttgcatgcatcatgccatgttttggaagccaaatccaagctgttttgaatgtattgccctattatagtccaagcaatataattaaaagctatggctagtatgtaattgctaattgtacaataaccagcagtttcttctggattttaatatttattcataatttccctcactaaatcaaattaaccattttggatagccaggggctaattctgttgtcattatttttgtcctacaaatagacttcttacattccagctggccaactgatatttgaagacagaactgactcaatcgtgttcattttatgcttagttaaataaaagacamgcaacttggggttaaatattgagtaactagatctatcaagccagcccagcatttcatattcaataaacaatggatgaatctatgaagattgatatattcttcatgggatccaaaccagtgagtaagttaggtgaaatccttctggaatcagttggacaagatagtaatagagatagggataat

SEQ ID NO: 285887 - DNA, 484 bp, Homo sapiens
aacagctctgaattgagttgtactctcccctcattaaaaacaataataaaataaataacaacagaacaaaacaccattatcaaagcaggaagttagctcagggaatagagcaaatgaaacacaaaacacaccctcttagaaactgacatagtagaaaaagcacggcattaaatatcaaatctatagctgatcaatcttgtgaagatcatatgaaaattggcatacaacagaaaatgctattgaaatattgttaytaaatttaagcctctcacttagaaacaggcatatatatggactcacgcatttattcaatcaacaaatatctgtagagtacctggcacataccactgagataaatgttaggtatttattctgacttaagttactggaacagtttttctaatcttgtctatgatttttacagagaataaaataattttctgttgcatgatttaaaactctcagcaacaggttgcagtaataa

SEQ ID NO: 285888 - DNA, 792 bp, Homo sapiens
agtggctttacctgtgaattgtaccaaaataaacctaataaagaattaacatcaatttgtcacagattcttccaaactatagtagtgaagggaacacttcttaactcaacttataaggccaatatttgcttgataccaaaactaaagacatcacaaggaaaaaactatggaccaattttttttattaatatagatgtcaaaatccttacctaaatactaggagaggccagcagcatataaaaaggattttgcactgcaaccaagtgggatttatcccagaaatgcaagcgtgtttcaacctatgaaaatcaatcaattatattaataaaataaaggaaaaaaccatgatcatttcaacagatagagaaaaatcatttgacaaaatccagtgycttttcatgataaaaaacatcataaaaccaggaataaagaggaacatccttaatatgataaagggcatttaagacaaaccaatagcaatagtgwatacaaatggcaaacaggcatgaaaatctgctcaacatcactgatcatcaggaaaatgcaagtcaaaactacagtgagataccatctcaccccagttaaaattgcttttatcctaaaaacaggcattaacaaatgttggtgaggatgtggaaaaaagggaacccttgtacactgttgataggaatgtaaattaattcaaccactgtggagaacggtttggatctttctcaaaaaaataaaaatagaacaaatawatgatctagtaatcccactattaggtatatacctaaaagaaaggaaatcagt

SEQ ID NO: 285889 - DNA, 554 bp, Homo sapiens
tatttttcttgacccatttaaactttccataatgtttaatcaaaatattcaatatttargttaaaaacagcaaaatctgggatacaaggtgtaccaacctcaagtaaacatgccaggtgtttggaaaagtagaagaataatgaaccttactacatgcaaactgtgcaatagttacatgtagaatgcatctcaaaaaaaaaaaggttcctggaaaccacagtgctatgaaaagataatcatagaaaacaaggataaatttgaataccacatactcattttaagaaaaattttcactgagagaaaaaatttaaagcaagttgatggcatataaacatccttgaaattcttcaagtgaatacaaattagttgagttaagcattcagataatttgggtccttctcaggtggcctagcaagttagtcaaaagataagacctgtaatcaagctgccctctctcattaccgtcgttaaactgcataggtagacataataatcgacttgaataatgtaccatcaaacaacattaaatagtctatcagatcacactgcttata

SEQ ID NO: 285890 - DNA, 514 bp, Homo sapiens
tgggggataataatgcacttcagatttatcctcaatgtctccatcaatagtattgagacaaccatgcaactagctatcttgatcccctaactgcgtytttattcttgaagtagataacacaatggaagtaaattaatatgactcactttaactaaaaatgaatatgttaggctatagttagagacatcatgtttatcaaccaaatggaatattcagtcaaagacttcagtatatataataaaatgtagatatttcaaattatttcagaattttagtgaatttatatctcattaaaaaaaatctttcttaggtttccataccacccaaactaaagcaaagatcccaaagtgatgtaagaaaagaaaaatgaatcatttgctttctgtgttactgaatgaatattttattttatttcatttttaccttttagaagagattgaaattctctgcttttatcttcgctgacttttccttctagggaggagtaagtgttccttacatcattcacagtcaa

SEQ ID NO: 285891 - DNA, 606 bp, Homo sapiens
tttaaaatatgcagctagatatatgtatgtagttgtagctatgttctgagaattttattgtttactgaggtattcgttaatcaaagataaagagactcataatttagtttgaatcactttatatagcaataatactgtctatccctttacacatgtattgcagtaattcaagaatattatggtcttttataaagatactgaatttcaatcccttaaaaaattacaccaccattgttaagggatattcagctgcattcttaaagacagccctttaagtcacatttcttaattgagtgccttgttttgtatgactagatccatgccaaacacagtgaatagatgtttttagcagtaaccaaccttatgtttgtaaragctaaagtttagcctaaaagaaatggcaaaaactgattagaaagatggaaaaatatgtgacatgccaactttggatcagcaggaggttcttgttgattcttagtcataatcccatttcttagggatcagtacccattaagcaacctcttattaatgaattgaagagagccttcttagatcccttaaaagaataagttgttccttccatgtcaagggtcttccataatgaca

SEQ ID NO: 285892 - DNA, 599 bp, Homo sapiens
ctctttctatgcacctggcactgttctaggcagcaaatagagtagtaataagacaggcaaggtccctgttttcatgggatgtattgcggaaagacataaaatacaccattgtctatataagtagaataatttcaaataattcctacaaagaaaaaaataaaggtgacaaaataaggaatggcaagtgagagcatagttaactttacattgggtggtaagagaaggtccctttgaagaggtgacattaaagctggaggtgcaagtggaagaggagtccttcattataaaaggtgcagaaagagcattccagcaagagcaaaaaaagtttcctttgagatattaacttgacatgttcaataaacagaaaggaagccagtgtggctggaggaaatgaagtgcagtgatcttggagtgtgacaatgaatgaaagaccaaatttcacacattttaagacayacatctctgaaatcaagaatgtgtcttgaaatcaaaggcatttttcagtcactagtggtcagatagcagttgttgccattgccttcgaaatactttaccagtttcatttacatttccttcttaagtttgcaaaagtgatatgt

SEQ ID NO: 285893 - DNA, 608 bp, Homo sapiens
ttgaaatacaaataatttccccataaatcttacattcacatatttggattctgagttttacccaagtggcacacaaccataatttgtaggacaggtgaaataaagttcctactattctggtactgtatctagactgagctttacatatttttaatagctttttttttttttttttgagacagagccttgctctgtcacccaggctggagtgcagtggcgtaatctcaccctactgcaacctccaccttctgagttcaggcgattctcatgcctcagtctcccgagtagttgtgattacaagcatgagcaaccgcatctgtctttcttttctttctttctttctttctttctttttctttctttctttctctctttctgtttctttctttccttctttctttctctctttctstttctttcttttcttctttctttctttcctttctttcttttatttcttctgttctttctttcttttctttctttctttttttttttttgtatttttagtagagacaggatttcaccatgttggccaggctggtctcgaactcctggcctcaagtgatctgagggtcttgacttcccaaagtgctgagattactggt

SEQ ID NO: 285894 - DNA, 608 bp, Homo sapiens
ttgaaatacaaataatttccccataaatcttacattcacatatttggattctgagttttacccaagtggcacacaaccataatttgtaggacaggtgaaataaagttcctactattctggtactgtatctagactgagctttacatatttttaatagctttttttttttttttttgagacagagccttgctctgtcacccaggctggagtgcagtggcgtaatctcaccctactgcaacctccaccttctgagttcaggcgattctcatgcctcagtctcccgagtagttgtgattacaagcatgagcaaccgcatctgtctttcttttctttctttctttctttctttctttttctttctttctttctctctttctgtttctttctttccttctttctttctctctttctctttctttctttycttctttctttctttcctttctttcttttatttcttctgttctttctttcttttctttctttctttttttttttttgtatttttagtagagacaggatttcaccatgttggccaggctggtctcgaactcctggcctcaagtgatctgagggtcttgacttcccaaagtgctgagattactggt

SEQ ID NO: 285895 - DNA, 620 bp, Homo sapiens
tttgctagctctgaaaataagtccctatatgcaaagatactacaaattcattatgattattatgtagtgtcgtaagtgcagtgaacaggggaattcaaagagacctgtaggagcgrttagaaaggccacctaacttcacctgagaaggcttcctggagttattattaggtgtgaaaagagagaacgatggcaaaagagggcccattgttagtcacaggggcagacagggaagaaaggtgggtttaacaaacagcacatattgtaccagagaaccacttatttgaatagccggaagtggcggaagatgaggttggggaggtaggcaggaggcagatctaggatggcatcgtgtgactaactgggtaacaaatctagattgtattctggaggcaaccaatagcctgtgaagcctcacgagctgggaagtgaactggtcacgcttatcttcccacttgtgataagagactgtacctgccaagggagtgtaatgtaggagctgagagctacaactctaaagccagccagcttggatttgagtctttgccctgagctttgttagccaagtgaccttaggtaagctacttaatccctctgtaaagaaataatgataaaaatcttcc

SEQ ID NO: 285896 - DNA, 620 bp, Homo sapiens
tttgctagctctgaaaataagtccctatatgcaaagatactacaaattcattatgattattatgtagtgtcgtaagtgcagtgaacaggggaattcaaagagacctgtaggagcgattagaaaggccacctaacttcacctgagaaggcttcctggagttattattaggtgtgaaaagagagaacgatggcaaaagagggcccattgttagtcacaggggcagacagggaagaaaggtgggtttaacaaacagcacatattgtaccagagaaccacttatttgaatagccggaagtggcggaagatgaggttggggaggtaggcaggaggcagatctaggatggcatcgtgtgactaactgggtaacaaatctagattgtattctggaggcaaccaatagccygtgaagcctcacgagctgggaagtgaactggtcacgcttatcttcccacttgtgataagagactgtacctgccaagggagtgtaatgtaggagctgagagctacaactctaaagccagccagcttggatttgagtctttgccctgagctttgttagccaagtgaccttaggtaagctacttaatccctctgtaaagaaataatgataaaaatcttcc

SEQ ID NO: 285897 - DNA, 608 bp, Homo sapiens
ctagtaacagatgccatataagtgtttgctactattattattattatttgccaatcaaatgaaagtacgaaggacttcttttgaccatatcaagggtttgcagcagcactgtgtccaaaagtgaaggacctaggcttttctctaatgccattgtcatttgcatggcctaatgagtaaggaatcttggtaatggaaagrattactaaaagaaaacctcaggctctccaggacctcaaataagagaatccctacatgcagttagtacttttctatagaaggagtttaagattatttttgttagaaaatccagaggataaagttctgttcagcaagttatacctttagtatcttgttttctcatagcacatattaacattttttgaagtctgataggtatgttagtgtttactttttatagggaatattccttagacagaggaattattattatttttttaaattctgtgtaacccaaagcctagcacagtgctagcacatgatgggcaaattataaatattcatcaaattgttcccaacatttgaaagcaaggaccttggataacacaactagcatttatttaaaaactagtatttatcaaactattagt

SEQ ID NO: 285898 - DNA, 608 bp, Homo sapiens
ctagtaacagatgccatataagtgtttgctactattattattattatttgccaatcaaatgaaagtacgaaggacttcttttgaccatatcaagggtttgcagcagcactgtgtccaaaagtgaaggacctaggcttttctctaatgccattgtcatttgcatggcctaatgagtaaggaatcttggtaatggaaaggattactaaaagaaaacctcaggctctccaggacctcaaatragagaatccctacatgcagttagtacttttctatagaaggagtttaagattatttttgttagaaaatccagaggataaagttctgttcagcaagttatacctttagtatcttgttttctcatagcacatattaacattttttgaagtctgataggtatgttagtgtttactttttatagggaatattccttagacagaggaattattattatttttttaaattctgtgtaacccaaagcctagcacagtgctagcacatgatgggcaaattataaatattcatcaaattgttcccaacatttgaaagcaaggaccttggataacacaactagcatttatttaaaaactagtatttatcaaactattagt

SEQ ID NO: 285899 - DNA, 608 bp, Homo sapiens
ctagtaacagatgccatataagtgtttgctactattattattattatttgccaatcaaatgaaagtacgaaggacttcttttgaccatatcaagggtttgcagcagcactgtgtccaaaagtgaaggacctaggcttttctctaatgccattgtcatttgcatggcctaatgagtaaggaatcttggtaatggaaaggattactaaaagaaaacctcaggctctccaggacctcaaataagagaatccctacatgcagttagtacttttctatagaaggagtttaagattatttttgttrgaaaatccagaggataaagttctgttcagcaagttatacctttagtatcttgttttctcatagcacatattaacattttttgaagtctgataggtatgttagtgtttactttttatagggaatattccttagacagaggaattattattatttttttaaattctgtgtaacccaaagcctagcacagtgctagcacatgatgggcaaattataaatattcatcaaattgttcccaacatttgaaagcaaggaccttggataacacaactagcatttatttaaaaactagtatttatcaaactattagt

SEQ ID NO: 285900 - DNA, 380 bp, Homo sapiens
agtacttttctatagaaggagtttaagattatttttgttagaaaatccagaggataaagttctgttcagcaagttatacctttagtatcttgttttctcatagcacrtattaacattttttgaagtctgataggtatgttagtgtttactttttatagggaatattccttagacagaggaattattattatttttttaaattctgtgtaacccaaagcctagcacagtgctagcacatgatgggcaaattataaatattcatcaaattgttcccaacatttgaaagcaaggaccttggataacacaactagcatttatttaaaaactagtatttatcaaactattagttactagttctaattatgacacaactgtatgcc

SEQ ID NO: 285901 - DNA, 380 bp, Homo sapiens
agtacttttctatagaaggagtttaagattatttttgttagaaaatccagaggataaagttctgttcagcaagttatacctttagtatcttgttttctcatagcacatattaacattttttgaagtctgataggtatgttagtgtttactttttatagggaatattccttagacagaggaattattattatttttttaaattctgtgtaacccaaagcctagcacagtgctagcacatgatgggcaaattataaatattcatcaaattgttcccarcatttgaaagcaaggaccttggataacacaactagcatttatttaaaaactagtatttatcaaactattagttactagttctaattatgacacaactgtatgcc

SEQ ID NO: 285902 - DNA, 491 bp, Homo sapiens
ggattgaacttgatgctagcgttggttgggagggtaagattctgtaacttgaccactccttctgctttctctgtggatgtgagagtttgatttctcacaccctcagcaggtgcacttgtttctgagggaggcagtgttgatttaagaagactgtcttcagaagttcttgcctctggagttgtagctatctccgccgacatgacccgagyggttggcagtatttgcaaactttgtattttatttggaggaactgaagcagaaggcatagtcttctgagagttcccatcctcaggtatagtccaagaatgcttactgttgttaagcccaatgcccccactccataaactagaaagaaggacaaataatcttgcccccttcatctcagtagtttgaagcaaggtagctcatgtgaaatttggggacaaaatccttatggcctttttgatagctgcttccacactgaatctgctaagactgagttttgccagttt

SEQ ID NO: 285903 - DNA, 491 bp, Homo sapiens
ggattgaacttgatgctagcgttggttgggagggtaagattctgtaacttgaccactccttctgctttctctgtggatgtgagagtttgatttctcacaccctcagcaggtgcacttgtttctgagggaggcagtgttgatttaagaagactgtcttcagaagttcttgcctctggagttgtagctatctccgccgacatgacccgagtggttggcagtatttgcaaactttgtattttatttggaggaaytgaagcagaaggcatagtcttctgagagttcccatcctcaggtatagtccaagaatgcttactgttgttaagcccaatgcccccactccataaactagaaagaaggacaaataatcttgcccccttcatctcagtagtttgaagcaaggtagctcatgtgaaatttggggacaaaatccttatggcctttttgatagctgcttccacactgaatctgctaagactgagttttgccagttt

SEQ ID NO: 285904 - DNA, 629 bp, Homo sapiens
ctgctttctctgtggatgtgagagtttgatttctcacaccctcagcaggtgcacttgtttctgagggaggcagtgttgatttaagaagactgtcttcagaagttcttgcctctggagttgtagctatctccgccgacatgacccgagtggttggcagtatttgcaaactttgtattttatttggaggaactgaagcagaaggcatagtcttctgagagttcccatcctcaggtatagtccaagaatgcttactgttgttaagcccaatgcccccactccataaactagaaagaaggacaaataatcttgcccccttcatctcagtagtttgaagcaaggtagctcatgtgaaatttggggacaaaatccttatggcctttttgatagctgcttccacactgaatctgctaagactgagytttgccagtttgagatgtgtagaggaaacaggtttctgtgttttgtagcgtactcaggaagttcggtttcctgtttctgtagggtttttgtgatctgtgacctctagtgggatggctctatggaagtgctgaagggtctctgacaaagctaagggtaaatgggaaagcacaggcaattattatcaggaaaacccatgaaaaaatatgaag

SEQ ID NO: 285905 - DNA, 619 bp, Homo sapiens
tctgacaaagctaagggtaaatgggaaagcacaggcaattattatcaggaaaacccatgaaaaaatatgaagtaactttcttttcctgagcacaccctggtttcacgtttcactgatttcaaagagaaatttcaggttcacgatagagagtgcaaaattttgttgatataggctgaatacagttttaacattttgtkctactacataaagacactgagaaaagtttttatgatacttatctgctgtgctctatccagaaagctgcattttgttcaagtgtatatccacatgcatacacataatcaaaagcttgtttacagtgtctctatcctttcatatagtacatatactctgaattataaaacatctatctacatacatgtatatctttctatttttataaatacacttcagctgtatcattacttaatctcaatgattataagtaataacagaaaaggaaagcataagtaattgaattagacaggtataccaggaagtcactttaaattttgctcctggaacttctaccagagatacccactaatggaataaataatcagaattttacttcctttattttccaatcacgattgtctgatggttgggggtaaccaat

SEQ ID NO: 285906 - DNA, 559 bp, Homo sapiens
tttttctcttgaataaattgagaacatggacaaaattagtcttaaccttttcttgaaaattagtagagaaagaaattgtagcttttaagggcatgcaattttgtttctaaacaacagatggcactatcmaattctagatttactaaaaattttttctatttttctcccttttttaaaattaaagaaagtcataataactgtcttagcttcagaaacacaagtagatcaaattatagaattacagcctttactggcattcaatcttgaagaacaatatttgtaggatcttgaataaaatactgctttttcaaaattaacacttgatggtagttaaaaagctgtttgatcaaattttagaagtattaacatcaaaacaaatgaaatcaatgctcataattgatttacaccaatagcaactgaattctccactttacaactaggatattctcttctgagcatcagtagagataaggatgttctgtgagggaagaggctgacctggactacactagaactgagtagcctctgggaagcccaatatctgacagtcacatagaac

SEQ ID NO: 285907 - DNA, 1133 bp, Homo sapiens
agcccatgccctccacaccatgccatgttttccctgtatatgaccaaacaaaatggtgcagttaaaccacgagccgtcatgcacaggagggccagctggccatcatgctggatcaaacagcagatatagaccatctctagcagaacacttgtgaattgcctttgtttcaaactcataaatgttagtatacctttgtaggaggactaccatgaaagatgaattgccactataagcagtcattmgtatttagtggagattaacttttaaaggtgcctactttagatatgtcataatattagaaattaaggatgaagtatttctatctatctatgctttgtaggacaattatattaatcccaaagttacctgacataagtaggaagcacatgcctcttctgatatatagcaaataatatatactcaatccactgagcaaaaattggaacctcaaggcaaagctgtatgtacaacctcagaaaatctgtgtggcatgaaataccgtaacgtacactgaaagggcaattttcgatttttgtgaggattcccaatagccaaatagaaaaaaawagcccatgccctccacaccatgccatgttttccctgtatatgaccaaacaaaatggtgcagttaaaccacgagccgtcatgcacaggagggccagctggccatcatgctggatcaaacagcagatatagaccatctctagcagaacacttgtgaattgcctttgtttcaaactcataaatgttagtatacctttgtaggaggactaccatgaaagatgaattgccactataagcagtcattagtatttagtggagattawcttttaaaggtgcctactttagatatgtcataatattagaaattaaggatgaagtatttctatctatctatgctttgtaggacaattatattaatcccaaagttacctgacataagtaggaagcacatgcctcttctgatatatagcaaataatatatactcaatccactgagcaaaaattggaacctcaaggcaaagctgtatgtacaacctcagaaaatctgtgtggcatgaaataccgtaacgtacactgaaagggcaattttcgatttttgtgaggattcccaatagccaaatagaaaaaaa

SEQ ID NO: 285908 - DNA, 566 bp, Homo sapiens
agcccatgccctccacaccatgccatgttttccctgtatatgaccaaacaaaatggtgcagttaaaccacgagccgtcatgcacaggagggccagctggccatcatgctggatcaaacagcagatatagaccatctctagcagaacacttgtgaattgcctttgtttcaaactcataaatgttagtatacctttgtaggaggactaccatgaaagatgaattgccactataagcagtcattagtatttagtggagattaacttttaaaggtgcctactttagatatgtcataatattagaaattaaggatgaagtatttctatctatctatgctttgtaggacaattayattaatcccaaagttacctgacataagtaggaagcacatgcctcttctgatatatagcaaataatatatactcaatccactgagcaaaaattggaacctcaaggcaaagctgtatgtacaacctcagaaaatctgtgtggcatgaaataccgtaacgtacactgaaagggcaattttcgatttttgtgaggattcccaatagccaaatagaaaaaaa

SEQ ID NO: 285909 - DNA, 566 bp, Homo sapiens
agcccatgccctccacaccatgccatgttttccctgtatatgaccaaacaaaatggtgcagttaaaccacgagccgtcatgcacaggagggccagctggccatcatgctggatcaaacagcagatatagaccatctctagcagaacacttgtgaattgcctttgtttcaaactcataaatgttagtatacctttgtaggaggactaccatgaaagatgaattgccactataagcagtcattagtatttagtggagattaacttttaaaggtgcctactttagatatgtcataatattagaaattaaggatgaagtatttctatctatctatgctttgtaggacaattatattaatcccaaagttacstgacataagtaggaagcacatgcctcttctgatatatagcaaataatatatactcaatccactgagcaaaaattggaacctcaaggcaaagctgtatgtacaacctcagaaaatctgtgtggcatgaaataccgtaacgtacactgaaagggcaattttcgatttttgtgaggattcccaatagccaaatagaaaaaaa

SEQ ID NO: 285910 - DNA, 589 bp, Homo sapiens
ttcatatacgagttgacaaattgttcattttctccttgtagaagaacaattaaattgatgagatgtatcatctaactctcatacacrtaattatatatttgcatgacaaatacaattggcatctcatttacctcatttctgtacccttgaatatcacgtaaacatattttgtcctgatttttaaatactttgaatagtttgagaaccaaaagacctcttttgacaatttcctcttgataaagcaaatagcatcatcaatgtctccctaaaacttaaaagctaacagcctatgcttgaaggggcagaaaagtcaagttatttcttactttttagggacaaacaggttgtttatcattgtagttggagacaagatatatggaataatatataaacacatcttatcctatttatgcccgtcacctaaacatataagtgctatttttccaagtttattatcaaattacaaagtggaaatatggctcagatggtagtagaggtaaaaacaaacctaagtcatgtaagatgagtaagtctaaagatctaatgtacaacatgaagattattgttaataatattgtagtgcatactg

SEQ ID NO: 285911 - DNA, 634 bp, Homo sapiens
ctgtgggcttttaatttgttaaattttggttctcctttgatttctctatttctggcactctcatcstcatcttcctcaacatctgatgatgattatcatccttttcatcatttttgatatttcttgattgtaaacctaattgacttgttcaaattctcggtaaatttaggccaaatgaataatataatcagaaatgtaataattgcacaataatatttgtacaaatagctataccataacaatacaaagataaatacaataaacattttactgactgtccaagggtgtttcctgaaatgcactctgaattatcaaaggaatattgtaatcaacataatttaaggtcaaaatattttactgtaatcaacagaaattttactttttttaaaattatggcaatattcacattttatttttgtcagcagtttgtcaatacatttttggtcagaatatttaaatgcccacttactataaattaaacatagcttatcaattcaaagccctcattattcttggcaagtatattttttatttataatcaatatttacctatttaaaaatactttataaagaattcagtttcaataagactgatatgttcttagaatgctcagtgattgttttacaatttcat

SEQ ID NO: 285912 - DNA, 1904 bp, Homo sapiens
ctgtgggcttttaatttgttaaattttggttctcctttgatttctctatttctggcactctcatcctcatcttcctcaacatctgatgatgattatcatccttttcatcatttttgatatttcttgattgtaaacctaattgacttgttcaaattctyggtaaatttaggccaaatgaataatataatcagaaatgtaataattgcacaataatatttgtacaaatagctataccataacaatacaaagataaatacaataaacattttactgactgtccaagggtgtttcctgaaatgcactctgaattatcaaaggaatattgtaatcaacataatttaaggtcaaaatattttactgtaatcaacagaaattttactttttttaaaattatggcaatattcacattttatttttgtcagcagtttgtcaatacatttttggtcagaatatttaaatgcccacttactataaattaaacatagcttatcaattcaaagccctcattattcttggcaagtatattttttatttataatcaatatttacctatttaaaaatactttataaagaattcagtttcaataagactgatatgttcttagaatgctcagtgattgttttacaatttcatwctgtgggcttttaatttgttaaattttggttctcctttgatttctctatttctggcactctcatcctcatcttcctcaacatctgatgatgattatcatccttttcatcatttttgatatttcttgattgtaaacctaattgacttgttcaaattctcggtaaatttaggccaaatgaataatataatcagaaatgtaataattgcacaataatatttgtacaaatagctataccataacaatacaaagataaatacaataaacawtttactgactgtccaagggtgtttcctgaaatgcactctgaattatcaaaggaatattgtaatcaacataatttaaggtcaaaatattttactgtaatcaacagaaattttactttttttaaaattatggcaatattcacattttatttttgtcagcagtttgtcaatacatttttggtcagaatatttaaatgcccacttactataaattaaacatagcttatcaattcaaagccctcattattcttggcaagtatattttttatttataatcaatatttacctatttaaaaatactttataaagaattcagtttcaataagactgatatgttcttagaatgctcagtgattgttttacaatttcatwctgtgggcttttaatttgttaaattttggttctcctttgatttctctatttctggcactctcatcctcatcttcctcaacatctgatgatgattatcatccttttcatcatttttgatatttcttgattgtaaacctaattgacttgttcaaattctcggtaaatttaggccaaatgaataatataatcagaaatgtaataattgcacaataatatttgtacaaatagctataccataacaatacaaagataaatacaataaacattttactgactgtccaagggtgtttcctgaaatgcactctgaattatcaaaggaatattgtaatcaacataatttaaggtcaaaatattttactgtaatcaacagaaattttactttttttaaaattatggcaatattcacattttatttttgtcagcagtttgtcaatacatttttggtcagaatatttaaatgcccacttactataaattaaacatagcttatcaattcaaagccctcattattcttggcaagtatattttttatttataatcaatatttacctwtttaaaaatactttataaagaattcagtttcaataagactgatatgttcttagaatgctcagtgattgttttacaatttcat

SEQ ID NO: 285913 - DNA, 1193 bp, Homo sapiens
agaaaacagctaagaggttgagaaatcagagttggctgcccaacttacaattctccttgctgaccagcatcttttggctgcctctcaaaataacaggataaggcacacaaaactgaattcttcacttggattaaatctgaatcttccttctcttattcctttgcttataaaatatcttcctaggcttgagacagtctagagaccacctgagaacactgaatgttccttttgagtatccagtagcataactcacaytgtcaacaaggccttacttacgtgtgctgaacatttttatatttttgtatcctttatcacaaaccaaacactgcttagttataaaatatatgtgtaagtcaacataattttttttgtcaaagcaaagatttttctccaaaatatagctacagaagaaaaggggcttataacaagtgtatagtacacattcagaaacattttgtttcatggatgtttcagtaaatgcttcatttctatgtaggaggtataagattcctgctaaaaatacattcccttccctgaatattcacaatagcttgccaaaaattctcacaaatgaataaagacagaactgattaactgtattaagtgtcctacttawctactagcaactgatgaaatctgaacgaagtaaactgaggccaaggatgttctcataccacgtacaggcaaccaatgcataaattcatctctgtttactctaaaaggagtggaaaggagaagatgttgccagagatatcatacaattctggcctaatgtgagggaggagaaagtwttgaattagtttaccaccttttggagtaaatttaatgattgaatttgtcaaagttataatttctactcagattaagggatgggaaagagaaagcaaacacagtatgtgtcttagttcacttgtgttgctagtaaagaacactgataatttataaagacaaaatatttatttggctcacaattctgatttcgaaaaaagtttaaaattggccatctgcatctggtgagtgtctcaggctgcttccactcatggcagaaggtgaaggggagctggaatgtgcagagattgcatggtgagaaaggaagcaagagggagaggggagagaggtaccaggcccagccctttttaacaaccagctctcttggtaactaatagagtgagaattcgcttaccatcaccatg

SEQ ID NO: 285914 - DNA, 577 bp, Homo sapiens
ctactagcaactgatgaaatctgaacgaagtaaactgaggccaaggatgttctcataccacgtacaggcaaccaatgcataaattcatctctgtttactctaaaaggagtggaaaggagaagatgttgccagagatatcatacaattctggcctaatgtgagggaggagaaagttttgaattagtttaccaccttttggagtaaatttaatgattgaatttgtcaaagttataatttctactcagattaagggatgggaaagagaaagcaaacacagtatgtgtcttagttcacttgtgttgctagtaaagaacactgataatttataaagamaaaatatttatttggctcacaattctgatttcgaaaaaagtttaaaattggccatctgcatctggtgagtgtctcaggctgcttccactcatggcagaaggtgaaggggagctggaatgtgcagagattgcatggtgagaaaggaagcaagagggagaggggagagaggtaccaggcccagccctttttaacaaccagctctcttggtaactaatagagtgagaattcgcttaccatcaccatg

SEQ ID NO: 285915 - DNA, 577 bp, Homo sapiens
ctactagcaactgatgaaatctgaacgaagtaaactgaggccaaggatgttctcataccacgtacaggcaaccaatgcataaattcatctctgtttactctaaaaggagtggaaaggagaagatgttgccagagatatcatacaattctggcctaatgtgagggaggagaaagttttgaattagtttaccaccttttggagtaaatttaatgattgaatttgtcaaagttataatttctactcagattaagggatgggaaagagaaagcaaacacagtatgtgtcttagttcacttgtgttgctagtaaagaacactgataatttataaagacaaaatatttatttggctcacaattctgatttcgaaaaaagtttaaaattggccatctgcatctggtgagkgtctcaggctgcttccactcatggcagaaggtgaaggggagctggaatgtgcagagattgcatggtgagaaaggaagcaagagggagaggggagagaggtaccaggcccagccctttttaacaaccagctctcttggtaactaatagagtgagaattcgcttaccatcaccatg

SEQ ID NO: 285916 - DNA, 577 bp, Homo sapiens
ctactagcaactgatgaaatctgaacgaagtaaactgaggccaaggatgttctcataccacgtacaggcaaccaatgcataaattcatctctgtttactctaaaaggagtggaaaggagaagatgttgccagagatatcatacaattctggcctaatgtgagggaggagaaagttttgaattagtttaccaccttttggagtaaatttaatgattgaatttgtcaaagttataatttctactcagattaagggatgggaaagagaaagcaaacacagtatgtgtcttagttcacttgtgttgctagtaaagaacactgataatttataaagacaaaatatttatttggctcacaattctgatttcgaaaaaagtttaaaattggccatctgcatctggtgagtgtctcaggctgcttccactcatggcagaaggtgaaggggagstggaatgtgcagagattgcatggtgagaaaggaagcaagagggagaggggagagaggtaccaggcccagccctttttaacaaccagctctcttggtaactaatagagtgagaattcgcttaccatcaccatg

SEQ ID NO: 285917 - DNA, 566 bp, Homo sapiens
tcacctttagagaagtctgtgattggaagcttgctggggcaatagtcagaggtattgctttgcctgtaaagtgaagccagatccaataaaagagactatgctggggcattaatagcaaatttcaatgccttgaaccatagatatttaactagagttggtttctctcatccctgccccaggaatgtctgccctttgttatgtgagtataagaggcaaaacttccagggtcttctgtctgatcatcttcccaatgaatgggacagaaagtttcttagcactagaattgggccttgatgttttatcatagtatgaattagtgtcatgccaggtctgtaggtaatacatcaccatgcaaggaggtgtgttgaagacatgtgatggttactttcatctacattcaactgtttggaactttttggtacctgttttttgataaggaatggaatagtcaattaaataaataaaatcaattcaaactgtttgcttaagaaacttccagatttccagayaggaatcacttgtcttcacggacaaaatccaacttagaggtaaaagccagattagca

SEQ ID NO: 285918 - DNA, 546 bp, Homo sapiens
gaccccaaaccctctgccccctgcatccctggagctgttcatcagactggaagccaaaggcccacataactctaattaatgtgtgcatatgttggccagcctcttggacgattttaccattagtacttgaattggcagggtcagagagtctgatgcttgtgttctgatgaggatttacagtcctaatgaatcatgtgaccatgagtagacttggayagcaccgtattcaggagacctgcctctggtgctttccaccctgaggatctctttctgttccacaaagaatgctcgtctgggaggaaacaaccagagggagggcacccttagaagtttaaaatgtcctcctcatctgcatctcagcacagaacattactaagccaagtttatatatatacattataatatatattacataacatatatatacacactcaggaatacagaagaaaagttttgtcttgaaagtgttgaatttaagactggaaatgggcctttagggttcatctgctttaacctctttttcacagatgagaagactcaggtcta

SEQ ID NO: 285919 - DNA, 348 bp, Homo sapiens
gaagagccaatgatacagttccagtctaaaagctggctgacccaaggctcaagaagagctgatgttttagtgtgagtctaaaggcaggaaaatccgatgtcccagctcaaaggcagacaggcaggaggaattacctcttacttgagggaggtttgggtcttttattctagccarttgattggatgaagtgcacccacattaggcagggaaatcttttttgctgagaatgttaatctcacccaaaaacacactcacagacacacccagggtaatgtttgaccaaatgactgggcaccctgtggggcagtcaagttgacacagaattacccaacacagcaggtgagattc

SEQ ID NO: 285920 - DNA, 504 bp, Homo sapiens
gacacatggctctagataagtattgaataacacccatgtgtaagggaaatgaagaaagagcaccctctggccctttgaggagtgtcattctcagagatgacccacatcagacatggatggctgcctgtaccaggctaggctctctaccctattttctcacaaggaggagagtgatttagaatgtcctggaagtatttcattgttctatcatgtttgcaattgatcagcattagaaagaaattttgcaccatggagagtcaagcatactaatgacacaatgtgtacttataagtaaactcatccctactttgaaacccatcaatgaaagcaaacttttggcccctgggagacacagtgacattacagtttgaaaacctattccaacaaagaccatcaaatcaaggactgagtcttatccacctttgtacttgcggcacsgtgctttgctcagagtaagtgctcagaaagtcttgttttatctagagtgaaagaggtaggcttctg

SEQ ID NO: 285921 - DNA, 565 bp, Homo sapiens
aaatggttcttttcaacatctgccaatggcgtccttgaatgaaatttattattcactatcataagaaaataagaacttaattgcattgttgaaatttaaaatttyatttttcattctgacagttaactattaaatgcacttcaagctcctagaagcagttctagggccttccaaccttactgttaggaaaatcatttaaataaaatgtttcttggattaatatacttaattccacctctgtatttagcaaaatcttttcttggggcaacaattattaagtcaccacttaaagactatttaatgatgttgaaatgaagtctacacttagtcagccaactcactgggactttttcaaactcccaaccaccacctgggattcatctcaattctctgattctgtgtttcaaatcaaagatactatttgctgtcagcaagtcccctgatttatttaatccttccccaaaatatatcctgaaattctcacaatttaacccctatttgtcatgacagcagctcctctacaatgactaacacactcttcagcattatcaggtgtttgcagagg

SEQ ID NO: 285922 - DNA, 580 bp, Homo sapiens
ttcctttcaaaaggaaaagctcttacagtgtttgtctttgtgtcttcagtacctaacatagtatatggcatatgcacaaattctcatgtcatggaaaaagtactagtctaggaatcacacagtttttattttgttcttattatgccactcagttcttatacaatttaagcatgtttcctcgctgcaaactaaaacattcagaataaaacaattttgcagatatttccatctttaaaacataaacttaacattttgaatgcgattagtctartagaaacaacattgaatcaggggtcagcagatgtggaccatagccttagttctccagtttcttgaggaaatcaacaaaaatctttattttttaaaaaatttttttcaccccaaaatctttaatcctcagtctattcactggcaaacaaaaaaaaaaatgagaattaaaagtatcccttcaatatctaatattctattagtatttatgatactaatattgggtaccaaaagatcagatgcctgccatagagtttaatttcctacagccaaatcctaaacaaggacccctgaagatctgagagaggcagaa

SEQ ID NO: 285923 - DNA, 560 bp, Homo sapiens
gaccctctaaatttagtccctgggtcaacataggtaagaatagctaacaaatccaaaaaacagctcattaattggtgtggagcatactcacagaactggcctgaagtgtgattacaaatatagagagaaagaagacagggtgcccaggcattaaaaaggggacaaatactgcaacctcaggcatcatctgaaaataaggaagaccatttgggaagggaacaataactgaactgcaatcatttccagcctattagattttacaccacagcctagaagtcgttaggttcatgcataatgacacaagaactaaagggatcktagctttaggttcagttagatacccacattttatctaccccatactaaggaatgcatgctcagtgccctccagaccccactgctgggagttagaacgtacgtaattagttaaccatggagataggaaagagccccaccttggagcagtgaaagattacaaaataagtgattatttttatatccacaaagaaaaattgttgtatgcacgagaaaaaatctagaagaaaattaaatcatatgta

SEQ ID NO: 285924 - DNA, 510 bp, Homo sapiens
aattaaatcatatgtaaatttcaaatttactctgagagatggacttacaggaaatagtcatcattttaccttaaggaaaatagccatatttatttaccttagtaaattactcaattattttataatgaacaggtattacttttataaagagcaactaaacatgaaaattgtattttgtaaaaagcctaaattgtagactctataccttattgcatgaaatgggttagtcaagttgaggacattgcttagatttggtgtcartcatggcctatgctccagtctcagatgacatatctcttcctccaggaggtcttgcctgatgtacacagcccattactacccctctacactgggatcctgtaggtactccctcctagccctcagccctctgttttcttccttcatgacacttatcatgacttgtaactacacaagtatgtgtaagattattggcaacctgacctaaatccaggcaagaagggttttgtcctgggcctcttgctttagaga

SEQ ID NO: 285925 - DNA, 609 bp, Homo sapiens
ccttgccctgtgccagcagcaactgttgccactcagggtcaagatggcaagactaaccttggggagatgggtctcctttagcctccagatcacaggggtaatccctgggctgtggagcatcaaggctgtgaacaggagcatgaactgagacaaagcatagcttaactgatcactttaaaatctttaaatatttgatatgtggctcccattgttactctggccycaggccccacaaacattagagtcagacctgattattagtgtaataactgtattccttgctaatgacatattccataaagtgtaagattatatttattttatttaaaatactagtcccccactagtacagagcctggcatatgttaggcatgcaatatttgtagaattaataaatggctaaaaacaaagtgctgctacacaatatagccctgtgcctgcccctaaacgcacttgtaatgaaagcaaatctgagaggaagataccattttgtatcaggcaagcacctagtgctgacagcctttgacaatagaagtcggtgtaccacggcataaaaccaatgattctcacttaccatcaacacagtccaaagagttttccattaacaag

SEQ ID NO: 285926 - DNA, 609 bp, Homo sapiens
ccttgccctgtgccagcagcaactgttgccactcagggtcaagatggcaagactaaccttggggagatgggtctcctttagcctccagatcacaggggtaatccctgggctgtggagcatcaaggctgtgaacaggagcatgaactgagacaaagcatagcttaactgatcactttaaaatctttaaatatttgatatgtggctcccattgttactctggcctcaggccccacaaacattagagtcagacctgattattagtgtaataactgtmttccttgctaatgacatattccataaagtgtaagattatatttattttatttaaaatactagtcccccactagtacagagcctggcatatgttaggcatgcaatatttgtagaattaataaatggctaaaaacaaagtgctgctacacaatatagccctgtgcctgcccctaaacgcacttgtaatgaaagcaaatctgagaggaagataccattttgtatcaggcaagcacctagtgctgacagcctttgacaatagaagtcggtgtaccacggcataaaaccaatgattctcacttaccatcaacacagtccaaagagttttccattaacaag

SEQ ID NO: 285927 - DNA, 550 bp, Homo sapiens
taaaaacaaagtgctgctacacaatatagccctgtgcctgcccctaaacgcacttgtaatgaaagcaaatctgagaggaagataccattttgtatcaggcaagcacctagtgctgacagcctttgacaatagaagtcggtgtaccacggcataaaaccaatgattctcacttaccatcaacacagtccaaagagttttccattaacaagtcacaccaataatttctgatgaatggcaaagagttaaagaatatggtacaaaaatraaaataaaaatacaagcccatgctctccacttcaaccaagaatccccaacctccatctccacaccaaagtttggttcattgtcattttattctatgtagatttaatttttcaaagtttatgttctttttaagccaaaaaaaatggagatacaaaatgaaataaaattatctttgaaaaaactacattatttttactatgactttaaggtttaagtgaaaaggcacagttacagctttaaaagcaggtagattacaatgttcattgaacctataattgcaacaagt

SEQ ID NO: 285928 - DNA, 614 bp, Homo sapiens
tcagtgtaatattggctgtgggtttgtcatatatggcttttattatcttgaggtatgttctttcaatatctagtttgttgagggtttttatcatgaagaaaagtcagattttatygagtgttttttctgtatctattgtgataagcttgtggtttttgtttttaattctgttaatgtgattgatatggtttggctgtgtccccacccaaatctcatcttgaattgtagttctggcaatccccacgtgccatgggagggatccagtaggaggtaattgaatcatggtggcagttaccactatgctgttctcatgatagtgagtgggttctcatgagatctgatggttttataaagggctttccccccatttgctctgcacttgttttttctgccgccatttgaagaaaaaagtgtttgcttccccttccaccatgattgtaaatttcctgtggcctctccagccatgctgaactgtgagtcaattaagcctctttgctttatattgcacccagtttcagatatgtctgtattagcagcatgataactgactaaaacagtgatcaattccattttttgcaaatgttgacttatccttgcattcctgcaaacctact

SEQ ID NO: 285929 - DNA, 457 bp, Homo sapiens
aatttcaaattttataattgttcatttacatacccattacccatctccaacttttgcctcaaactgtactacatatttttatttctccagtgcctagaatattgcttggcatacaatttataaagtcattgttgaattaataaataggtagtggaagataacataggatatgtagattggaagtaaattatggatgaatagactagaaagccatggaaaaaatctttttcattcactatttagtaaatgtttattttcttcccccaaaacttggttcttagaatcattcatgtcctagactaaaaactttgggrattgtgtccaactctacctttttcttgtgcaaaatcttctcatgtgtgccttcaaatttttggatttacatttccttctttattcctgtttatccctccctgtcaagagcctcaacacatggattacctcagaagcattctaa

SEQ ID NO: 285930 - DNA, 457 bp, Homo sapiens
aatttcaaattttataattgttcatttacatacccattacccatctccaacttttgcctcaaactgtactacatatttttatttctccagtgcctagaatattgcttggcatacaatttataaagtcattgttgaattaataaataggtagtggaagataacataggatatgtagattggaagtaaattatggatgaatagactagaaagccatggaaaaaatctttttcattcactatttagtaaatgtttattttcttcccccaaaacttggttcttagaatcattcatgtcctagactaaaaactttggggattgtgtccaactctacctttttcttgygcaaaatcttctcatgtgtgccttcaaatttttggatttacatttccttctttattcctgtttatccctccctgtcaagagcctcaacacatggattacctcagaagcattctaa

SEQ ID NO: 285931 - DNA, 580 bp, Homo sapiens
cttcccctttcagcctggggtccatgtcctccctctgtccactctcaatgtcttctttctgagagaagatctgcttagtgtgtcagtctacttgatgatctggtctctctcaaagggcaaagctcttcctggctgtgtctagtcagccgtctcgattctgctgtttgtttttaatatttcatgtcttttttgttctcctgttcctcttttacagctttttttgtgttaaatagataygtttagtgtaccattttaattcctttaaactatattttttagttattgtcttaatggttgccctagggattgcaatataatatatcactatcagggaacctgccccaatagtcacgtaggttcttttctattttccttaagcgtcagccggcttgaaaaataaagggacagagtacaaaagagagaaattttaaagctgggcatccgggggagacatcacatgttggtaggttccatgatgccccacaaaccgcaaaaatcagcaagtttttattagggattttcaaaaggggagggagtgtgcgaacaggtgtgagtcacagacatcaagtacttcacaagg

SEQ ID NO: 285932 - DNA, 470 bp, Homo sapiens
acccatctgggttgtgagcacctttgattctctcagctggagagttgggcaggctggtgcctctgagatttagatctaaaatcttcaagagaatttaggaatcaggccaggtgcagtggctcacgcttgtaattccagcactttgggaggccgaaactgtggatcacctgaggtcaggagttcaagaccagcctggccaacatggtgaagtcccatctctactaaaaatmcaaaaaaaaaaaaaaaaaaaaaatagctgggcatagtggcacacacttatagtcctagctactcgggaggctgaggcaggagaacctgggagacaaaggttgcagtgagctgagattgcgccactgcactccagcctgggcaacaagagtggagctccatctcaaaaaaacaaaaaacaaaaaaaaatttaggaatcaaatcatgtcttgttctattcagctgccttctcccatgaccca

SEQ ID NO: 285933 - DNA, 604 bp, Homo sapiens
actctacctctctaaaatttgctccaaagccatgacaataaaattatgaaagcagacctgtcaacaagggagggccgggcatagaactatttaagaggatcgtgtggttttcagttcccctgctgccccccaaagggaagattaacttgttcttttaaataatgagaaacataggaaaccatcgccagtctccctgtttaatgcatgcattaagcacacaggctgagsggcacagagctacacaaacttggcttgctgttgcgaacagggtgggcaggggaagggccggggatgaatttctggtcatagatcctatgcaatgaattcattaccacatattatctgagatgcagtgatgtcatgccattaagtcactgccataggctctgctgggcaaggcttctgacgcaaaggaggtatgcgtgtgtgtatgtgtgtgtatgtgtgtgtgtgtgtgtgtgtgtgtgtccacatgcatatttatctagatacagaaatatttttcctccctttagccttttgaatatgaattctagctatgtatgcttttcttttgttctggggctatctgttttctttcttacttcgtgaggtgtaagggttg

SEQ ID NO: 285934 - DNA, 610 bp, Homo sapiens
tggcatttgtcatgttggcatttggtacagaacttgctgaggcacctattggcccagtggcttcctggagccagagcagactccatttgttgcccaggaaaggcctcattcagggccttcatctacaattacaacattcattcctcatctcaraggtgaaagggctgctgtatcctggtggggactaattcctaatgaaacgggtgacggttttgtatttgtgtatttgcacagcagatggactgtgactacttctcaagtaaaagaaacttggtgcaggccgaagggtgtacagccaagacttgctctgaggactatgaggctgttcatggagagggctgagcgtggcccttatatagtattgccaggtctctaccaataaacgccagcaaggattgccatgacctggacttggaagctgtctcagcctatagcacatgtacaaaaacatgtgaacacacacaaaaagttgactttcagtcatgatttttcacaatgtactcaaagcctgtcaaaataggtgacattgatttttcatgtaattatacaatttttccaatcctcttacccagtttaattaggaaagggtagacggcaaatagaatgtgtg

SEQ ID NO: 285935 - DNA, 610 bp, Homo sapiens
tggcatttgtcatgttggcatttggtacagaacttgctgaggcacctattggcccagtggcttcctggagccagagcagactccatttgttgcccaggaaaggcctcattcagggccttcatctacaattacaacattcattcctcatctcagaggtgaaagggctgctgtatcctggtggggactaattcctaatgaaacgggtgayggttttgtatttgtgtatttgcacagcagatggactgtgactacttctcaagtaaaagaaacttggtgcaggccgaagggtgtacagccaagacttgctctgaggactatgaggctgttcatggagagggctgagcgtggcccttatatagtattgccaggtctctaccaataaacgccagcaaggattgccatgacctggacttggaagctgtctcagcctatagcacatgtacaaaaacatgtgaacacacacaaaaagttgactttcagtcatgatttttcacaatgtactcaaagcctgtcaaaataggtgacattgatttttcatgtaattatacaatttttccaatcctcttacccagtttaattaggaaagggtagacggcaaatagaatgtgtg

SEQ ID NO: 285936 - DNA, 610 bp, Homo sapiens
tggcatttgtcatgttggcatttggtacagaacttgctgaggcacctattggcccagtggcttcctggagccagagcagactccatttgttgcccaggaaaggcctcattcagggccttcatctacaattacaacattcattcctcatctcagaggtgaaagggctgctgtatcctggtggggactaattcctaatgaaacgggtgacggttttgtatttgtgtatttgcacagcagatggactgtgactayttctcaagtaaaagaaacttggtgcaggccgaagggtgtacagccaagacttgctctgaggactatgaggctgttcatggagagggctgagcgtggcccttatatagtattgccaggtctctaccaataaacgccagcaaggattgccatgacctggacttggaagctgtctcagcctatagcacatgtacaaaaacatgtgaacacacacaaaaagttgactttcagtcatgatttttcacaatgtactcaaagcctgtcaaaataggtgacattgatttttcatgtaattatacaatttttccaatcctcttacccagtttaattaggaaagggtagacggcaaatagaatgtgtg

SEQ ID NO: 285937 - DNA, 1193 bp, Homo sapiens
aggagattggagaccttcatttgaatcttgatcctgacactaacttgctggatgactttgaactagctacttaactattcagggtttcctcctacctaatgttggagagttgaacttgatgctgtctagaaagtccctcctaggtcaaatatttggtagttcatctgagtcttttctgtcttgtggctctaatccacacctgagtggagccattcatttgatcgcttccctttttcatccattcataccaygaacaggtgttaggtcctttctctttggttcctattttttaaagtggtccaaacccactgtctttatcttcttaaggcttctgagtgccttagcctttcttagtggctacaatgcttctatgaagctcctgaactttctctctacaagagtgaatggctttttttcatcttttctcagcttcctctgaggctggtgcctttgacatggttgaccttgtacttcaagatacttctttctctccctgactccctctgtaatactcacaataccaactcttccttcatctctagttgctttttctagaagatctagttgcagtctttctctgggctttagaatcatccwaggagattggagaccttcatttgaatcttgatcctgacactaacttgctggatgactttgaactagctacttaactattcagggtttcctcctacctaatgttggagagttgaacttgatgctgtctagaaagtccctcctaggtcaaatatttggtagttcatctgagtcttttctgtcttgtggctctaatccacacctgagtggagccattcatttgatcgcttccctttttcatccattcataccacgaacaggtgwtaggtcctttctctttggttcctattttttaaagtggtccaaacccactgtctttatcttcttaaggcttctgagtgccttagcctttcttagtggctacaatgcttctatgaagctcctgaactttctctctacaagagtgaatggctttttttcatcttttctcagcttcctctgaggctggtgcctttgacatggttgaccttgtacttcaagatacttctttctctccctgactccctctgtaatactcacaataccaactcttccttcatctctagttgctttttctagaagatctagttgcagtctttctctgggctttagaatcatcc

SEQ ID NO: 285938 - DNA, 596 bp, Homo sapiens
aggagattggagaccttcatttgaatcttgatcctgacactaacttgctggatgactttgaactagctacttaactattcagggtttcctcctacctaatgttggagagttgaacttgatgctgtctagaaagtccctcctaggtcaaatatttggtagttcatctgagtcttttctgtcttgtggctctaatccacacctgagtggagccattcatttgatcgcttccctttttcatccattcataccacgaacaggtgttaggtcctttctctttggttcctattttttaaagtggtccaaacccactgtctttatcttcttaaggcttctgagtrccttagcctttcttagtggctacaatgcttctatgaagctcctgaactttctctctacaagagtgaatggctttttttcatcttttctcagcttcctctgaggctggtgcctttgacatggttgaccttgtacttcaagatacttctttctctccctgactccctctgtaatactcacaataccaactcttccttcatctctagttgctttttctagaagatctagttgcagtctttctctgggctttagaatcatcc

SEQ ID NO: 285939 - DNA, 603 bp, Homo sapiens
tcttgttaacatttattgagaattaagtatgtctcaggcactgttctatatttcttacatatattaattcatttaatccccactaaatayaggagatcaatactgctgttatccctatttcacagatgaggaagctgagacacaatcacggaagagcaagatttaaaagccggcagtctgactcctgatctctcactcatccactactgtagacagccttctctgtgtttcattagcacataacaagaattcatgctctcggagtacaaagcagggtttgtaatatcaataaaagagacactttcatagtgttttagctgagtcttgaggagaaaagtagagttttagtgaaggaagaaagaaaggcactacatgctgattgtatgtttgaaggcgctgctgttaagaggtgaagatgctgttgtggaagatgaatctgggatggactaaggatggaacactaacatttaaagaatggaggaagaaaagcagttgtggagagtgagaaagactagagataaagcagaaaaaatcctagagggtttagtatcatgaccaggaactaggcatttcaaaaaggaagaaacgatcaacagtgatgaa

SEQ ID NO: 285940 - DNA, 603 bp, Homo sapiens
tcttgttaacatttattgagaattaagtatgtctcaggcactgttctatatttcttacatatattaattcatttaatccccactaaatataggagatcaatactgctgttatccctatttcacagatgaggaagctgagacacaatcacggaagagcaagatttaaaagccggcagtctgactcctgatctctcactcatccactactgtagacagccttctctgtgtttcattagcacataacaagaattcatgctctcggagtacaaagcagggtttgtaatatcaataaaagagacactttcatagtgttttagctgagtcttgaggagaaaagtagagttttagtgaaggaagaaagaaaggcactacatgctgattgtatgtttgaaggcgctgctgttaagaggtgaagatgctgttgtggaagatgaatctgggatggactaaggatggaacactaacatttaaagaatggaggaagaaaagcagttgtggagagtgagaaagastagagataaagcagaaaaaatcctagagggtttagtatcatgaccaggaactaggcatttcaaaaaggaagaaacgatcaacagtgatgaa

SEQ ID NO: 285941 - DNA, 576 bp, Homo sapiens
attcagcaagtatttatggagtgccatctgtatgctatgataagctctagggttacattaatagataaaacagccccctacccctatcaaaaaaaaatccctactctcattagcttcttttaaatttataccattgtttaatgggaatgagcccagttgaattttttcagtaacatattttaaaayaagctttattttcaaaaacaattttagatttacaaaaaaattgaaaagatagttcagagagttctcatccactccacatagttttccctattgttatctttcattaggatatatttgccacaattaatgtgtcaatattgatacattatttttaactaacacctatagtttatttatattttttatatttttcatttgtgtcttttttctgttccaggctaccagccaatccagaataccacattacatttagtaatcaggtttctatcacttcttaggcactttatacaagtcatttcatttagtcctaacgagaaccctgtaaggtaagtactactattgcctcattttatatatgagaaaatcgagggttggagaagttaagtaact

SEQ ID NO: 285942 - DNA, 356 bp, Homo sapiens
atggctggagaacagtgacattggatgagatactcctttaagaagctcctgttctagaccagataagagatgagcagtcctgaggcaggaaggcaggaacagtatcagaatctccaagaggaaggatgaacacatcttttgcctttgccctttttcagggaggaagcatgcctacatggcaagcctgctggtgtctagcctggaaatgcttccccaaaacacatgtatctgtgggtttgttggaagaataccccagcaacaactaagctggtgggactttaaatgtcctyggtccacttagtgcacagtggcttacccttggccgaggagtacctcctagctgccaggatgctgtg

SEQ ID NO: 285943 - DNA, 618 bp, Homo sapiens
ggggataaaagaccaagtggatatttgtgctatgcactaaaataagactgggagtaagacaggggcaggtttaggagtcagatattcgagagtattcaatattaccttgaggtgcctattagacactcaarggcagatgtcaaggagagaactgagtttttgaatctggagctcaggagagaagtttacgcttaatacatacatgtgggagtcctttgcataaaacttttatgtatattcccgagactggatgggctctgttttgcttacctaatactgtgtaacaaacaacccacaactgagtagtgtaaaacaaaagctattttatatggttacatattctcaaaaattatgtgggacaggaattgaggcatgacacagcaggaatgcttacctctattctacaatgtctggttccctaaatgcaagggatgtctgaaaagaggtgagtatatgggagactataactgcacagagagagtttcagcaggcacagagtaggagagatgtggagtctgattagtagatgtacaaaatagttcagggatgagactataggagattatggatgcccagggatgatttgatttttgccagttaaacagggatgtatggaat

SEQ ID NO: 285944 - DNA, 1075 bp, Homo sapiens
attttttaaaaagcatttaaatgcatggctgaagaacatttgtgcatttgcaatcaaaatatacaaagcacaagaggaagaatgcttccaggagcaaaagcaaaataaaacaaaatatgcagaaaaaacaaattgcagaataatacctgccaagatagcagatattaaaattaccagagacagaatagaaatatatttttaatattttatggaaaaaataagatattcaaagcattaggaagaaacraaaaatcaatatgtttgatttgaaataataccaaatagaacttctagaaataaaaactataattgaaattagagctatataaatattaagttgaaagttaaatatagtttcaaaggtcactatgaactaggtaatactcaaaagttatttctgaaaatatggcccaaagataaggaaaacataaaaggttaaaagatgcaggctaacgagtgaaaaattccaacatgtctaattwgggttttttttttttaatgtttgtaaataccagcctggagccagctcataacatcagttccatctacatccccgtggtcagaattttgtcatatgattctaaactaactacaagagaagctgggacatgtggtctccctgtgtgttcagaaagatgaaaccatatggaggtcacatatcgctatggtaccatggcattcaataaatggaaactctgccctcctgctatagcttctgtttctttcgccattacttctaatgccataaaaataatgatagtgacacctaacacttgttcagctatgtggcaggcattagctacttttcattatctcagtttgcacaacaatcctaccaaataagtttattatttwttactataaatcaaggctcagagatgttggaactgcctgaagttataagcgagtaaatatttgtcttactactagtactccctctacttaaaagagagagactgttttttccaaggggctaggtgaccccagcatagtctccctggaagatgccagtttttcccagctctaagtcacctgcctagtacataaccattggaacatctgtaaaaagcttccc

SEQ ID NO: 285945 - DNA, 668 bp, Homo sapiens
ttgcatggtttcagttcttttaaatttatcaaaacttgttttatggtctaacccatgggtgctccatgtgtacttgagaagaatgtctattctgctcttactgggtggaatgttctattgtttgttaggtctagttgatgtatagcatttttcaaatcttctatttatttgttgatcttctgcctacttgttcaatccattattgaaagcctgtcattgaagtctccaactactattcttgaaatgtttgtttgtcttttcagttctgtcagtttttgcttcacgtatttggagctctgttggtagatgatatttgattctttttagatagagcattattttttctgcttttttttacattttaatcattttaataatattcatgtcgttgctatcttacaggtttatatccgatggtcttgaccatcaaatcctttcattgtgcctgctgatctcacgaagcaaaaaaagctttttcacatattttgtgagtttttattgtgagctcatgtttaaataattttatctgtaggaaacrtatacagcctagattaaaggtatgtctttacaaattgatttttattttgcatctgtcagatgctccaagaatatcaccatcctggttttgttttttatgtatatttgtaatgtaggaaggtcctgcagaa

SEQ ID NO: 285946 - DNA, 567 bp, Homo sapiens
gaaagttacaaaaactttatgctcattggcttaggcaagagagaaattatttgctcacataactgaaacacccctggatatggcacaatccaggatatacacaacatcccctgagttcatctcacaacttagccgcctctgggttggctccaagtccaggatctacacagggtcttccagtagtttcaatcttcacatatcatgattagcatgtctaggagagcccacttcccttagagagcagaccaaagtcctgggttgggactcactgataccacctgacatgacttgggttgagtgttcatccctaaactatagagggtgggctggaggtaaagtgcccccctcagttgatttagtctgagtcatgtgctccaccctggggttgccttctttgtcagagcccttggsataaatagaggaaagaattaattcctctcaatcaaatcaaagtcctattgtcacagtaagggagagtggtgctaagaggaaaatgcaacaaatatctactacacccagatttgtacacacatttaggtacaagtctgttacaatgaaaaaaattcc

SEQ ID NO: 285947 - DNA, 635 bp, Homo sapiens
gatgggcctgctccacctctcttgttccttttttggtggagagaattattaaaattgtgtgccttttctgcatcctgcaaagctagactgtttgctgagaatctcccatttgttttccttagggcaatgccctaaaatgctcaagtttgtgtgtctcctccaagtcccacagagtcaagccagttgaccgcatatgactgcaagccacctgcaaaggctcacacttattgtatggagcacatgcatggggagccattcagcaggggtactgggagaggaggtgaggagcatggatcattgagggcatccgcgggccagttaaggggctttgcaaggcatctcaagtggctcatgggtaagcctcctgaaggagactgtgaagttgttagtagaatacatggycatttgttgaatttcaagccctgttgctgtgagtccccaccacttttccctgctcccagcctctcacagccatatagccatggtgatcccctcagcattctgtgtgtggtgcggaagagctgggcctcttgtgtatcattccacacagctgggaaatccagctgctcattcactactcttgctttcttccatggaaggactcatgggccacaggagcctcttttggcagtgag

SEQ ID NO: 285948 - DNA, 635 bp, Homo sapiens
gatgggcctgctccacctctcttgttccttttttggtggagagaattattaaaattgtgtgccttttctgcatcctgcaaagctagactgtttgctgagaatctcccatttgttttccttagggcaatgccctaaaatgctcaagtttgtgtgtctcctccaagtcccacagagtcaagccagttgaccgcatatgactgcaagccacctgcaaaggctcacacttattgtatggagcacatgcatggggagccattcagcaggggtactgggagaggaggtgaggagcatggatcattgagggcatccgcgggccagttaaggggctttgcaaggcatctcaagtggctcatgggtaagcctcctgaaggagactgtgaagttgttagtagaatacatggtcatttgttgaatttcaagccctgytgctgtgagtccccaccacttttccctgctcccagcctctcacagccatatagccatggtgatcccctcagcattctgtgtgtggtgcggaagagctgggcctcttgtgtatcattccacacagctgggaaatccagctgctcattcactactcttgctttcttccatggaaggactcatgggccacaggagcctcttttggcagtgag

SEQ ID NO: 285949 - DNA, 557 bp, Homo sapiens
taagtagttccttaacacaattttattttggagcttcctaattatattactccaggtacctactgtcaatgagcttgcccatgggaaaaaaaaaaagaagagttatttatgcatttttatattccacaagcatttatggagtaactctggtgatctcagcactgcagagcatgccaaagtataagacatggttcctgcccttgaggaacttaaagactcactggtgataaataataaatatgtgagaaattattaaatcagaagtgtataaaacagatgatgaatatttaaggggaatgatgttgtggaagagcccaataataatattatatctgtagtttattttttaactatttttatatataaagaaatgaagtagctagagaatgtaccgtggrtcagggaaatagcatgaacagagccttgacaacttgactgagccagtaggagcctgagccagttggagtgaaagccccatatagaagagtcatttcatttccataaacatgagcaagctctaaatgatagctacaatcccacaagtgtttttcctgccc

SEQ ID NO: 285950 - DNA, 510 bp, Homo sapiens
ggagaacaaagaagaggagaagaggatggaggaggaggaggagggcatgtctcaagatgtctagagtgcagcacccaygcatcaccccaggacttcctagagagatttggagaatgtttggtagacatgggaggaactagaattggggaaaagtggtggcggcactcctgagtgcagaattgtgaggctcacttcctactcaggctggtgtggcctgagaaacagggtttctggcaggttgacacttccccacgggagcttgatccaaaaggctgctggccctttgtcaagattcactctccagaaaagggactctgtcccataagcaacacaatgggattctggggccactttttccaagcagctccagccctgtcttgctgcccttgtgccctactcacatctctggctctgtcttcccaccatctgaagttccatcccagcctgggagcctcttctttggggtcaaggcaggcccagaagttcatctactattctcagcatgtagaa

SEQ ID NO: 285951 - DNA, 585 bp, Homo sapiens
tttgacatgatctgctttccaaaatgtatgaatgtgctctgcttctcataatgagggagacctataataacccagcctctatacttctcccttccctgttggaatgtttacagccacgggatcagcagtccgcagcctagaaatggtctttagaggggcagattgaagtccctctgagttgttcgggatcctgatctctgcccagatttctttcacactagtccagccaaagagttggaaagccttggtcccgtatmatggtgccccctgtctgctcacaagcgctgttgtgagccaatggaactccacctgcctgattacaatttgcttggttcactgagccaattgccctgccttggttcctaagatgactgtgatgacattttctaggcttagccatttcctctcactccatatgcctttttagttctcctggccaaaaagtattctctgtaaacgattgagaagctaatttataccaaagagtaaatgattcacaaggcttagtgtattactctttctcaggacctttgcaacttaaaggggacaacatcttcagtcaaaaaataaatttcaagttgtggc

SEQ ID NO: 285952 - DNA, 555 bp, Homo sapiens
aaagggatattctcttttgtaagaactttttataataatagaaagttacttttgtatcaaggaaaaaatattaaaattaactttgttgagtgacaactttcaattaagtcaggtgacattaacacactagagcccccaatttctccatcagtcacttgttttgtcttcatggaaccattgcacaggtgaaatttaaatccactggcatttggttgatttttgcatctcattctttgcatcagatgagaaactgttagtatacttttatgacccayctgaagcaggaaaactcattgttgctttttataaagttgttttagatagcatacatatgtaacccagaaaaatagtaagaggtatgtttatatagattttcctataggtagagacatttaagaaatttgctgtgttgggtggaatatagatatgagactgttgaaaaatatggtgctttctacagttatttgtgcaagatctttaaatgtacttaatataaaaatttatccatatctgtaggtatgagttatgcaggccagtacataacaaaaacatttt

SEQ ID NO: 285953 - DNA, 483 bp, Homo sapiens
caaagggagctgcctcattcttggttgaaatttgctgaaacttttattcaatagtttatagacctcagacatattccataaccaccatcctatttcagataggaaatagctggatcagaatcagaagaatgagaggaactgagacttagctcctgccatgaacttttctagttattgtcttaggcaagcaatttgttttayagggctcgtacattcagaaaagaaaggaacatgagcatatgtcctaaggactccatgtgcctaccacaattattattaagattacaaatatgaggtagtcacagagatgctctctgctaataattttgaaagttgtgttgtaggttgtctctagttccatatccttcttgaggctgtaaaagccataaatgaatataatgttttctgcttcacttctaatacttttactgaagatgcctgatattttctggctcttcaggttgtaacagcacagcagggaaa

SEQ ID NO: 285954 - DNA, 1587 bp, Homo sapiens
caaagggagctgcctcattcttggttgaaatttgctgaaacttttattcaatagtttatagacctcagacatattccataaccaccatcctatttcagataggaaatagctggatcagaatcagaagaatgagaggaactgagacttagctcctgccatgaacttttctagttattgtcttaggcaagcaatttgttttacagggctcgtacattcagaaaagaaaggaacatgagcatatgtcctaaggactccatgtgcctaccacaattattattaagattacaaatatgaggtagtcacagagatgctctctgctaataattttgaaagktgtgttgtaggttgtctctagttccatatccttcttgaggctgtaaaagccataaatgaatataatgttttctgcttcacttctaatacttttactgaagatgcctgatattttctggctcttcaggttgtaacagcacagcagggaaawtttgaaagttgtgttgtaggttgtctctagttccatatccttcttgaggctgtaaaagccataaatgaatataatgttttctgcttcacttctaatacttttactgaagatgcctgatattttctggctcttcaggttgtaacagcacagcagggaaaaaatgagaaatgaatcctgaatcctgattactgaagactttcattttttatggaaggtctggattttctgatttctgaaagaaatgaccttgtgcttatctctgataaaaatcatacgctatttttcttctcagttggacaatttcataagctattccttgwgtctctcccaattgcacagggtttctgactggagcaatttagttcacctgccattttgaagatcttgttgtttcttctcaatgcatataaaaatgcttaaaaagacaagtagagaaatcaatatatctagattctcttcttgaaggtaagataatttctattcccactataatccttgataaataatgactttagtgtgaattattttaaaacaatttattttaagtctaagttcataaatatttagaaaactaaaaataaawtttgattactgaaagtactgcttggcgccttcaaatacaataaagacaaattcacatgaacatatttctatgtaaagattagtagattttcatattttaatgaaatgagtagtcttaagtatttcttttgataatgtatcctttcatttaaggtatattatgcttttgagataaaagttggtcagctttcagaaaactgagaatatgttttaagtagcttttttatcttaataatatgtatttttwaaaaaagaaaaaggtgctagcaaggaaaattttcattgaaaattatagaatgtcacatactaataatgatgaggccatgcctataaagttatactgagtgtgtatatagggttattcctatatataaggaatgagcaaaccctcaaaggggatatacaattttggagtgaattttataggccaaactggataacattggtgccttatgctactttttcttctcagttacaatacttttcacaaattatatgtatatatttcccaatactcccac

SEQ ID NO: 285955 - DNA, 520 bp, Homo sapiens
tttgattactgaaagtactgcttggcgccttcaaatacaataaagacaaattcacatgaacatatttctatgtaaagattagtagattttcatattttaatgaaatgagtagtcttaagtatttcttttgataatgtatcctttcatttaaggtatattatgcttttgagataaaagttggtcagctttcagaaaactgagaatatgttttaagtagcttttttatcttaataatatgtatttttaaaaaaagaaaaaggtgctrgcaaggaaaattttcattgaaaattatagaatgtcacatactaataatgatgaggccatgcctataaagttatactgagtgtgtatatagggttattcctatatataaggaatgagcaaaccctcaaaggggatatacaattttggagtgaattttataggccaaactggataacattggtgccttatgctactttttcttctcagttacaatacttttcacaaattatatgtatatatttcccaatactcccac

SEQ ID NO: 285956 - DNA, 607 bp, Homo sapiens
ggggtcagggcaagaattttgagatcttacaattctgtttaccacaggagtgaagggtacagaattatagtgatatttgattatctatatcctgtcactttattataaaattacttgattcaagttttaataaatttttaccaatgctaatgttttcaatttggcttgcttaaataattcaccatccaaaacttttctactttcaacatttaaaactgaagactgctttttatagctgatgtcagtaaaaaatctattaatataattattaatcatrcttttccaaaacttttccaactatactgttttccttgaaatagaacacccattatcttacatattacatttgaagtcttcacctgttacaaaccctataagacttttacattttttctaattctttacataatattgatcagaaatcggatttttaaactcattaggctcaattcaacagacaaaattcatctttataaacatatattgcatactttattagctagtcagtttgccaggatataaaactgaaaaagattattctgttctcaaatagtttgtgaaaaatttcctgatgatacattaggataatttttaatattttgtctgg

SEQ ID NO: 285957 - DNA, 607 bp, Homo sapiens
ggggtcagggcaagaattttgagatcttacaattctgtttaccacaggagtgaagggtacagaattatagtgatatttgattatctatatcctgtcactttattataaaattacttgattcaagttttaataaatttttaccaatgctaatgttttcaatttggcttgcttaaataattcaccatccaaaacttttctactttcaacatttaaaactgaagactgctttttatagctgatgtcagtaaaaaatctattaatataattattaatcatacttttccaaaacttttccaactatactgttttccttgaaatagaacayccattatcttacatattacatttgaagtcttcacctgttacaaaccctataagacttttacattttttctaattctttacataatattgatcagaaatcggatttttaaactcattaggctcaattcaacagacaaaattcatctttataaacatatattgcatactttattagctagtcagtttgccaggatataaaactgaaaaagattattctgttctcaaatagtttgtgaaaaatttcctgatgatacattaggataatttttaatattttgtctgg

SEQ ID NO: 285958 - DNA, 454 bp, Homo sapiens
aattatagtgatatttgattatctatatcctgtcactttattataaaattacttgattcaagttttaataaatttttaccaatgctaatgttttcaatttggcttgcttaaataattcaccatccaaaacttttctactttcaacatttaaaactgaagactgctttttatagctgatgtcagtaaaaaatctattaatataattattaatcatacttttccaaaacttttccaactatactgttttccttgaaatagaacacccattatcttacatattacatttgaagtcttcacctgttacaaaccctataagacttttacattttttctaattctttacataatattgatcagaaatcggatttttaaactcattaggctcarttcaacagacaaaattcatctttataaacatatattgcatactttattagctagtcagtttgccagg

SEQ ID NO: 285959 - DNA, 631 bp, Homo sapiens
tcatccatgatacttaagaaagctaaaattgttgggattttccttctatatactgttatttcagttaaaatataattgatgaatagataatttataattctaattctaaaatactgtaattctgtattagacagaataggctaagataaaataggcaacaattgtattaacaaatatccataaaaccttaagtatttgacatagtaaaggtttattggctattcacatcacagctaaatgcactaatatcctatctcttaatttatgtatagcaaataacctctaaggattccctgtagtaggagtccccagcccctgggcagtagactggtaccagtccrtgacctgttagaaactgggttgcacagcaggaggtgagcagcagatgtgcaaatattaccacctgagctccaccccctgtcaatagtagcattagattctcataggagctggaaccctattataaactgtgtatgtgagggatctagactgtgagtttcttatgagaatctaatgcctgatgatctgtggaacagtttcatcctgaaatcattccttctcatctgtggaaaaattgtcttccacaaaactgggacctggtgccaaagagattggggattgctgctgtata

SEQ ID NO: 285960 - DNA, 478 bp, Homo sapiens
attgtttgttaatcttaattagggtctcagataagttggttctcacttaattgaaagagaaattattctgaatgggctggtcttaatcaagtgaaagtccttaaaagagggcttgggcccttccagaagagaaaggggtctcctgctggccttgaagaagtgagctgctatgttgggagaggccaaatgaaggtgcagtgagaagggcaaagaatagggagtgacctctcagagctgacagcaagaaatcaggaccttagtcctgtaactacaaggcactgaattctgctaacaactgraagagaacaccaagctccagaagggaacacagcccagccaaacttgacttcaaccttgtgagattctgaaccgaggatccagctaagctgtgcccatgctcctaacccaaagaaattgagataaccaagtatgttttaacagttgctaaatttgtggcaatgtgtacacagaattaaaa

SEQ ID NO: 285961 - DNA, 559 bp, Homo sapiens
atgtagtaatgaagatgaatttatcaaattcttttccactaaaagaggtattacctgcccatactgcctttgctattttcaacagccctaccaaattcttagaatggcttatttggtgaayacctttggaatactcatagtcatacaattctttggaaaagttgtgtagatttgttattaaaattgactctaagtctaccagcaccaaccttcagcatcacatattccccagcatctagacaaacatcattatctctaaatttctgcttctagttctcagtacttcatttcagtggtcttcaaagtttttgcctacaaaacccccttaaaaagttatgtacccctttgcatattatacgttgacatctaaactcttattaatatgtatgtcaatagtttcaaataatataatgtccagtgtgttatatattgtatagttgctttaagtatatgtttgtaaaacattggagagagagagtctagaatgttccagaactttgtctcctgaatgtcattctgattatttttatggcagctttctttgctttgatctgcaggg

SEQ ID NO: 285962 - DNA, 559 bp, Homo sapiens
atgtagtaatgaagatgaatttatcaaattcttttccactaaaagaggtattacctgcccatactgcctttgctattttcaacagccctaccaaattcttagaatggcttatttggtgaacacctttggaatactcatagtcatacaattctttggaaaagttgtgtagatttrttattaaaattgactctaagtctaccagcaccaaccttcagcatcacatattccccagcatctagacaaacatcattatctctaaatttctgcttctagttctcagtacttcatttcagtggtcttcaaagtttttgcctacaaaacccccttaaaaagttatgtacccctttgcatattatacgttgacatctaaactcttattaatatgtatgtcaatagtttcaaataatataatgtccagtgtgttatatattgtatagttgctttaagtatatgtttgtaaaacattggagagagagagtctagaatgttccagaactttgtctcctgaatgtcattctgattatttttatggcagctttctttgctttgatctgcaggg

SEQ ID NO: 285963 - DNA, 559 bp, Homo sapiens
atgtagtaatgaagatgaatttatcaaattcttttccactaaaagaggtattacctgcccatactgcctttgctattttcaacagccctaccaaattcttagaatggcttatttggtgaacacctttggaatactcatagtcatacaattctttggaaaagttgtgtagatttgttattaaaattgactctaagtctaccagcaccaaccttcagcatcacatattccccagcatctagacaaacatcattatctctaaatttctgcttctagttctcagtacttcatttcagtggtcttcaaagtttttgcctacaaaacccccttaaaaagttatktacccctttgcatattatacgttgacatctaaactcttattaatatgtatgtcaatagtttcaaataatataatgtccagtgtgttatatattgtatagttgctttaagtatatgtttgtaaaacattggagagagagagtctagaatgttccagaactttgtctcctgaatgtcattctgattatttttatggcagctttctttgctttgatctgcaggg

SEQ ID NO: 285964 - DNA, 601 bp, Homo sapiens
cagtcttttcacattcatctaaattctctcccactcacttttatcccatgaggaaattctatgctcttgcaatttccctgttaacatgtatgacaagctgacttgtcatttgcatatttttaatttaatatgtgtatttaccactagactgtaaacttcctaagtatagatagcatgtcagcctgtctrtttacttatcattatatccttgagagatagcatagtacctagcatacagtaggaatgagttaaagaatatttaataaaaatctctaaaatcaatcattttgatctaggatgctgtaaaagaagtgttgaaaaaagctgagaaaatatttggaaaattattataaatttggaggtacaggaagcttcattccgaggcaggtatacataaacacattttttcactactgaggcatatggtcagtggactgtatatcttcctgcattttttaaagttattcaaaataacttgatatgatcagagctgtttaaacaaaaagtaagggcagaggggcttgggaaaggagacggatagagctagagagggagctagactaactcctgatatcaaagctatagccttcattgtaattac

SEQ ID NO: 285965 - DNA, 2199 bp, Homo sapiens
cagtcttttcacattcatctaaattctctcccactcacttttatcccatgaggaaattctatgctcttgcaatttccctgttaacatgtatgacaagctgacttgtcatttgcatatttttaatttaatatgtgtatttaccactagactgtaaacttcctaagtatagatagcatgtcagcctgtctatttacttatcattatatccttgagagatagcatagtacctagcatacagtaggaatgagttaaagaatatttaataaaaatctctaaaatcaatcattttgatctaggatgctgtaaaagaagtgttgaaaaaagctgagaaaatatttggaaaattattataaatttggaggtacaggaagcttcattcygaggcaggtatacataaacacattttttcactactgaggcatatggtcagtggactgtatatcttcctgcattttttaaagttattcaaaataacttgatatgatcagagctgtttaaacaaaaagtaagggcagaggggcttgggaaaggagacggatagagctagagagggagctagactaactcctgatatcaaagctatagccttcattgtaattacwgtctatttaaataattctcccataagtatttgatgctctacaaggcaatactgttcaattcacattttattctctaatctggtttaatgaaccttgtatgctcactcagattgcccaaattacttcattctccctacactgttggccacctttgcaatacactgtaagtcatgtctacacagtttcaagtggtctaactatgaagttcctggcaattcctaatgatcccctgtagacaggtatgctaggtgtgtgtttgcaggtatgtgggtgtgcattttttctgagtgcataagcaataccattcaagagagaagaagacagatttctcacccaaacgttattttccttttttaaagaaaaattttattaaacatatcaaaaaaggtctttagattttacaaatatgtatttaaaactagatcatgctgtgwtcttgtacagaaattttgtttcwtagtagtgggaaaaatgtgccatttagaattgagagaatatggcactaaaaaaaaaaggcagcacacaagattcttaaaatactaataaacatttttgggtaaatgaatgwtatgtaggaaatctggtaaagagcttgaaagccaagccacagtcataccaggtacctgaaagagcactggtcccagagagagccagccaagtttaaaaccaagcattgctgatcaacccaaaagccaacttctctgaacgtttcctcatctataaaataagaagaaaaatggctttcataccaaccttaagtatggctgagtaactataaggaaaccgaggggttaatttgatcgggtctgacagccctgtttgctttcactgacttgctttttgttattattattattctttttcttttttccatgaagctgaaagccactgtagctgaaggcctctctgctgaatgctgaaacttaaccttcactggttactttacagacaacatccattggtcaccatggtaatggttgatttatttgtttttcaagaacttgggccagctcctwtagtggctataaaatggtataattctaataataactatccttagttatgcgtaggggaatgaggtaggtgatcactctgttaattacatggttttctataacaatattgctgtattaatatacacatactgttgttaaatgattacatggttttctataacaatatttctgtattaatwtacacatactgctgttaaatgatttgcatggtgtgatctaaaagctgtggcctttggtattaggtaaatcgattagatatccactttgcctacctaacctatggtcttaggctagtctattaatcactgtaagcctcaagttccatatttatgaaagagaatatgagtagttacagtccatacattgttcatggcaactttttataaacattgtcctttacttccttccctttactatgaatgtatatatcgacataagaaataaataaaatataactcaagacacagttctcacaaaacagccttaaccgttgattaactttttcaaaccattgcttcaatctatccttattacttttattcttagaagtcttcaaggcataaccatatgtttcagtagat

SEQ ID NO: 285966 - DNA, 403 bp, Homo sapiens
gattcctttctccccgtctgtgcaagcctgcctccaacctggtgatcgttgacactcaccatttctgtgaaagacttttttttttttaacatattatactagatttgactaactcaatcttgtagcttctgcagttctccccacccccaacctagttcttagagtatgtttccccttttgaaacatgtaaacatactttgggcataaatattttttaaaatataactataatgcttcactaataccttaaaaatgcctagtgaactaactcagtacattatataatggccaagtgaaagttttgtgttttcatgtcctgtttttctttgaaattatatagcccagaaattagctcattatctgaaaaacrtatgaagaactgatgaattgtataatacaggag

SEQ ID NO: 285967 - DNA, 590 bp, Homo sapiens
tggtcagttcttaaatgccttcctttgtgctgagaacaaagtagttttgtcattttattttctacctcaacacttttctgtccattctaaacaaaaaaaataagcaagtaacatcagcctacactgcttgaaaaccttcctgctgagagacactgcagggctggccctgggttgaagtccgaccgtccaygtttgtctccgtgctctattttttgccacaaactgattccttaatacacagagtatcttcacattcccaaattttcctcacctacatcaaaattactggaaaacattttactttctatgttgtcctataaaccaaagagtatctgagacaagtctcaagaaagtttattttgccaaggttatgaatgcacctgtgacacagcctcaggaggtcctgacgacctgttcccgaggttgctgggatacagcttggttttatgtattttagggggacatgagatatcaatcaacacatgtaagatgtacattggttccatctgggaaggtgggacaactcaaaatggggggcttccagatcagaggtagatttaaggattttctgattggcaattggttgaaag

SEQ ID NO: 285968 - DNA, 498 bp, Homo sapiens
attgggaatccacccccatgacccaaactcctcttattaggccccacctccaatattggggatcaaatttcaacatgagatttagagtggacaaatataccaactatgtatcaccatctgatatgatttctttacaactttgctcctacctgtcccctttgtgcagctagtatcaaatatattacatttaaatatattatagatccaataagacaattatatatatacatgcatatataaatgcacaacatatgtgtgaatatatatacatacatatatagttttctacaattacttttaaataagttaagagaagatagaagaaaaaataagtatttatatcatcttttataattacaaaattacctttaccaatgctcattattttgggggagtttattcaaattgctgtttgggatcaactactttcaacttgaagaactttaattttkttttgtaagataagtcttttactaacagtttctctcagtttttgtt

SEQ ID NO: 285969 - DNA, 531 bp, Homo sapiens
aatattgaattgcctgtcattggattttttactttctttaaatagataattttcaaaactaaattatctttgaaagtttgcacaaaacatgcaaacgtatatccattttaagggcaaagtctgataaaagaagcaaaactatctaccttactgataaaaatcttcatataagaaaataacaaaatttccgctaacattatagtccaggatttcctttcctttcttgaacaatccagtcctgacttgaagctcatttcagagtactttttgttgttgaaggagaaatgaagtatcaaaataatataatgataaaagtaattatttaagatcatggaagctctgagaatatgccactcyccaactctgaggagtgtaatttattctctgtcccagacgccgtactcagaaatccatcactgtgtttattcaaagccacacattccacaggctgttcttagccaatgactgaccatgggaggaattttaaaccaggcctgctcctggaagacagcaaactcctctgatatgcat

SEQ ID NO: 285970 - DNA, 1175 bp, Homo sapiens
atcatccgtaactatgtactttctggaggcttttctaggcctaagcatatcttcatctgggttttgactcttcatcctctggtctggtcattctcaaaattatctttgtattaaaatcatctgggtatctttttaaagtgtccattcagtaggtctggggtgagcctgggattctgcacttctaatgtgctcctaggtatggccactgctgctgatgctctgaagaagacttttgttgtggcaaagattcattctattccattgtttcgttagtctgaattatgataattagcaataaataaatcagtaarcaaccaacatatgttgtacacctaacacaatactgggtattttgtgtaggctcaataaacattttgtgtgatatgacatattgctttaacaatgtttaacagaaattagaaatgatactgacccaagatcttcaactcagcatttgcataaatggctccatatgtgttttcagctatgcactgatacattccggcattttcaaaagtcacatcatacagtcttaattcccctttatgatactgaaaagaataaaatwatcaaaggtttgtgccatgataattttgtcaaaaaawaaaaaaaagatttcttaaaccagtggttctcaaagtgtgactccaggaccaatattatcagcatcctttgggaatttgttaaaaatacaaattcatgagcccctaacagacctctgaatgaaaaattctgagagtttggcccagcaatctgttttaacaagccctccatgtgattttgatgcatgcttaagtttgcaaaccactgacttaaactaagtcataacacatagcttcttctataaataaaaagatactgaaaaaagacagtgataaaatgagtaaacaaactacattaagtgtatattctgaaaattaccaataacacttctatcaatctattgctattacctatggttcaactggtaataagttcgtaacttctataactcatagttgtgacttcattagacatatgagaaatattttatctttctccatgatgtaacatgcatcactgtttttaaaaccattaatcattatatagtagtttttcatgtatggaaatggctctaaataagatactgatgaaatttatacaaaattaaaataatgtatctaccttgaacataa

SEQ ID NO: 285971 - DNA, 415 bp, Homo sapiens
atgtattcaaatattgtattagttaattctcacactgctaatgaagacatatccaagactgggcaatttataaagaaaaagaggtttaatggattcacggttccacatggctggggaggcctcacaatagtggtggaagacaatggaagagcacaagcacatttcacatggtggcaggcaagagagcacgtgcaggggaactgccctttataaaaccataagatcttgtaaggcttatttactatcaggagaacagcacaggaaaagcctgccaccatgattcaactacctcccactgggtccctccccacaacacgtggggattatgggagctacaattcaaggtgagattktggttggggacacagccaaaccatatcaagtgtataaccaaatacttactgaatgtctatta

SEQ ID NO: 285972 - DNA, 555 bp, Homo sapiens
aatgttcctctgtgcatatactgtgctaattatctaaactttaaaatagaagcagtggagaaaaacaaatgtctgtcaattacagccattccaaaacaatgtctgcttccattttaaatctttctgtgtgttgttttctctacttgttttaatgtagttgtgctggtattctatgcaaacttggggaatattttttctcataacattttaatataattatttctctgtgttttataaatatttataaacatatttaatatctgcataatattccatcatataatgattatttagtttatataaccgcatcttaattkttacgcatttaagatgattttgattttttgccacttaaatataaaaatcgtaatgaacatctctatgaaaaatatatttatttactaactaagcaaatacgtactgagtgcctatcatttgccatgtactgttctagatgctggagataggccagtgaagcaaatagacacaggttcttgccttcatatgatttacatcctgataggagacaaacagtaaacaaaacaattaatttaa

SEQ ID NO: 285973 - DNA, 555 bp, Homo sapiens
aatgttcctctgtgcatatactgtgctaattatctaaactttaaaatagaagcagtggagaaaaacaaatgtctgtcaattacagccattccaaaacaatgtctgcttccattttaaatctttctgtgtgttgttttctctacttgttttaatgtagttgtgctggtattctatgcaaacttggggaatattttttctcataacattttaatataattatttctctgtgttttataaatatttataaacatatttaatatctgcataatattccatcatataatgattatttagtttatataaccgcatcttaattgttacrcatttaagatgattttgattttttgccacttaaatataaaaatcgtaatgaacatctctatgaaaaatatatttatttactaactaagcaaatacgtactgagtgcctatcatttgccatgtactgttctagatgctggagataggccagtgaagcaaatagacacaggttcttgccttcatatgatttacatcctgataggagacaaacagtaaacaaaacaattaatttaa

SEQ ID NO: 285974 - DNA, 599 bp, Homo sapiens
tatggatacagaaactaaagctcaaagagtttaaatcactttkttttttaaaggaaatatgtttggaaattaggtataaacatattttgaacagtggaggtaacagtatttttatatttattatttcccttaatggttgtaacaaggatacagaagagtgttcagtcacttgtagactgtagcctcttgtttgtcaaagagtgcttgttagtctttatctgactagacctctttccatatttgatactggtgacccctcctctcttccttggcttccactgtctactactgtgttctcttgattttccttctccttgctggatgtttctactcagtctctttcatgagctcctgtcccttttcctgtatcctaaatgatactcctcccctaaatattaaccttgattctctcctttctctccgctgtatcacacactcatcatgggagattgtttcgccacctagcatttcaatgttggtggcccccaaaacagtatcttgagcctgattcattcactaaatttatgcaagtgaattcagctatctataggatatcattccaatgaaacatagctacttaaaataccacaggttggaaa

SEQ ID NO: 285975 - DNA, 665 bp, Homo sapiens
ttgtcttttattaatcattctatgtaaaactcaaatacaataaggcaaactgattactctgcaaaataattgtcatctgaagcattagataattcaattatattctgcttcttttgggtgggtatattatgattagttttttggcaattctataaaccacatagagtatgtatggtaattctgtattagcctgcttatttactcattatgataccaataccatgtgccataaaggattgcttatgcatatataagcacatggagacattaagctttctaggtgaaaaatccttttgagttaatttgttatggattttgaaatttcttaaaaatttaaactgtgtgtatatgtgtgtgttttgtacttatggacagttgtgcaaattgctcattaatgatattaacaagaaaattacatataaaactagatattaatgaatatactttatatatttttcaacgtaaggctgaaaaacatgcttctaaaaatgaaagttatactgctgcttttcagatggattatggattgtctggagatcatattcttattgtaatatttaaataaattctgatytaatttaaagggagtgggacagctacagggggaggagcagctacattcagtgtttgcgaagttccactctgtttctgtgattctgtcatga

SEQ ID NO: 285976 - DNA, 611 bp, Homo sapiens
tattctgtataattaagtgaaattgtgtaattttctttacacaggttgcacgtatttcttaagtatatttttaagtattatgcatttttgtgcttctgtgaatgggatctatttttcattgatttttgtttcagtcactactgtataagaaaatctagtgactttaaattattttatagaaatatcaaataatatgtatctaataatgtttgataagttttatattttctgagttttttagaaagacaatcatataatatatacatactaataaatttctccctgacttctaatatccatagtctttttagctactagcttgagaaaatgatgtattttattaaatatgtgctgtaacttcactaacagattttgctgaaaagatgttttataaatcactgacaggcattatcatcgacgcttgatatacattgatgcttgataaagttctgtgatataccacagaactttatattgtggttctcaaaagtgtatttcataaaagaacatgacataatagaacaattcttaacctggaggttgggaatmctttatcctaatcaagccctgccattaattagccgtttgacctaggacattttatcaaacca

SEQ ID NO: 285977 - DNA, 394 bp, Homo sapiens
tccagtatttataggtatttatatcagaagggcttgcacattaactaagtttatgatcttgccagaaccacagtattaatttctgctgaaataatagagcctaaattccagtgcgattttgttatatattttgtttgaaatataataatggtagttatctacccataaaaggccaactgaataaggtttaattactctggaccttattcttgctyggaataagtaagattattacaagattattatacttataagtaatcttataagtaagatttcccacataaagatttccctttatgtgggaaaatcatttaaatgtaagacctcaaatcttcaatccttcaaacagaatttttcggttaccaggaatataaattatgcttctgaattgaga

SEQ ID NO: 285978 - DNA, 1895 bp, Homo sapiens
ctgcactcttaagttcactgcagcattattcacaatacccaaatacggaaacaacctaaatgtcatttgaaggatgaatggataaagaaaataaagaaatattatcaaaccttcagaaaaaggaagtcctgctatttttgacaacatggaggtacctggataacattatattaagtgaaataaactggacacagaaagacagatactgcatgatctcacgtataagtggaatataaaatagtcaaactcataaaagctgtgaatagaatggtggttaccaggggtagtggggagagaaaaatcaggagatgttgctcaaatggtacaaagctttagttattcatgataagtgagttctagaaatctaatgtacagcaagggggttacagttcacartattgtttagtggaaatttttaaagagtgaagatcttaagtgtcctcaccacaaaaaatgttaactatgttaggtgatagatatgttcattagcttcactgtaatgatctttcaaaatgtatacatatatcaaaacaccaagttgtacaacttaaatatatagttcttatttgtcagttacaccttgataaagatgaaaagtttttaaaaatgaagaaagttgagwctgcactcttaagttcactgcagcattattcacaatacccaaatacggaaacaacctaaatgtcatttgaaggatgaatggataaagaaaataaagaaatattatcaaaccttcagaaaaaggaagtcctgctatttttgacaacatggaggtacctggataacattatattaagtgaaataaactggacacagaaagacagatactgcatgatctcacgtataagtggaatataaaatagtcaaactcataaaagctgtgaatagaatggtggttaccaggggtagtggggagagaaaaatcaggagatgttgctcaaatggtacaaagctttagttattcatgataagtgagttctagaaatctaatgtacagcaagggggttacagttcacaatattgtttagtggaaawttttaaagagtgaagatcttaagtgtcctcaccacaaaaaatgttaactatgttaggtgatagatatgttcattagcttcactgtaatgatctttcaaaatgtatacatatatcaaaacaccaagttgtacaacttaaatatatagttcttatttgtcagttacaccttgataaagatgaaaagtttttaaaaatgaagaaagttgagwtgctgtctcctggtaatcatcattttattttctgtctctgtgaatttgactactctaaggaccgcatgtaagtggaattgtatagtatttgtcctttcgtgtttggcttatttcatttagtatactgtttttgaagttcatctacattgtagcatatgtcctaatttctatcctttttaaaacggaataatattctattttatgtatatagtgcattctgtgtatctattcatcttctgaaaggcatttgggttttcctaccttttggctattgtgaataatgctgctatgaacttaagtgtacaaatatgtgttcaagttcctgctttttatttatgttttcagtatatacccagaagaggaattatgggatcacatagtaattctatgtctagttttctgagawcaatcatactgttttccacaagggttataccactttacgttcccaccagggatacacaaaagttccaattccttcacatcctcaccaacaattttcttttgcttttttttttttttttttttggttttgcttttaataatagccatccttatggatgtgaagtggcatcttattgggattttgatttgcatttcctaataattagtgatgttgaacatgttttcctgtacttattggccatcttc

SEQ ID NO: 285979 - DNA, 575 bp, Homo sapiens
taaatgaatgaatatataaataaagaatatatttactatgagtcagaagattatgtttaagggcacacaccatattataaaactgaaaaaaggcacagatgcccaagatagtagtgcagtttgaataaattatttattgttgtacacattgaaacatagaatcatttcatattgtgtttctctagaattttgatttttcctgtttgtttttttgtgttcttctgtgcaccttcttcacgtttaggggtcagatggagagactcaaaayacaatgaagtttgtagtcaaacatcaatacattcagggcaggaaagatgaaaggatgaatttttaaagtaatacctagattggtggtaactgtacttttaaagggataggagctctacaagggacttcaaatcaaagcagttgaatataaatacaagcccattttcagtggagaattgtcaagatatatttcattctgtattattctaggctcttataactaaaactatagtgaaagaatggcaattgtccagtgagttgaggtagtaaataactcagcctgaatcccagtatgccctccattttct

SEQ ID NO: 285980 - DNA, 575 bp, Homo sapiens
taaatgaatgaatatataaataaagaatatatttactatgagtcagaagattatgtttaagggcacacaccatattataaaactgaaaaaaggcacagatgcccaagatagtagtgcagtttgaataaattatttattgttgtacacattgaaacatagaatcatttcatattgtgtttctctagaattttgatttttcctgtttgtttttttgtgttcttctgtgcaccttcttcacgtttaggggtcagatggagagactcaaaacacaatgaagtttgtagtcaaacatcaatacattcagggcaggaaagatgaaaggatgaatttttaaagtaatacctagattggtggtaactgtacttttaaagggataggagctctacaagggacttcaaatcaaagsagttgaatataaatacaagcccattttcagtggagaattgtcaagatatatttcattctgtattattctaggctcttataactaaaactatagtgaaagaatggcaattgtccagtgagttgaggtagtaaataactcagcctgaatcccagtatgccctccattttct

SEQ ID NO: 285981 - DNA, 576 bp, Homo sapiens
tattgattcttcctatctgtgaacatggaatatctttccattttttgtgtcctcttcaatttctttcatcagtgatttatagtatccattctacaggtcattcacttcatttgttatgttaattcctaggtatttaatttaatgtgtggctattagaaatgtgattactttttatttttctgagattgagtctcgctctgtcgccaggctggagtgcagtggtggaatctcagcttactgcaatgttcgcctcctgggttcgagtgattcccccacctcagcctcctgaggagctgggagtasaggcatgcaccaccaagcctggctaatttttttttttattttaatagagatggggtttcaccatgttggccaggatggtcccaatctcctgacctcatgatccacctgacttggcctcccaaagttctgggattacaggcttgagccactgtgcccagccgtgattacttttctctttcagattgttcactgttggcatatagaaatactactaattcttgtatgacgattttctagcttagaactttaatgaatttgtttataagttccaat

SEQ ID NO: 285982 - DNA, 552 bp, Homo sapiens
gatattaataagtaattaagtcaaattcaaaagtgcaaatcatgggatgttttattgaatgttacagatacattatctcattttctttcaatctcttttgtcttttctttggagaatgttggcttaaaaggcaaaatagaatcaatatttagcatttaaaataatttctttgagaattgtagaaaggacagttggcatgatggattgtagacatatgtaatacttatgcccaaaagttaygcagacggaagatatgaatacattcaagcatggcttaaataaatttcaaatcaccagcccataatgggaaaatagggcaagctaataaatcttttatttgtgagaataatattatgaacaggactatcatcctcctaagacaagtccttttcctcagaaaaacactggggccagatggcctataggtaaaaattgatacagcattttaatgtctgttttgtttatctattgctgcataaccaactactctaaaacaatggatgacaaaacagttgttttaatattcctcacagttttatgggttgactggaa

SEQ ID NO: 285983 - DNA, 552 bp, Homo sapiens
gatattaataagtaattaagtcaaattcaaaagtgcaaatcatgggatgttttattgaatgttacagatacattatctcattttctttcaatctcttttgtcttttctttggagaatgttggcttaaaaggcaaaatagaatcaatatttagcatttaaaataatttctttgagaattgtagaaaggacagttggcatgatggattgtagacatatgtaatacttatgcccaaaagttatgcagacggaagatatgaatacattcaagcatggcttaaataaatttcaaatcaccagcccataatgggaaaatagggcaagctaataaatcttttatttgtgagaataatattatgaacaggactatcatcctcctaagacaagtccttttcctcagaaaaacactggggccagatggyctataggtaaaaattgatacagcattttaatgtctgttttgtttatctattgctgcataaccaactactctaaaacaatggatgacaaaacagttgttttaatattcctcacagttttatgggttgactggaa

SEQ ID NO: 285984 - DNA, 522 bp, Homo sapiens
ggagatcagcatccactgtattgttaagtcttttccttaggtgttgatttgtgaggcttatattagtctttccaccatggtaatctttggacaattttttctcactcattcattctgtaagttaaaacaagcatttaactagatgccatttgaatgtgttatgcttttctacaataagtggtatgctttgctacaataaaagttgagagttatagtttctgttcttayatcatttctgcctatgagaaaaaaacctattcaaaaattcaactttatcagaaaatattcagcatatagcaccaatttgtacaatacctttcctgtggttcatctatcaaggcctctcctaaataatatagaaacactataactgttccatttttactgttttacacaagaagtgagattcatccccaaaccccaatcaaaccttatttaacataagattacttagttggaactttaaaaaaaagtagatatggactcagtggtgagttattcaagataaaagataattcatag

SEQ ID NO: 285985 - DNA, 522 bp, Homo sapiens
ggagatcagcatccactgtattgttaagtcttttccttaggtgttgatttgtgaggcttatattagtctttccaccatggtaatctttggacaattttttctcactcattcattctgtaagttaaaacaagcatttaactagatgccatttgaatgtgttatgcttttctacaataagtggtatgctttgctacaataaaagttgagagttatagtttctgttcttatatcatttctgcctatgagaaaaaaacctattcaaaaattcaactttatcagaaaatattcagcatatagcaccaatttgtacaatacctttcctgtggttcatctatcaaggcctctcctaaataatatagaaacaytataactgttccatttttactgttttacacaagaagtgagattcatccccaaaccccaatcaaaccttatttaacataagattacttagttggaactttaaaaaaaagtagatatggactcagtggtgagttattcaagataaaagataattcatag

SEQ ID NO: 285986 - DNA, 593 bp, Homo sapiens
ttttgctttaacacaattataagctaacagatatatttttctgctccatcttaaatatgccattgtggggttttttctttttgtttttgttttttctttggtttttgtttttagaaacaaagtcttgctctgttgcccaggcaggagagccatggtgtgatcatagctcaatgtagcctccaactcctgggctcaagtgatcctcccacctcagcctcccaaagtactgggattacaggcatgaatcaccatgcccagccctgataaaagtttaagaataatacttgtagacctatatcatgagagctcactgacttgctagagtagctactgtgaaaaattaaccgaaatgcattcatatgtttgcaatgagtgatttcaaatcattgtttaagttggtaactaagtattataatctacagcagcacaaatacatgtgttgttcatctatgggatgtgaatttttttgtgtgttcttccatraaagaaagcagacctatgaaggtaaaaatctaagccacatgtttcatatttgtttcataaaagacacattaatgattgtattcaagtttccaggtaatatttatttaaca

SEQ ID NO: 285987 - DNA, 523 bp, Homo sapiens
ttatttatgtacatcaagagcaaattgcattcctgactgccttgtgcaaaatcagagtgctgtgcccattctttttttttttttttttttttttttttgagacagagttttgctcttgttggctgggctggagtgcaatggtgcgatctcagctcactgcaacctcagcctcccaggttcaagtgattctcttgcttcagcctcccgagtagctaarattgcaggcacctgccaccacgcacagctaatttttgtatttttcgtagagatggggtttcaccatgttggccaggctggtcttgaactcctgacttcaggtgattcacccgccttggcctcccaaagtgttgggattacaggcatgagccactgctcctggccgcccattctgttaaggaagcttcattaatttatattctagaaagagtattcaccaaagggtatctcctttttaatcattttcctctgatgaagtagtaacacaactcattaactttatcatgatttaatataaaaattaaag

SEQ ID NO: 285988 - DNA, 583 bp, Homo sapiens
caaacaaataaggaaacaaccaagaaaaagatgagacagagaccatatgtgtcctgcaaaacctgaaatatttactacctgatccttacagaaaaaattgtccaactcctgctttagaaaactttcattttaatcacacagatgtggaatacacacatgtacaaaaataaaaatagtacattttaataatagtgactgtattgatatttgcatgtatcaggcactgactaaataatttatatccattatttcatttagttctcacaacaaaactgtgagagatgtcttgttatttattaccattatacagataattcaaagaggtcaaataatttgtccatagtcatccagccagtaagtggtagagctagaatttaaaccaggctatttgattccagagtccattctctctgctattagagatctgaagtaagagatatatggtcaaaaaggaaagataaaattttctttcataagagcagtaraaacttggaggaaatgggagcagggtgcggtggctcatggctataatcccagcactttaggaggctgaggtggagggttgcttgagcccaggagtttg

SEQ ID NO: 285989 - DNA, 1182 bp, Homo sapiens
tagtcttaacattcaacttccaagttttgtcaaatttaaagcagtggtttgcraacttttgtagccatcagaatcatatttggagcttgttagaatattgaagccttggtcctgctcctggaaactgcgatttagcagacttggtgtgggacctgaaacctgctattataacaagtttctcaggtgattcctaatatacatgtacgtatatggttttagtcatatacataatatgaaccaaaaagaaatttgaatcatttcttatgtggttactgaaggattataaaatggatgggaagaaagaaaatccattatagaaatatataagatgattaagtttttttttttttatctcctgaactctttgttgaaacaggtgctgtgaaattttatttgaaatagtagatctttggatattttgttatccatgaattctttgggtgttcttaaaaaaggtatatatgtttcacagttcatggaatagcaagatgttttgacaaatgcaaggaaaacttcttatacaatggaacaatatgtgaaagctatttttgaaagctttattgtgtcattgttactacattgtttccctactataacacwaagaaatggtttgaaaaccaacctaaataaaatctagacctcaactaaatataaaaggaaggtctggatctaggagcactcacctttttgcatccagtcaaacctctggagttagaggaacatgttaggttcatgctgatactgagtgctgagcctgagagggaacaccaggtggtaaggaggaggtcactgtgagtcctgtccattttctccagataatgttgacagaaaggaaaatgctgaggcaaaattaatgtaagttgagagtctctttgagccaacttcaagaactgtaacccaggaagatagattcaagctgcccttaatatatgctctgattttacagcagttacaagtgggtttttgaaggaaaaaaagaagaggcagtttctaagttgtttwccaggaatttgaaactggcacatttttcccacaaaactaatatttatgttgttttttaaaaataaaatacatagaaattgaccctccctggtcttaaaacttgaaacttatatttgtcccatgagtttctttttcaggaaaaccaaacctcaagcaaggaactgcaattcatcatatcat

SEQ ID NO: 285990 - DNA, 630 bp, Homo sapiens
tatatgtaacagtagagaaaaaaaattaagtgtgtcaaataagaaaaatattgaataaaaactattataaacatttatctgccttgaacactaaagggttgtcttttagcaaaaagaacagtctccaatttttgcctagctttaaccattgtgaaacacagagagaagtccaaggggtagctaggctctgctgcagtcaagagtctgggacaaccagttccagagctctgcaaacacaatacccagtggggcccaacccagcactgtgttacagagctcacatgatccagccccagacctggcttgcagctttggatcatgtagcctttttctagagtgagattcactgcagtgtttatatgagctcccaggtagggcatcagaatgactatgcatccaactgtcatgttccagtttttttcttgaagcttaagcaaagttttaactatgtcctggtaagctartgtgtaaaagctatgctctttcaaaagacagtttctacaattgcagctctcatgactctaacgccttagactgagcatccctgagaggttattatttgatttagcaagagctttaactttataccagtccattataaacagctgtggttagatactttgaaaagta

SEQ ID NO: 285991 - DNA, 506 bp, Homo sapiens
caatgtccttaagacgggagcctttagctctgatctagtgatatttctctaaagagcctgactgcttagggcttcctaattagaagacgaagtgctgtttaaactttagactaagaaaatgtcaagaacatatcccttccacattaaaatgttcctttaaaatttgaaggcagatgtacagaagtgtgcatacatttaacatagaagttcccgctagtcaaggktaaagacagcagtgtttgggtgaatgagacagtacttgtcctttgactgatagaactcaaccacattgaatgccatctttttttaaagaagcaaagtaacgccatctgcccctgaactcttaaaataaacttgatttcaaattccttttctaaactattttttatgactatttctaataaggacttaaagaactagacatttttaatcgccacaagaaaatgaagtagaggtgtgcctgcttgttgaaacctttcctctgaaagcttgggggccacagtgag

SEQ ID NO: 285992 - DNA, 1138 bp, Homo sapiens
attatctgacattttaacaacatttttatttaaaaaaaaaaaaaactaacatccaatgtccttaagacgggagcctttagctctgatctagtgatatttctctaaagagcctgactgcttagggcttcctaattagaagacgaagtgctgtttaaactttagactaagaaaatgtcaagaacatatcccttccacattaaaatgttcctttaaaatttgaaggcagatgtacagaagtgtgcatacatttaacatagaagttcccgctagtcaagggtaaagacagcagtgtttgggtgaatgagacagtacttgtcctttgactgatagaactcaaccacattgaatgccatctttttttaaagaagcaaagtaacgccatctgcccctgaactcttaaaataaacttgatttcaaattccttttctaaactattttttatgactatttctaataaggacttaaagaactagacatttttaatcgccrcaagaaaatgaagtagaggtgtgcctgcttgttgaaacctttcctctgaaagcttgggggccacagtgagtctttaaggaagtggccaaagacaggwcataaactatagaatattcaaatggttataatagtgaggaaatacattttaatggtggtttattattacttcaaattacatttaattgaggataatgaagacatggtttgaaaacaagatcagaaaatgagaattattttattggagaattaagcaacattaagtagtatgctatgcttcagcaacttagcacaaaatgtgagcaagtagttagtttattttcwcttcagcgttttcaagtctcaaaaatccagctagtacctatgttggcactcaccaaaaaattctgggtacacaaatattaccatcaacatgtggctagtaagtaggtttctgtaccattccaaatgcccacaggaatgatagaaatgaattagaatagtttattgagcaactcttctgtgtaaggcactgagggcagtggcaggggaggtggggagctgtacacaaagcagtggtattctgagtcagttgtgagcatttctttccaaatctgagttcagagacatcacactggtagcttaaaattggtcacaaaaaggagggcttacc

SEQ ID NO: 285993 - DNA, 664 bp, Homo sapiens
tattttgaatagtataattataggaataagtttagtaaacattacaattatagttattttgtctactttaaggtatttatagtgttcaaacgtttcagccacattaaaattctaattttaatttgtatattctaggagaatttaatgaattgcatttgtagtaacttttaaatgttccatttgatatttcaaattttgtttattagatctgtatattttcatgtaataaattgagcatcttataaagtatacataaacatttttattcctctctattaaataaacccccaggaaattaagcatcgtagcagaagcaatcccagagggggtaaataatataccctaggtcatactgttagtgagtggcagatctaggactcatgcccagatccatgaacttaaaacytgtgtttctatcttctgcaccccaactctttgcagacattttttgaagtagctttttcacattccttaggacactattttcttttttcacttagcagtatgtgatttaggattgtacagacatagctgtctgtacaggttcccataggctgcattgaggcattagaactgttggtttggaccatataatttttttatgaaaaatgaattaactaactgataacatttttaaattggaggattgcccatagaaaggtag

SEQ ID NO: 285994 - DNA, 459 bp, Homo sapiens
gcagcccagtaggtcccagccttattttacccagctcctattcaagatgcagttgctctgattcaaatgcctctgacaccaggatcccaacccagtgctccctctccgaggccaggcttctaaggatatatctctgttttctcattcacttgctaggttcatcataccattatggatgtcatccaggaacagctgatgacaggaacagctcaataaaccagagcccgggttccatgaacatgttgtctgggtgtaagtgtgggctttatcatatatcagctgtgtgactataagaaagatcctgacctctctgtgccaatatcccaatatccaaaatgggaatggtcatcatgcctacctagtagggttattaaaagaattaagcaamataatgctcatgaagcgcttagcatagtgcctgacatacagcaaggacctaataaatgctgggggagatgt

SEQ ID NO: 285995 - DNA, 1008 bp, Homo sapiens
gcagcccagtaggtcccagccttattttacccagctcctattcaagatgcagttgctctgattcaaatgcctctgacaccaggatcccaacccagtgctccctctccgaggccaggcttctaaggatatatctctgttttctcattcacttgctaggttcatcataccattatggatgtcatccaggaacagctgatgacaggaacagctcaataaaccagagcccgggttccatgaacatgttgtctgggtgtaagtgtgggctttatcatatatcagctgtgtgactataagaaagatcctgacctctctgtgccaatatcccaatatccaaaatgggaatggtcatcatgcctacctagtagggttattaaaagaattaagcaaaataatgctcatgaagcrcttagcatagtgcctgacatacagcaaggacctaataaatgctgggggagatgtwtgctgacttgctgcttcagagtgtgggcatcacctctaacctatttaaacgggaagggtgcacatgagtattaggtcagaagaggagaaataggacagaagtgggggggaggagatataacaaatgtataggccagaatctagaaccttttattatgcctcctgtaactttctcatgaaagtgggagtggagtgagggggaagaaaatacccaggatggattcataggaacawagaaaggtctcttctagccccgtgactctactgaaaaaattcaatctcctctacattttccatgaggcatcagttgctctttatagtttctaaggcagcagaattattattagttctatggaaaatatcgaaccatagttgttctcaggagtatcttgctgcttaagcttaaatgtcacaaggtatttgatcatagatagataccaataaggcaggcaaaagcctgctgctcagaaagggaaaagcacaaagaaatgacagaggtgggcacagaatagacctggggatgtgggagacagataagactttctttcc

SEQ ID NO: 285996 - DNA, 548 bp, Homo sapiens
tgctgacttgctgcttcagagtgtgggcatcacctctaacctatttaaacgggaagggtgcacatgagtattaggtcagaagaggagaaataggacagaagtgggggggaggagatataacaaatgtataggccagaatctagaaccttttattatgcctcctgtaactttctcatgaaagtgggagtggagtgagggggaagaaaatacccaggatggattcataggaacaaagaaaggtctcttctagccccgtgactctactgaaaaaattcaatctcctctacattttccatgaggcatcagttgctctttatagtttctaaggcagcagaattattattagttctatggaaartatcgaaccatagttgttctcaggagtatcttgctgcttaagcttaaatgtcacaaggtatttgatcatagatagataccaataaggcaggcaaaagcctgctgctcagaaagggaaaagcacaaagaaatgacagaggtgggcacagaatagacctggggatgtgggagacagataagactttctttcc

SEQ ID NO: 285997 - DNA, 470 bp, Homo sapiens
ttattagttctatggaaaatatcgaaccatagttgttctcaggagtatcttgctgcttaagcttaaatgtcacaaggtatttgatcatagatagataccaatarggcaggcaaaagcctgctgctcagaaagggaaaagcacaaagaaatgacagaggtgggcacagaatagacctggggatgtgggagacagataagactttctttccgagaatgatgatttagctttagaatgtggctggcacccctgtagttgttttccttgtgcttgttccactaaagcagccattccccagccttggattatagcatttccttatcaatgctttgagcaagatgcaaacaaaggagagctcccataccaatttgggagtagaagttctcaccctcgctctcctacccggcatccctacaaaaatacgcagatctgggtaggtctttccaaggatctgttcaaagtaaaagtaaaa

SEQ ID NO: 285998 - DNA, 470 bp, Homo sapiens
ttattagttctatggaaaatatcgaaccatagttgttctcaggagtatcttgctgcttaagcttaaatgtcacaaggtatttgatcatagatagataccaataaggcaggcaaaagcctgctgctcagaaagggaaaagcacaaagaaatgacagaggtgggcacaraatagacctggggatgtgggagacagataagactttctttccgagaatgatgatttagctttagaatgtggctggcacccctgtagttgttttccttgtgcttgttccactaaagcagccattccccagccttggattatagcatttccttatcaatgctttgagcaagatgcaaacaaaggagagctcccataccaatttgggagtagaagttctcaccctcgctctcctacccggcatccctacaaaaatacgcagatctgggtaggtctttccaaggatctgttcaaagtaaaagtaaaa

SEQ ID NO: 285999 - DNA, 470 bp, Homo sapiens
ttattagttctatggaaaatatcgaaccatagttgttctcaggagtatcttgctgcttaagcttaaatgtcacaaggtatttgatcatagatagataccaataaggcaggcaaaagcctgctgctcagaaagggaaaagcacaaagaaatgacagaggtgggcacagaatagacctggggatgtgggagacagataagactttctttccgagaatgatgatttagctttagaatgtggctggcacccctgtagttgttttccttgtgcttgttccactaaagcagccattccccagccttggattatagcatttccttatcaatgctttgagcaagatgcaaacaaaggagagctcccataccaatttgggagtagaagttctcaccctcgctctcctaccyggcatccctacaaaaatacgcagatctgggtaggtctttccaaggatctgttcaaagtaaaagtaaaa

SEQ ID NO: 286000 - DNA, 541 bp, Homo sapiens
gggccataaacatcacccaggtgtctaattaatggttacgatccatcacgtggaaacttggcacagagtagtgaggctctggggccccgagctgctcaggccctgagatgtgcacatccctttaagccagttggttgcttacagctaaccccctttctccaaatgccagctaggtcctgggaatacatgggtcgcttcctgtagcagagccaaagggctctgacatcttggataacagcagstcctaggattgtctgctcccaagtggtcaaggcccccagactcccagctcactgtaatattgtgatgagggcagggctctttcacttctacttcccaggtcactgatggcagcagttcagcatgaacagctaattgctccattctccaaatgacccttttgtctgttccaggtcaccagggcaccctttcccacaggaagtcggagaggctgcttgttgctgagagctggccttgtggggagcacagcactgggcacctggggagagccagggaagcagcttcagggctaatggcccct

SEQ ID NO: 286001 - DNA, 488 bp, Homo sapiens
ctcagtagccactcaggagctaccatgctaggcagtgcagactgaatatttctgaagttgcattagatagtgctaatagagcaaacacaaattagtaactctcattcctccctcccaaagatccacctatctctttactcctcccttttgacatgtaccttttctttttttttgagtaacttgtgtacttgtcttatacactccccttaagattagaagctgtttaagggcagggtctggtcttcctggccctgtgacacagcaaacactgaatgtatttttaattaaatcagtgtgaytcaatttgcaccattttattggatctcttttgcatttcagctgacactagatttcatcagagtctagagaaaaggatggatcacagaacaggtttgtctcaatcacaaacagtaggatggatttttgctaaattgcaaggttttcttaagcacaaaatgtagaaaagacccaccagagctgtgagtatt

SEQ ID NO: 286002 - DNA, 567 bp, Homo sapiens
gagatcacaaagaattctttaaagaggcttaccattaaactgcaaaactgaaatcctaataactagaatgcaaatatttaattagcatttctcattaaaataaatgtgtgactttttttcttaccttcaaaaatgacatggcctttgaaaatacatactggaaatgagctgggaagagaagggttggattttgaaggcagccacttgatactggggagtttgcaagttgagccttcctgagtccttcccattctttcatcggggggagaagaagactttgctgtgcacctgtatataatagtgaaattaatttcaaatccaggacctgctttattcttacctcagattccatgaaacctgctttaaactttttctaatattctagaaatctactctatccttacccaagggatagaggatatttctgtggcacccaagctrttcagtgaacagatgaactgtcccagggtcttcactgtgattggaggggctcaagtcatttgggaaaaatcggtgttggcttcaagagctataaatgctcccaggcagccagactatactattgat

SEQ ID NO: 286003 - DNA, 545 bp, Homo sapiens
tctgctcaattgtcatttctctagggaagcctttccttatcactctcctgcctatatctacattagaatacttagctataatcactaataaaattgtacttttaatttcagagagtttgtagctatacattcattattctgatcaattataacctgcaatttttcactagattgtatatttcctaagaatagggascaatgttattgatccccagaggctagcccagaatctgacaccataattgacaatatatgtcagttgaatgaatgaagtagtgaattaaatgcaattgatcaaaacaataaatgcagaataggttgagggagctagcattttaggtcacagatataccctccaaaattacaatgggccaaatgcaataggatgaaatttaagagggaaaatgtaatgaagtgagggggcagagtagagcagatggggaaggagcgagtttgaatgaactgcaggtttcatgtggtctcagagtggcgaggcaggaaagctgatgcagcctccaactgcagtcatggaaacatgtacactc

SEQ ID NO: 286004 - DNA, 596 bp, Homo sapiens
tatattgtttcagctactacaaaaagttttccctgttacacactgtcacatgaaatcctaacttattcaaatgaaatatatattgaaatatttgaaaataatatctaaatgtcctgaaagggagctgtacctgtagaaactctcatctgcaatgaatgagattgcctgaaagaaagtaaaattcattacaaataatgcagtctttatcatttttattcaaaagaattttaagggttttcaggaccactgttttaagctttcaaatatccataaatcaacagcattcagtagagacgaagtagagtcatacaaacctgtgttgaaatcttgacttggccactgaacagctgtgtggctgttaccctgagctagtttataatcttttagagcctcaatttcctaatttgtaaaatggggttaataacagtaactccttgggtaattatgaggagtgaataagataatgcatgtaacatgcttagcctggataacatactccacaaacsttagccgttgtatgtaataaacaaattaattatctgcttttgtgagttactgtgtgggagacaagtatggatggcacagtgcctaagatc

SEQ ID NO: 286005 - DNA, 581 bp, Homo sapiens
atttctcttatatcctagctattgtcctaggtattggggatgtattggtgaacaagagtttctggaaaaagggatgattaatctggagatgataatagaggcccttgctagctgacagcaattgaacagctgacatgcagaaaaagaattagcccaatactgtgtggctccatggggattaggcagaagttatagggatgcagattttggttacagcatctgttcacaagtgaagagcatggccttgggttagaaagtgccttgtcatattccagcrcaggcagatgtgcatctgtcagggcacatgacataatgcagaaaacacttagcacagtacctgggcacgtcacaagtgctcagccaatggaacaaaatagttggacaggggattcttctgtctttggggaatatgtgatagatcattctagaattctaaagaacaggaactcttgcccatatttttatccctcctctccatcactgagcttggcatatggttggtggtctttaaatgtctaataaatgaatgagaggtttgtatcatctccaaagtgtacattaataattatgatactaaaaga

SEQ ID NO: 286006 - DNA, 537 bp, Homo sapiens
ctggagccaccacacccagcccacgaaagtaggttttaatggggaaattattaagtcatctagaaagaagttgttgtcttgtcctgggcttgagtgccaaggacatcaagtatagagtcaattattttctgcggatatctacttagattataaatggttcagatatacgggactaagggcaggagttgacatgacttgctctgaacttcacactgttgctgacccagagtcccaaagccagatttctaggaaaataatcagactaggttatgtgtccatcctttgtcctcagctgtggctactgggccagctccttcagcagtgttgtgggtgcgtggataagaataagaaaccaggtctcctaggctttcattttaaagaggagagaattgaacacctgtgaggtgaagtgatttgtccatgattatacagccagttactgatttacagacagcaatgaaacccagggctccttattcctctatagtccamaccattttgccttaaaaaaaaaatcaccaaaggtttattatatct

SEQ ID NO: 286007 - DNA, 593 bp, Homo sapiens
ttttaaaatccaaactccccaataggagctccaagaccatatacgtagctcgtgcctgcatttccaaattcatctcttcttattctctcccgctaccaactctagtccaggcaaaatggcctttttagtcctttaaatgaccacatccttttcagccttgaggttttgcctgtgctgttcttctcacctaaaatgcttttcccgtccttgctgccctgacaggttccttctgataatttagttctcaactttttgggggaggactcacgtgatcatctccctagtttccagtggttggctatctcacacggctcagtaattttccccttggccatcctctgcacaattcagcctcattgtttattaactcatgaggtttattcactaatttttttttgtcacctgccctagactggatgtttacaaggccagagarcatagctgttttgctcattattgttcattcattagtggttatcacctatgttgtaataggtggaaccagcttgcactggctggtgagtgccgattgggtgcgtttcttccctactctgagttcagtgatgtcatattgatagcttgtaatcagccat

SEQ ID NO: 286008 - DNA, 596 bp, Homo sapiens
tctaactctagctgcactctcctatgaacctttcttcccagattgtcacaagtctttttttaagtggctaaggtcagcttaagataagccattaggtagggggcgtggttaatccttaggtataggggaaacccagcttaagtttctctgcatgatactttttaaccgatgcatcgtaggtccttgctttcttcggtaacccaagagctagcatgctgagtcaccgtcagcttgttacctrttaggactccacggtctaggaagctgctaccatctgagtggaagacactaggtctgagagagacaggagtctcaggtcttatcccacctccagtctccccctagatgggtgaccctagacaaattcaacttgtgctgggaagaggagcctcacaagacctctccttttacagataaacttcatcgagtgacttgtccacagtcacagtgaacctctccatgactcttgtccctcagttactggggaaaaggagaaagaacaatcacatttggtttctcaggatgttataggtcaaatgagataaatatttaaggatttggcaaagtttaaagctctaaaatatgaggcagtgaca

SEQ ID NO: 286009 - DNA, 562 bp, Homo sapiens
tgcaaactccttttttgtttcctaggtcttactgagataggtgctaatattggtgctgcccactgtccccctacaaattgaaaatgactatgctaatacattatctcacaaagggcagtcacaaataggaagagcaaatattttgaaatgaatattaaatggacactctcctgaagaggttaggcattgctggaaatgcctcccttgaaaatctttgtttccaagattgtcctttcctggacaccactgtaggatggctctcttccctggattgaaatggtggctccggaatacaatggcagactaatttatgtgttccccaaactttaaatagttttcctttactcccagktctacaaaatatctgccacagaaacctttcacatagaaggatgtcatgtcacatgtacattgttaatgtaactatggtaaccaaaaaatgccaccagtgtgtctgtttcatacacaaatgaggggacagctgtggagtccacatgtctgccagtggtataatagatgtgagctaggacagcctgggttggaaaattacaactcatttata

SEQ ID NO: 286010 - DNA, 523 bp, Homo sapiens
agaaaaccatcagatcttgagacttattcactatcatgagaacagcacaggaaaaactcaccctcgtgatgcaattacctcccactgggtccctcccacgacatgtggggattataggagctacaattcaagatgagatttgggtggggacacagccaaaccrtatcagtcatcaaatccaacttctttattttgtagataaagaaactaagccctagaagaggaactctgccagtctatttacaaagcctgcactgaaagctagaccatatactctttggagagggatgatgtgaccagctcatagactagggcctataccatgtaataggtactcaaacttttttaaaataaatgaatcaataaatgaatgtctttatgtaatcgggtcacattatttcatgagtattttcttcatatcattaaaaagtctttgaagctataatgctcaatggctgcataattctaccaactttttgttggtgagaaataaggactctctcaattatttgctatcacatat

SEQ ID NO: 286011 - DNA, 503 bp, Homo sapiens
ctacctttgcatcagctgtgatcagattcactgtttaaacatacatgtttatatatatgcttttattttattttatatgcttttattttatattatataaatataaatatatatttataaatatatttatatatacatatgcttttgcttaggtaggtacaggtttcaacgtgccctgttttcagagctaatgtagatgttccaagctgttgacagtaaaacagacaagcagtttcttamaagaaatatgaaaacaattactttattctacccttgactctgaccagcagatgtaaaggtggcattagacagactacaggttgactgcttggaaatctacaggtaataggacttcaggagagaaatttgagctccaggagaacagagaagggcagggtcaggtctggtctcatagaaatgagaagctagatccagttcaaggcagacaataggatgcatagagtggagagtagagactgagaacacagttctggaaactgagg

SEQ ID NO: 286012 - DNA, 500 bp, Homo sapiens
gggagatgtctgaagtaatttctggaagaagcaaaagtcctaggatagttttctctttgggtgggtactttggatgggaaaggaatttcatctcacgggacagaggagcatttgcaaaattctatgaatccctactgggtcgtctccatggctgtgactggatgacactgttaccacatttttctgctaaaaaaaaaaaaaaaaaaggatcctaggaaaatcaaattactatctccaaaatatgagaatcccagacctctgactctccccagtgagactttggtctatttaaacacacacaaaactctcctgccttgcattagcaaaggaaagtttagaaaaacaaaattagattttacctgcagtgtgttaaatkaaaccctccaaattatgcccatttttaaaggtaattgaatgttaagttttttacttatttaagagcaattccattccacccactttgcctattagcatatcagaggttcacacgcacactaata

SEQ ID NO: 286013 - DNA, 585 bp, Homo sapiens
tcaatgctatcaaacagcatcacgtgatacagaggaatatttcatgaaaggaagagttcatcaatgcagcaaacttcattgttgtcttattttaagaaactgcctcagccatcataaacctttagcaaccatcakcttgaccagttagtggccatcaacattgaggccagaccctccaccagcaaaaagatgaagactcgagaagggctcagatgattgttagcatattttagcaataaagtatttttaaattaaggtacgtacattttagacataatgttattgcacacttaatagactacagtgtagcataaacacaatttttatatgcactgggaaaccaaaaaatgtgtgtgacttgctttattgtaacattctctttattgtagtcatctgaaaccagaccctcaatatctctgaggcgtatgactatactaaacagaggccgatagtaaattaacaaatatttgtggtgaactccttccatgcaatagaaagcataggtacctcttcctggacatcttttccatcccagccactgtacaacatgtccttcacacaacactgctaatccttttaccgttc

SEQ ID NO: 286014 - DNA, 1204 bp, Homo sapiens
tcaatgctatcaaacagcatcacgtgatacagaggaatatttcatgaaaggaagagttcatcaatgcagcaaacttcattgttgtcttattttaagaaactgcctcagccatcataaacctttagcaaccatcagcttgaccagttagtggccatcaacattgaggccagaccctccaccagcaaaaagatgaagactcgagaagggctcagatgattgttagcatattttagcaataaagtatttttaaattaaggtacgtacattttagacataatgttattgcacacttaatagactacagtgtagcataaacacaatttttatatgcactgggaaaccaaaaaatgtgtgtgacttgctttattgtaacattctctttattgtagtcatctgaaaccagaccctcaatatctctgaggcgtatgactatactaaacagaggccgatartaaattaacaaatatttgtggtgaactccttccatgcaatagaaagcataggtacctcttcctggacatcttttccatcccagccactgtacaacatgtccttcacacaacactgctaatccttttaccgttcwcctacaatgctagtggaatcaggtgacttcaccctcagggatttccccctccaggcactgcagggctttgattggaagctcagagtggagagtgctttaggaaggaaagcaaatgatcatttagtgtctttttcttcctaacaacaacaacaacaaaattcatagaaatatgccccttacattctttttttttttttccccacagacaagatcacccttacttaggacaaaacatttcctaatcacaaacattctgtgattctgcagcctaacttggctaggacttctctcatcaatgttttctaaggatacacctgcccctgaaatgcagtttttgtggtgccctatgcatacctaagaaggaacccatagtataaagtggcacatgtactttcttgatccatagggaaagtacgtggaatttgaggtggtaaatgatgttttaagcagacagaacagcatctgttgaagatacagagacatgaatgtgcagacagtattcggcaaccagcacaagtagctcwgctttttccagtagtttactgatgcctaaaatttcttacattctgcaattggaattaaaagccttaaaatgcagataccccttgaaattgcctg

SEQ ID NO: 286015 - DNA, 1003 bp, Homo sapiens
agaatgacagcttcattccttcttccctctttattgagtatctaccatctgctggcyattaggccctggggaagcagaaacaaaaaacctgccctttttatgaggaaagacaatacagtgtggtgaggggtatgagaaaggcttgctcaggtaagagcacagaaagggctagataatttaggctaataggtcaaaagtagcttcctcacaagggaggtaactcttgagtgattttgaaagtgagcaggagttggctaggcaaaacagaggtcaggtggagaatagtaatttgagtagaaaatagagcatgttgcaaaagcatgaggcataaagaacaaatactttttttttgagaattggaaagacttcagaatagcctgtactgtatttatgtgcatcttggagcagcaaagtcaggtagtcaagggcgtgatgattggggcaccgtgtgccaagctaaggcatttcaacctcatcctgagagwtggtcattaaaatcatattttaagataacttttaatgatatgggataatgccttatgtgttgtgtgaagaaatcaagcaataaagtgatatatggagcatgatcccaatgatgattagaaaaactattcatgcatttcttttaaagctggaaggaaatgtaccagtatgcttaccacggttatatatttgctttaagataatgaaaactttttgttatgtgtccaacgcattgtccaaggcttaagaaaaatagtatgagcacataccactttcacattttaacatttttaaaaggaaatattaatttatctgtaatatgaaggctgacctggagagtgacaaaaaataaagacagaaaaaccatatgtaagggcagctgcagtaatcaaaagagaaaatgtgtgggtctgggccaacttagtggcaggaacatagaaaagaaaagaaggcttcaaaggagagwaaatccatactgcttgctaaaggggcacaggaggaaggaggagtggggtgactt

SEQ ID NO: 286016 - DNA, 556 bp, Homo sapiens
gatttgaattattaatgagcaagatagtgcatggtgtattttatattctcactgtataatgaagtactccatttgtagtgcttagcaaaatagtattctatatttaaataattcttacatattactaacaacagttagcatttatgtagcctcagaagactggaactcactttgaatgaatgttgcctcataacacctctttgatgtagtcaggaagtatatgattctctcaatgagaaattctggttagaagagttccccaaattatataacaaatcaatagaggagagatacaagtttgcacatttttacttcacrttatgattgtatagttcttgaagttggaaccaagaagccatttgttataaaggtataatggaaagcaacttgttctttggaggcagaaagacctgagttcaggatatttcttatttaagattttccttatatgtaaaaagaagatacaaatttaggttgaaggctatgggatataggtgatcaataaataggagccattattcctgatgccctggtatagcattagtgagacagtccc

SEQ ID NO: 286017 - DNA, 525 bp, Homo sapiens
gataggtcattgataggtcattctatggatgaccttgagcaccaacctaagcattgtcaattaattgtatgaaccacaggagaatcatcagagtttcaagagccatratttaggaagatcatggtgcctctggagtccagcctagctagaagaaaggagaaaatgggggtaagggaaatcagtaaggaggctattacaacttattaaacaaccatgtctcctttttttaacccctctctcttaatactatgtgaaaattccttagagtgaactggaaataattctggactaaaaattagacaactaggctcaaattacaggatggcccttattagcaaaatgcatgggcaagacttaagcattccaggcctctctttgcttatctatgaaatggcaatgagggtattactgacctctcaggattatggtgatgataaagtgagaaaacattttagataatctttgtggactatatcatcattacctcctggcttcatttctgcaaacttctcctgaacagcaggc

SEQ ID NO: 286018 - DNA, 457 bp, Homo sapiens
tacaatatacatactatatatacttttaataattactttatcttcgtgtatatcataaaaatgtaatataattagattccatatcattggtatgatcaccttataaccaattaagtagtgaagcttctttcagtccctatgtatatatattttaaaaatggtatttgcaattataataacaattactgagcacttactgtgttcaatattgtattccattattataagaamttttatatttattgactcattcaatcctcacaataacccagtgagggtaggttgtattcacttatcttcatcttccagatgagaaaaataagtcacagagaagtcaaataagttgatccaggtttcaaggcaataagtggtaatactacttttattttaggagaaaataacaggataggttttcatctataaaaggggggccagagaggggaagaaagccttctta

SEQ ID NO: 286019 - DNA, 457 bp, Homo sapiens
tacaatatacatactatatatacttttaataattactttatcttcgtgtatatcataaaaatgtaatataattagattccatatcattggtatgatcaccttataaccaattaagtagtgaagcttctttcagtccctatgtatatatattttaaaaatggtatttgcaattataataacaattactgagcacttactgtgttcaatattgtattccattattataagaacttttatatttattgactcattcaatcctcacaataacccagtgagggtaggttgtattcacttatcttcatcttmcagatgagaaaaataagtcacagagaagtcaaataagttgatccaggtttcaaggcaataagtggtaatactacttttattttaggagaaaataacaggataggttttcatctataaaaggggggccagagaggggaagaaagccttctta

SEQ ID NO: 286020 - DNA, 532 bp, Homo sapiens
ggagataaggatccaagtgcttaagcagagcttactctagacaattcttggctgacctcacctgtacctacttgtgcctgaaagagacaagacactggctttatatgattaccyatgcctgggctccattcagaccagccaggtaaaagttctgggggtggggcctgggcacattaatatttttaaaagatctccaggggacaccgatgtgcaatcaggtttaagaaccactggactaaagtgaaatgtaaatttcgttaccaatctcttggatctctttcattttcccaagggtttggctctttgtggagtgggtagactattttcagaaatatgagaatactggagaacatcaaccctgcacattcacacacacagaaattctgcagttcccctatagcattttctattgagggctctcaacttctagatctttctgagaactctcacattgcagaacagacggctaagttcacaacaccaccaatggaatttccagagaaagccaaatatggcagaattccatttgtct

SEQ ID NO: 286021 - DNA, 318 bp, Homo sapiens
atgttaccactggagaaagctgaatggagggtacaaggaacctctctgtattgcctttgcaacttcctgagtctgtaattatttcaaaatgagaagttaaaaaaatattgatgcacagatcatactctggaccaattaagtcagaatctctagaagtaggatgccagaatcagtctcttttaaagctcccaggtgatagcaaagtgrggccaatgtagtcactgatcttgccacccaatgtttaagtgctttaaaatctcacaacgttgtccaactagcacccaatgtttaaatgttttacaatcttctcacagatgg

SEQ ID NO: 286022 - DNA, 590 bp, Homo sapiens
gactgaggacctgaattaatggttgagaaaaagaagcagaatcccggagggaaggtataggcaaagaaaactaagggaaccacagaggggaaagaggtgggaagataaagagggagagcgaccagagtaaaggggctcctccacatggggtgagaggaaagtggcggagatgaagaaagggggagctgcctgggagagccctctgtgagctgggtcctcyctgggaatgaaacatcctgttctcccttgccccatattaggggcccagcctccacaacaactgtgaggacacacaaatgcacacacacacatacctataagaaaaaatgcaagggtaaacactacaatgattcttccttaaagtacttttttttataggcagtaggatttgttattcatattttcccattttttggtcatatgtcttctgtttttctacaatgtacacagtttacctgtaaatttagaaaaggaagtattttaatattgctactccatagtgatggaagatagattaatggaatatatgctgggaagaaaagcctctgaaaaaaccttttttttccagggacaattctttcaaaggcaat

SEQ ID NO: 286023 - DNA, 590 bp, Homo sapiens
gactgaggacctgaattaatggttgagaaaaagaagcagaatcccggagggaaggtataggcaaagaaaactaagggaaccacagaggggaaagaggtgggaagataaagagggagagcgaccagagtaaaggggctcctccacatggggtgagaggaaagtggcggagatgaagaaagggggagctgcctgggagagccctctgtgagctgggtcctctctgggaatgaaacatcctgttctcccttgccccatattaggggcccagcctccacaacaactgtgaggacacacaaatgcacacacacacatacctataagaaaaaatgcaagggtaaacactacartgattcttccttaaagtacttttttttataggcagtaggatttgttattcatattttcccattttttggtcatatgtcttctgtttttctacaatgtacacagtttacctgtaaatttagaaaaggaagtattttaatattgctactccatagtgatggaagatagattaatggaatatatgctgggaagaaaagcctctgaaaaaaccttttttttccagggacaattctttcaaaggcaat

SEQ ID NO: 286024 - DNA, 634 bp, Homo sapiens
catcagaacaaagtgactaagatttttttaaagttagaggctgctgtgactgacttcttaggaacttggaggttcactttggcaggcaggttttcttgtaacarggggttcctgagtgtgtactagcactgtgacagcaataaaactgggttgcacagcatagatgcctccttccagctggtagggttcattttgtctgttctgaggaaacaatttcctcctgggatagagttaaatcccacaagaattaggtagtgctgttggatcttaaaatatctgcattgcaatccagaagcttcatggacttgacaccattttagtacaggttcctgagttgctttttgaacgggtgcaaagtctgatgctgcattctcatccatcattccctctcattgtccacacagaggaataaatctattagaaatgcagatgttactgtgaacccaggatctcaaggttgttaatctcatttggcttttctaggttgctgacaaacgtttatttttaaaatggactgcaaagcttacctggtcctagtttggccacagcatagaggaggtcatagttgaggactggcgtggcatcgttgatgggctgccagccaacaggtggggaggaagggggcgagatgaga

SEQ ID NO: 286025 - DNA, 634 bp, Homo sapiens
catcagaacaaagtgactaagatttttttaaagttagaggctgctgtgactgacttcttaggaacttggaggttcactttggcaggcaggttttcttgtaacagggggttcctgagtgtgtactagcactgtgacagcaataaaactgggttgcacagcatagatgcctccttccagctggtagggttcattttgtctgttctgaggaaacaatttcctcctgggatagagttaaatcccacaagaattaggtagtgctgttggatcttaaaatatctgcattgcaatccagaagcttcatggacttgacaccattttagtacaggttcctgagttgctttttgaacgggtgcaaagtctgatgctgcattctcatccatcattccctctcattgtccacacagaggaataaatctattagaaatgcagatgttactgtgaacccaggatctcaaggttgttaatctcatttggcttttctaggttgctgacaaacgtttatttttaaaatggacygcaaagcttacctggtcctagtttggccacagcatagaggaggtcatagttgaggactggcgtggcatcgttgatgggctgccagccaacaggtggggaggaagggggcgagatgaga

SEQ ID NO: 286026 - DNA, 591 bp, Homo sapiens
ggaagtgtgataatactggtattgaatgctgcaggaargtcaaatagggtgaagatggagatgacaccactggatttgacaaatgggctgatgctgatgaccttactgagagagctgtttgaacagatgtgtaatagattaattacagatggaggagtgaagggcagagaaaaagctggaaaaagagtttggcaatgaaaaccagggagctgggctaactatgtgggcagtcacggtcacaagcagatttttggtagtgtggggaaacacttattggctgaagaaatgaaactaacaaagagggagagagaagagatagtaaggatatgttgaagtctgaaccccaggacctcagaacatgaccttgtttggaaatagggtcatcaaagatgtaattagttaaaaagatgtcatactgaagtggtatgggaccctaatctaagttgactagtgtccttataagaaagccatgtgaagacagagaaacatagggagagtgtcctgtgaagacagtgaagtggcacctctgcaagccaaggaatgctaaatattgctagcaaaccaccagaagctaggaagaagcaaaaaagg

SEQ ID NO: 286027 - DNA, 501 bp, Homo sapiens
aaccccatcctgaggccacccagggcccctagtgttctcattagcatacaaaaagacacttatcactgaggagattttccaggggttcttggaactgtgtaccaggaaacagggaggaagacaaaaaatatatttcttattatattmaaaatattatactcttagctgataagggtcaattccctaaaaggtttaaacaccagaacgagccaagagacttgaatccgcaaagtttaagtcaacgcaccctattatagatggctgagtacatcctttccttgcctaaatccactttgtaagtacccaaagtggagactgaggaagaggagcaagtgaggggattgcttggaacctgtcctggaagctgtccaataagtaggggcaggtgacaagagaggaaccgaaaggcagcatagtttgcatgcctagggctcttgttgttctgactccatgcagtgactgtccatcctttgggtgagtgggaccctctcattacgtgaa

SEQ ID NO: 286028 - DNA, 501 bp, Homo sapiens
aaccccatcctgaggccacccagggcccctagtgttctcattagcatacaaaaagacacttatcactgaggagattttccaggggttcttggaactgtgtaccaggaaacagggaggaagacaaaaaatatatttcttattatattcaaaatattatactcttagctgataagggtcaattccctaaaaggtttaaacaccagaacgagccaagagacttgaatccgcaaagtttaagtcaacgcaccctattatagatggctgagtacatcctttccttgcctaaatccacyttgtaagtacccaaagtggagactgaggaagaggagcaagtgaggggattgcttggaacctgtcctggaagctgtccaataagtaggggcaggtgacaagagaggaaccgaaaggcagcatagtttgcatgcctagggctcttgttgttctgactccatgcagtgactgtccatcctttgggtgagtgggaccctctcattacgtgaa

SEQ ID NO: 286029 - DNA, 501 bp, Homo sapiens
aaccccatcctgaggccacccagggcccctagtgttctcattagcatacaaaaagacacttatcactgaggagattttccaggggttcttggaactgtgtaccaggaaacagggaggaagacaaaaaatatatttcttattatattcaaaatattatactcttagctgataagggtcaattccctaaaaggtttaaacaccagaacgagccaagagacttgaatccgcaaagtttaagtcaacgcaccctattatagatggctgagtacatcctttccttgcctaaatccactttgtaagtacccaaagtggagactgaggaagaggagcaagtgaggggattgcttggaacctgtcctggaagctgtccaataagtagkggcaggtgacaagagaggaaccgaaaggcagcatagtttgcatgcctagggctcttgttgttctgactccatgcagtgactgtccatcctttgggtgagtgggaccctctcattacgtgaa

SEQ ID NO: 286030 - DNA, 535 bp, Homo sapiens
gttcaaattatatccaaaggattatgttgatgacaacccaccatcaaggcagtcctgaatattgaggacaaagagaaagtatcttgagcaaggctgcacagatacctagggagggaagtcagaaaatcagagttcttgtccttgccactgacttcctgggkataagtcacttttcctctgggccctggctaatattagtttacattggtatgtgtgtaccagattcttgaaatatggttggattttttttcttaattagagagagacagggtctttgctgcccaggctagagtatagtggtacaatcacagcccactgcaacctcgatctcctgggctcaagtgattctcccacctcagcctcctgagtagctgggactacagctgtgtaccaccatgcccaactaatgttgttttaataggtagggtcttgctatgttgctcaagctggttttgaactcctgggctcaaatgatcctcctacctcagcttcccaaagtactgggattacaggtgtgagccaccacgcctggatt

SEQ ID NO: 286031 - DNA, 535 bp, Homo sapiens
gttcaaattatatccaaaggattatgttgatgacaacccaccatcaaggcagtcctgaatattgaggacaaagagaaagtatcttgagcaaggctgcacagatacctagggagggaagtcagaaaatcagagttcttgtccttgccactgacttcctgggtataagtcacttttcctctgggccctggctaatattagtttacattggtatgtstgtaccagattcttgaaatatggttggattttttttcttaattagagagagacagggtctttgctgcccaggctagagtatagtggtacaatcacagcccactgcaacctcgatctcctgggctcaagtgattctcccacctcagcctcctgagtagctgggactacagctgtgtaccaccatgcccaactaatgttgttttaataggtagggtcttgctatgttgctcaagctggttttgaactcctgggctcaaatgatcctcctacctcagcttcccaaagtactgggattacaggtgtgagccaccacgcctggatt

SEQ ID NO: 286032 - DNA, 575 bp, Homo sapiens
ctgagttatcatgtgccaaacactaactcatcactttatatgcactagctcattcagcaacccttttttggggagttactattcatcagacacatcttgygcattatctcattaaattctcataacaatcctatgaaggagctgttcttattattcctattttgcagatgacaagactgacagttacaagggcagaattacttgagcaaggctctcctacagtaagtggcagatcaaaaagttgaacccagtatggtctgataaccaagccaatgtttatagccacatatataccatacttcccccgattcaactgacaaatggagatgggtgtgaagaatactttgatcaaagatccggaggcaggaatgtacagagcagtgcttctcaacagggagcaattcctcccttcccaggagacatttgagagtatctgcaaacacgttgtcacaattagggggatgctactggcatttagtggatagaggccagggctctcaccaaacatcctacaatgcacaggacagttcactgtaacaaagaattatctggacccaaatgtcaatagtgccaag

SEQ ID NO: 286033 - DNA, 536 bp, Homo sapiens
tgccaagcctgggatattatggcactgctcagagctaacttggtcaagagtttcatctttcctggaattgtccttggtatttcaagctttgtgtggggtaggcagcattttactaggagtactaaggcatggattctgttcctagttctaccattaacttgctctgtgatcttgaccaagactctgaatcactctgtgccatagtttcatcattaataaggatgataacaacaaccactcacagctactgagttatcatgtgccaaacactaactcatcactttatatgcactagctcattcagcaacccttttttggggagttactattcatcagacacatcttgtgcattatctcattaaattctcataacaatcctatgaaggagctgttcttattattcctattttgcagatgacaagactgasagttacaagggcagaattacttgagcaaggctctcctacagtaagtggcagatcaaaaagttgaacccagtatggtctgataaccaagccaatgtttatagccacata

SEQ ID NO: 286034 - DNA, 578 bp, Homo sapiens
atagtgacctgaagagctacagctacttttagtactttgtctcggagaatgcagtttccctctttttagatccttttatcataaggtggggtgagggcatgggaggagtagctactgaagaagacagaaatagattaaatattcaattgagtaaaaccctttaaagcactcccttccccatgaccacccacaccctgccccatctatgcctccctctggcataaataaaaaatatttaggtggtgaaagggggtgcaggaactgttccttctttatagaccaaaaaaaattaagtaaaattaaaacctactttctataaaaaaaaaaagttttaaaaagtgaagtcaatgaatgtttatgggcacaaaatttattgtctacttcgaagaaagtgatttatttttacattgttcttcatgatccattgatagggcaaccacmcaccccaactggcccaggacagttcttctgggtactagtcctcctaccataattatcaacaccttcttttacactgaaatgtgtcttagtttgaatatttagttctatagtcatctacctatagaaaaagccatttc

SEQ ID NO: 286035 - DNA, 584 bp, Homo sapiens
actctttaaagaagcacaataacttgttacaggttctatgatgacagaatgtacaaggttcagtagagagtctaaggaggatgtgatcggtttcactcggctgaaggtgaggggcaggtagaagtagaacgcccttgtaaagggtgtaacccatatttaactccattttgaagctttaggtgatcattaagataataatattttgccatgttcatctttttagcaatattggctattttgtataacaatggacagaactgtgcaagcatttgatagaaaagggcacaagcttcagagacaaacattggtgttaaaatcccagctatactgtcactagctgagtggcttttggcaaggttcttaacttcttcacaattaaaaagtgataatatctgttattgttttgtgatataaagcttatatctgaaatctgaasagtgttaaaggctggctttaccttggcccaattactacagcacagagtctcgtcacctacttggctgctcattatagtggtgcacatgacactggctagtttttcagagatggggaaacagttaaacctaaaagagactggtgtacaa

SEQ ID NO: 286036 - DNA, 584 bp, Homo sapiens
actctttaaagaagcacaataacttgttacaggttctatgatgacagaatgtacaaggttcagtagagagtctaaggaggatgtgatcggtttcactcggctgaaggtgaggggcaggtagaagtagaacgcccttgtaaagggtgtaacccatatttaactccattttgaagctttaggtgatcattaagataataatattttgccatgttcatctttttagcaatattggctattttgtataacaatggacagaactgtgcaagcatttgatagaaaagggcacaagcttcagagacaaacattggtgttaaaatcccagctatactgtcactagctgagtggcttttggcaaggttcttaacttcttcacaattaaaaagtgataatatctgttattgttttgtgatataaagcttatatctgaaatctgaacagtgttaaaggctggctttaccttggcccaattactacagcacagagtctcgtcacctacttggctgctcattatagtggtgcacatgacactggctagtttttcagagatrgggaaacagttaaacctaaaagagactggtgtacaa

SEQ ID NO: 286037 - DNA, 626 bp, Homo sapiens
  misc_feature (1)...(626): n = A,T,C or G
aggattgagtgtgcagcagcagataaggtcaggagaagcttggggacttgcttgtagcaagtagcaccctaggatgctgctgttatctggacacaacacaccttcaactctaggagagcttttagattactaaataacaaaccctaatgctaaatctgtaaacttgtgaagatcattaaaatatccctttgtggctaaaggtaaattttaggggacttgtcctcatcttccaacatggaggagacacgygttcctgtactgcaattgacttgattgatagtatgcagaaatgcaagacaggccaacctggccatcttccctaacctctcacacctccctctccttgagcttccttgaaccagcagtgctcatttgctgggattagagccaccgacttagcttgccatttgtttacctcaagcaaactgtgatcaaaaagcccctaacacgagctagaaagctggcttagtggaatcaacatctgggtagataatacttaaattccttgcaatcctgctttcacttactagtagggtaaaatcaatcttccctttactgggaaaaaggcaataaattataactttctcactgtcagtttgttggttntgagatttttaaaactaaat

SEQ ID NO: 286038 - DNA, 626 bp, Homo sapiens
  misc_feature (1)...(626): n = A,T,C or G
aggattgagtgtgcagcagcagataaggtcaggagaagcttggggacttgcttgtagcaagtagcaccctaggatgctgctgttatctggacacaacacaccttcaactctaggagagcttttagattactaaataacaaaccctaatgctaaatctgtaaacttgtgaagatcattaaaatatccctttgtggctaaaggtaaattttaggggacttgtcctcatcttccaacatggaggagacacgcgttcctgtactgcaattgacttgattgatagtatgcagaaatgcaagacaggccracctggccatcttccctaacctctcacacctccctctccttgagcttccttgaaccagcagtgctcatttgctgggattagagccaccgacttagcttgccatttgtttacctcaagcaaactgtgatcaaaaagcccctaacacgagctagaaagctggcttagtggaatcaacatctgggtagataatacttaaattccttgcaatcctgctttcacttactagtagggtaaaatcaatcttccctttactgggaaaaaggcaataaattataactttctcactgtcagtttgttggttntgagatttttaaaactaaat

SEQ ID NO: 286039 - DNA, 592 bp, Homo sapiens
ctttgtcctttcccacaaagaagccagattaacatatacataattcatgtcccaagacatgcaagtgagagttttacctttttaaaacattttaggtgtcaaagtttgtacatttgggattgtgtttatcatatagcctagcctagcctagattaatgcagcactagtaccaggtgtcctgtgctgctttttaaaatcctaacacatgcatccaaagaagatctataaacagccaacaagcacayggaaggattctcaacgttactagtcatgatggaaatgcaaatcaaaaccacacagagacatcacttcacacctactagaatggctatattttttaaaaatggaatattacctgtgggtgagtatgtgaagaaattggaaccttcatgcttcatacttactagtgaaattgtaaaatgtttcagctgctatggcagacatctggcagattcaggtaaggaattagaactggaacactagggatcagaggctcccagagtggaatgatcaatggtggccgtggctaggactgttgtggcaattataggaatggctgattctctgaatgccatatggaggaggagggacc

SEQ ID NO: 286040 - DNA, 370 bp, Homo sapiens
tgaccactccatcttgctgggatgggccttagcaatrtgtttccatggttatacatatttgtaatatacacatgagattctttttactaacgtgtgtctcctcttcaaattttaaaagcttcggagtccacaaatggatgtgctcctgctgactggtgcttcaattcagtctttttatgcctgcctcatatacccttaaaacctgggaaagcagttcctgatggcttgcacgtgagtttaatttagtcttctttcagtatctgtttcactgtctctctctctctaatgtacacatgcacacacaccacttacacactcacacatacatatggtctagctaagcaaaatacatggagtacttagcgtatat

SEQ ID NO: 286041 - DNA, 592 bp, Homo sapiens
  misc_feature (1)...(592): n = A,T,C or G
gagtaacaagacaacctatggcataagaaaaagtattcgtaaagtatacatctaataaggagttaatattcaaaaatatgaagactctaaataactcaatagtaagaaaataaatagcccagttaaaaactgaacaaaggacccggatagacatttctcaagaaagacaaacagataatyaacagttattttttaaaatactagatttttttttacttcatgcatagtgcgcacattgacctaataagaaaaatagtaaaaactttctactgtcaagattgtaacttttacaaatcatcttaaagtccattgggaacgaaattgctaatgaatgtaatcatttaacatgcactttcaaataagcaggcaattgactggtgcggttctcactttccatttacttttaaaagcagttagagctccaccttcctttaaattcttattaggtcttaaaacactgagccaatatttattattcctttgatagtgtaagtcaaaaataaaacactgaatttagagctatntaaaaatttagaagtagtgggaatataattcttctccatgtactgctatttactttaaactaagaacc

SEQ ID NO: 286042 - DNA, 592 bp, Homo sapiens
  misc_feature (1)...(592): n = A,T,C or G
gagtaacaagacaacctatggcataagaaaaagtattcgtaaagtatacatctaataaggagttaatattcaaaaatatgaagactctaaataactcaatagtaagaaaataaatagcccagttaaaaactgaacaaaggacccggatagacatttctcaagaaagacaaacagataattaacagttattttttaaaatactagatttttttttacttcatgcatagtgcrcacattgacctaataagaaaaatagtaaaaactttctactgtcaagattgtaacttttacaaatcatcttaaagtccattgggaacgaaattgctaatgaatgtaatcatttaacatgcactttcaaataagcaggcaattgactggtgcggttctcactttccatttacttttaaaagcagttagagctccaccttcctttaaattcttattaggtcttaaaacactgagccaatatttattattcctttgatagtgtaagtcaaaaataaaacactgaatttagagctatntaaaaatttagaagtagtgggaatataattcttctccatgtactgctatttactttaaactaagaacc

SEQ ID NO: 286043 - DNA, 592 bp, Homo sapiens
  misc_feature (1)...(592): n = A,T,C or G
gagtaacaagacaacctatggcataagaaaaagtattcgtaaagtatacatctaataaggagttaatattcaaaaatatgaagactctaaataactcaatagtaagaaaataaatagcccagttaaaaactgaacaaaggacccggatagacatttctcaagaaagacaaacagataattaacagttattttttaaaatactagatttttttttacttcatgcatagtgcgcacattgacctaataagaaaaatagtaaaaacttyctactgtcaagattgtaacttttacaaatcatcttaaagtccattgggaacgaaattgctaatgaatgtaatcatttaacatgcactttcaaataagcaggcaattgactggtgcggttctcactttccatttacttttaaaagcagttagagctccaccttcctttaaattcttattaggtcttaaaacactgagccaatatttattattcctttgatagtgtaagtcaaaaataaaacactgaatttagagctatntaaaaatttagaagtagtgggaatataattcttctccatgtactgctatttactttaaactaagaacc

SEQ ID NO: 286044 - DNA, 628 bp, Homo sapiens
atgaagctcccacttctcacttataaatgagtacatgtggtatttggttttctgttcctgcattagtttgctaaagataatagcctccagctccttgttcctgcatctgtgttcctgcaagggacatgatcttgttctttttatggctgcatagtattccatggtgtatatgtaccacattttctttatccagtatatcactgatgggcatttaggttgattccatgtttttgctattgtgaatagtgctgcaaygaacatatgcatgcaggtatctttatggtagaatgatctacattcctttgaatataatcccagtaatgagattgctgggttgaatggcatttccgtttttagttctttgaggaattgcctcactgctttccacattggttaaactaatttacactcccaccagcagtgtaaaagcaagaaaaagactttcaataggcttataaaattaacaactgtcactcttgttctacttaagtaagggtttatcagtaaaaataaagtctaataaatccaagagtagagataaataattaattgccaatattgctcctttctttatttatcttccagaatttctttcgctcttaaattttctttctagatttaaatttaa

SEQ ID NO: 286045 - DNA, 628 bp, Homo sapiens
atgaagctcccacttctcacttataaatgagtacatgtggtatttggttttctgttcctgcattagtttgctaaagataatagcctccagctccttgttcctgcatctgtgttcctgcaagggacatgatcttgttctttttatggctgcatagtattccatggtgtatatgtaccacattttctttatccagtatatcactgatgggcatttaggttgattccatgtttttgctattgtgaatagtgctgcaatgaacatatgcatgcakgtatctttatggtagaatgatctacattcctttgaatataatcccagtaatgagattgctgggttgaatggcatttccgtttttagttctttgaggaattgcctcactgctttccacattggttaaactaatttacactcccaccagcagtgtaaaagcaagaaaaagactttcaataggcttataaaattaacaactgtcactcttgttctacttaagtaagggtttatcagtaaaaataaagtctaataaatccaagagtagagataaataattaattgccaatattgctcctttctttatttatcttccagaatttctttcgctcttaaattttctttctagatttaaatttaa

SEQ ID NO: 286046 - DNA, 628 bp, Homo sapiens
atgaagctcccacttctcacttataaatgagtacatgtggtatttggttttctgttcctgcattagtttgctaaagataatagcctccagctccttgttcctgcatctgtgttcctgcaagggacatgatcttgttctttttatggctgcatagtattccatggtgtatatgtaccacattttctttatccagtatatcactgatgggcatttaggttgattccatgtttttgctattgtgaatagtgctgcaatgaacatatgcatgcaggtatctttatggtagaatgatctayattcctttgaatataatcccagtaatgagattgctgggttgaatggcatttccgtttttagttctttgaggaattgcctcactgctttccacattggttaaactaatttacactcccaccagcagtgtaaaagcaagaaaaagactttcaataggcttataaaattaacaactgtcactcttgttctacttaagtaagggtttatcagtaaaaataaagtctaataaatccaagagtagagataaataattaattgccaatattgctcctttctttatttatcttccagaatttctttcgctcttaaattttctttctagatttaaatttaa

SEQ ID NO: 286047 - DNA, 628 bp, Homo sapiens
atgaagctcccacttctcacttataaatgagtacatgtggtatttggttttctgttcctgcattagtttgctaaagataatagcctccagctccttgttcctgcatctgtgttcctgcaagggacatgatcttgttctttttatggctgcatagtattccatggtgtatatgtaccacattttctttatccagtatatcactgatgggcatttaggttgattccatgtttttgctattgtgaatagtgctgcaatgaacatatgcatgcaggtatctttatggtagaatgatctacattcctttgaatataatcccagtaatgagattgctgggttgaatggcatttccgtttttagttctttgaggaattgcctcactgctttccacattggttaaactaatttacactcccacyagcagtgtaaaagcaagaaaaagactttcaataggcttataaaattaacaactgtcactcttgttctacttaagtaagggtttatcagtaaaaataaagtctaataaatccaagagtagagataaataattaattgccaatattgctcctttctttatttatcttccagaatttctttcgctcttaaattttctttctagatttaaatttaa

SEQ ID NO: 286048 - DNA, 541 bp, Homo sapiens
agctggaaatatttctaataaattccttctaggagccatggttcctatatttattgacattgatatgtacatttgcggtgactccagaaattccttgggaattaaattgggcaagcaygttggggaggagaaatcagacttgtcttgactttatattttcagaacccgcaggttagttttacttagagtgtgtgtttctttgcattggctgggaaggatactgatagaaatcatggcgtccagattgaagtcataggaacccttcaaagccatctattgagtcaccagtgataaagtgctctcttttcagtcatatttttaatttcttgttaaagaaaaaaacttttaggaatggataaacattaaacatgaaattcgtttgccactcatgttaatttatggtctctgatgccctgattaactgtaattctatcatacatgtttgttaacaaagcatcatgccatgtattaaagatatgaaataaataagcatgtgtctcattctaaaggagataataagttattataataatacaaactt

SEQ ID NO: 286049 - DNA, 541 bp, Homo sapiens
agctggaaatatttctaataaattccttctaggagccatggttcctatatttattgacattgatatgtacatttgcggtgactccagaaattccttgggaattaaattgggcaagcacgttggggaggagaaatcagacttgtcttgactttatattttcagaacccgcaggttagttttacttagagtgtgtrtttctttgcattggctgggaaggatactgatagaaatcatggcgtccagattgaagtcataggaacccttcaaagccatctattgagtcaccagtgataaagtgctctcttttcagtcatatttttaatttcttgttaaagaaaaaaacttttaggaatggataaacattaaacatgaaattcgtttgccactcatgttaatttatggtctctgatgccctgattaactgtaattctatcatacatgtttgttaacaaagcatcatgccatgtattaaagatatgaaataaataagcatgtgtctcattctaaaggagataataagttattataataatacaaactt

SEQ ID NO: 286050 - DNA, 541 bp, Homo sapiens
agctggaaatatttctaataaattccttctaggagccatggttcctatatttattgacattgatatgtacatttgcggtgactccagaaattccttgggaattaaattgggcaagcacgttggggaggagaaatcagacttgtcttgactttatattttcagaacccgcaggttagttttacttagagtgtgtgtttctttgcattggctgggaaggatactgatagaaatcatggcgtccagattgaagtcataggaacccttcaaagccatctattgagtcaccagtgataaagtgctctcttttcagtcatatttttaatttcttgttaaagaaaaaaacttttaggaatggataaacattaaacatgaaattmgtttgccactcatgttaatttatggtctctgatgccctgattaactgtaattctatcatacatgtttgttaacaaagcatcatgccatgtattaaagatatgaaataaataagcatgtgtctcattctaaaggagataataagttattataataatacaaactt

SEQ ID NO: 286051 - DNA, 605 bp, Homo sapiens
tagcagagtgtagtaggaagaacaagaacttcagagtcaaagagacctgctagtggataattatttgatgttgaaaaaatcacttagcgtaattcyttccaatatgtttacagctatacaatgcattttaaatgtgttaaatagtaacaatatgttaatgaaactgaaatgaacactaacatatacatgacccagcattcatccaatgctcaataactgtttaaccttttctattttcatgatatggctgatttttcaaatgaaatctgatatacatgcctttctttcctgagtttctcttctgcgttctactgccagtaatataaaaccaaaaaaccatccttcaacaagtaactgtttggctttctcactttgtcccactctctttctttctagctctttcttttaaattaaatataatgtcttcctcattgattaaatatgtctagcttatacagaaaccatagatattagttagagaaaaacaactaagtgtgtattgtgctctaatcatgactgactatcaggttcttgtagacctaatcatacagtgctctgtgcctcagatttctcatagataaaatgaaggttttggtcgtgatgaa

SEQ ID NO: 286052 - DNA, 605 bp, Homo sapiens
tagcagagtgtagtaggaagaacaagaacttcagagtcaaagagacctgctagtggataattatttgatgttgaaaaaatcacttagcgtaattccttccaatatgtttacagctatacaatgcattttaaatgtgttaaatagtaacaatatgttaatgaaactgaaatgaacactaacatatacatgacccagcattcatccaatgctcaataactgtttaaccttttctattttcatgatatggctgatttttcaaatgaaatctgatatacatgcctttctttcctgagtttctcttctgcrttctactgccagtaatataaaaccaaaaaaccatccttcaacaagtaactgtttggctttctcactttgtcccactctctttctttctagctctttcttttaaattaaatataatgtcttcctcattgattaaatatgtctagcttatacagaaaccatagatattagttagagaaaaacaactaagtgtgtattgtgctctaatcatgactgactatcaggttcttgtagacctaatcatacagtgctctgtgcctcagatttctcatagataaaatgaaggttttggtcgtgatgaa

SEQ ID NO: 286053 - DNA, 1183 bp, Homo sapiens
tgctctgtcatgatctcggctcactgcaacctccaccctcccgggttcaaacgattctcctgccttagcctcgtgagtagctgtgactacaggcgtgtgccaccatgcccagctaattgttgtatttttagtagagatggggtttcaccrtgttggccaggatggtcaccctctcttgacctcgtggtctgcccgcctcagcctcccaaagtgctaggattataggcacgagccaccacaccaagctgtgaggatgcttttgctctgccccacaaaggcatgaaaatatttttaaaaaactaatgaaatcaattatttctgaactctggaaattaaccaaaagcacagaacaaactagaaaccatttcattttcaaggaaaatgattaaatctttgtaagactatggagcatgtggtgttttaacgtaggctactctaatttctccctccagcactatgctgtgttaatcaagaaaagagaggggtgacctgttttggaaatccttgtaaagtcccaaatccaaatccagaaccttgtcaatattttaacaatacttctagcatctcgctcaagaaaccttattcccaaaawtgctctgtcatgatctcggctcactgcaacctccaccctcccgggttcaaacgattctcctgccttagcctcgtgagtagctgtgactacaggcgtgtgccaccatgcccagctaattgttgtatttttagtagagatggggtttcaccatgttggccaggatggtcwccctctcttgacctcgtggtctgcccgcctcagcctcccaaagtgctaggattataggcacgagccaccacaccaagctgtgaggatgcttttgctctgccccacaaaggcatgaaaatatttttaaaaaactaatgaaatcaattatttctgaactctggaaattaaccaaaagcacagaacaaactagaaaccatttcattttcaaggaaaatgattaaatctttgtaagactatggagcatgtggtgttttaacgtaggctactctaatttctccctccagcactatgctgtgttaatcaagaaaagagaggggtgacctgttttggaaatccttgtaaagtcccaaatccaaatccagaaccttgtcaatattttaacaatacttctagcatctcgctcaagaaaccttattcccaaaa

SEQ ID NO: 286054 - DNA, 591 bp, Homo sapiens
tgctctgtcatgatctcggctcactgcaacctccaccctcccgggttcaaacgattctcctgccttagcctcgtgagtagctgtgactacaggcgtgtgccaccatgcccagctaattgttgtatttttagtagagatggggtttcaccatgttggccaggatggtcaccctctcttgacctcgtggtctgccygcctcagcctcccaaagtgctaggattataggcacgagccaccacaccaagctgtgaggatgcttttgctctgccccacaaaggcatgaaaatatttttaaaaaactaatgaaatcaattatttctgaactctggaaattaaccaaaagcacagaacaaactagaaaccatttcattttcaaggaaaatgattaaatctttgtaagactatggagcatgtggtgttttaacgtaggctactctaatttctccctccagcactatgctgtgttaatcaagaaaagagaggggtgacctgttttggaaatccttgtaaagtcccaaatccaaatccagaaccttgtcaatattttaacaatacttctagcatctcgctcaagaaaccttattcccaaaa

SEQ ID NO: 286055 - DNA, 1179 bp, Homo sapiens
tctgaactctggaaattaaccaaaagcacagaacaaactagaaaccatttcattttcaaggaaaatgattaaatctttgtaagactatggagcatgtggtgttttaacgtaggctactctaatttctccctccagcactatgctgtgttaatcaagaaaagagaggggtgacctgttttggaaatccttgtaaagtcccaaatccaaatccagaaccttgtcaatattttaacaatacttctagcatctcgctcaagaaaccttattcccaaaataatataactatttgacatgactcatatctcagcttcatagaaaaaacycttatttcagggtgttgataaatcacaacaatattctggaattattagcaccacaattctctaaggttgtgaaaatagagactctcaataaagagatacagagcataaatataaagaaccaagtagaagcttcagaatttaaaaatataactgaaatgaaaaataacaacattgaataaagaggcagaataaagattagggaacataaaatatattatataaacagaatattttgtatgaggcacagaaataagtgaaaaaagatgwtctgaactctggaaattaaccaaaagcacagaacaaactagaaaccatttcattttcaaggaaaatgattaaatctttgtaagactatggagcatgtggtgttttaacgtaggctactctaatttctccctccagcactatgctgtgttaatcaagaaaagagaggggtgacctgttttggaaatccttgtaaagtcccaaatccaaatccagaaccttgtcaatattttaacaatacttctagcatctcgctcaagaaaccttattcccaaaataatataactatttgacatgactcatatctcagcttcatagaaaaaactcttatttcagggtgttgataaatcacaacaatattctggaattattagcaccacaattctctaaggttgtgaaaatagagactctcaataaagagatacagagcataaatataaagaaccaagtagaagcttcagaatttaaaaatataactgaaatgaaaaataacaacattgaataaagaggcagaataaagattagggaacataaaatatattatataaacagaatatttwgtatgaggcacagaaataagtgaaaaaagatg

SEQ ID NO: 286056 - DNA, 568 bp, Homo sapiens
atgcttaggtttttttggaaggtagatatgttactaatatttgaagactgccagctctgtgccccgtcttaagtttgtccaatttcttgttcagtggccatatggtaagtcatctaggtaattagtctgagtgactrgtttcagggaataaattaatagtattttcttgtatcaggcattaagaacacatacaactttttattttctgatgtataggaagcttatagccaaattttctataatactaaaataataataatcacagtttatgtattatatatatataaaataaaaccctggggttgagaagttttgttttacttttattctgatcatctgagggcaatgcttcttttatatttagaattcttcaagctttggcaattaatcatacattgtaattgaatatgttattattgtactttccatgctattttttctaaattaactataatttcacagtataatttttcacttaattctctccaaacaaaaaaaaactccaagtttttcacctgaaaatacttctagtttaaataggtaggttttatatcaaagatgtgtgtgt

SEQ ID NO: 286057 - DNA, 568 bp, Homo sapiens
atgcttaggtttttttggaaggtagatatgttactaatatttgaagactgccagctctgtgccccgtcttaagtttgtccaatttcttgttcagtggccatatggtaagtcatctaggtaattagtctgagtgactagtttcagggaataaattaatagtattttcttgtatcaggcattaagaacacatacaactttttattttctgatgtataggaagcttatagccaaattttctataatamtaaaataataataatcacagtttatgtattatatatatataaaataaaaccctggggttgagaagttttgttttacttttattctgatcatctgagggcaatgcttcttttatatttagaattcttcaagctttggcaattaatcatacattgtaattgaatatgttattattgtactttccatgctattttttctaaattaactataatttcacagtataatttttcacttaattctctccaaacaaaaaaaaactccaagtttttcacctgaaaatacttctagtttaaataggtaggttttatatcaaagatgtgtgtgt

SEQ ID NO: 286058 - DNA, 617 bp, Homo sapiens
ataagggctggtgtactgcagttttctttttgtgtgctgtcattggctatgtttgatatgagactaatgctaacctcataaatgagrcagacaaatgatcagataaaaaaatgtaaatttacatgtctggattaaaaacaatacaaacaaacaaaacaaatagattttaaatggagaatatgttagtccagtggcatataaatatgtatgtaagtccagccctacgcatgaatcatcctttgtccagtgtgtctgtgctgtgtgcactacctgcccgttcttcattgacatcgtctgtccctgacatccagccatccacatcatcacagcttgatgatctgggatctccctaagcagattatcctgcttctgacccatcctatgaaggtcaatagtagcttaataccacatcacagtacgtgcaccattcaccccacttgttcacatcacacaggcattttgttatctcatatcatcaccaaaataaaagggagagcacagtacaatacatatttagagagaaagagagggagagagagaccacattcacataagtcttattagagtatattcttataattcttctattagctattgttgttaacctgctacgatgc

SEQ ID NO: 286059 - DNA, 586 bp, Homo sapiens
tgcttgttttcaagcttgatataagtattatcatactctatgtattcctttggatcttctttttcttttttgatgtgtttgtatgatttatacatgcttttacttatagttgtagctcattcattttcattgatatataatattstatcacataaatatataaaaatttaattatctgtgttattgttgatgactatgtgttgtttttccattttgagaaactctgaagagtgtttctgtgagtcttttcacacatgtatcctgccataggtaaaatcagtctttgtaaagaataaacctaatatttgaatctctaggcatagagtacagatgtctttaatctaataaataataacacactgcttttgaagtggttcaacaaatttttctcccagcagcagtctatgggagcacctggttctccaaatctttgccatcacttggtattgtataacatttaaacatttatcactctgaaaaggatgtagaggtatttgtcgttttatttgtacatccatgaagatcgtgatgtttatatgcttattaattatttggctttccttttcataaagtgcctgtttatgtc

SEQ ID NO: 286060 - DNA, 586 bp, Homo sapiens
tgcttgttttcaagcttgatataagtattatcatactctatgtattcctttggatcttctttttcttttttgatgtgtttgtatgatttatacatgcttttacttatagttgtagctcattcattttcattgatatataatattctatcacataaatatataaaaatttaattatctgtgttattgttgatgactatgtgttgtttttccattttgagaaactctgaagagtgtttctgtgagtcttttcacacatgtatcctgccataggtaaaatcagtctttgtaaagaataaacytaatatttgaatctctaggcatagagtacagatgtctttaatctaataaataataacacactgcttttgaagtggttcaacaaatttttctcccagcagcagtctatgggagcacctggttctccaaatctttgccatcacttggtattgtataacatttaaacatttatcactctgaaaaggatgtagaggtatttgtcgttttatttgtacatccatgaagatcgtgatgtttatatgcttattaattatttggctttccttttcataaagtgcctgtttatgtc

SEQ ID NO: 286061 - DNA, 571 bp, Homo sapiens
acccgaccctggaggctttccaaattcaacagtgttgccaaaaccaacattttattttgtcatgatccttgattgaactactgattcaaaacatctgacctttaagaaacatacacttattttgtctgtgcctctcttctgttgatttctccttgtccagtttcaccctctcttgtctgatccctcctttttctcctctgtgggctttttctcctgaagttttggtagtagtcaaccttgctaacctttattctctcctcgggccrtctcatgcatggcttaaatttcagttattacatgtatttaaagaactattataaaacgtggtgacttcagtgaacaacagtgtattttgaaaatcactaaaagtgtagattgtaagtgttcttaccacaaaaatgatgagtatgtgaggtaatatgtatgttaatcagctcaattgtaacattccaaaatttatgcatatttcaaaatatcatgttgtacatggtaaatatatacaatccttatatcaagctatgagacaaagattaaccaaaacataaaaaaaagaattaaaagaaatgaacaa

SEQ ID NO: 286062 - DNA, 604 bp, Homo sapiens
ccatcttcacagccaaattggatcaactgcacagcttgtctgattgattaggcagggattgtttaagacagccaaaaaaaccaatttggcaaaaacatatcaatttaatggccatggggmaagacaggtgagaaggatggaatcactagaagatgtgagaagccctgcattccaaggtgctcccttaaatctttgtgaaagtgtgccatgttggtctccctacaaagataaattatggctgcattgatctgttgccaaaacaatggctggaaaataaaaataagtttagttacttgaagccaactaactttttacacggattttcttacagagctctttgacattttgaggggatagggtgtgggactctcctgtgcttctgtctgatagtgagggttaggagatccggcttcaggctccccaggatcccccaacctggctccctgtacatagggccctgggaaaaggagcggatgcattttcctagtccacagcccctttgtactgataatggtgattggtgcgaacataagccacgtgtccactctccctaccctagccccggtctttttcatagtaacggcttttgctggtattaccgtgc

SEQ ID NO: 286063 - DNA, 604 bp, Homo sapiens
ccatcttcacagccaaattggatcaactgcacagcttgtctgattgattaggcagggattgtttaagacagccaaaaaaaccaatttggcaaaaacatatcaatttaatggccatggggaaagacaggtgagaaggatggaatcactagaagatgtgagaagccctgcattccaaggtgctcccttaaatctttgtgaaagtgtgccatgttggtctccctacaaagataaattatggctgcattgatctgttgccaaaacaatggctggaaaataaaaataagtttagttacttgaagccaactaactttttacacggattttcttacagagctctttgacattttgaggggatagggtgtgggactctcctgtgyttctgtctgatagtgagggttaggagatccggcttcaggctccccaggatcccccaacctggctccctgtacatagggccctgggaaaaggagcggatgcattttcctagtccacagcccctttgtactgataatggtgattggtgcgaacataagccacgtgtccactctccctaccctagccccggtctttttcatagtaacggcttttgctggtattaccgtgc

SEQ ID NO: 286064 - DNA, 461 bp, Homo sapiens
acctattttgtcaaagacacttaacacatagtgagggctcaacaaaaattgtttaataaaagaatggtagattttgacataaaaatattttttcttcaatgattatagrgtaaaaataattaataattgtttttaaaaatcgaattttgtaatttcctctgttttggcatatgctgtgtatgtacaatgtacagtttatttttctatagccaagtgttccaagtgatcttaaatgagaggtttggtttttcggtttttgggtttgtttaggtctgctttcctggtagactttgccactttaggacacttatttcatgaattgattggaagctaggaaaaatgaaagacaagagtgagagaattttaggaacaacacagaaataaagaacatgctactgttggtttcctaggttggtccctggcattattttttacccacatagagaaaaagtaataataag

SEQ ID NO: 286065 - DNA, 557 bp, Homo sapiens
ggtacacattctctttacctagaataatgttcatgagccttctctacactcttctgatcttctggggggaatcaactgtttatatcaaggagacatcaaataacagatttcaatttcagaagatgtgtcaaaatggctaagattactttgctcttcagagacttgaaaaataagacmtgagagttactttgatgagcataaacaactcaacagtatatgttcaaataaatataacatcagtactctgtggatcaccattgaagacgagctccatctgattgcacttctcatacggccatctggggggctgcaggagtagagcccatgacagcatataatggaccaaaagagaaaaataaaaagaaagaaataaaacaaaaagggaaaaagcctgtgggctaatatgatgaaacattcattactttgtgggaaagcagccaaagtgatttatacttcaacactccatgctgaaatcaaagagaatgggatagaaatgtcgatgaaactctgcatggggagctctttgaaatagggctgtgcaaaagaatattttgatt

SEQ ID NO: 286066 - DNA, 582 bp, Homo sapiens
gaccccattaatgggccttttgtgtmaaataatggacattttatattatttagttgtttagatattcataatacatattaatgttatataatacatattagtattatgtatcaaacaaagaaacgaatgccaattttagggaggatttaaatttatcttttcatgatgaatagaagcatttcagtatgtattagattacatagctaactccaaacttgtattcatgtgtcaaaatttaatagagataaatctaattacaacagaatatttcccatgtaaacaataaatgtatttatgtatttataggtgtttggaacttactaacttgaaaatttttaaaagtatttgtcaacagctaaacctacagaaggtcacggatattttaatcctcaaagtttggttattaagaaatactattttaataaagtatattttaaaaaacttttcttaatactacctatgaagataatcatgaagactaaaaataaatcatagttctaaataacataaaacatttaagtgtaaattttaaaaatccaattaaacatgagttaataatattttgaatcacctggctttagc

SEQ ID NO: 286067 - DNA, 582 bp, Homo sapiens
gaccccattaatgggccttttgtgtaaaataatggacattttatattatttagttgtttagatattcataatacatattaatgttatataatacatattagtattatgtatcaaacaaagaaacgaatgccaattttagggaggatttaaatttatcttttcatgatgaatagaagcatttcagtatgtattagattacatagctaactccaaacttgtattcatgtgtcaaaatttaatagagataaatctaattacaacagaatatttcccatgtaaacaataaatgtatttatgtatttataggtgtttggaacttactaacttgaaaatttttamaagtatttgtcaacagctaaacctacagaaggtcacggatattttaatcctcaaagtttggttattaagaaatactattttaataaagtatattttaaaaaacttttcttaatactacctatgaagataatcatgaagactaaaaataaatcatagttctaaataacataaaacatttaagtgtaaattttaaaaatccaattaaacatgagttaataatattttgaatcacctggctttagc

SEQ ID NO: 286068 - DNA, 582 bp, Homo sapiens
gaccccattaatgggccttttgtgtaaaataatggacattttatattatttagttgtttagatattcataatacatattaatgttatataatacatattagtattatgtatcaaacaaagaaacgaatgccaattttagggaggatttaaatttatcttttcatgatgaatagaagcatttcagtatgtattagattacatagctaactccaaacttgtattcatgtgtcaaaatttaatagagataaatctaattacaacagaatatttcccatgtaaacaataaatgtatttatgtatttataggtgtttggaacttactaacttgaaaatttttaaaagtatttgtcaacagctaaacctacagaaggtcacrgatattttaatcctcaaagtttggttattaagaaatactattttaataaagtatattttaaaaaacttttcttaatactacctatgaagataatcatgaagactaaaaataaatcatagttctaaataacataaaacatttaagtgtaaattttaaaaatccaattaaacatgagttaataatattttgaatcacctggctttagc

SEQ ID NO: 286069 - DNA, 592 bp, Homo sapiens
catctcagcagaagtcaggaatagagatgggggggtatgtaggacagatgcgtggaggaccctctttgatggcttagaccctgtgaaytgcatgggaggccatcaggggtttcagccagcagaaatctgctggcttgaactaaaggagatataaatggaatgaaatggaggcaggttttcagacttctgggattctacataatggatcagtggagaactccccagttacaaacatgtattatccttcaagactggagaagaatgaccccaaacttagttcagaggttgacagagctgccaatggcactacaggatgtacaggcctggagggacatgattgcttcctccttggttccagggaggttggtcatctctttaactaacgagggcaagaacaactggcccatggccagagagtcagggccacctgctgggcccagaggacagattatggaagcaatgaggtttattcttaagtcttaaaatctaatgcaatttgccctgctagttttcagacctacttgggacctatgatccttttcttttttctattttttttctttttggatagaaatgtctatcctatgtctgt

SEQ ID NO: 286070 - DNA, 592 bp, Homo sapiens
catctcagcagaagtcaggaatagagatgggggggtatgtaggacagatgcgtggaggaccctctttgatggcttagaccctgtgaattgcatgggaggccatcaggggtttcagccagcagaaatctgctggcttgaactaaaggagatataaatggaatgaaatggaggcaggtkttcagacttctgggattctacataatggatcagtggagaactccccagttacaaacatgtattatccttcaagactggagaagaatgaccccaaacttagttcagaggttgacagagctgccaatggcactacaggatgtacaggcctggagggacatgattgcttcctccttggttccagggaggttggtcatctctttaactaacgagggcaagaacaactggcccatggccagagagtcagggccacctgctgggcccagaggacagattatggaagcaatgaggtttattcttaagtcttaaaatctaatgcaatttgccctgctagttttcagacctacttgggacctatgatccttttcttttttctattttttttctttttggatagaaatgtctatcctatgtctgt

SEQ ID NO: 286071 - DNA, 483 bp, Homo sapiens
ttttttttttcccttctcttactgtatagctggagtgctattgcagtgtttaatcaaaaggataagggcagtcatatttgtaatttccagatcttaaaaggaatgcattaacactcatcagtaaatatggtgctgactacaagctatactgtaaatgtccattatcaggttaaagtatttttctttgttcctattttgctcaaaatggacatcatgaatttaaatggcaccgtgttgaatatttttttcttctatgtagaaaactatactgtattttaaatgattaacrtaatatttagaaattattttctaaactttacaatctgaaaaaatatattaatctggaatttatttggtaatctttcttttaggatttttttctataattatccattaaaaaataatacctgtggttttgctatttagattgtgacttaagtttgtttgtattttgtatttaagtacagatggtccttgacttac

SEQ ID NO: 286072 - DNA, 614 bp, Homo sapiens
ttggtaatctttcttttaggatttttttctataattatccattaaaaaataatacctgtggttttgctatttagattgtgacttaagtttgtttgtattttgtatttaagtacagatggtccttgacttaccatttttggactttaagatggtttaaaaacatgaattagaaattgtactttgaattttgaattttgatatttttggcagctagtgataagctgaaggctaacactctcccaaagtgagccacagcttattcagccatatggtcagaagcccagatgcctgatgctctccagggtactgtgcactactgtgagtgttctgagtgtttcaaggcagactaggccaagctgtgatactcagcagacaaggtggattaaatgctctttcaacttatgatattttcaattcatgatgggtttatcragaagcaaccccacagtaagctgaagagcatctttatattctgcaattttttattaggagtaatttatttcttcaaactttttggaacttacttaaagaactgtatgatctggtgacttctttctgggaagattttctattaattttaaaaattcaatgccttccatggttactagttgatt

SEQ ID NO: 286073 - DNA, 503 bp, Homo sapiens
tttaccaattaattttacagtatatcctaacatgaacactcagataagaaattcctctcagcaaagtcagtgcttagtgtaaaagaggaaactaaaatattcttgtccaatcgattctatatagcaccaacattaagatctctttcaaaggttattcaatgaaacacatattgtattaatttacagcatgtgttctttaattgtaaatttgtaactgaacttcacatgaatattaaaattcatcttctacttatcttttttctccataagttcttgtatttacttctcatttaraaatgacattaactattaatattttttaacatcaagttcacatatagccatttgttactaaatctcgtatttgggaagaggaaatgacttagataactgatggtgcaaggaattaaagttattattcattatcatatttgtctatattatgtattgacaatgcaataaaatattcttgacttggtaaacaaagcaaaaccatgaatata

SEQ ID NO: 286074 - DNA, 503 bp, Homo sapiens
tttaccaattaattttacagtatatcctaacatgaacactcagataagaaattcctctcagcaaagtcagtgcttagtgtaaaagaggaaactaaaatattcttgtccaatcgattctatatagcaccaacattaagatctctttcaaaggttattcaatgaaacacatattgtattaatttacagcatgtgttctttaattgtaaatttgtaactgaacttcacatgaatattaaaattcatcttctacttatcttttttctccataagttcttgtatttacttctcatttagaaatgacattaactattaatattttttaacatcaagttcacatatagccatttgttactaaatctcgtatttgggaagaggaaatgacttagataactgatggtgcaaggaattaaagttattattcattatcatatttgkctatattatgtattgacaatgcaataaaatattcttgacttggtaaacaaagcaaaaccatgaatata

SEQ ID NO: 286075 - DNA, 448 bp, Homo sapiens
agtttttgccaaagtctctgtctgaaccatttcccactggtgaactctgggctgtaaattctacctgaaagtgtggcacaactcaaagaaagagatctgtgttttcatattatcacataaacatgacattgactaaagaccatggtggtgagatggaaaggggaatagataagtttccaagcatttttgaatctctacttacatgaactgcaaaatctctccagtaacctacagaccttcctttaatgacaattgcacatgcaggccttgagaaataaaatgaccccaaaactagaggaggcattcacaggatggtcaaaagcaatccaaagagatttsggtggaatgctaacaatattgctatgtaatccagggcacagactatttattagatatagcaggcatttgatgcatgtttttagagtaataaataaatgccaactctgaa

SEQ ID NO: 286076 - DNA, 614 bp, Homo sapiens
tcacttacattgcatttactgagcttcaattttggtcagactgaaggtatatgatgagattccaaggaaatcttggatataattaaaacaagtctgatgtaatttttaaaaatattatgatttgtggctttttccaatgtaggaaatgacctttccctaaatactctgtagtgtgacttcaaaatttctattccctgatttcaatacaatacaatatgtaaacaataaaatttctatttgaaccctaacatcttatttaaatgtttatgtgtagatccaaaatgttactgtatgggtttctayatctatgagacagttacttaccccattcttgtcatccagcaataggtgtaacagtaaaactactgcacagaattattcacagattaaagatgtacagatggtgtaaatagtatctggcccacagcaaacactcaagaaatgttggctatttatgttagatattattattttaattttaaaattccatatcttgataaaagctagggcagggtagagtaagaattattttatagctatgaaaatatctctttattcagatcagctcttttcagagcattaaaaaatactgaagaagagaaataatataattt

SEQ ID NO: 286077 - DNA, 614 bp, Homo sapiens
tcacttacattgcatttactgagcttcaattttggtcagactgaaggtatatgatgagattccaaggaaatcttggatataattaaaacaagtctgatgtaatttttaaaaatattatgatttgtggctttttccaatgtaggaaatgacctttccctaaatactctgtagtgtgacttcaaaatttctattccctgatttcaatacaatacaatatgtaaacaataaaatttctatttgaaccctaacatcttatttaaatgtttatgtgtagatccaaaatgttactgtatgggtttctacatctatgagacagttacttaccccattcttgtcatccagcaataggtgtaacagtaaaactactgcacagaattattcacagattaaagatgtacagatggtgtaaatagtatctggcccacagcaaacactcaagaaatgttggctatttatgttagatattattattttaattttaaaattccatatcttgataaaagctagggcagggtagagtaagaattattttatagctatgaaaatatctcyttattcagatcagctcttttcagagcattaaaaaatactgaagaagagaaataatataattt

SEQ ID NO: 286078 - DNA, 1538 bp, Homo sapiens
gactgattttaaccactgtttytcaacctacatcttattactccccaagaagcctttgtagatattttttccaattacctccactatgaaatgttcatgtcattgttcatcatatacttgtttttgtactatatatatctgtgttttataaataaaaattgtaagatttttttttcttcccaagaatctattaccatctccttgggtttgatctcatcctgttatgacctcatagtttagatcaatcatgattcatgctctgcacctgggtacattgtgaaaagagtaagttaacaaaatagcgaggaagaagaggcccttggcttacatctatcagtgtttgccacaggccacctttggggtcactacttaaattcagtatttattcactagtcactaacaaacattattgactatttatatcaagttttaaacagaaggtggagatacagtggaaaaccaaacaatttaagacattgtactctactgaacagtttgatagggcgtattctaaaatgtttcagaaccaaaatgtggccatattatgtataatggtttgggtgatgtawcctaaagagtcattatcatcatttgagttttgagagttcataatcttccttgcacattattcagttagtcatttgataattttagagaatttataaatcaagaagtactggtctcatcactgaataaaagttgctgtgaacaccagaaataggaacatgtgactgataagaatagtttttagtttagcatttgtttttgacctttaactctataaaacttcaataatgttatttatttgtctcctgcaacttacttagaaatgcgtgacattttagaagwatcactaaaaatacctttccaaatgctcacctatataatcacttttacataataaaatgtaacatattgaattattgtttgccttacagaattttataatatatggtctgttttgcttatattgtgttaaaatgaactcagtcattgtaacagtcaattcatctatcaacaaccattaccaagcctaccatttacaaggtttgcwcctaaagagtcattatcatcatttgagttttgagagttcataatcttccttgcacattattcagttagtcatttgataattttagagaatttataaatcaagaagtactggtctcatcactgaataaaagttgctgtgaacaccagaaataggaacatgtgactgataagaatagtttttagtttagcatttgtttttgacctttaactctataaaacttcaataatgttatttatttgtctcctgcaacttacttagaaatgcgtgacattttagaagaatcactaaaaatacctttccaaatgctcacctatataatcacttttacataataaaatgtaacatattgaattattgtttgccttacagaattttataawatatggtctgttttgcttatattgtgttaaaatgaactcagtcattgtaacagtcaattcatctatcaacaaccattaccaagcctaccatttacaaggtttgc

SEQ ID NO: 286079 - DNA, 523 bp, Homo sapiens
ccactgtcacaaatgagctctggggaagggagtcccacttacaggatgatgaatgaacaggggggaaaaggagagatggagctgtgagaatcgctctcctgctcacgacccctggaggctgtgatgaccgaccttgtggttgcagtgtttgttgctaccttggagcctgggaggtgaagaccactgcttggctgacaggtgggaaaggtctctgtggcccagtgagatttgtcccaacaatcagttgtggagaggcttccccctttagacagaagcaggaggagatggaaaaagagggccgagctgggtgggaggggtagccctggctggagacaggaggacctagaggtgagggaggtaggcagatgatccatgttgctgaattactgaggcagaatttctgagcttggaaagtgaggcaagtttcatgttcctggcaaattttctcttcctttctcttttgttcttyttgaacctcccaccctgcacacctgtctaaaaggaaatcaatggcagcagggag

SEQ ID NO: 286080 - DNA, 567 bp, Homo sapiens
caacttttgctgtattttgctgcacatgatttgcaggtcacacacacacacatcttctggtttggctggggtgataactcttttaactttcttgtctgctcctgtaacttttttcttcagtactaactctgctgttacgacctgacactgaaatggtctattttgaaggcctgggaaagcaatgttttcctcctgcataacaatttcttgatgtgtcttaattgctccacataacaaggagacatctcatactttttctaagagccatgcatttccctgtacaaggcactagttttctttttacatttctctataatatgatgcatgctcataayctttgggcccacactcttaaaatgtctgacaaaatgcaagtaccttttcatcaggttcaacatccaggtatctgaatgggcttcctatgaggagacgtaatcacaatgaaggaggtttttctttatctttttggtaactagcctgagaacaaaatatttgtgttttatgaagacactttcctgtgttgtctttattaggttttctgattacttgggaaaaccgggctttgaa

SEQ ID NO: 286081 - DNA, 609 bp, Homo sapiens
atccaggtatctgaatgggcttcctatgaggagacgtaatcacaatgaaggaggtttttctttatctttttggtaactagcctgagaacaaaatatttgtgttttatgaagacactttcctgtgttgtctttattaggttttctgattacttgggaaaaccgggctttgaaagggttaaagcatttttttcttttacatcagtgtaagtttctatattgtgtttgaattctgattatcactctggttaaatgaattactattatttaattttattatttaattaacagtgacctgttatcctgtcttttttttttttttccctgagacagggtctcactctgtcacccaggctgaagtgcagtggtgccatcatggctcactgcaaccttgacctcctgggctcaggtgattctcccacctcagcctcctaaatagctgggactacaggggcacaccaccatgcccagmtaatttttgtattttttatactgacagggtctcactatgttgcacaggcttgtctcaaactcctgggctcaagtgatctgcctgccgtggcctcccagagtgctaaaactacaggcatgagccactgtattcagcctgtt

SEQ ID NO: 286082 - DNA, 617 bp, Homo sapiens
aggctggaatcattttaaagtgagctgtctcttcctgtcatggctaactgtaaggatttgtgagcctggagctgtgatcactttttccatcatggagaaagggcctgcctgtatgtgaggccaatagaaaggaaaacagcaagagatggaggaaaaagactgacacctgatgacatgatgttgaacctttggatccagcaaactaaagccaggaaatctccttgtacttgccagttacttgggacaataaattcccattttgtgtggaagcaggtttgaaagagttttctgtcactcacaaccaaagacacccaaatgataacagttttgttccctccccagcctgtatgaattacaaagggagagctgtgcttcacatggagaaatctggaggacaccctctgaccaggatgtcaggtagtgggagagcctgagcttatgtgtccctgatgtcatgcagggcrcacgcaacatcaccttggggcattcttaccagaaacatttaacctcagtaatcatgaagagacaaactgcagaactgaattataaactggatattctaaagactcactgtccacaggactcaggatcatgaagaacggagggaggtagggact

SEQ ID NO: 286083 - DNA, 612 bp, Homo sapiens
tctggtcttccagctaacccacagacttgctgtagggatcagaatcaactactgccaccttagttgacccatagacrtgcagttaggagccacaatagccaccctggccaccacagcctagagtggaggcactcagccaagtgcattatagatcaactgagttccagctgaccacaggtacatgagtgataacaaatgattattttaagtgcttgagttttgaggcagtttgttttgcagcaatagctaactgatatagagattagcacatatctccagaaatcaataggcattgctttttggccttttggctaagatcaaacatagaaatcaataggtaaataatcagtaagactttaaaggatttaaataacaagcttggtataacagctatataaagaaagctgtacccaacatcaaagtggaaacattctttttaaacaaatgtggaaaattcaccaaaaataagcatattttaggcttaaaagcacatttcaattttttccaaaaagaaaaactctgtaagcaaatttataataaacaaattatagcaaaaaagaaaaactaaatttaaaatctccccaaaatgatttattggattagaatagaaat

SEQ ID NO: 286084 - DNA, 612 bp, Homo sapiens
tctggtcttccagctaacccacagacttgctgtagggatcagaatcaactactgccaccttagttgacccatagacatgcagttaggagccacaatagccaccctggccaccacagcctagagtggaggcactcagccaagtgcattatagatcaactgagttccagctgaccacaggtacatgagtgataacaaatgattattttaagtgcttgagttttgaggcagtttgttttgcagcaatagctaactgatatagagattagcacatatctccagaaatcaataggcattgctttttggccttttggctaagatcaaacatagaaatcaataggtaaataatcagtaagactttaaaggatttaaataacaagcttgrtataacagctatataaagaaagctgtacccaacatcaaagtggaaacattctttttaaacaaatgtggaaaattcaccaaaaataagcatattttaggcttaaaagcacatttcaattttttccaaaaagaaaaactctgtaagcaaatttataataaacaaattatagcaaaaaagaaaaactaaatttaaaatctccccaaaatgatttattggattagaatagaaat

SEQ ID NO: 286085 - DNA, 483 bp, Homo sapiens
taatcagcaaaatgtggggaatattcttcagtatttttactttgtataatatgtgaaactgatttaaattgtatttgatgttttatagctgctgtttaatgtaacagtacactgtgaaaatgtgcttctgtcaataaatatactagatcatatctatcagtggttgcatcatacttcctttgtattcatcaggataggctaggttatgttgyagtaacaagcaatcaccaaatctcacagtgtatttttcttcaggttacttgtggggactctgctgctctatgtcactgttgacattattccttgaccctggcttacagagcaaccatatttagaacattgctggtcaccgcagcagagtgagcagagagcttgaaggtctagcactgttaaccaaacacttggattgggatgaacacatattacttttgcttacaattcattggatagaataggttgcatgaccttacccaagtagaaggg

SEQ ID NO: 286086 - DNA, 483 bp, Homo sapiens
taatcagcaaaatgtggggaatattcttcagtatttttactttgtataatatgtgaaactgatttaaattgtatttgatgttttatagctgctgtttaatgtaacagtacactgtgaaaatgtgcttctgtcaataaatatactagatcatatctatcagtggttgcatcatacttcctttgtattcatcaggataggctaggttatgttgcagtaacaagcaatcaccaaatctcacagtgtatttttcttcaggttacttgtggggactctgctgctctatgtcactgttgacattattccttgaccctggcttacagagcaaccatatttagracattgctggtcaccgcagcagagtgagcagagagcttgaaggtctagcactgttaaccaaacacttggattgggatgaacacatattacttttgcttacaattcattggatagaataggttgcatgaccttacccaagtagaaggg

SEQ ID NO: 286087 - DNA, 533 bp, Homo sapiens
tctgctgtcaccagactcattgataagaccatcctgaggcagctgaaagtgttcacccatatcccatcagagacccttgctatttcagcgcatggtgtcagcctgactgccatcagccatctttgttgcctgcaggagggaaggagtgggaagaaccagggaattaccatctgggccagtccttaagccatgactggcaggtgtgaattccccagctttgttacctttcactgtttcccagagtttcctcttaagcttaagcaccagttccatattgcagtagctggtgtgacagcacacacttactagctgccttcccttgctcaaatatctttcttcttcacctacccatgttccttccacttcccaaataaactacttgcactcmtatccttatctgagggtcagcttctgggggagctcaaactaagacccatgtgtgaaccttgctgtgagcaactatgtccatattccctcacactttagaacattcatttcctcctagaccttctgagtccttgttcaccacccag

SEQ ID NO: 286088 - DNA, 638 bp, Homo sapiens
cactgtcctggcttcctgccctcctcctccctgctggctctctcccggatgatgtcttgcccaccgtggagccatctgatcccctctggggcctcccacatttataggytcacaccttctggagctcatttgctcactcagttctagtacgagggcctcaaccagtctgcagcctttggaagggctctcctgatggtcacagtggcaggagtgccatataattcatggtccaaactaaaacactttagagagtaaaaggaggtattaattgtgcttgagtcaggcgtggtggctcacacctgtaatcccagcattttgggaggccgaggcaggtggatcacttgaggccaggagttcaagaccagcctggccaatatggtgaaaccctgtctctacttaaaggatacaaaaattggctgggcatggtggcacgcgcctgtagttccagctactcgggaggctgaggcaggagaatcgcttgaactcgggaggcagaggttgcagtgagccaagattgcaacactgcactccagcctgggtgacagagcgagaccccatctcaaaaaaaataaaaaataaaaaatacattgtgcttgaagaatgagtgtaaacccgactgtcctgggcaaaccacccac

SEQ ID NO: 286089 - DNA, 638 bp, Homo sapiens
cactgtcctggcttcctgccctcctcctccctgctggctctctcccggatgatgtcttgcccaccgtggagccatctgatcccctctggggcctcccacatttataggttcacaccttctggagctcatttgctcactcagttctagtacgagggcctcaaccagtctgcagcctttggaagggctctcctgatggtcacagtggcaggagtgccatataattcatggtccaaactaaaacactttagagagtaaaaggaggtattaattgtgcttgagtcaggcgtggtggctcacacctgtaatcccagcattttgggaggccgaggcaggtggrtcacttgaggccaggagttcaagaccagcctggccaatatggtgaaaccctgtctctacttaaaggatacaaaaattggctgggcatggtggcacgcgcctgtagttccagctactcgggaggctgaggcaggagaatcgcttgaactcgggaggcagaggttgcagtgagccaagattgcaacactgcactccagcctgggtgacagagcgagaccccatctcaaaaaaaataaaaaataaaaaatacattgtgcttgaagaatgagtgtaaacccgactgtcctgggcaaaccacccac

SEQ ID NO: 286090 - DNA, 638 bp, Homo sapiens
cactgtcctggcttcctgccctcctcctccctgctggctctctcccggatgatgtcttgcccaccgtggagccatctgatcccctctggggcctcccacatttataggttcacaccttctggagctcatttgctcactcagttctagtacgagggcctcaaccagtctgcagcctttggaagggctctcctgatggtcacagtggcaggagtgccatataattcatggtccaaactaaaacactttagagagtaaaaggaggtattaattgtgcttgagtcaggcgtggtggctcacacctgtaatcccagcattttgggaggccgaggcaggtggatcacttgaggccaggagttcaagaccagcctggccaatatggtgaaaccctgtctctacttaaaggatacaaaaattggctgggcatggtggcacgygcctgtagttccagctactcgggaggctgaggcaggagaatcgcttgaactcgggaggcagaggttgcagtgagccaagattgcaacactgcactccagcctgggtgacagagcgagaccccatctcaaaaaaaataaaaaataaaaaatacattgtgcttgaagaatgagtgtaaacccgactgtcctgggcaaaccacccac

SEQ ID NO: 286091 - DNA, 387 bp, Homo sapiens
gcagtcactgtggtgatggccacagatatgcttgcatcatcacacccccagttacaggtagctcagcacacagagagagactctgtttgagaaaaagtaaggggaaaaaaacaagagattcttgcttgataatctagagaagacttctgggtcttatccaagaccacaaagctggtacctctgagtctgcaaaaaccacggtgttattgggcttgaatcccaagtccctttgaatacatagaaagccttcccaagaaagacaggtacaaacaagccyaggctgtgaagactacaaatacctaactcttcaatgcccagacactgaagaatatctgcaagtatcaacatcatccaagaaaacatgatctcaccaaatgaattcaataa

SEQ ID NO: 286092 - DNA, 439 bp, Homo sapiens
gggtcaaccactggaacattgcacagcccaatccaccaaagcaggctgcaaatatcagttgtagttattagtgaaagactttgtatatacaacactgagcaccgtttctggcaaacagtaggtgatcygtatgtgtcctatgacattggatctgtgttcttacttcttctcctctctagaattggcctgctctgttttgccatggtggatgctttaaaagttttaaagtgcttgttggaatacagtgtgatccctaggatgtttttccccctcacagaaagctacagtttttagctcatgtgctttagaataagatgcgcaagtcagagtgtaatccacttagatcctaatgaaagtcactggccaggactccgcctttaggagggaggtctctcccactgagtgtcttgaagggtaaatgtaaataacagtttccatg

SEQ ID NO: 286093 - DNA, 485 bp, Homo sapiens
tccgcctttaggagggaggtctctcccactgagtgtcttgaagggtaaatgtaaataacagtttccatgactaaaaggtagatttatttctgtagaattttatattttacagtgatctccacccagtgaaacggggcctagcaaagaagccaggaaattgcttaccctttcccatgagacttggcctttaaaatacttacaacttttggtcactttttgccatttcagatagattttccttccagaacattccaatttattacctcggyggtaaattcttgctccttccggatgtgctgtcgtttcaacgctggctttcattttctgtagcttttttccgagttcaggatcatatgtcagttttaagccagttgactttgatcactttacacagccggcaaagaatatggcctagttcatcccttcttcattatttttaagtgaaattttaaaataatctcttggtttagttcattcctgggggg

SEQ ID NO: 286094 - DNA, 442 bp, Homo sapiens
aatagagtcaccagctgcagttttcttttctgttgctcacaagcagaagagcagcagcacagagattaagcacttaagctctggactcaaatcctgctttgcaacttgctaggtgcgatttttgggccacctgtgacatctttatgtaattcagttttctcacttgtcaaataaaaagagaaatagaaaaacagtggtttttcatcagattgctgcgagaatgaagtgagattatgcatgtaaagtatttagtgtgggtcaccagcacagtgaacagtaagcactaaatctacacgttagttgcactccatcttactaatatagagatgagtttcaggaatgggctgcaaggtagtgcacyttaacacgtggaaccagctgagttgaggtgcactgggaagaagtgaggcatccctaaccccagcctggggtgctggcagtc

SEQ ID NO: 286095 - DNA, 418 bp, Homo sapiens
attccttaatgagctgattttatggcttaactctcaggacatccttaattccttcatttccacaaccttgaggggtctgttttagtcrcccttatgtgggtagaatcttggttttgatggcacatgaaggtggggaggattgtggatttgggtggcaggcggtgccattctgagtagtgtgataacaggagtcactgtgaggtgctgtcgatacacacctcagaatcattagctcctttaatccttcccacaatcctgtaaggaaagtactagtatatttcccaattgactgaattcattccatctttataacaatgtcttaaaagaacatccaatgtccccgctcctgctttctgctgctgctggtggagcctgaagataaagagggggagtcaaagggctaaagagaagcataata

SEQ ID NO: 286096 - DNA, 418 bp, Homo sapiens
attccttaatgagctgattttatggcttaactctcaggacatccttaattccttcatttccacaaccttgaggggtctgttttagtcgcccttatgtgggtagaatcttggttttgatggcacatgaaggtggggaggattgtggatttgggtggcaggcggtgccattctgagtagtgtgataacaggagtcactgtgaggtgctgtcgatacacacctcagaatcattagctcctttaatccttcccacaatcctgtaaggaaagtactagtatatttcccaattgactgaattcattccatctttataacaatgtcttaaaagaacatccaatgtcccygctcctgctttctgctgctgctggtggagcctgaagataaagagggggagtcaaagggctaaagagaagcataata

SEQ ID NO: 286097 - DNA, 579 bp, Homo sapiens
attgaggagcaattagaaaaacttaatttattgtaagaaaatacacaatgcaaggtgtgatgctctgtggctcctgtcacttggcaccagtggcgaggatacagcagggacaggtggggactgaggtgagctgaagggagggccgtatcagtgttgttgattctgtaatttttcaaaaacagctagaaatcctgattttgatattaaatctcccaagtcgtaagtgtaacttcaaattaattcatactggctcaggatatcggtggcctcgacagttggttggcatgaaaccatcactaaatcccaaagctgrgtgaaaagtactgtgctgtgggggatgaaaattctgactacagtgaagaatagatgaagaggtcaagaagtacttacaagaataacattttaccactaaaaagaaatccatttcaactatgtcaccccctgcacttggagtgaataatttaaagtacaggttttggaaccagaaaagtctgttgctgaatcccagctctaccactgatttgctctgcaacccacagcaaatcgatcaacctttcagtgcctttgtttcctcacacc

SEQ ID NO: 286098 - DNA, 559 bp, Homo sapiens
cctcccacctctatctctcgagtagctgggattacaggtatgcatcaccacgcccagtacatattcctgctcagacccaggtgataaaactgaactcgmagggagcagcctgcatccccaaatgcttgcatgaagcctcaagccttgtggccccccagaactgaccagggtcccaagagatcagatcatgcaggggttgtggggtaggggagttaaaacctcttttctggatccaagtcgaaagcattccacttgccattgcccctccggatggggagcaaagctcccaaagtttgatgctgaagccatcagccctccccaactctgtgtctgggcctccgagagcctggggttcctctgggaggacagcttggcgactgcatcctgctaggcgctgcacctttggctgctctctagttcaaacataaaactttttattccaactggtgattttcctctcttggccagggccaagtcttctgtttctataagcagagccctggttgctaggtgacagcctcacttcaggttccagaggcagctaaagcagaaatgaacc

SEQ ID NO: 286099 - DNA, 649 bp, Homo sapiens
caagtgaaaaacgagtaaagaatgtgaataggcaattcacaatagaaccacaagtggccaataaacaaataaaaaaattgccaaactcattagcagctgagggagtacattaaaacaataacgagaacacatttttaatctactaaatggcaagtatttttttaaatgataatatacagatgggtgaatatactatgggtgaactgccattttgctgtacttggttagaatgcagttagagaagacctttctagaaagcaatctgggcgcatattgaaagtcttaaacatatgcacaccttttggctgagcaatacggtgcccttatttacaaaaatgttctcatagyattattgatagaaatttgaaaaaaaaatctatccaacaatggaatattagctaaataaaaagaaatcacttaaatacatgcataagtattctcagattgtgaaagggaaaaaaagcaggttataaaattccatatatgtcatgagttcattttgtaagtgaaaaagaaggtggtatacacctgcatagaatactatcagctggatgttctaaaacgttctcagcccatggaaactttagtatctcagcaattctttacaaagcccctagacacccctcgacatcctcgccccaccaaataa

SEQ ID NO: 286100 - DNA, 562 bp, Homo sapiens
acgtgacttgctttggccaatgggatgttagcaaacagggtacaattagaggctcgatgtgttctcacatggttgaccttgccgatttgcactctagcctctcaccaagaaaaggatgtgcctcaggtaggagttggtccaaggaggatgagatgcacatggagtagatctaggttcaaccttcagcccagtcaaggccagcctagataactacagagaacctacagatgagagagcgtgaaataaactcttmttattgcatgccactgaaatttattttgttacacagcattttgtggcaattggtgactgatacaccctttaagatatttttctatacacatttgtaagccaaaataaaatcatactatgcagttttgtaagccacttggttccaatcttatatttagataaatttttattaatactcaaaccatattcaaatttccccaaattaccataaaataccctttatagctggtttatccaaaccagtttcaaatcaaggacctgacattgcatctgattatgtccttaaatctcttttagtctagcacaatcc

SEQ ID NO: 286101 - DNA, 506 bp, Homo sapiens
aagttgaaagaataatactgtgaacactcctatacccaccaactagattgaacaattgttaacactgtctatatttgatttatctctgtgtgtatatattttatttttgctgaaaatagattgcagctatcacgatacttcacccctaattatttcagcatgcatctccttagaataaggatattttkctacataaacacaatgtctttgtgactcctaagataattaacattaatccctaatgtcacccaacattagacccaaatttaaatttccccaactgttccccaaaaatgtgttttatggctgtttaaaataaataagtgaagtttaaccaagtttcatgtattacaatggttatgtctatttattttatcgtagaataatctacttttttttcccatggaatttattttcaaagagaccatgccagctgttttatagaatgtctcacattctagattaatttaattgcttcttcacagttcacttgacttgttcttcta

SEQ ID NO: 286102 - DNA, 551 bp, Homo sapiens
ttagttttacaaaaagaaacactggaaagataaactagaaactaataaaaattgttgctcatgggaggtggaatgggaaaagtgaaggaggggatacgagtggaaatgagacttctctgaatatggcttttcacataattttgactttgcattcaaattttacatattcacaaaataaattaaatcaaaaagaaagaaaagacaaacttgaaaattgaaaacatatcaggcttggctaaaggaamctaattgcgtaccaaattagtaacacagatatgacgagaaaagaaaaaaattcagacatctctgatacagttctctggttctagtcctctgtgaaaaatattccaagagtaaaaaaaaaactgcatataaatatttaaggttactttgtaattgtattagtactggtaatagtggtttttaactttggaaaatttttaagtatattgtaagattaaagcaaagaagtaaattcctgaaactattctatctatgtatattagagaataaagaaaataagtaaatatattctaatagtactaagaatc

SEQ ID NO: 286103 - DNA, 661 bp, Homo sapiens
gctcatttcttataaaaagtctctgaaagttataaataacacatatttgcattagagaaatttgggaaaatacagaaatgttaaaaaggagaaaaattttcctataatctcagtactcaaagacaattgctgttatgttttggttgcatttcctgctgatcttttttctgtataggktttttattctttttcaaaaatgccatgataatgttgtagttagagagttttgcatctgactttttagaaagaaaacaaacaaataaggtaagacacttttcccctacatctgtttcaactttaagtagcaaggggcttattttaaaagcttagtggcttacagcttatttcatgggatggagtacagctgtcagcctgggcttcctggacacacctgcctgagatctggtagcagcagcagcaagagcacaggtatctgctcagcaggtcaggtcacctatgggacccacaccatcatgggggttggagaacatagttcttcacctttcagtcctcatacaggaagaaaagaactagagtagtatggagaaagcctgtcagtcacatgtgcttcaccatggtgttgtagttcttcaaagtgaaattttagtgccagtgagtatttcagtatatgacacaccatattttatttaacttttgctct

SEQ ID NO: 286104 - DNA, 614 bp, Homo sapiens
ttataagtattatggtctcatattgcaaaatgctgtgatcaattcttagtccacatcttagccctcagcagcatttgacatgattgatcattccctccttgaaacaccagattcactgtcttttgggccacctatattcctggtgtctcccctctttctggtcactactccttgagctcctttattggtgtcccctcctcttcctggtcaatgttggagggacctcggctcagtcctcagatttcttytctgttttcatctactcctatagtttcaaataacatcagtgtttttatgacttctaaatatgtatatatttcttccccaatatttccctcaaactccaaattcacatacaaaaatacctgttatatgtttcatttgactattgaatagacatctgtacatacagtacaatagtagcagaaaatggatatgcattgaaaggggcccagatagctcaggtgcagacttctttatcctcacaatgctgggtcacactggacatgtattgtctccaggtctcttattaccatgggtacgtatgtcaaacatctcggtagcggagaacctggttgtggttggggtatcttaaaatgagctggtcatataag

SEQ ID NO: 286105 - DNA, 546 bp, Homo sapiens
taggtgctaaaaccacatttgataaaattgaaaactcattcacacattcaccacacacacrcatacacacacatgcgcacacactctctctctctctctgtcttagaaaattaggaataggaatagaaaaggaaactttaaaaaaccaataatggtttaatgtcatactttggtgttgaaaatgtggggatattcttgctttttacttagtccaatttctttatttttcgacattggacgaaatcccagaaaggtaaattgacatacctaaagaccggtggtctacccagaaaagcacaagttattttatttattttttaaggtattttgtaaatgctatttttaaaactaatttcaacttttatttcagattcgggggtagatgtgtaggtttgttacatggatatgttttgtgacactgaggtttggagtatgaatgtgtgaatgaccccatcaccccggcggtaagcatagtacccaacagggagttttcagtccttgtccctcttcctctctcccccactggtagtctccagtgtttatttt

SEQ ID NO: 286106 - DNA, 546 bp, Homo sapiens
taggtgctaaaaccacatttgataaaattgaaaactcattcacacattcaccacacacacacatacacacacatgcgcacacactctctctctctctctgtcttagaaaattaggaataggaatagaaaaggaaactttaaaaaaccaataatggtttaatgtcatactttggtgttgaaaatgtggggatattcttgctttttacttagtccaatttctttatttttcgacattggacgaaatcccagaaaggtaaattgacatacctaaagaccggtggtctacccagaaaagcacaagttattttatttattttttaaggtattttgtaaatgctatttttaaaactaatttcaacttttatttcagattcgggggtagatgtgtaggtttgttacatggrtatgttttgtgacactgaggtttggagtatgaatgtgtgaatgaccccatcaccccggcggtaagcatagtacccaacagggagttttcagtccttgtccctcttcctctctcccccactggtagtctccagtgtttatttt

SEQ ID NO: 286107 - DNA, 605 bp, Homo sapiens
tatacttttcaattctgtaagtctgtaatgtgggtcattaaccatgtgtgtgctggtacccgtttaacaacyccctactgaagtcctgatttgtagtgttttttatttccatggtgtacgtgtttttatcatggcaaacttcaagttgccaatgtgatgttattgaatgtggaaataagaagggatgcgcagtagcatgccattatattttcaccccacagttaaaatagacacaaatggcctcaggagcacacataatagtgaaatgtagtgaaataattaagacatgatgacttctgagtgtttattacttttgtttttaatataaatctttaattgtttatataatttaatttttaataatgtccaggtttaacagctatcttacaaaattccttaaatttttattgacgcataataattgtacatatttacgggatacatgtgatatttgatacatgcatactgtgtgtaataatcaaatcagagtgatgggatatccatcacctcaaacatttatcatttatttgggtggaaaacatttcaaatattttcttctagttatttagaagtgtacagtaaattatagataacaataatcatct

SEQ ID NO: 286108 - DNA, 558 bp, Homo sapiens
gagatattacatttttaattctagcattaatttctttttaattcttcctaatatgttacaatattttgatgaatgtatgttgacattatctttctccagagagaatttatctcctttcaattggacataaagtggtggctgattaccttaataaaatcgggaaccgtgccgagtcactactaagttgctagtgtttgctactaaaagtgaacttaaataagtattttaatcaaacttgtgcacttaacrtatttattaatgaagaaaataccacttaagtaagatataaacaaatatactaaatatttcagtatacactgatatatttttatttaatcttagacacattcactgtctgtataacttgggggtttcctatcatgtaaaatagtaatggatttaatatccacttagaaatcctcatttaggcttcaattccatccaattatatattgaggcatgagtttcatatgctcgtcaaggcactcaaagtttagaaaaggaaatgacatatccattttatatttcagggtaaatttcagttggtgccaaaaagca

SEQ ID NO: 286109 - DNA, 542 bp, Homo sapiens
tgatgcttttttgttttttgtttttttcccctccagaatatctctttttccccttatttttctctggttctgagttatatggtaggggagggattcttggtgggatgaccccagctgggtaaatgggctgtttgctccggcccctagttatgcatgtgagactcctcaggcccgctcctttaagcttaatcctctaaattctttgtcttgtaggaagatgacgattcagagactgaaaaacctgaggctgatgacccaaaggtatttggtgttggctgtggtgggtggctggatgcaaacaaggtgtttgaacactgtggctcagttcgtatgtttggtcaagatctgtcccactgacaaactgtgcaactgtgtggacattttctgggataaaataagctttataaagaaagaacctggagacractcaggaatgaacaaatcctgagacacattggatttccagcctttcagattgtgccatatctcctgactagaaaggcgagaggcctggctgaggccaacaacccacttgcattctg

SEQ ID NO: 286110 - DNA, 607 bp, Homo sapiens
aaggctggggtacagggcaagggtcaggggccggggccaggaggaagcagcccagctctgtggaatcagaagctccagggttggagccagggcatctgcagatccagaaagccctgttcttggctgcttgagcaaagcctttccatctccaggagggcagcaggtgtgggcagtagccctggctctgcatgcaaggctgctgagagctccctggcacagggctcctggggggatacacctggctggaaggcagggtcccaaccaggataggcaccccagaggcatgcagctgtgcctgccaaccctcttccctggtttctcctccatggggcctgctctccctgctcagatgcacctgtcaagcctctccccacaggcagcagcacgcgtggtcttcagcacaccagttgctaggggtggcattttctttactgcacacaatcacatcacctcactcaggcctggacccagctagtgctcaataaatgtgcgctggatgattaaaccatttgtctttttttttttttttcttttctygagacagggtttcacactctgtcgcccaggctggagtacagtggtgtgatctcggctcattgcaacctcc

SEQ ID NO: 286111 - DNA, 626 bp, Homo sapiens
tatttgacaaaccctccattcaaatactgtaaaaccaattaatttgcctgctgtgaaatgtgtttcttgatagcttttatgtgattttcttttcttctcaaagaaatgtaaataggaggtcaatgtaggtgcctgattttgctttaaaaatatgccacagtaggtataggttgtccactcggtttgcatttcaaatgaattgaaagacaacctccattttcaggtcatcaatctcagattgktctcctgataagtaaactgtgtcagagtaatagtttgattaccatgatgatggtcttatatttgagaagggagtgttggcaaaattaccattttgtttgattataaataatgatttgcaaccgtggcccttatctttcctgctttgttaagtgacctggctttgttacctgtgtctgactatatccagcctcttccaaaatgcacctgcatgtgtgtccaggaaatcactcaataaaattggagcttattcctgatgctttttatttggaaacatcacaatttgttacacttcttgttgccaagaaaatcaatagaacaaacacaagaaggtttgtttcttaaacttcccctgggccttacttactatcttctgttagctggag

SEQ ID NO: 286112 - DNA, 579 bp, Homo sapiens
gcagaaaatgcaaactgtgcctgatttcaaagtgtgcacttaactataaaagcccatttaaacaacagttctattgtatacacttgcaaatgtcaaaattgcaacttgcacaaattatcttcaaaaytggagaacccacctgaaaacactgcaattgctgtacaagtgttggacctgaactggatggataactccctttgctggagatgccagggggaaggagaacagaagcctaaaaagggtgggtgtgaatgcaaaaaggaatagcacacacccatactgggacagtgagattagctgttcgtttagttctgacctctttcataggtgaaggaagatcattaagcaaagtttagatcagtgttactttcaaaatcatgaccctaaaatctaagggtttctcctttgggtgtttctccttctacaaataaagtccaaactccttgaggtggtatccaaggcgttttccaaatatgcacctatttgcccaggtttcctctctttccactccccatcacacaaactttaatcctgccacttgagaccttatatcaccatgcactacagcatgatccctca

SEQ ID NO: 286113 - DNA, 1163 bp, Homo sapiens
ggagcttgctactgcttgaagtagcctgctccatgttgagacagcatcatcaggctattcttccttttttgtgagttaaaaacttgtcccccaggaacttctacttatagactgtactttggagctgcacagaatgcatcttctccttcttttgaatgacaagccttcagttgttggaagatagtaatcctatcccctggcatcgtctcttctccaggctgagacattctcagcttgttcattcatttattgggaaccttcaacttttcttctaatgctcaatttctgtacactgtcactattgttggtgcttccaggaggaactccagattgcctggggctcttgtaactcatggtatcctgttccasgtgtgatctgtcagctcaagggaggacagtactgtcgctgccttctgatactcatcttctcttgatacagcccaacagttagtgacccatgatgcacatactgtgggtttttccatgcaaagatgaagccgctgaggggaattctttctcattcatagagaaggttactatgtgattggtagctcggttccacacagccatacawatacactttacttctgtaaagtcaaagatatatatgagaagatgcaaaactgaatctggagcagttgttttgcatgacatataaacacggctgactaaattgactaaggaaatttgtcattctcccagggatggggtgggggaaacatgctgaggggagcctattgtctcacagtgagacagctaacagcccaatttgtctgattgtttgctgaactcttagaaaatctaacaacagtggaaccatagactttcctaggcttgatcactagccattcctgccaagcttttctagtggtcaaaactctgttccattcaattgaatgaatattcttctatttggaatgctgttaagacagtctcctgagattgctcctctgawttccatgcaagtgctcatagagaggaagtgtaaaatcaacggttacattaaacataacttcttggccatggcataacaatgggtcaatgcaaaatgcaattcttttaaaagtttctaacactaacttatgatttaaatggcatggtataaaaaccctggcgatgtttcttcaaataaataatggaattctgtattcaaactctttagt

SEQ ID NO: 286114 - DNA, 603 bp, Homo sapiens
aaaccatcagatctcatgagacttattcactgycatgggaacagcacagaaaagacctgtcccccatgattaaattaactcccaccaggtccctcccatgacatgtgggaattatgggagctacaattcaagaagaaatgtgggtgggcacacagccaaaccatatcagttgcaaattcagaaatccatagcaggtcaattaattgttttaaaacttccgctcttgaattacttgtctttattcaacagcctcaagataatcttagcttctcatttgatttaatctgttatgcaaaaaatagcacgaagtcctcttatggctgttttaatcagttgctttttgagattttataaaatagccaattgagctccacattgtattttttgtatgattaatttgaagtgattgtattggccatagtggttatgaatgcaaggaaataataatcttatcttgcttatgttactgagccgggtgtatataactttatgctcatcagagcaatggacaaattgggctcatcgaactgcaacttacattttcatgatcattccattgtattatattggtacaacaaaggaattttgcaaaataaaaataat

SEQ ID NO: 286115 - DNA, 592 bp, Homo sapiens
cagcccaaagatgacgtgataacagcattcagaagtgcctgcactccataaagacttgctcccttcactctggctatgttgctggatagaaaatcctttggcaagatccatttgtcaattggaaatttcctttataactaaggtttggtttattgtaacttaatgaaaaatgtactgtctttggtgaagaagcatgtttcacccacaaagtcatctgttgacactaatcattctctaagtggagtaaatatgcagatgccagccaagcacttcagtattgcattgaggtgtttattttttccmagtcaggaggcccaatgtaagtggcacttggtcactctgttcccctggggtttgtgggtttgaaaattcaattttcttccccctaaccaatctgagccctcttgcccctgatgctaagggggcacacctcataaaatgacatgtatcttttagtgagagacaatcaatgcctaatagaggttttctccctaccattcgtaaccagaagaaatgggaagtgtattattagtacatagtaggtactcagttacatattcaaaaacctaattggcaggaaatactgataaaa

SEQ ID NO: 286116 - DNA, 592 bp, Homo sapiens
cagcccaaagatgacgtgataacagcattcagaagtgcctgcactccataaagacttgctcccttcactctggctatgttgctggatagaaaatcctttggcaagatccatttgtcaattggaaatttcctttataactaaggtttggtttattgtaacttaatgaaaaatgtactgtctttggtgaagaagcatgtttcacccacaaagtcatctgttgacactaatcattctctaagtggagtaaatatgcagatgccagccaagcacttcagtattgcattgaggtgtttattttttccaagtcaggaggcccaatgtaagtggcacttggtcactctgttcccctggggtttgtgggtttgaaaattcaattttcttccccctaaccaatctgagccctcttgcccctgatgctaagggggcacacctcataaaatgacatgtatcttttagtgagagacaatcaatgcctaatagaggttttctccctaccattcrtaaccagaagaaatgggaagtgtattattagtacatagtaggtactcagttacatattcaaaaacctaattggcaggaaatactgataaaa

SEQ ID NO: 286117 - DNA, 557 bp, Homo sapiens
ctttgttaaaaaaacctttgagactgattaggctgcttatattgaaagagaagcacaaggtctatatctttagatcttttattgaactgcaagcatagcatcaataactgcttctcagctgtaaatgaaaattgattccaggtttaactcctgattttcaggggttcctttaaccccgagaaaaatgaaaagaaaaactgacaaaaagaaaaaccagaggtttagtggtatgaggcagggcatacagagaacataacatattcccactcccaaaacgtctgtcctcctgggtcaggccactccctagccaaaccccagtggccatctctgcctaccctggaggactggcttgaaaatggaaattcaataagtgtttcatggggaaggccagggctggattttatatctatgatgccaacagtggcagctgagaagcaaaaaatgcagtcagccaggtaatagacatcatgtggcccccaaatctcaaccakgccattgatatcaaacttaaaaaatacattgcagcacatatgtttattcagacactaagtacatag

SEQ ID NO: 286118 - DNA, 1122 bp, Homo sapiens
cattgacaccacacactaggttgccgttctcatgagtcatacatgatacttggccttttcaaatcataaagtccagtctcattgaaatgctgaaaacacacattcctgccatctcatttggtggtaaaatactgtaaatgcttaaaatgtgggatagaaggatacaagggcagccacaagtttttgccaaatgtcttctgcctaaaggttcatttaatggcaagatgttgcgtattgattctcagctgcattctgaaatggtgcatctgggaaaggtgaatgaagcatcacatttatatctaaattaatgagtatgggttccaagcctcacaccagagtcaccaaatgaaaattatacctcacccaagacaataagtagtccaagagagggcaagacaatctctattgcttaccactgaccagcatttgtgtatggaacagagagagagatgggaggkggttgaaagcagttttaaagagctctgcatctccttactatagctttaatgaaagtttgaactgattwgtgctcaggctgttttttccccttaggaggagctacatttaattttcctaaggttttaacttaaaactttgattcagtggccaccacctcactgggaatcctacagaatccctgtctgagggctgtggcagtgacaaccagtttgaaaatctgtattatactctataggaacaaatctccaagwtctatcaggggtggacccctagcccagtgccaaccactgtgcccacaggcaaggtctaaacatgcatcctgccatgggcacgtgggcctgataaagattgtcttctgtagctgatggccttccaaggggttcagaaaataggtatttcataagattaattgggcttcttagtgtgagaactaggagttcccttaggggccatctagtctagggattggccaactgaaggcctcagcccaaagcagccttccgtctgtctctgtactgcttatgattttagaacagttttttttttttcatttttaaatgtgtaaaaaaatcaaaagaagaataatatttcacgacacataaaaatttatatggaacttagatttcattatccataaataaagtgttattggactacagccac

SEQ ID NO: 286119 - DNA, 597 bp, Homo sapiens
ccaagtgaggactttctctatcaggcagaagagtgtctctagtactcagcattctctttggagacaaacccagtcactggttagcttccattctcaagtgatgaggaaaggcagaattccttttggaattgcccctctcagtctcccttcagcttcttagagcaactacagcagattagatataaraaacccctgtggctacctccaaagtacaatcacagagggtacttcattactcatctcttcacgtcagctcctaattgtcaaatgattaaggaaataactcctttatggagttggtccattaatatctatctaaggaagctgtccaaaacaactgaaatactaagtcgctgttaagtgcactacaactcatacctgctgacagccattgtgtcttacattaaactcaatgggggcaaggaccaattcttagtcctatgtgatgcatggcaaattttcagctgctgataacagaacactttagcttggagtgctttaaaccatttctcaaacccatttccagagaaaggttgtcaagaaggcctgtctacctgaattgacacaggaaataggatttcccttatgctgatgcat

SEQ ID NO: 286120 - DNA, 1141 bp, Homo sapiens
cctattattcatagactcaccttcttgatagataggtaactagctgtctagatagaatcagaaagaactgtaaatatagatacgtggagaatagcagaccccaatactggccaagmcttagtatttaatatctagaactaggaaatctattcagaataaaaatgtagtccctcaaataaaattgctccaatcatcctaggaataacatgttagttcaatcaaagcactttgaacctttcacatcacacctgtcagatgtacaattatgacttgagggcttacaccttgtctctgtctcacaataaatccaagtcagccaatactagctaataataactaagacttattgaggtaagcttaatgtgtgccagacattcatttctctaagtgcgctaatggatcacttcattgactctttccatgaaatttgggaggttatactggtattttctctgttcaagtgaggaaattcaggtttaaaaaagttaagaagaaaacacacagaatgggagaaaatatctgtgggtcatatatctgataaggatctwtgctgttttggttactgtaacctcgtagtatagtttgaagtcaggaaatgtgatgctcccagctttgttctttgtgcttagaaatgtttttgctatttgggctcatttttcgttccacataaattttaagatacttttwtctaattctgtaaaggatgtcattggtagtttgataggaatagcattgaatctgtacattgctttcagcagtatggccattttaacaatgttgattcttcctgtccattcaatgagcatggaatgtttttccatttgtataatctttgatttctttcagcagtgttttataattcttattgtagagatctttcacctctttggttagctacattcctaggtattgtatggaaagaccattcttttgccacaagatgaccagaaaacttcttgtgattttgcgtaatcgaccctcttagttttacaaaatattgggggtgattctgctactaaagtccttgtttttataaaattaaccacataaatgacctcctgtgtactcttttgacttcaagtcttttctaaactagattgtctatgaataacagtgaatggatttcacatagggagtttct

SEQ ID NO: 286121 - DNA, 593 bp, Homo sapiens
tgctgttttggttactgtaacctcgtagtatagtttgaagtcaggaaatgtgatgctcccagctttgttctttgtgcttagaaatgtttttgctatttgggctcatttttcgttccacataaattttaagatacttttttctaattctgtaaaggatgtcattggtagtttgataggaatagcattgaatctgtacattgctttcagcagtatggccattttaacaatgttgattcttcctgtccattcaatgagcatggaatgtttttccatttgtataatctttgatttctttcagcagtgttttataattcttattgtagagatctttcacctctttggttagctacattcctaggtattgtatggaaagaccattcttttgccacaagatgaccagaaaacttcttgtgattttgcgtaatcgaccctcttakttttacaaaatattgggggtgattctgctactaaagtccttgtttttataaaattaaccacataaatgacctcctgtgtactcttttgacttcaagtcttttctaaactagattgtctatgaataacagtgaatggatttcacatagggagtttct

SEQ ID NO: 286122 - DNA, 594 bp, Homo sapiens
ctactgcaaccatctccttggagagaagacttaggaattcccttttttaatgagctccccaggtgattcttgtacccatgaaaggtagagagccatgggcctgcaggagagaatccaagttccttaggcagaaatacaaggtccttcactccctcggcccaactggtctcagttccctccactctatacygttcaccctacacaccagtcacactgaatttctcactgttgtctggacactttggttcctccacacctccatgcctgtctctataccccgcttccctgccttcccctccacctagtaaaaccctgatcccccttcctctgagaatccttccctgaccaacacttgctgccccaccagagatgtctgctgccccatcagacttgtaccatatgtattatatatgacataatattctatatattatatagaatagagagagattcatattggttctgtttctctggaaaccaataaatatgtattatttagacatacataatagaagatattctctctccctctggagagatttactttagcatttattataatgaattgactcatgtgattatggaggctgagaa

SEQ ID NO: 286123 - DNA, 590 bp, Homo sapiens
tcccaacaagttcctcatcgccatctgagaccacctcagcctggatttcattgtccatattattatcagcattttggtcaaagccataaaacaagtctctaggaagttccaaactttcccacttttttctgtcttcttgtgaaccctccaaactgttgcaacctctgyctgttacctagttccaaagtcacttccacatttttgggtatcttttcagcagcatccaactcctggtacaaatttactatattagtctgttttcacactgctgataaagacacactcaaggctgggaaatttacaaaagaaagagtttgattggacttacagttccacatggctggggaggcctcacaatcatggcggaaggtgaaaggcatgtctcacatggcagcagacaagagaagagagagcttgtgccagaacgcccctttttaaaaccatcagatctcataggacttattcactatcatgagaacagcacaggaaagatctgcccccatgattcaatgacctcccaccaggtcacttcaacaacacgtgggaattcaagatgagatttgggtggggacatagccaaaccatatcaa

SEQ ID NO: 286124 - DNA, 531 bp, Homo sapiens
tggacttacagttccacatggctggggaggcctcacaatcatggcggaaggtgaaaggcatgtctcacatggcagcagacaagagaagagagagcttgtgccagaacgcccctttttaaaaccatcagatctcataggacttattcactatcatgagaacagcacaggaaagatctgcccccatgattcaatgacctcccaccaggtcacttcaacaacacgtgggaattcaagatgagatttgggtggggacatagccaaaccatatcaatgaataattcagtttatytaattcctaagactgagattctgttttggggcagtgtactccactttccctgatggaacagaagcctagtcctctaccctaacttgctcaactgggctcacaactccctacctgtctccagaccttgcagggactatgtgcacaaaaaccagaccttttgcttagtgagggagatctgagggaacccaagtgggacaggccctctttagaccctgggatttagactccttgtctgcctggta

SEQ ID NO: 286125 - DNA, 1082 bp, Homo sapiens
tttggttatgcatttgagtttcatccaaataattgttcaccaagccattgttactgaataaaaatgcattggcccacacacataggttaacaatcttaattaatgatcttgtggcccactaccaaaaggcttgaatgcccctgctgactttaagtgcttagaaaatagatagctgatggctgtacaaccatgtaaatgtgcttaacaccactgaactgtggacttaaaaacggctaaaatggtaaatgttaygtcatgtatattttaccacaaaaaaaaaaaatgttcaggccaagaacaatagttcatatctgaatcccagcactttgggaggtcggggccggaggactgcttgaggtcaggagctcgagaccagcctgggcaatagagtgacaccttgtctctaacttagaaaaataaacaaagtttttaaaaatagcacagtgcagtggtatgagtacwtaatttatcatgccattccttattgctggcaagatactaagttttatggatgattttgtatgtttttttcctattgctggttacactgctatattatttgttatatgccaatagagaggaactttactattgaacaggtatctccttgtggatgagagagaggaggcagaawtgtgtaaatgaatggaactctccatattgttgtgtgggtcttcccttcactcttgtggatataagacccagggtgggaaacaaaacgatgcttcttccaaaagatcctcccatcaggaccagaactagtatgtttaggagtaagatggaacatttccccagctaagataccagtggtgtgtttctcacaattagattacagtggtgtcagtcttcaagagcatcgtgttcaacaagcaaaatgataaatagatgtaaacaataataatgactttgtaatatgccaaaagcattttcttaaagtacctcatcatatattttataatagatgtatttcatatgtatatgtattgtcgcctatcagtgacttacaaatgaactggaatttcaggaatctgatagactctgcccttgagttttctgtgtttcagtttcctactgggaaaaac

SEQ ID NO: 286126 - DNA, 437 bp, Homo sapiens
gaggaaagcagaatccgccgggatgtcttaaaaatactcctgggaggatgagggataaaaaactacatattgggtacaatggacactactcagatgatgggtgcactaaaatttcagacttcactatacaattcatccacgttaccaaaaaccacttgtaaccctgaaactattgaaataaaaataaataaataaaattaaataaacaaaaaatactgttgaccagatctcacctcatacaaatgtgaaagaaaaatagaatctcaggaccccaaattcactatgccaaagggaaagttaaacttgggaactgagtcaygcaaaaactgccttccttttgttcccagatagctgtaatttcgcatgcttactttagcttatgtaaaatgtagatttcctgagcgctaatcagagcctcacaagaatgtaaccactgg

SEQ ID NO: 286127 - DNA, 599 bp, Homo sapiens
ctgccacccatgtgtgtctccttctttccactgtgtcattcccaccatttaagaggtaacagtgctcctttctgatcaacygtggcttccacaacctggcacttacgaatctccaccaaaaggcccctcctagatatccagcattccacgggctccccagcacagactgatggcttctaacaacactggtcggtcccttactccccagacacatactcggcttcctcctgtggaggacagggtgcagtcagcctagtccctgacatagacttgttccatatatgcttattgctctgtatagaaatgacctcactcatctgcatttgtctgagagagtgctttcagatacaaacaacaaatggtgactactatgatccagtcctcatgaagaatggtaggtttttttattggttttgttttgggtctctgtggaactacacttaaattgcaaatacaaggttgttgttgaaaattaatttacttaaacacacattgcagctggtggtaaccagatgattgggtgaaaattggaacagtgtatgaacccaaataatgtcataattggcataaaatgaattcttcgttttagtcaaaatgtc

SEQ ID NO: 286128 - DNA, 527 bp, Homo sapiens
cagtagaactaatgaattttaaatgactcattttgaagatttccttccatsctataactactagttgctccattagtatccttagaattggagctatcactccaattaactccaatataacacttgaatagggctgaatgtttgtatagaaactattaacttgactaacagtttgaaatgatcccactttgatctttagcaaccctatgtgataagtcaagctggggacacatctgcattttgtagataaggaaagggaaatacaaagagattcagtgacttactcaaagtcacacaagtaataatcagcacgaggacttcaagtctgatcttctgactctactccttggccctctgcaacctcccagcctcaataaaacactgggaggggatgcttccaggtcacacacctcctgtgacagcctctttgttatgttgccctggagagccacctgctccagtcccatggagtgccatagaattgtcttatccctctttcacatacagaccttttacttcttgaaaac

SEQ ID NO: 286129 - DNA, 525 bp, Homo sapiens
ttacaatgagcatgtatctttgacttccatgtataaagatgaaatgttttattttaaaaaagaaagaaaaggtttgagatcaaggaacagcaagcagagacaaattcccctgagaagagaaaaccaagagaggaaagaactccaaactccaccaagaagctgtggatgaagctggtagagaaaatgttaagatccacctaagaggctgagcctaaacagaagccggggtcgggcctaagcagsgctctggaagtgaaacaaagcaggagccataaaagtggtaggactcattagagcagctctgtagctgtaatttaacctgcctgtgtgtattggtatcatccaaattgcttcacactttaataaaatagaccttggacctatattaccaactgaatgtgtgaactcaagacccactccagaagggcatatgaggagtggaagagaaagacaaccaccccaaaaggtgcaatctagacaggacagcccctgatgccagtggaaagaggccatgacaagcaagtc

SEQ ID NO: 286130 - DNA, 609 bp, Homo sapiens
gtggcctccaggtcctgtggggagggctctctgcattgttcaatccagccgaagaggaatctgaggacggcgccaggggctcacccctcagggatgattcagccacatgagctgatatttttgcccttgtaaacccagttgaaaatagctggaggctctcatccgggccgtgtcttaggcagggcccaggcaccamgaggacacacacctatgggtgccatctgccttcgggtcccgtgtagctactcctgggaggcgcctccattctccaccaagatgccagcttgttctgggtcttccagctccggcaggccaagggcctggcttgctgtgacttcagcacggagcctgctgagcagcactcactgtgcgcccagcccatggggagagcgactttcaccagctaccccggaaaaggctggtggctgtcgccttatgctgcagggaagcaatcccacagcccctcccatatggatcacatgggctccatcgagctcagagaccttaaagaaaccatccagttcaggttgcactgccccaaaaggcaggtggggcctggcttcctgtccccacgttacaggtgaagctcggctcggggcactgcaggca

SEQ ID NO: 286131 - DNA, 623 bp, Homo sapiens
aggaagttaaagggctgtgttctgggattcaaagagggcacagagtagaggagaaagcctcggagtctaagcatccagtttgcattcagtcattttgtctccctattttcagtatggtacccataacattgactatgcctggtgtcctctatctatggacactctcttttacctctccagaaaataaaccccttgtatcttggccaggatgttagggcttcctaacccatcagcaaggaatgagggagaaaatgtaggagtctaactgcttcttttttattgtggtaaaacatatatgacataacatttgctactttaatcgtagtgtgaattayattcacagtgttgtgcaaccatcactactatttacttccagaatttttcatcaccccaaacacaaactctgtactcattaggcaataattccccattcctgtttctgaaacagatttccaccaatcctctttattcccacctctatctccagttctgagagtttctgatgccagtaatccctgagcctttgaggattctgcagtgtaaatttggttggttggtgggttttttcactgctgctttcagagtcttctttctcaggtcagctacatatgttatcacttgtc

SEQ ID NO: 286132 - DNA, 653 bp, Homo sapiens
cttggtattcttcttgccaaccctgcatatcatctccctttcactacatgttccctcattcacactccatgcccaaggaagtattaatagtatcctcaaatggtacctctggaggtgctttccatctgcacagctgcatgggattgggattagttcaggcacctgctggtcctggagcttagaacctaatcacattcccttcccttagactgtcttcagacacacacagcacaaaggtccactttgcccaccctctcaaagatgctttctttctgcctgttgtacagctattttaccctcccagggytgactttctaagtcctcccagcaaggctttccaccacctcattgacttgaaagaggggaaaacacaagcttcattcagggtggatcgttttgatacagaaaagatttgctttgccccaaagggaaggccgacttttctcttctggcgcaattctctgggtccttgtagctttctgctcacactgactcacaaattcccgaggtctcctttcctcttggatggaactaccctcacatttcccggctagcaaagggagaagttgtacccaatagtgctgaaggcctcctccagctctgctgacttatgagcctttgtcctttgtggtttgtcctgagccaaggacaac

SEQ ID NO: 286133 - DNA, 622 bp, Homo sapiens
gaaagaagtgggatccagggtttattaagacaaagagtttggagtggggtgtgggaatgtggtcctgcctagcctagactgctgttgtcctggaggacagggttagcagctgaaaaccccaagtggttgctatgggagaagagagcttctcacgctgcaaaaatgtaccagacatatgtgggcaaagcatctgtcttctattaccctcaggcgcccagagaacctccattcttatcccaaggaaaatggggctctggccctaaggaagagcttttaagagaaaaatatcagacatcaaattcagcttcagccactcrttagctgtgtggccttgggagggttacatgatgcctcttctgcagaatgcaggcgacaacacctatttcttggaggtcagagggcccctgaaacagcatacaccctggaccagagtaaccaatggcttgtttagaagcccaaggctcagccccaaagtagcatgtggaagtgtgggttgcaggagtggaggggctggtaacttgagagaacaaagtcaagctcagtgggtataagaggggctgtcatctcagcccagtcgattctgcagctgccttgggcattctggtgacagcacttggagcag

SEQ ID NO: 286134 - DNA, 600 bp, Homo sapiens
gaataaggatgtcactagtttgcccccttaggagaacccaattggaatagtacagtgtcttagccccggagcatttccctaacatacccaccagctgtcccacaaaagcatgccacagactaacccctttggagggttactgagagggtgagataatgcaggacagaggcaatcctgcttgacatgtctatagcgtcatctccagggactagcgaggcagagagctgcctacacaatccccagctggccttcctactggtatcacacactcccatctccttcccactcctcaacttccagaagatagaggttgrgtcaggagtgatgagacagcattggagagccactctccacaaccacccctggacctcaaagccactaaaatgtccatggccaaatctgactttactcaaacaagtaacctccccaccctgaccccagactacccaagagtctacctactgaatttctattataattaagacttctcactctacatagttcatctaattttgtccctggtgaatcagtgtagtagcaactgagaaaccaaggctcagagaagttaactggttgcaaagccaaggctggaatctagat

SEQ ID NO: 286135 - DNA, 542 bp, Homo sapiens
tgtttgtttgttgtctgctccctccatcccccattcttccatagactatcagttccttacaggcagggactagctatatctgttttagtcactaatgtgttccccgtagccagcacaatgtttggctcatagtggacactcagtaaaataggtggctgagcatggtggctcctgcctgtaatcccagcactgagaggccgaggcaggtgcataacctgaggtcaggagttcaagaccagcctggccacatggcaaaaccccatcgctactaaaaaaatacaaaaattagctgggtgaggtggtgggtacctgtaatcccagctacttgggaggttgaggcagggagaactgcttgaacccaggaggtggaggctgcagtgagctgagattgcgccactgcactccagcctgaacgacagagtgagactctgtcccaaaaaataaaataaaataggtgctgagtgaacgaatgaatgaacagktcagcaacagcaccttcagcatattctgccgtttaggtcactgagctatgtcccagatct

SEQ ID NO: 286136 - DNA, 594 bp, Homo sapiens
cagaagctgaaggaggccaggaactaactctgccctggagcctctgaagaaagcagtcctgccaacaccttaacttaggcctagtgaagctgagtttgaatttctggcctcccaaactatcaaacaataaataggtgctgttttaagccaccagtgttatggtcacttgttatagcagccagagcaaattaacacaattactctctagtaagctatcgtccttcaaaccaaggacttcgagaggctgctttctgttgtggtccaggcttcagctggcattcaagtttggagcattaacgtccaaagtcagaatatatttacttctgatatgatgtcttttggtcttgaggacctggaaaggtgtcatcagaaagacagtttccaaaatactctagacatttacctggacagatgagtacatcacccttccaattttaagacatcagagcaaacacctaataaacatgcacagcctcaaagaaaccaaacatctaagaaacaatattcttactgtagaactttcagacaggtacagctccacaggttycctactgtccaaagggcagacacccccaccccttcaccctgggagtc

SEQ ID NO: 286137 - DNA, 350 bp, Homo sapiens
agacagatagggtccctgccccatggagctcccagccttgcaagagagctggaccacagacaagtacacaaagaaatacagaaactacagggctatgaaggagaagcacggcagtgaggagtgggaggaacagagaaggcttctctgaagaatgagcagaagtaaccrgagaagacagagccctccctgcaatgggacagcctgaggcagggcctgttgggaagacatacacctgaagaactgaaagaagtcaagtgggcctgcaacagaggaaatgacaggggtcagaccccacgggaccctgaaggccatgttcagcagcacagccttcagcctaaggcaatgagaag

SEQ ID NO: 286138 - DNA, 546 bp, Homo sapiens
cagaacccagacacctgcccctgcagtatacaaatattgcaaggcaggtagagatgagtgtacctactagagagcacagtgtctggagtggggggcagggggtgctcaatgttggtgacaccatgtgtcagtctacaggcacatggggtaaaggygcagctcaaactcctttacttcaaaggctggtcttacaatcatcatcacaattctaagccaagtcaggaaataaacacaacaaactgtacagatttctgttacaggctgagtccagcctcttcttcctgtgtgggctagtagcaaggtgatgaacggcccctctgcgagactggactgtcaaatgctcatgtggcaaagtgcctattaccaagaaaaccccaggccttgcagcaacccacagcccatactggaaatacttcctgaggaactcagaggccccaaggaggggtggagaaaagggaccagagaccagggaggaacacgttggaggaaaatttctaaaagtaattatctgacttgaaaaagaagctcttttccagcttaatacat

SEQ ID NO: 286139 - DNA, 546 bp, Homo sapiens
cagaacccagacacctgcccctgcagtatacaaatattgcaaggcaggtagagatgagtgtacctactagagagcacagtgtctggagtggggggcagggggtgctcaatgttggtgacaccatgtgtcagtctacaggcacatggggtaaaggtgcagctcaaactcctttacttcaaaggctggtcttacaatcatcatcacaattctaagccaagtcaggaaataaacacaacaaactgtacagatttctgttacaggctgagtccagcctcttcttcctgtgtgggctagtagcaaggtgatgaacggcccctctgcgagactggactgtcaaatgctcatgtggcaaagtgcctattaccaagaaaaccccaggccttgsagcaacccacagcccatactggaaatacttcctgaggaactcagaggccccaaggaggggtggagaaaagggaccagagaccagggaggaacacgttggaggaaaatttctaaaagtaattatctgacttgaaaaagaagctcttttccagcttaatacat

SEQ ID NO: 286140 - DNA, 643 bp, Homo sapiens
cccttcctttggtcatcctagagcaagtcatgttgaagtcttcatattctcaaaaaaagaagtagaggggctatttataagccctcctgatatatcayaaaaattcaacaaattaaataatgtggacaaaagaaaggaaaggaaaagatctctctttagttgcattcagcatatatttatcaagagcctacttaactcttaagtccctacgatgtgctaaatcttcatctagctatttttcatgggccttctctatcttaccttgctttaatactgtgtcttcctcctaaatttgtattaaccacggtggtttaccttttagaacagagatggcaagcaaatatgtttatttttactgttgatgttgatcaattaatcatgtctacctgaggtaccaaatgaaagagcactgggacccattctgctcatttgactagtgccatgatttattagcaatgtctgccatggcctcaggagataaaaacttcagagctagtgctgtcacttagaaaagcattaggggaacaacaaaaaattgcagatacctaggtagtctttaaaggtctcagaagtatatcagcaatcatgtcattttgaatctcaagtctggttaaagatttagcataagactaaaacttaaata

SEQ ID NO: 286141 - DNA, 643 bp, Homo sapiens
cccttcctttggtcatcctagagcaagtcatgttgaagtcttcatattctcaaaaaaagaagtagaggggctatttataagccctcctgatatatcataaaaattcaacaaattaaataatgtggacaaaagaaaggaaaggaaaagatctctctttagttgcattcagcatatatttatcaagagcctacttaactcttaagtccctacgatgtgctaaatcttcatctagctatttttcatgggccttctctatcttaccttgctttaatactgtgtcttcctcctaaatttgtattaaccacggtggtttaccttttagaacagagatggcaagcaaatatgtttatttttactgttgatgttgatcaattaatcatgtctacctgaggtaccaaatgaaagagcactgggacccattctgctcatttsactagtgccatgatttattagcaatgtctgccatggcctcaggagataaaaacttcagagctagtgctgtcacttagaaaagcattaggggaacaacaaaaaattgcagatacctaggtagtctttaaaggtctcagaagtatatcagcaatcatgtcattttgaatctcaagtctggttaaagatttagcataagactaaaacttaaata

SEQ ID NO: 286142 - DNA, 580 bp, Homo sapiens
cagttgctttgaaaataaccgaatttcacttttgccctttaatttctccgtcttaatcacattctgtcaagaccagggcacacatattatgcataaaaaggtcaagaatacccttgtgtgcttcctgatccaacactgagatatgtcccagacactgtcacacatgcatacaaaattgcccacacacagacctctgtgaactagaccagccagaaaaatatagtttgatgggacaggagcctctaaggtaaattgacactacaaggcatgaaagaaggcatcgatagcagtatacccattttgataacctccttttcagttaaattaaactctagatctgaactagagtggggtgytttcgggaatctcctgaggctcctggacctattcctggccaatctaattgagtgggacacatattttcaccatcctgatcaccagacattggcctaattataaaagttgcttccatctatatggggcttagtagtcctgctgtgtttggggcttaattgtctttatctttagccagtggaacactgggacttttgacctttaatgctatacctagaaaggtagt

SEQ ID NO: 286143 - DNA, 621 bp, Homo sapiens
cccagcatgtatcctttttgttaattgcaacataagcacctgtccaacttctgctgaggggcaggccacttgagtagaattcatgcctttggggagaaaaaagaataaggtggctggccaggggtctatcccttctagatctccattgtcttgggcatatgtcacaggcagtaagaactgcaagagtcattaacccttctgggaagactggtaactaatctttacccagtgggcacctcctgccagggtccaggcattcacagaagtgtayagagtcacagtgattcatgggctgcaaaggccatcttgggacttcataaataccactttgctgaagaagcagcactgttgagaaagcctgtaattaccatctccaatgacctcataaattctgaattgcatttttggagtcatattggctgctgggactcccatgctctgtccagtggttttgcatgcttgtctgctgcctcaaaaattggtaattatggaatctacaccctagagaagtgcttctcattctacatcatgaaaaagaattacctggatagaccgttaaaacagagtccggagctggggctggagaatcagcattgttaacatactcccctatgatgttgc

SEQ ID NO: 286144 - DNA, 623 bp, Homo sapiens
tgttataatttggtttatttacccctccaaatcttatgttgaaatttgatccccartattggagatgggacttaatgggaggtttttgggtcatggggggcaaatcccttataaacagattaatgcactccctaggatgggggatggcgagtgagttctcgctctattagctcccaccagagctggatgttaaaaagcacctggcacctctcctttcctgcttcctctctcaccatatgatctctgcacagccagttttcctttgccttccaccatgagtggaagcagctggaggtcctcacccaaagcagacgctggtgccatgcttcctgcacaacctgcaggaccataagccaaataaacctttttcaaaacaaattaccaggtcttcctcaggtattcctttaaagcaacagatataacctaagacataaccatttgggggcatgatctaggaaaaggataaaaatgagaaatcctgtaaaccaaaatcaatgtttttgtatacaggaatagttgattactgtacattcacaccacgcagcattaaaaaaataataaattaatgttagtccagttgactaggattttattatctgaggaactaaagattcaaaaaaagc

SEQ ID NO: 286145 - DNA, 604 bp, Homo sapiens
aatcagcaaaaaaaatcccttacttttttggtaaaaagaatagtaaattggaaggcaggacacctgggttttcatcccagttcttcaactaactgggggcacgaccttatacaacatacttgacttctgagattcttttctaatccataaaaggggatatttggccaggcgtggtggcttacacctgtaatcccagcactttgagaggctgaggtgggtggattatttgaggtcaggtgttcaagaccagcctggccaacatggtgaaaccccatctctactaaaaatacaaaaattagccaggtrtagtggtgcatgcctgtaatcccagctattcagatggctgaagcaggagaatcacttgaacctgggaggaggaggttgcagtgagcctggatcatgccactgcactccagcctgggcgacagagcaagactccatctcaaagaaaaaaaaaaaagatacttggtacccttcaattctgaaaatgtttgttggacatttttattcaactggtaggaaaggagacaaaggaaacaacattcattaggtttttaatcttgtagaaactttctctatcgatctgtgttgtctctaggtgata

SEQ ID NO: 286146 - DNA, 604 bp, Homo sapiens
aatcagcaaaaaaaatcccttacttttttggtaaaaagaatagtaaattggaaggcaggacacctgggttttcatcccagttcttcaactaactgggggcacgaccttatacaacatacttgacttctgagattcttttctaatccataaaaggggatatttggccaggcgtggtggcttacacctgtaatcccagcactttgagaggctgaggtgggtggattatttgaggtcaggtgttcaagaccagcctggccaacatggtgaaaccccatctctactaaaaatacaaaaattagccaggtgtagtggygcatgcctgtaatcccagctattcagatggctgaagcaggagaatcacttgaacctgggaggaggaggttgcagtgagcctggatcatgccactgcactccagcctgggcgacagagcaagactccatctcaaagaaaaaaaaaaaagatacttggtacccttcaattctgaaaatgtttgttggacatttttattcaactggtaggaaaggagacaaaggaaacaacattcattaggtttttaatcttgtagaaactttctctatcgatctgtgttgtctctaggtgata

SEQ ID NO: 286147 - DNA, 592 bp, Homo sapiens
ggttgagatgcaattaacagattaaaaatatggtagggtttgacattgccccactaaggcttggcccattttggtgagctctgtgctttctgccccttgcttgctttcatgtatctgtgctactgagaacgatatcacccacctggagattcacccacctgttctggactttcaccttctggcataaatgcagtggtgcttccataaacttcaaagaaagtggtttaggcatggcaatctggctagaagtgatgagtcagagatttatgatgagaatctcatcaacataaacaggtcaataaaaacagctgtttattaaggayagtttaattcccattttataaaattgttaaaccccatagatcttcttaggggagagtgagcaaagtagcaatgtggtactgggtgatcataaattatacatagtgtgctgaagatgggcaaggcatgtctgcaatgtgtatcagataataccagtgatagaatattaatctgttgaaaagacaggctctttttgaatctcctggttatgatttctgagggatgatttaataaaaccaaggagcttagcttaagagtagaaagatttgga

SEQ ID NO: 286148 - DNA, 620 bp, Homo sapiens
ttgcattcactaggtttaagtgtaaaggaaaaaaatcatgtgcaatcatgtaaataggtatctcaggaatcacttatgcttcccagcaagaccttgctctaatataactgatgtcatttctaagcacctcatttattaattagtttacctatgtcaatttgattatcttatctttgggaggtamacaaagactgaaaatatatgtacatacacacacacacatatttatatgtgtatatttataaatacacatatatttatattttttagtgtaaattattttttcctggaatttgtacgtcactaatccaacttgaataactagttcatggaaggaacagtacaagggactctttcagtgtcacaggagaaagaattgttggagacccactgctcactttcgctttttctcccccggacacctgagtaccctcgaatcccaccacagtttctcctaaggcatgtttgtcagtgcgtttacagaggttctaattaattctttgtaattgcagagtgttttctgcctccatttctcaccgctgtcccagccttggaaacaagatgttccacctctggaggctgccctggtaaaagcctattaataaataattaagtttgga

SEQ ID NO: 286149 - DNA, 583 bp, Homo sapiens
ctggtgagactttttctctcctctgttttgggggcaactgtttctttacttaataaaaagcaagaaaagatgctgaatggcaaaacggggagactgaagaggttctcctgtacttattccacctctcacatcccaagtctcttctttctctgacccactctggggccaagaaagccgttgcctgcatacaccttgcagatggtttcaagttgagtttggccaatgggatgcatcagcaagagactgaagggtgaaagaagacgtaagtagaggggaagtgcttcggctatgcctgccctgctccttctgtagctgagcatctgtggcagatgctgtgtccttccatgaccacagcttttgtgaggccacctgctgtgctatgtttttagaygccaccctatctgtatttactctcttaccctgccaattcctctgcacgtcatcccttcattgaaatctttcagctgaaccgaattctgcttcctactaggctgttactcacattgaacctattcctggaccccattcatgtgtcagtgccttccatctctgcattgcctacacgtagctggttctcaataaa

SEQ ID NO: 286150 - DNA, 544 bp, Homo sapiens
ttgaaatcattgcttttaagaaaaatcaaacacagtcagaatggttcatcactgttgagaactattcaaattttcttcaaattgacttgacatctgtggttacyaccataggcaacagttagcagtgccttaggaagcagactgcaagataagtctaaaataagaaataattgcctatttattttgaaaagtttctaagccaagaagagtggaaataatgtctcaagatcccctggaatcactggccccctaagcaatgagaattgctaacatagaactctgctcaatcctagaatcaactcagcaggctcctcacaggcaagttctctgcaggctgttgtctcttattccttccatgagatatgatttttgtagccatagttaatgttctactctgccctctagacatcacttccatcttatctgtgtcatattagtgcctgtgaatcctacaggagaggacaacttaaaaaacaaaatataaaaaactgccataagatccctagtgttttttcttttaatctccaggaatatttcatttcct

SEQ ID NO: 286151 - DNA, 543 bp, Homo sapiens
gtattcagccataaaaaagaatgatatctcctatcatctgcaacaacatggatggaactggaggtcattaagtgaaataagccaggcatagaaagacaaacatcacatgttctcacctatttgtgggatctatcaatcaagacagttgaactcatggacacagagagtagaaggatggttaccagtgcctggaaagggtagtgaggggctgggatggctaatgagtacaaaaagaacagaaagaatgaataagacctattatttgatagcataataaggtgactatagtccacagtaacttaattgtacatttaaaaataactaaaattggattgtttgtaacacaaaggataaatgcttgaggtgatggataactcattctggaaggcatggttatttcacattgcatgcctgtaccaaaacagctcacgtactccaraaatatatatacctactatgtacccacaaaaattaaaaatttttaaaaaacagaaaactcatcaaactgtacacttttaagagtcagtttactgaatttcaatt

SEQ ID NO: 286152 - DNA, 551 bp, Homo sapiens
tttatgtgtctgtttcctccatcgtgaaaggggaatgatattaacctaattcttgtgtttttgtgtgtttaatttgttgatcatgtgaagcacttaaaataatgtctagcacataacaagtcctcaacagtgttattttcatgtttacgatgtgtctggcacagtgtcttgccatttacagatgttatctcatttaacccccaaataatccagtgaagtgctcacgctcattacacagagccagaatctgaagtctcatgtcaggtggcaatgacaaagctgtaattacttttctggcctgtatgactccaaatccctcakgttgtctttccaataagccacaagtccaatccaaggccccgaatgatgtttgtcatgtactctctgcgtttttgacatatccttaggaaaatggagaaagaaaatggagatgctgatggctctgctcagcattccctcttgtaggagctgtacatttctaggtggtggtgaccaaagagttacctggccttggtggtaggtacctccaactaaactctgcagatttattg

SEQ ID NO: 286153 - DNA, 580 bp, Homo sapiens
agcagggacctttctgcaccaaggagcttaacttattgtttcattcaatcctcgcaataacattacatagcaagaattattgtgtttattaggcagataaattaaggacttgaaaaaatcaggaaagttgctgaaagtccaatacttataaaattagcatatttgtactaagtcaatgagtmaagtgccgtttttttgttttttgttttttttgagatggagtctcgctctcgctctatcacccaggctggagtgcagtggcttgatcttggctcactgcaacctctgccttctgggttcaagcaattcttgtgcctcagcctcccaagtacctgggattataggtgcatgccaccatgctgagctaatttttgtatttttaatagaaatggggtttcaccgtgttagccaggctgctcacgaactcttgacctcaaatgatctacctgccttggcctcccaaagtgctgggattacaggcatgagccaccgcgcccagccaagtgctaagttttaaaaaattttctttggagttacgggtctcactatagtgtccaggctagagttcagtagctactca

SEQ ID NO: 286154 - DNA, 543 bp, Homo sapiens
aaatggattacatttctttcttatcatcgttgttatgtaattataacagctttatggaaaagaaacacctctcaacactgttcctcaactattgcttcctgtggtctttggataaataggtagcatgtcattttaattctctgtcaaacacatcttattacatggtcttggtttgcagagaagaaaatggctgtgggcaacattttaaggttcttatagggtaggcctgacaggtatattttagaaagtgagtaacagaaggagacttttcagatccccaaagatgggacttttattttgaaaacaaggacaaggatatrcaaacaaacagtcttcctcccagtgaaacaaaattatgaagacaagaaccttaactcaggttacccaactttttattgtggagctttttcctgttttttttttttttttttctgttgttgttgttgttgttcatttttgtctatacattatttgcattactttaaaatggtatgtacattactgtaaaattgttcaaaaatgtagaccaagtaccccgtgaca

SEQ ID NO: 286155 - DNA, 567 bp, Homo sapiens
aattctgggttatatttttcctcccartttttaacatctaactaactagtaccattgctttctggatttaactaaagcagagcaatagattttgaaacgagatatttgttctatttgaacagatatttgttctgtttgaagagatatttgttctattatttattctccagattttactcagcacctcctgtgtggtagacactgttctgagatactggacactttctcctcagcatcaggaataaggatgccctctctcactagcctattcagtattgtactggaagttctagctggtacaatatgatttaaaaaaaataaaaggaatgcaatttgaaaagaaaaataataaaactctctatttacagactatatgattatctacatagagaatcccaaataatcaacaaaacaattcctggaactaatgagagagagttgcagtgttgcaggacccatggttaatatacaaatgtcaattgcttttatcagcaatgaacaatcagaatttgaaaattaaaaaaaaaaaagccatttacaatagcattcccaacaaggactctgccc

SEQ ID NO: 286156 - DNA, 611 bp, Homo sapiens
aataatgtattattctggggagggatgttgattatgggggaagccatgcacgtgggaaggcaggggcatatgaaaactcgctgtgcctttctctcattaattgtagtactggaagtccttgccagagcaatcaggcaagataaagaaataaaaggcatccacatgagaaaagaggaagtcaaattgtgcctctttgcagatgacatgctcttatattcagaaagattaaaagactccaccaaaaaactcttcgagctgrtaaattcagtaaagatgcaggatacaaaatcaatgcatgaaatcagtagcatttctatacatcagtaataaaacactctgaaaaagaaatcaaggagttattcccatttctagtggctacaaaaatacctaggaataaatttcactgaggaggggaaagatcttcgcaaggaaaaccagaaaacattgatgaaagaaattgaagaggacacaagtggaaagacaactcatgctcttcaacagaagactcaatatcatataatgaccacactgcccaaaacagttactgcaatgaatcatctgagaaccaagggtaaaagacaaggaggacagctagcagtccccaacacctt

SEQ ID NO: 286157 - DNA, 385 bp, Homo sapiens
gggccacaatcccctggcttccttcttccctactccaggctcccagaagtccctccccatggctatctcagcctgaaaggccaaaataatgcaagcgtgtagaaggaaggtcaggaaaaacgtaggaatggatctcagggcaggccaaggacaaaacagattctgaagaaagtatcaattgaaatagatgactctctagaactgttccaagataaacttaggcacattaaaattttaatgagttttttgagcattcgtaaattcaccaatcaggcaggactccattgtaggcagttcagcacyccatggggggatatggtgtgcagaggtagagaagaaaccatttataagatatttacagaagcaagggcaaggctaggctttg

SEQ ID NO: 286158 - DNA, 681 bp, Homo sapiens
agcatggctcctgcactaggatggcactcaaattcgtgaagtgttccatgctttttttaaaaaaaaacattaaacactgagcaaagccagcatgcttatggcaacctgttttgggctcagttttgttttgtcactagctgaacacaaaggttcttgtttaattcttagcctaagtatagacgatcataggggagagggagyctgtgttctcagcctcctgaatacttaacataatttaaatattaaaaaaaagaaaagtaagttaaacctgtgctacaattcccagatgggtaagtgtagcccttagagctcaggccaaggcagaatctaaatcacaccawagcatggctcctgcactaggatggcactcaaattcgtgaagtgttccatgctttttttaaaaaaaaacattaaacactgagcaaagccagcatgcttatggcaacctgttttgggctcagttttgttttgtcactagctgaacacaaaggttcttgtttaattcttagcctaagtatagacgatcataggggagagggagcctgtgttctcagcctcctgaatacttaacataatttaaatatwaaaaaaaagaaaagtaagttaaacctgtgctacaattcccagatgggtaagtgtagcccttagagctcaggccaaggcagaatctaaatcacacca

SEQ ID NO: 286159 - DNA, 340 bp, Homo sapiens
agcatggctcctgcactaggatggcactcaaattcgtgaagtgttccatgctttttttaaaaaaaaacattaaacactgagcaaagccagcatgcttatggcaacctgttttgggctcagttttgttttgtcactagctgaacacaaaggttcttgtttaattcttagcctaagtatagacgatcataggggagagggagcctgtgttctcagcctcctgaatacttaacataatttaaatattaaaaaaaagaaaagtaagktaaacctgtgctacaattcccagatgggtaagtgtagcccttagagctcaggccaaggcagaatctaaatcacacca

SEQ ID NO: 286160 - DNA, 606 bp, Homo sapiens
gtggttttatattttttattattttggggaaattattggtctttacatatatttattaatccccattttttttcaatttctgggaatacaactgcatatattttaggtgaattggtattttcatayagctcttagatgctctcatacattttcctctttgtatttttgattgcataatttctattgacttatcctcaagtttattgactcttttcttggttgactttagtctactgatgaactcactcaagtaatttatctctaacatgatagttgtttttttaagtgttattatttttagtatttccacttgactttttatagtttccaactctctgctgaaattttccatctgtttgtgcatattgtgcatattttacactagatcctttaacatactaattatagctattttaggaccctgcctgatagttccaacacctgtataatttgtaagtctgattgtattgattgttttgtctctttgaagtagttctcctttgccccacccccaccacataactattcaggtattccatactatttcattgagtgacagacatctcatatagaatagcagagactgaagtgagcagtattttcacc

SEQ ID NO: 286161 - DNA, 605 bp, Homo sapiens
actgtaggcctgtaccacagagcagggagatcccctttacccttctctaactatatactgtttttgcttatcgccttggcttgctaggctaacataatcaattgaagggcatttatttggatctagtctttccctatccagataagctctatgtgcctgaactttagaggtacaatttcttagcatttaccctattttctctatgccaggtaggaaactctgtcttgtatgtttaataggtcttatctgggagagagtttcctctccctacccccgtggtaggaaacctctgtattggtataagtttctgggctgggaacagttcaatattcttcccgcagaggcatgtgctttttctcttcatcttttccccagtaacaatggctctktacctgtactctggtggtgacagtgctgttgctcatttccctttggctcatgtgttttggtccatatgatggaaaagtctgagcatggctatgaatgaggctttatgtttatccagcagcagcagcctatcccctccccttctcctctaggtcagtacaattttgggatgtttccttcagtttcctttcttgcctccagtctttcttaatgtacct

SEQ ID NO: 286162 - DNA, 617 bp, Homo sapiens
ggcttgttcaccaggtacattaagaaagagcttgagagtagatggcaacttcacctgtgtctgcagctcccagtcttgagccccaccagttctaggtcaggaaggactagtttgagttgttctagtaaatatggacctgaggacacattacatgmaggaggaacaacgtatatcaactttcagaagcatgagagagcattttgctttaagaggacaagcaatagaattacactgagcagacagtacatttggtgctggactttggctgagactgtgagaaaaaagaggacccatgatcccaaatttcaggttacttgtggtctggaggttttttgtttgtttgttttattttaattacaaaatgtgctttctgatggagaggacaaattaataatggaaaatagtataaatctgaagaattcctcttgtgttatgcatggtttgtttgacccctacaaatcctatattgaaatgtgatcctcagtgttggaggtggggctcagtggaaggtgtttgggttatgggagtgaatcccttatgaatagattaatcccctgagaggtgagtaggttcttcctctagttgatataaagagtctgtcatctccagctctctct

SEQ ID NO: 286163 - DNA, 597 bp, Homo sapiens
cgtcaaccaatgtatccagtgtatccaaagatatatgatttgtcgaatgtattttgatatttagaagaattgytaatgacatgcgtatgctgtattataaagtttttaaaagcaggtcacaaataatgctttcaccatgatactgatttcgaaaaaatacatggtggtattttttttatttttacatgtgcattttgaaaattttcttctgtgaaaacacatttattttgtaatttgaaaaatttttaaaaagcttctcaaggtttgaaaaataagctattataattatacgagcttaccatgagttggtagtgatgtttttcttacaagtaaaataaataaataataaatagtgctcatagctatgattcctggcgtctctcaaggactataatgaggaaaaagtccaacctggctggcagattcttatgagtttttataggccatggtgtccctcgtatatgacatcttaagctgacctaaaaaggaataaattctgagaaaggtttacacagagtaagcttttataaacattgcaacatctttcccagtcttcatctcagcctagcaaacacctgtcaccttcacaagtgacat

SEQ ID NO: 286164 - DNA, 615 bp, Homo sapiens
ccttgtgtcaggcaccttgctaagtgctttatatagctcttgcatgttcaccacaatcctatgaagtaagtattctatttcctacttttctgatgaggagtgtgggtcttggagagcttaggttactggcacaagggcatataggttagcagcagcagcaaaataatttatccatccaaagcctatgttcttaaccaccataaaagatgcagctcaaaggttacttattttaggaaccctcttacttcaccagaaaagaaaaaaatttaccctctttcccctcactcagtgttcagatattttgtataaacttctcttagaggacttatcgtactggattgcaattagtggaattattttaattactttttatgkctgatacagttttgcagtcttggcaccaaacttacctgacacatagcaattgctcaataaatgtttgcagaaaaggaggaataatggatagaatgaataaacagtgaggcaaaacagcacagcccctgggccctttggacacagagacctggatgtctcctttttagccaactgagatgaggatatagctcttttcctttcattgaacacttgaaatatgtcagccagagaggctgagtc

SEQ ID NO: 286165 - DNA, 574 bp, Homo sapiens
aattaaagaagaggtgaaatacatggtcatttgctgttaggaatttataacagagcagaataaagagtataaaagcatgcataattactccaaggaacagaaaaaaaaaatcataaaaaaattcacaaccaattagaggtctgcatacatgctaattgccgcctgctaggggtgtcccatcaagaatggcaggcttgtccctgtgaataggagaagtgtgaatgagtgagcatgttggttctgaagtaaaaaaaaattcttatstcacaggttcaaattctccaggcttatgaatatgacacattaatattcattaagtggaacacattatcattttagaaggagattactggggactcactattttcattccatcacattttccaattaggagtcccacttttgcaaataatcagctttctgttgccaagggcttttcagttgctttctggcaagggggtttggagctaagttcaacattcatttaagaaacaggaaaaacctgaagtacaattatcttttttaatgacaggttaatcttgctgtagtgaacctgatcagagaagagccaaac

SEQ ID NO: 286166 - DNA, 574 bp, Homo sapiens
aattaaagaagaggtgaaatacatggtcatttgctgttaggaatttataacagagcagaataaagagtataaaagcatgcataattactccaaggaacagaaaaaaaaaatcataaaaaaattcacaaccaattagaggtctgcatacatgctaattgccgcctgctaggggtgtcccatcaagaatggcaggcttgtccctgtgaataggagaagtgtgaatgagtgagcatgttggttctgaagtaaaaaaaaattcttatgtcacaggttcaaattctccaggctyatgaatatgacacattaatattcattaagtggaacacattatcattttagaaggagattactggggactcactattttcattccatcacattttccaattaggagtcccacttttgcaaataatcagctttctgttgccaagggcttttcagttgctttctggcaagggggtttggagctaagttcaacattcatttaagaaacaggaaaaacctgaagtacaattatcttttttaatgacaggttaatcttgctgtagtgaacctgatcagagaagagccaaac

SEQ ID NO: 286167 - DNA, 436 bp, Homo sapiens
ccctttggtgtgtgtaatacaccatggggagggcgtggggaaggctgggagagccaccgcacctaggcaagtctgaccccagggaaaggaggaagaaggtgtcctaggagcaaggccatgggggagggatgcagagaggtcctcaaaccaaagtcagccatcagaggggtctgcgtctctgaggaacgggccttggagcagaggcaggcaaggatttcagaaagcagcccctggccagtgaagctccttggagcagaggactgtgcraccttctctggtactgggagctggtcacataccaggaagaagtgaactcagggcccgagggagtctgacctgtcatgtcatgttacagaaggcttggctgggaacgctctgcccccggccggacgtggtgttccaccgtgggccactggtaaattagggctctctgggc

SEQ ID NO: 286168 - DNA, 436 bp, Homo sapiens
ccctttggtgtgtgtaatacaccatggggagggcgtggggaaggctgggagagccaccgcacctaggcaagtctgaccccagggaaaggaggaagaaggtgtcctaggagcaaggccatgggggagggatgcagagaggtcctcaaaccaaagtcagccatcagaggggtctgcgtctctgaggaacgggccttggagcagaggcaggcaaggatttcagaaagcagcccctggccagtgaagctccttggagcagaggactgtgcaaccttctctggtactgggagctggtcacataccaggaagaagtgaactcagggcccgagggagtctgacctgtcatgtcatgttacagaaggcttggctgggaacgctctgcccccggccggacgtggtgttccacygtgggccactggtaaattagggctctctgggc

SEQ ID NO: 286169 - DNA, 589 bp, Homo sapiens
cttcagtaagggtcagagaattgaaccttatatactgagctacagaacagaggcttgggacttccagggtcgggggatggaggtggcaacacaggttgatggtaggatgagggaaggaaatgtatggtgaataaaggttgtcttgttatgcagataaaaagtccctcaggtcataaaagttatctgggagcaaccctcttcctgatagagatacttcactaagctaatgtagatttcctttatagatgaaaaatttcttttacaaaaggacggctttttcagagctactagctagtcctagtgcagacaccttcttgaataactagaccaaaatacgccaagaagtgtatttggaggtggcacattttggtctcctatggtcatgttttgcggtggtgtgtcctgagccccatcaratgcatcatgtgaccttgacgttttcaggccccctgccccagtccagacccttcccaccagccttgctggaatggagctctgaggctgggctcccagagacatggctgtaaccagattggagaccaaaagctggaggcgagccctccgatccagcctaccttttgggggcttc

SEQ ID NO: 286170 - DNA, 623 bp, Homo sapiens
gcccctagggtaagaactggtcccgcatccctttgcagaggtgtggctctgagcccctccatcggggtctggggcaacacggggcaaggggactctcggaggagaggcaccccgttctgggaagaggggggatacgggccaggggaggctggttcccggggctcccgggctcaccacagatgctctctggaagcttaggggcgtagggggctgggaccgtttctgggggcctgaaagctgctctacaaatgaagacaaactgtctaactcaggtgagaatcaagactttgagaggagggaaagtccaagaaaatccctgagagccccaggacatgtgctgttgggtgaaataattaagaaaacctgcccgatctcccacrgagacagaaatcatcccctgccgctccgggctgatcctcaccgtccagctcctaattcttcacagctgtccctgtgagaccactggaggggggtggggaccaaagcgtgaggccggaagcaaaggagggagtggagggacaggctcagagagatacgggaggagggggagacggcagtgcagagacagacagaaacagagaggcaagggagatggatggcgagggacacccagcatgagacag

SEQ ID NO: 286171 - DNA, 512 bp, Homo sapiens
aattgcctcaaaaggatagtgcaaagatgaacaaggatgaggaacatggatgtcctcactgtcattaaacagtcatgggagttgtcacatatgtgccctatgttttaagcataaagttgggagatgatgtctgaaactggggcttccacatccttgcactgctttgtgactgctggaggttcaagtcagggcaagttgtcacctcccagtaatggtgatccyctcaaacaggcaaaaaatagaaaagtgtgcaaatggggtgcatttattttaaggacatggggagcctaaaggaatggacagctcaggaagacctggacccaggaatgggaaatccagagagaatccaggaaggagcctttcccctctttctttctgggcccccttctctcattatcatttccccgtccacgtggctctctaggcagaccaaaggtcagaccttaaagagactctgttcaaccttgaacttccttgctgacatgttttcaattcaagtgtgtgtgacaaat

SEQ ID NO: 286172 - DNA, 605 bp, Homo sapiens
agattctgacacgtgttgcaacatggtaagcccttgaggacattacgctcaatcataagccagtcacgaaggaccaatgctgcgcgattccatttatgcgaggtgcctggagtcatcagattcatagagacagaaagtagaatggtgcttgccaggggctgaggggaagagggaatgtggagttagtgtttaatgagtacagaatttcagtttgggaagatggaaagagttctggaggcrgatggcagtgatggctgcacagtaatgtgagtgtgcagagtgccactcaactgtccactttaaaatgggtggccggcacagtggctcacgcctgcaatcccagcactgtgggaggctgaggcgggtggatcacgaggtcaggagatcgagaccatcctggcgaacacggtgaagccccgtcgctactaaaaataaaaaaaattaaccaggcatggtggcgggcgtctgtagtcccagctactgggaggctgaggcaggagaatggcgtgaacccgggaggcggagcttgcagtgagccgagatcgcgccactacactcaaaatagtaataataaaataaggggaaagcttcatgacattggactt

SEQ ID NO: 286173 - DNA, 606 bp, Homo sapiens
tccatttgttcacaaaggcctagaaacaatgatcagccgacgagtgataaacaccacaaatgcctcgattttggtctctaaattccatttttcaccaaaagaaatcaggctctttgaagaaatgtctggatccaggtgtggagcaggaaatacacaagataaacctggatcatcttgtcaaatctgagaacatgtacacagtcatggacggctgctattgggtcaaagggattctttgtaggaccgcagaaggctcctactggccaaaggtagtacaatatgagcatcaagaacagcagttacaatgcattgaagcataaaaaacacataaatatgtctaatccgtgagttcataatgataagcaaaaaaacatgagacaracgccaaactcatttttaacttttaaggctaatggaatgccagtttattattctgaaatctgtaaacaaaggggaaaaaattaaacatttatctggccttccctgaaggaactgtgcctcagggtaacaaagtttttggtgagaggaagtttctctttgtagaagtattttagttaacacgtggagaaggaatgataaagttggaagatcaccattttgaaacct

SEQ ID NO: 286174 - DNA, 619 bp, Homo sapiens
agtcttatcttttagatataaatgctaaagtacttatagactaaaatacttgctgtgtgggatttgcttcaaaagaatcctatcaggggaaggaaagaaaatggrcaggctagagatgctatgtattagctatgacgtgatgattattgagatgcaatgatggctgttttttataccttgtatatacatttggatatgttcaggacttttctaacaaaatgttaacaaaagaaaataaagttgttcttgatgtctcaggagcccacagatgtctgatgagaaggtatagcgtttccatccatggatagaacttgttagggtatacagaaaagactcaaacctcagttgcctgtcccccatccttcatgccagactctcatggtcaagatttccagaaatataaggactatctatgtagtttacatacaagtgggatgatatagttggggagaggaactcaaatatctaaagccctgggtaagatggggtagggggtggaatttaattgtatattggagataaccaccccaaaacttctttgactaacaggagaagaattttttatcgaactctcaatctgaagatcattaattttctaccaaaagtcagggtacacatg

SEQ ID NO: 286175 - DNA, 552 bp, Homo sapiens
agagacaaaggacagaactcaaagtcgtccctttgttcatctgagacaaatgcatacgtaattgtttcctctgccctgttgtctatgttatcttgtgtaaaaatgcagattcactgagccagacaaaggcatgaatgactatttccccctaccccattcacatgaaaattgtgtatttctcagtatcctaccctttcccttttgaatgttgaagccctcaaaatcatatttaaagaaaggcatagacctatctccccggtgcatgtccttaactttggcaaatacgtctcctaaaatgatttttttaattaaaataaataaattaggaaaaattctgcttctgggaagatggagtagacatatctttccctaatttcycactaagcacaactaaaactctggacattatatataaaacaaacacgataagtctctgaaaggtgatgaggagaaggtaggctggctaagtgccttaagactcaaggaatgatgtggtagtgagttctgtagggtttctttttgcctcatatatcctaaacttggaactgaaaa

SEQ ID NO: 286176 - DNA, 589 bp, Homo sapiens
ttctgtagcaagacagctatttatgtcaaataattcagcatagatgcagagagyttttgctttcattctgaaattagtgagttaaattcatcctgcttaaatggaccctttactaaactgtgtagcctcatgaatagtgtaaatgaaattaacttggaagggaagggttaaataataaacagtagtagcatataattaattttaaaattaaatgttaatttgaaactctattattatacttactatccttacttccctttcattcactagaatttgatcattagtttttctccttatcgcctttaatgttgtctccctgagccatctccttcactaccatgggctccaccaacaaccataaataacagttcacaaattataagatcagccatttctgcagagttttaggcctctgttgccatttttcccatgttcttctgtatttcttacagaaatatcagattccacatgtctaacgtgaacatgtgccactgtttgcctggcttagtcccattgtacatttttatctggcatccctctggatggtgactcctttcctctacgaaagtcctgagtttgcacaatacaa

SEQ ID NO: 286177 - DNA, 589 bp, Homo sapiens
ttctgtagcaagacagctatttatgtcaaataattcagcatagatgcagagagcttttgctttcattctgaaattagtgagttaaattcatcctgcttaaatggaccctttactaaactgtgtagcctcatgaatagtgtaaatgaaattaacttggaagggaagggttaaataataaacagtagtagcatataattaattttaaaattaaatgttaatttgaaactctattattatacttactatccttacttccctttcattcactagaatttgatcattagtttttctccttatcgcctttaatgttgtctccctgagccatctccttcactaccatgggctccaccaacaaccataaataacagttcacaaattataagatcagccatttctgcagagttttaggcctctgttgccattttycccatgttcttctgtatttcttacagaaatatcagattccacatgtctaacgtgaacatgtgccactgtttgcctggcttagtcccattgtacatttttatctggcatccctctggatggtgactcctttcctctacgaaagtcctgagtttgcacaatacaa

SEQ ID NO: 286178 - DNA, 598 bp, Homo sapiens
cactgtgtgcaagatcagtttcaataaggtagaaaactatctggcccacaagcagaatttctgcccggttactgcacatcagcgtaatgacctgggtcaactggacggcaaagtgtttccgaatccagaaagcgaacgaaacagccctgatgtcagctacgaaagaagcataataaaatgtgagaaaaatgggaatttgaagcagccttcccccaatggaaacttattttcatcccacctagcaaccctgcaaggcttgaaggtctttagtgaagctgctcagctcattgctacaaaagaagaaaacagacatttgtttcttccacaatgcctttaccctggagcaataaagaaagcaaaaggagccgaccagctttctccatattatggaatcaagccaagtgattayatttctggttctcttgtcatccataacactgacatcgagcaaagcagaaatgcagaaaatgaatctcctaaaggccaggcttcctcaaatgggtgtgctgcgctgaagaaagattctctgccattgttgcccaaaaatcgaggaatggtaatagtgaatggtggactgaaacaagatgagagacctgct

SEQ ID NO: 286179 - DNA, 599 bp, Homo sapiens
tcccttcttttcttgaccattgggaaacagctttctttctttatgaggcggctcataggcctctcatcctctctccagttaattactggcccatgatttgttctactacmgtgtgtgtgtatatatatatacacacatatatatacacttatatacacacacgtatatatacacactgtagtagaacaaatatacatatatacacacacataaagatacagatatgcataaatatattaatgcagatacatatactgtgtacatatatgtcacatatatactaaatacatgtacatatatacacaaatatagagctaaactaaactgtaggtcctaagggccaggatcccttcatattcattatctttgaatatatgtgtatgtgtgtataatatttgtcacatatagtaaatatatatcaaatatatatactaatatatattatatatacacatatgtgccagatatacagaatatatattataaacatacacacacacatatatacagtgagtcctacatctccatggattacgtgtctgtggattccaccaaatgtgggtcaaaaatatttggaaaaataaaaaccaagaaaaaat

SEQ ID NO: 286180 - DNA, 598 bp, Homo sapiens
ttatcaattattttactctattttattcaaaaactattgtaaactatgagttggcatgttgctgcatacgaaaaaaaggcattaatcaactctaaataaacamgtggatagatctatctaacaactatgaagtagttaatacatttataagcaattttattatagaaaggaaggctaaaagagtagtgcttaattatctggacttctctgtgctgggctcccttttgattgtattaatgaagcagctggcccattgtttccctttaattcctctattgttttaagaatatgtcacagctctttattcttttatcaggtgctgtgcaggaggatccacacaatacctcatattcctactgtatttgccaaggcacaaagaaacctccaaagcggttttcaaagaaggggcacccataatttataagttctattccttccactactccactgtcaagaatttcaacagtattggatttgaattcattataaaatttgtattaagcaatgtggttacgtatagatatatgtcctgtgttcatgcctagaccctgagatctaggcattaccacatgcgatgttgaaatgggacagttattta

SEQ ID NO: 286181 - DNA, 446 bp, Homo sapiens
ggcatgttgctgcatacgaaaaaaaggcattaatcaactctaaataaacaagtggatagatctatctaacaactatgaagtagttaatacatttataagcaattttattatagaaaggaaggctaaaagagtagtgcttaattatctggacttctctgtgctgggctcccttttgattgtattaatgaagcagctggcccattgtttccctttaattcctctattgttttaagaatatgtcacagctctttattcttttatcaggtgctgtgcaggaggatccacacaatacctcatattcctactgtatttgccaaggcacaaagaaacctccaaagcggttttcaaagaaggggcacccataatttataagttctattccttccactactccactgtcaagaatttcaacagtattgratttgaattcattataaaatttgtat

SEQ ID NO: 286182 - DNA, 520 bp, Homo sapiens
tcatttgataaagatttcatgcccatgcaagaggaatgtgattttttgctctagtttgcgcaatatgatctttccacagttttggargatgcattactattgatcattcctaataataaaataaatcacttcaaaataataaagaattaaacattgtaaaactaaatataatcaacaaatttaccaagttcctcactggcttattcagttgcaagatgacgctcagtcgttacatcattgtttatccacttccttcaccatttcactcatcattcctatattcttcaaacgctgcaggaaaaggaaacattcaaagctagtttcgccgggcgcggtggctcatgcctgtaatcccagcactttgggaggccgaggtgggtggatcacccgaggtcaggagtttgagaccagcctggccaacatggtgaaaccccgtccctactaagaatacaaaaaattagccaggtgtgatcccagcctgtaatcccagcaacttgggaggctgaggcaggagaatcgc

SEQ ID NO: 286183 - DNA, 590 bp, Homo sapiens
cactccactggcactggaaacacaggcagaaactcagatcaatcaagtaaccaggaactaaattgttcaaaaatgttcagatctacacaggtctcccgagttcattcaaatgaaaagacttaatatggccaaataaagtgaactccttcttagcagcaacttcatttcactaggtacttgaatttcaaatggggtttgttaagtagctttgctaggaaagtcgagaaggaagatcttatcccttgtgtttctttatgggtttttttttttttttttttttttggktttcctaaaatcatctcatatgaagccactttataaaagttatattcttattcttagttatggctaaaaatttcatgccaatgttctaggttcacagaggatgttttgtagtgaaaaaaaaaatgtaacctcattttttctcaatttttaaaattctgataaaatacacataagatgtagtatcttaaccattctcaagtgtatagttcagtggcattcacattgttgtgcaactattaccaccatccatctctagagctctttatcttgccaaactgaaattctatttatgctaaacctaaatc

SEQ ID NO: 286184 - DNA, 380 bp, Homo sapiens
gggggtgagggccatgggaatcttggactcctaggaatgactgaatttttttaaaaaagagagataaaggtcataataagattagttctgatgtctcagaacttggagaatggatgtgaggctatgcatgtcgggaaagaatagtgtggactcaccaggtatatgcaggggtgcagggtcctgatctcttcactcctctrtggataatatggaagctggtgggggtgttggagcatggcagggagtctcacatgaatcacccagatctctaagattgtcttgactctctttgccaaacagtgaactactccttaatgaaccagtcatctggcccctttgtgcctatcattcttcagttctggtgctttgtataccaagtc

SEQ ID NO: 286185 - DNA, 560 bp, Homo sapiens
agtttaatagacttccctgtaacaaaatgtggagaacaaatcaaatattatatgtaatttaccttatgcaaacttgcagcatcaagttttgaaatgttggtcaacttaagctctcatgagtaaagtttyttgaagaaatataaagtctattttcctttttaaaaagcccaaagtaccaaataactattatgcatttagtaatttggttattacaaaatgtttttatacatattgctttctttttttttttttttttaagacagagtcttgctctgttgcccaggctggagtgcactggcatgcttatagctcactgtagcctcgactttccaggctcaagtgatccccacacctcagcctcccaagtagctgggactacaggcacacaccactaccctcggctaattttgttttgttttttttgagagatggagttttgccatgttgctcagacttgcttttattcttataattccattatgtatggactttcaataaaccactctcacccagtacgtttccatgatttacccaagtttgagaaccagtatttgaaagct

SEQ ID NO: 286186 - DNA, 590 bp, Homo sapiens
aaatataaccagaataaatcacaagacattacgtatatatgtattgaagactgtctatatccatggggagtccaatattgttttcatgaacctatattcaccaaatctctccaaagttttcccagtaattagttataacatttgcttgcaatatagtcattgtaagaataagatatatactaacatagctagtttattactctttttactctatcctatagcagtgaaacattccaaatgtagtcctcargttgaataatgcatataaaaaacaatgaaatatttaaacaacttgatatttcacactgtaaggggatcagttatgtttccatcaactagtttaccaatttactcatttattcaaaatttaaaaaattttaaaaaccttctaaactctgctaggtgtttgaaatctaaaaataaagttaaaatatgattattatcctgctagatccaaatttaattgagaaactaaagtaatctcacctcaatgttgtaatgccaaagcaatattctgtaataagaaaatgaaacaacacattcttgctgagtattaagcatctataattaaatacgtataatgattcatt

SEQ ID NO: 286187 - DNA, 535 bp, Homo sapiens
tataaaaaacaatgaaatatttaaacaacttgatatttcacactgtaaggggatcagttatgtttccatcaactagtttaccaatttactcatttattcaaaatttaaaaaattttaaaaaccttctaaactctgctaggtgtttgaaatctaaaaataaagttaaaatatgattattatcctgctagatccaaatttaattgagaaactaaagtaatctcacctcaatgttgtaatgccaaagcaatattctgtaataagaaaatgaaacaacacattcttgctgagtattaagcatctataattaaatacgtatratgattcattctttagtaaagttaacaggtttggtgaactgttcagaaaacttctgcacattttaaaacctaatattaatataaatccagctattttataactatggcttccatcctgaacaattcttataattctaaaaaaggaggtacagttgaaaaagaagatgcggacaaaaatgtacccccacttttttttttctcaagaaagggatacttct

SEQ ID NO: 286188 - DNA, 565 bp, Homo sapiens
tgggggttgccaattggttttatccacggatgtatcatttctcatgcttccttttttttttcttacaaagagaaagaacctctctgtcaacaagcctctccggagtggaagattaaaaacctagacatcacctaccttgcagcgctactcccaactgggttgtgtaaaactcaattaaacgtgtccccattgaatactgcattacagtacattaaacagaaaattcttcaagcgtgatgacaaagcttgaaaccttgcctcaaagctgttccttgcagctttctttaacatttcagtctttatggtgcaagtctcccgttgacacaactttagtccagccatggaaaaaaaaaaatcacagagccccacagggattaaaagagaaaaaggggaaaagtgaagctggtcttggcacttccctgaagcctttattgaaactatactgccaacagacaactcggagctgmaaagtattctaaaggtctgcggtctaacaattgaaaatataattcccttattttcggcaggtaaattttacagatttcctccttatcaagaacattat

SEQ ID NO: 286189 - DNA, 601 bp, Homo sapiens
ggcagccaattttcagagtagcccaaaagttaatgtttaactttacctagagggtataatgttgtataaataataaactaatttaaaaggaaaaatttgcgttcatattttacgcatttatttaactattcagtaattcatagaaaatgtataaccattgtctaattttacagtattcttgaaagagggtgagtgcccgaactaaatatttagcagtgggaattataaaatcataaggcgattaagttagctagtcgcagaattccaatattgctttttaaatgacttcaggatataggaggtactaaggttattatctgttatcaggaatacagtggaattgtacaactggataataaccaaacaaactgacacaatgtaaaattacattatcagtgtgttaaaacaaaattgcgccctaaaggagtccacatgccagctcagagctgcagtgtaatyatgcttaactctgataattaaaatactacggagatcaacagaatcattttcattaagaaaattattaatgatggtggtataacagtaattgattgcagagcaccacaggataacgcgatgccgaaaacccatgtttcatgaa

SEQ ID NO: 286190 - DNA, 499 bp, Homo sapiens
agtcgatgaaataaacatgcaattaacaatttcctcatggtctgaatattataaccagtgtaataaacyaactcaacaaggagaattttatggttctggacaaattcaaattttattcctcggattttatttatcattactatgtaaataagttgcaatctaaaattaatagtttatttgggaatctgtctgagtactaaaacaaaattatttggcttcatgtagttgaaagccaaaaattcaaataaactttatatcatagaaaaggctgtatcagaggactttatttaatggggtgaagaaaatattttctgattttctttttatgactataaggcagatctgacaccattagttttctttctgtcataaatatagatgaatgtaatttgacaggcgtcactacaaaataggttatagataagttcaggcatctctccttccacacagaccttttatactcagttctgatggagctgcttgaatagaatgaccaagg

SEQ ID NO: 286191 - DNA, 550 bp, Homo sapiens
agagcaggccactgtcaactaaagaatgacaaggctcataaatttggaaaggagaagtttatttctaataaagtgttgcagcttgtatggtgaccattctaacaggctgggaagcatagcctacacccagaagccaaaaacagatactttgrgggtgggaagaataagacagggatttatgctgatcgaggtggtgaaatatacagaagctataggaggaatatttataaaaggagaaatggccgggcatggtggcttatgcctgtaatcccagcactttgggaggccaaggcagacggatcataaggtcaagagatggagaccatcctggccaacatggtaaaaccctatctctagtaaaaataaaaaaaattaactgggcatggtggcacacacctgtagtcccagctactctggaggctgagatgggagaatcgcttgaacccgggaggcagaggttgcagtgagccgagatcacaccactgcactccacctggcaacagagtgagactccatctggaaaaaaaaaaaaaaaaagaaagaaaggaga

SEQ ID NO: 286192 - DNA, 191 bp, Homo sapiens
tgttggctaaaaggggtaagtggcatcaaaggggcacttacaatgatatcaggtgaaaaagaaacactagaaagaaaatgggttcatraataacctgaaaagcagatgaaatcaataaggtttaaatggttgaactactcaactttaaaatgttttaactaaaataatgaaaattatagaaaattaagtta

SEQ ID NO: 286193 - DNA, 643 bp, Homo sapiens
  misc_feature (1)...(643): n = A,T,C or G
tatatttgatcaaccataaaagttatttaatcattttaaccttggaatactaccccacaaaacactacytaatggaagttagctgagacgcattagggtatcaaaacatcaagtcggcaaagcaagagggcctagaaaattcaagcccagcttattctgccataatgctacagcaggttgcgtggcaaccagtggctatggattttgaagttattttatccgtattcagtgaggaacgacttagcctgaattgattttagtaattttcagaattaatcaggttttcaagaattattacattagcagacattttctaggtttccacatttagaaatacgtatgtacaagtctagtttccaaaatagcactagttactggttgcctggttatttgattaataatacatattagatacctgctgataaatttgttacatcttgtgacttgtattaaagctggttattgtccagaattttaaagctgcttattttatgtgattttncactgttgaccttatccctaggagttttttgggttgtttgtttggttgtttgtttgattgtttgtttgttttttgagactgagtctcccactgtcatccaggctggagtgcagtgcagtagcatgatctccactcactgca

SEQ ID NO: 286194 - DNA, 599 bp, Homo sapiens
tctgaacctgctaaagacctaacattgctaaattggttttacgtggattttgcattactgaaaatttggcagaaataaaactacatatttcctccccctttacatatattggactactttaaatcaacaaaaattagaaaactatctgttctaaatcctgaatctggcagaaaattggatgcagcttaaagactgacgctgtctgaaatgtcatggcctcttccgtggctagagttctagtctgattgatttggtatcttacatttgaagtacatggttctctctgtgcttgaaagatgcagaattaagctatatcatgttaattcggtaactactttcgctcttccaacccccacccctgccaaggtgaatgaatcccagtttccttaggaaggaatattatcaaaatatgtgggckattcaagctagccaagtttagcttgatagaaagaaaataagtagcgggtgtgttgcatttaattatggaaggctgcaagattccaatgacatatttacctcatttacctagatgatattctaatatttattaggccatttgagaaacatctgcaacacttagataagatgtgctgcctcat

SEQ ID NO: 286195 - DNA, 598 bp, Homo sapiens
tctgtatcaaaatgtaaatgtattaatactgtgtcaggaagcacattgtttagtcaggtgacattgttttgtagcaacactttttcaatgaaggaaacaaagaattaaattatattatgactgatagtctggcagtaattctttattccccacaaactgactgtttcacataaacatccaacatatatgaccaaaaatagggagagtagaggcacyttacctcatggacattcaggttataactctcctttcatcttggaatgctgctttttgaaagaataatcccttgaagaaagctttaggggttagcctgaggaaaataatttttaactctttagtccacagctcattgactagaactcgtcatatggttccaccctaactgcgagagaggctgggaaatgtagtcttttgggttgtcagctagtcccaacaagattaggagggatctgacagttttgactttctctaattagccacaagtatgatccactagaactaaaaaattgactagctctgggattatttgggcttttaagagtaaaacctgtgtcatcgacctccatattcttataataattggagaatcatcatatta

SEQ ID NO: 286196 - DNA, 596 bp, Homo sapiens
atttaaaaaattgagtaaagtgatcctgatgctacaagaaagacgggatttgttgccaacgataaaatttaatctttcaaacaaaagttaaaattttggaaaatttgtttctgccaccatgagcataacaatttcccaagacttaaagactttaaaaatatatatatattttttaatttgggggggggttagtcatttatttacttatttatttcaacacaaagtcttgctctgtccgccaggctggagtgcagtggtgcaatcayagctcactgcagccttgacctcctgggcccaagcaatcctcacacctcagcctcccaagtagctgggaccacaagcatgtgccaacatacccagataattttttttatatgtagagacagagtctccctatgttgtccaggctggtctcgaactcctggactcaagtgatccacctgcctcggcctcccaaaaatgctggggttacaggcatgaaagactttaaaatgagatcagtagtgcaattaactaatgttgttttcatactgcataatgaaatgtgtcaaatgttgtaaaagctgcagaactcagtgaaccaatattttctaaat

SEQ ID NO: 286197 - DNA, 535 bp, Homo sapiens
cgctgcttccatcagccgctctgtggctgttcagcaggatggcgtgttcagccggggagtggtgtgtcatcaacccaatttggcagctgaggcaatgaacacagagccaggaccagamgacctgggggcatttttactcttgaaaagaacttagacattgatcaacttaataggctcatttcatggaagaagtagaaatgcagaaattgaaaatcttgccctggttcatgtagcctgtgggaattagaaaccatgattccaggctcctggccacctctctttccatggagggccccttgtggggatttcttctctagaatgggctccctctgaccacattttgtccatgtgtgaaatccagcatgactgctgatgccttccatgtgtgagtggtggccgtgggcagtgcctgatgacctcatctgatggacattcttttccgtcctcctcctcacccctctcccataacccgggtgcagaaacattcaggacattaaaccctgggaacctcaatttgagataagacctcttatgt

SEQ ID NO: 286198 - DNA, 535 bp, Homo sapiens
cgctgcttccatcagccgctctgtggctgttcagcaggatggcgtgttcagccggggagtggtgtgtcatcaacccaatttggcagctgaggcaatgaacacagagccaggaccagacgacctgggggcatttttactcttgaaaagaacttagacattgatcaacttaataggctcatttcatggaagaagtagaaatgcagaaattgaaaatcttgccctggttcatgtagcctgtgggaattagaaaccatgattccaggctcctggccacctctctttccatggagggccccttgtggggatttmttctctagaatgggctccctctgaccacattttgtccatgtgtgaaatccagcatgactgctgatgccttccatgtgtgagtggtggccgtgggcagtgcctgatgacctcatctgatggacattcttttccgtcctcctcctcacccctctcccataacccgggtgcagaaacattcaggacattaaaccctgggaacctcaatttgagataagacctcttatgt

SEQ ID NO: 286199 - DNA, 536 bp, Homo sapiens
tttaaagtgatttaatgctagtactagcccataacaaaaataataataattatgaccttagccctagagaactaggtaaaaggaccaaagaggtatgagagaagggagagatgagtgtgatctggggcagtccaggaagtctcatgggggaacttggccctcatttagtgttctaaagataagaagactctgatagggcaggagataggagaaaggcacttcatgtggggtgaaaaaatgaggaaatatktaaaagcaagaatgagcagagcccacgtggagatagtaggatacctgacctggcaggagaagagggtttcccttggaattcagtggtaaatcagcatgtggggcagcgaggggtctagagagatttggcttgatgtaagagaaaatggggaaacatgtatatttggttttcagagaaattctacacttaaaaaaaaagatgcttcagaaaggttaatctgacattaatataatgatttggacaggggagaagctgacaataaagttctgtattactgagaggtgaa

SEQ ID NO: 286200 - DNA, 591 bp, Homo sapiens
gatatatgaactctgtatttttgtcatttgatatagatgtagatatagacatattagagaagaatggcacttacccaaaccccaattgttccaaatttatgttttttggagtttagatatcttatttccaaaataccaaaataatacagagatacagtgattttgatgaacattttggcccatgtttggtgtgtgtatgcctgtgtgtgygtgcgtgtgtgtaatctctaagaacacacacacacatttttcttgcagcacagctattccttcagcatcccattatcatctgcagcccatgagatcactctttccccaagctctgtaactttatatggttccattacatagttaaacatgtaaaaaaatcttttagagcatgcaatttttaaaattcttctagcaattagactcctgaataaataatttcttctgcatacacaaagtatatttaacaaaaatgtagcttattttattcacttagcaatagtctaaaaatagctaatgttcctcaggctaatgttataggcttaatattattctaagtgctttagttaaattgacatttataaccaacctaggatgtaggta

SEQ ID NO: 286201 - DNA, 591 bp, Homo sapiens
gatatatgaactctgtatttttgtcatttgatatagatgtagatatagacatattagagaagaatggcacttacccaaaccccaattgttccaaatttatgttttttggagtttagatatcttatttccaaaataccaaaataatacagagatacagtgattttgatgaacattttggcccatgtttggtgtgtgtatgcctgtgtgtgcgtgcgtgtgtgtaatctctaagaacacacacacacatttttcttgcagcacagctattccttcagcatcccattatcatctgcagcccatgrgatcactctttccccaagctctgtaactttatatggttccattacatagttaaacatgtaaaaaaatcttttagagcatgcaatttttaaaattcttctagcaattagactcctgaataaataatttcttctgcatacacaaagtatatttaacaaaaatgtagcttattttattcacttagcaatagtctaaaaatagctaatgttcctcaggctaatgttataggcttaatattattctaagtgctttagttaaattgacatttataaccaacctaggatgtaggta

SEQ ID NO: 286202 - DNA, 628 bp, Homo sapiens
tggggctgctttttattaaaaggaaattccactgagagctcttttgccctaactgcctaaataatttctttttagctcctgtattactatcagttgacttagatgccaaggactttgggtggaaaataatgatccctcttcaccaggaagcagatgctcagctttgtggatagtcaaaatgacagccacaaaaaccccctagcaagatcactgagaaaaagaacaacctgtaattgctgagtgctaactatacggcaggcatttccttaaatctttaacttcatggttttatttcattagcccagaagccctctaatgatgyacagtagtcattgttctcatttttgagaagaggaaatgaggatttggagatgttgaaacattggcttgagatcttctaagtggcgagtggttgagggaattaggagcctataacagctgccagacaatctgactccagagttcatgtccccaaggaggaaaccacattgctgaggagtcccactgagggagtggggccgaaagggtagccctgaggctttcaggttctgagcccatggctagagaagaacctccatcaaagaactcatcatcaaaacacagctgtgttgtctgtgatcttctctga

SEQ ID NO: 286203 - DNA, 585 bp, Homo sapiens
tgaagcctcttttagtataaaaatattaaattatctcaagttagagacacttctctattaaaaaaaggaaaatttacttagtttcatctcgcttcatcatatgtgatgtgtgaaggctaggatgtttaaatgtcttaataagttacttcaaatatttctgtcgagrgcatacccaattctcattttttcatagttttgttaaaaaattaattccttagcaatcagaaaccataaataacttttaattttaggttttaaaatctaattttcactttttatgactttttatgttttattacttacttgttctaaagtatcctccaaacccatttttttatttagggctttattaatttcttcttcagtttcattcaggagttccttaagaggtacctataaaatacataggaatgtgggtgacatataacatttaattacaaaatatccctcctgaagcatctacacactgtgataggaggagtcacttttggagaaaaactgaagttataacattttaaatctaatatactgtcaaacagaaacaaaactagtttttaatcaaatttctgtaagtgtagactataa

SEQ ID NO: 286204 - DNA, 520 bp, Homo sapiens
ttcacaacaaaaaggcatgtaaattgggagaagggaatggaagtaaatgttctaagatccatgcactgcttaagaaggtaaaaaaatacaaattgttactagatactggcatgtcaagtatacacgttacaaatctccaaggaaatcacttagagaacagtgaaagattgtataactaccagaaaatgactattagaaacaataaatcaaaaaggaaaacaggaaagagaagggaaaaaacagttagatcatacagaaaacaaaacagatccaaaaccaagtgaattggtatatgtaagacctaaactttcaaygagaagacaaagattatcaggaaaaaaacgataatgccatttacaaaagatacacttaaaagaatatatctatctatctatctatctatatatgcaaacactaatcctcatgattcccaaagtggctttttcatgtcattcatagggaaagttggtatactattaccaaagtaaactttaaggcaaaaacgttactagagaaaaag

SEQ ID NO: 286205 - DNA, 493 bp, Homo sapiens
cttgtctgcttgcaagatgggcccttcgcagacatctgtgagtttagatttcaggagggttctcacctttaactgatatgagtggctcacattgcctaaaccactgcactaatatggtttatgctacacacttgcttttcttctgaaaatctggtatttgctaggcagaggctgcctatgtgaccacaccctaacaaaaaccctgaatgctgagtccccagtgagcttccctggttgacaacattttatacgcattgtcacaatttattgttggggaattaagcacatactctgtgacttcaccaagacagaatccttggaaagcttcctctgtgtctgctttcccttggacatcaccccatgagctttttaccttgmtcatttcactttgaatccttttgtttcaataaaacatagctatgagcccagctatatattaagtcctgtgagtcctcctggtgaatcatcaaacctggcattggtattgggaacc

SEQ ID NO: 286206 - DNA, 575 bp, Homo sapiens
tttattcttcagggaaagaagaaaaggtctagaagtgagagacacagcactactaaaagtgtcactgaccaggcgtggtggctcaaacctgtaatctcagcactttgggaggccaagaaagcaggatagcttgagcccaggagttcaaggccagcatgggtaacatagtgagaccctgtctgtattttaaaatctaatcaattaaatgtaaaagtgtcactgaaaataggaaagtgtttattgaaaataggaaaatcacgtggaaaattatatactaaatatgaggaccgcccccctacaaacataaatggtctttctcagcttggttcccaaaatgctggcagctaggtcttgtacccttttagcaggtgactgaaaggctccactccggggaatctgaatagccaaagagayaagacctaaaaattctcatatcataattaccccaaggaaattttcaagtgccctattcttcaatgttagcaaatcactaattatataacagaatatctaataaaaaaacaacatggaggaaacaaactatgaatcaggaaaaacgctgtaagaaaaacccc

SEQ ID NO: 286207 - DNA, 610 bp, Homo sapiens
cctcccgcccccaagtctacacgcgcatcccttcctcgccccttcgcgtacctgacacacacasgcgcgaaatcccgcgtagtccgagcgctccccgacctgcagaggccggtccccgagctcggactccttttcgcgccgatcaaacaagtacaccgtcctgtggccgacgcctccgccatcctcctcagtccccacagaggccccaccaggcccgccgccgtccgccgctgccatattggggaaaaggagaaaagacagcgacgcctgccgccgccgggctcagggctgaggtgcgcgctccgcgcggcgccttcagctccagctcccggggcggctcgaggcctcggcccggcgcgctgcagctcctcgtcagcggcggcggccgagcagcggcaggcgcgaggatcacccgggaaccgattcaaacgcgctcctgcccgtgcaccacgtcacttccgcggcccgccactcctgaggagaaggggacgcgcggcgcgctcctcaccgggcccgggcccagcgcctatcgccgcccacgcgagcctcacggtgcgacccgcgaccagcgccgccgccgggactgtggcgcaggaggaagagcggtggc

SEQ ID NO: 286208 - DNA, 614 bp, Homo sapiens
attgccttctgtgagccaatctcatttccataaccacctcctctctttcctttgcacaatgcaaaaggtagagatttcatgcaatttttatgacagtgacttagctcccctcacagccatcatcaaatctacaggtatattggagtgactcctgtgcttttgcatgcatattaaggactgtgtacagaacttattctaaattgaaaaatgatgcttatcttctagtttcttctattataggaataaaatagttatgttggcacttagaaaaaaagttcaaaaaaagcatcctaggcatatacattttgcatgtgattaatgtgaggacttcttatcaaagttatatctattaaatctctcaagaattccttaattttgtttctttttaatttgtgcaagctggakagatcacatttaaaattttaccaaaataagttcaagactcaagaactcgatccattgttgccaattgttctgtgtagtatgtgttcaaagtacaaaataatattaacactaatttggattcaaatgatctttctccacaaggcaaatgacattttaagacatattctgggagctggatcttctgtttagatgctgctaatagggagaca

SEQ ID NO: 286209 - DNA, 2172 bp, Homo sapiens
ctgttttttttcatgtgaaagaagcaaattctgtatgatatggacaagcacaatcttctatttyttaaagattttaaaataaaacatctaaaagtaaatattgagatttaaactgatgagaaacagattgggtattgcctgtcaaagccccaaaggctacaaaataaatgacaaggtaacagcagcctcagatcattgaaatgcaggctgtgttcactgaaatttcatatgcatgtcttccctccactgtctccttaacagatgtcatcaaatcagatatacagggccagaaatgaagtgcaaatactaccccaggagctactgagacccaaagctacaggctccccaacttgtgaactacaaatgtgcaacwcttcatcctgaagaggagattgttatggcgtctactgtttacaagtttaacaacttggtcttttgtggttctttaagatttttgcggcatgaggtttaaaaagatcagttaatcatcttcatggcaggcaaattttgaggaaaagagaaaagataccggaaaaagaaatcaagtttcctttgctagacgccattacagaatgttcctacagagaagaaatggcaagtgcatagatgtccgcaatccaacaacaaagtgtgaaactgggaatggctctgtactagagttagctatcttccagtctagcaatttccgtagccctgctataattgactagcgggattaaggacaaatgaagctgcctggacttttatttttttatcgtgactaagagtatatatgtagaataattwtaaagagggcacctcggcggtccattctgatcagaaactggaatgttgccagctctcagaacttagtgtttgcttcctccaacctcatgttttactacctctggttcattcctaaagaaaataatgtagtwtgacactttacctctgtgttctttctctctaaaaaaaacatcgcccaaacataatcatgagaaaaataacagaaaaaaacccaaatgagaaacattctacaaaacacctgaccagtcctccttaaaactgtcaaggtcatcacaaaccaggaaggtctgagaaactgtcacaggcacaacgagcctaaagagacatggggattaaatgtaacgtggtctcctgaacagaaaagagatwaaaaaaaacaaaactaaggacatctgaataaagtatggattttattttaaaacaatatatccatattagttcgatatctgtatgtgttctatttgatgaacggtttctcacttggcattctttgttttagtgacttatttgtctaagcctatgggctttgatatctagaagtccaggcaaaatcattactaccttctgtttctcttacatgtatcaatactgccccctgacacacacaccaaatccacacaaggctccaaggtacatatcctaatacaacaagaggaagatataaactttgtctgcaacttaagccctggaatagacaatactgctcatgaggatagttgaaatccatgataggccaccaaagctgactgtggtacctctttccatctctcctctattagwgattttaaacttattgttgtttgaagatataaatatttgggcaagtaagaggatatggaagacacattgcttaaagctgatgacggtgtgttgaattacatatagaattcctgtggatagaccctaactgaagagatatctggtctgactccttattttgtagctaagccacttcagaaaatgtaactaatcagccacaaatcgcaaagctggaaacagaaattccctgttttttgacaccaagtctgaggtctttccaatgtaaagcactgcttcccaaggtactattcccagagagaatttattctagtattttcatttttcaaccgtgtttttttttwaaaaaaatagtatttccactctggtttgtattgaagtgaatagaatcccaattatacttcactttatggaaatgcaacacatgaagagctttttgtatgagcttttcatttctggttctctttgtcacaaaaggctcttcacttttgtagttgaaatcatttgtaattatgaactgtgcttttaaaaaattcatcaatgaaatctttgattttgaaatgaggtgccagaagaaaggcagaagtgggataagtggaatttaatgca

SEQ ID NO: 286210 - DNA, 517 bp, Homo sapiens
catatcacaagtataatctgcataaaatgtaatcaagcaaataaatgacaatgagatggatgacccctgtccattccctcatacycttctcctttgccttgcactataaaagcagggaagctaccacttcacttccaagcttcccttgcagctagaaatggacatactatgtgtgattctggcctctgagatgtcagtggaaatctggggaggggacttctggtaaagacttttccttccccacaaagaagggacaggcacagatggtgcaaccttcctcccttctctgttctttctactttgaactcagaaataatgggaagtgccacttttcaaacatgaggaaaaggtcattgcttaaataaaattacagcaactgcattccttcagacttattactgggagggaagaaaaatagccacctattgtttaagccattgctgtttctggtaggtggctgaaatgaaaccataactgatatacatagaagctatcagatgttccctgttccttgaga

SEQ ID NO: 286211 - DNA, 607 bp, Homo sapiens
gcaacagagtgaaacatcatctctactaaaatacaaaaaattagccatgcatgctggcagacgcctgtagtcccagctactcaggaggctgaggcaggagaactgcttgaacccaggaggcagagtttgcagtgagctgagatcgcgccactgcactccagcctggatgacagcgcaagactctgtctctaaataaataaataaataaataaataaataaataaataaataaatcaaaattgttttccactgatgagtaaaagcctaaattcagcatatattagttagcttattgttgtcagtttacaaaaatgtcagtggtccaaaggtaaacataagacagtcatagactacttgtggttgtatgtctattcctgaaataaggagaggagcagttagacaagaacacactttacttttaaaattatatcttaagaaaaaaaaactaacacaaatttagtgttgcaacatctcttatgagttttgaaatagatgtgtagacagcaatcatgtgaraatcagacaatctggaaggacattattcgtcctctgaggataagctcaattcaactctactagtgtttatgtctcctggctgtttagcatg

SEQ ID NO: 286212 - DNA, 605 bp, Homo sapiens
gctatattttttccttcttatccatttatcacacacctctgaactgctaagcattcttaaaaagttcttaattgttccatctccaagctgagctgcagtggcaattgcaaaggcataatacagtgcagtatttctctcaataatctaaccttcattaggtttaatgggtgagaataatggttataactcaggtggaaagagaaacctgctacctgttgtgccaaactcttaacttttccagacaacattcagtcaaactaagggggtatttttttaaaagacagaatagatatatctatcaatctatcaatccatctatctatctatatctatctatatctacatatattttttccagatgatactgtagacttatgatacaggtggctraagtcccacaagtttcctttctgctcactgttctaaagccttgacatgcatggaatagcagaggagagcaagaactgggggtgtgaactacagccccagcacactgagtcaactgttcttgatataaaatgtaacctgtgtgatcatcagcattgatcacagcaggaagcagacagcagggaaggaatgtcttgtggtgccacaaaaaaaaaaaa

SEQ ID NO: 286213 - DNA, 553 bp, Homo sapiens
caataatctaaccttcattaggtttaatgggtgagaataatggttataactcaggtggaaagagaaacctgctacctgttgtgccaaactcttaacttttccagacaacattcagtcaaactaagggggtatttttttaaaagacagaatagatatatctatcaatctatcaatccatctatctatctatatctatctatatctacatatattttttccagatgatactgtagacttatgatacaggtggctaaagtcccacaagtttcctttctgctcactgttctaaagccttgacatgcatggaatagcagaggagagcaagaactgggggtgtgaactacagccccagcacactgagtcaactgttcttgatataaaatgtaacctgtgtgatcatcagcattgatcacagcaggaagcagacagcagggaaggaatgtcttgtggtgccacaaaaaaaaraaagaaagaaagaaagaaaaacagaaaaaaaaactacctggaaggaaatgccaatggggatgacattaaaaatagaccaaatgaccat

SEQ ID NO: 286214 - DNA, 593 bp, Homo sapiens
aggtaaaaagctctcatcttaacctctagtttgaattcatggaactaaagggcaggttaagcccagcttcgaatattcaatagcatttaacacattttcctatttcttctccaggataaacattcacaacatcttcaactcatccttctatgataaatctgcaatcctgttcctagttgcttttttttttagatggagtttcacccttgtcacccaggctggagtgcaatggcactatctcagcttactacaacctcctattccccagttcaagtgattctcctgcctcagcctctcgagtagctgggattacaggcatgcaccaccacacccagctaaatttttttgtagttttagtagagacggggtttctccatgttggccaggctggtttcaaactcctgacctcaagtgatctgcccacctcggccttccaaartgttgggattacaggtgtgagccactgcacccggccctgctcttcaacttggtcttttagactagaattccaaagaactacccctgaccccttcaattcattacaatgtttgatggttttttttaaaacagaaattctacagtgtttgtgacat

SEQ ID NO: 286215 - DNA, 593 bp, Homo sapiens
aggtaaaaagctctcatcttaacctctagtttgaattcatggaactaaagggcaggttaagcccagcttcgaatattcaatagcatttaacacattttcctatttcttctccaggataaacattcacaacatcttcaactcatccttctatgataaatctgcaatcctgttcctagttgcttttttttttagatggagtttcacccttgtcacccaggctggagtgcaatggcactatctcagcttactacaacctcctattccccagttcaagtgattctcctgcctcagcctctcgagtagctgggattacaggcatgcaccaccacacccagctaaatttttttgtagttttagtagagacggggtttctccatgttggccaggctggtttcaaactcctgacctcaagtgatctgcccacctcggccttccaaagtgttgggattacaggtgtgagccamtgcacccggccctgctcttcaacttggtcttttagactagaattccaaagaactacccctgaccccttcaattcattacaatgtttgatggttttttttaaaacagaaattctacagtgtttgtgacat

SEQ ID NO: 286216 - DNA, 617 bp, Homo sapiens
gaaccactgacaccatttaacaagaatatcaaggatgaaaagccaagtcctgcttcttatcaaggattaagtccaggggaagttctccacgctgttccatgaacaaggcaaactcatgcccaaaccttataaaatattgaggttagaacggatgcttgtgcttatctgtccatgcccttgatactccagttctaagaataagcacccaaatgactttccaaaggtaatgatactaggacacagaggacctgggagtagaatttagatttttctcttctcagaattatgaatgytatctccattcatcatagaaaacagaggttaaaaattttaatccacccaagtttattattattttttggcactaaagagaatcatcaacagtgttgagggtaatgagaagatataattaaaattatcttcacagctctgagctcaattgcttttgctcaatagagcagaaggagaagaccatctggtccttgaacaaggataaaatatgagtgaggtggccaagaatggcaagaggaacactgcactagaaatattaagctccagcttcccgtcttgacttatccacttgtatacgatgttatctgggtatgtcacgtgaaatg

SEQ ID NO: 286217 - DNA, 496 bp, Homo sapiens
cgctatccttttgtaactaaaaacctcttgtgatatgaataaccatacactaacatactttgttaactgttttcatacactggatttgcttgaagaaagattatacttgtgcttttataagaaatggggcgaatatgtgtaaatatttacacagcatataatttattattagattaacttaaagaaaatagctagtgattttaaagtttgagctgattgtaacttaaaaagttatccttaccgtgctaygtatttcaatctatgaagcagtgtctgtattcctattttaacaaatacactgtggttgcttggtatccaaaatgttgttatagccattgggccagttcaggttcttgactttgccacacaggagaatttgagagttagtccaaaatacaaataattcctcataaaacgaaagtacattctgatggctgatcagagggagctgctcaaaggtgagacggcggcaccaattgacactggggaaactccc

SEQ ID NO: 286218 - DNA, 1128 bp, Homo sapiens
gatttgaaccaaagttgtccatcgacagaggtatatctgtgckttagtctaaaccactgcactatgctaccttttgcaaagagcttactgagagtccctgcaaactaacagccagttggctttgcttcaatcagcttggtcctgtctctctgtctctccatctctctctctctctctttctctttctcctttttaaatcaaatcaatatcttcacatataatgttggatctaatgttcttactgtatctaaacattcgtccaatgagcagtcttcccaagataggctgatgtgctgacaaatctctgtcctcataaatggaaatgagaccaaagtgctgggctagaagccacgttccttcttccttgtcctttcctggtatcccactcaccttatgtatctttcacagtgtagaattcatcaaagaagaaaaatcagccctcatagtacagctggtattttcactgggaaaatgattccagatctcttttactaaattactgcaaccttcagatcctcagatttctccagttatwctgaggcatgagaattgcttgaacccgggaggcaaaggttgaagtgaggtgagatcgtgccattgcactccagcctgggcaaaagagtgagaccctgtctgaaaataaataaataaataaataaataaataaataaataaataattaaaaaatccccagttacctataaacacataatcttattagacaatctattttcattgtatccttggcccaaaaatggtttaataaaattacagttatagtaaattacataaattgaacaagtaattgcatccacaaatgtaaacagtattggcaaaatgatatatatatatatatatatatatatatatatawaattttatattatatatataaattacataaattgaacaagtaattgcatccacaaatgtaaacagtattggcaaaatgatatatatatatatatatatataaaattttatatatatatatataaaattttatatatatatatataaaatttgacttgagagctattgagtattttatagttggaaagtccttaaattctcacctagaaaaatctctcagatttatttaaacaaaaacagtctaaatatatggca

SEQ ID NO: 286219 - DNA, 529 bp, Homo sapiens
caggtttcaggcctatttttattggccaatcccaagacaacagtttcccatactgaggggtccatttggttcttgttctcttcaggaatgtatttgtttcaaactgtgacagttcaagagtgccaataagtggattctttgttctggttccatttctaattgaaatttgatcccttccaaggaaatggttgctccaattttacttaataagtctctacctaacaataaattaggacatttagggacattcaggaatgaatgagtagtaatactakaccctgcctcacaagcaagaaggaaagtaagttgccttactttagaccacctgtctatccctgttactatgcagttacaattggaaagtgggtcgacagactgagtcaagaaagagtaggtggctcgcatatccacaaggaactcagttcttctactgccatgtagaaagtgacttaaggctctgctaaagagatgatgatggagcatgttaaagtcagatccaggcaggatccttgggtcacattactcagtg

SEQ ID NO: 286220 - DNA, 592 bp, Homo sapiens
ttatgaagtacagaagcgtatctattaatttaacacaagaaagttcaaatttaagaaggagatggactgatacatgtcctaagaagtcaggctgcttaattttcactcctctattgtataagggacagggaagaaagtgtgcatgcttgkgataagcaaagatgtgggaaaaaattgacccatagggttgcaatgattgctgcactccagtagcactcaaagaggtctcacaatatgataaggattgttctaacaagtcttgcttgacttctgcatcatgaacctcaacatacaatccctcatctccctatacttctcccaattctgcaacctagtcattaagaatatgcaaagtaattgcatatcaaaagccacctatgaagtattaaagacaaaataaaccagtgtaaaaacccaaatgaaacaaagctattatgattagcttttcaaaatgttttgaggtaattgtttaattgagcagacatctgtttggtaccagcagtaacacaaaacagttttatttggtaacttaaagaaagttaacctcaaaatcaaaacaaagcaaaacagttaagatggttgcaatttactg

SEQ ID NO: 286221 - DNA, 554 bp, Homo sapiens
aggccatgcatattttttcacacaaaatgtattgggacttakgcttgagcacaagggagacagcacagaaggaagagttctccagctggctctccaaaagaggctggcctgggccttttattgaactgtgtaaggggtttgatgtcagggatctctgcctctggaagtgatctttccattcttccttgttatgatgtccaaacatgcctggcccaggttaaagtcttggttatcctcagtgggttcaagatgatggagttgctcactaccaccacccccagaaagctgcctagcagtcattccagagtctcatgcacatgtgggtcataggatcacctggcttggggatgatttatggtgaaatattgtttatcttagcttcttagctcagtgacacaggatcttgaggttagcacatatgggaaatgggggtattggggttgggtgctatccctaacctctcccaatttctccttctcctttgttccttttttgttgcttctttttgttttttcctctccagctcttggtgccccaaagttttttcctcagta

SEQ ID NO: 286222 - DNA, 592 bp, Homo sapiens
ttatgaagtacagaagcgtatctattaatttaacacaagaaagttcaaatttaagaaggagatggactgatacatgtcctaagaagtcaggctgcttaattttcactcctctattgtataagggacagggaagaaagtgtgcatgcttgtgataagcaaagatgtgggaaaaaattgacccatagggttgcaatgattgctgcactccagtagcactcaaagaggtctcacaatatgataaggattgttctaacaagtcttgcttgacttctgcatcatgaacctcaacatacaatccctcatctccctatacttctcccaattctgcaacctagtcattaagaatatgcaaagtaattgcatatcaaaagccacytatgaagtattaaagacaaaataaaccagtgtaaaaacccaaatgaaacaaagctattatgattagcttttcaaaatgttttgaggtaattgtttaattgagcagacatctgtttggtaccagcagtaacacaaaacagttttatttggtaacttaaagaaagttaacctcaaaatcaaaacaaagcaaaacagttaagatggttgcaatttactg

SEQ ID NO: 286223 - DNA, 554 bp, Homo sapiens
aggccatgcatattttttcacacaaaatgtattgggacttaggcttgagcacaagggagacagcacagaaggaagagttctccagctggctctccaaaagaggctggcctgggccttttattgaactgtgtaaggggtttgatgtcagggatctctgcctctggaagtgatctttccattcttccttgttatgatgtccaaacatgcctrgcccaggttaaagtcttggttatcctcagtgggttcaagatgatggagttgctcactaccaccacccccagaaagctgcctagcagtcattccagagtctcatgcacatgtgggtcataggatcacctggcttggggatgatttatggtgaaatattgtttatcttagcttcttagctcagtgacacaggatcttgaggttagcacatatgggaaatgggggtattggggttgggtgctatccctaacctctcccaatttctccttctcctttgttccttttttgttgcttctttttgttttttcctctccagctcttggtgccccaaagttttttcctcagta

SEQ ID NO: 286224 - DNA, 554 bp, Homo sapiens
aggccatgcatattttttcacacaaaatgtattgggacttaggcttgagcacaagggagacagcacagaaggaagagttctccagctggctctccaaaagaggctggcctgggccttttattgaactgtgtaaggggtttgatgtcagggatctctgcctctggaagtgatctttccattcttccttgttatgatgtccaaacatgcctggcccaggttaaagtcttggttatcctcagtgggttcaagatgatggagttgctcactaccaccacccccagaaagctgcctagcagtcattccagagtctcatgcacatgtgggtcataggatyacctggcttggggatgatttatggtgaaatattgtttatcttagcttcttagctcagtgacacaggatcttgaggttagcacatatgggaaatgggggtattggggttgggtgctatccctaacctctcccaatttctccttctcctttgttccttttttgttgcttctttttgttttttcctctccagctcttggtgccccaaagttttttcctcagta

SEQ ID NO: 286225 - DNA, 592 bp, Homo sapiens
ttatgaagtacagaagcgtatctattaatttaacacaagaaagttcaaatttaagaaggagatggactgatacatgtcctaagaagtcaggctgcttaattttcactcctctattgtataagggacagggaagaaagtgtgcatgcttgtgataagcaaagatgtgggaaaaaattgacccatagggttgcaatgattgctgcactccagtagcactcaaagaggtctcacaatatgataaggattgttctaacaagtcttgcttgacttctgcatcatgaacctcaacatacaatccctcatctccctatacttctcccaattctgcaacctagtcattaagaatatgcaaagtaattgcatatcaaaagccacctatgaagtattaaagacaaaataaaccagtktaaaaacccaaatgaaacaaagctattatgattagcttttcaaaatgttttgaggtaattgtttaattgagcagacatctgtttggtaccagcagtaacacaaaacagttttatttggtaacttaaagaaagttaacctcaaaatcaaaacaaagcaaaacagttaagatggttgcaatttactg

SEQ ID NO: 286226 - DNA, 667 bp, Homo sapiens
gaactgtgtaaggggtttgatgtcagggatctctgcctctggaagtgatctttccattcttccttgttatgatgtccaaacatgcctggcccaggttaaagtcttggttatcctcagtgggttcaagatgatggagttgctcactaccaccacccccagaaagctgcctagcagtcattccagagtctcatgcacatgtgggtcataggatcacctggcttggggatgatttatggtgaaatattgtttatcttagcttcttagctcagtgacacaggatcttgaggttagcacatatgggaaatgggggtattggggttgggtgctatccctaacctctcccaatttctccttctcctttgttccttttttgttgcttctttttgttttttcctctccagctcttggtgccccaaagttttttcctcagtaccttcactctaaatrtactgttttgattttctcaatctctcaaggggctctgatttctgccagtagctaaaggaaagagtatcatgctattctctttgaaaaactttctgttttaataagaattagtctgacttgaaacaattaattgttaagtgtgtattggtatgcctaagacacagattaacggaagaattatttgctaagatggggacaagggtttcctggtataccttag

SEQ ID NO: 286227 - DNA, 512 bp, Homo sapiens
cttaacccatatctagaaataggtcctcattaaactctatttcacttttaatacaggaggtagaaagaaattatttaggcagatagtgagggtaaaagagttgtcgrcagggctttctttctaacaaaaagcagccccaaaatagtttctttcctaacaaagaggagcctgaaaaattgagctacaaacatagataagcaagctgaaagcttgcacgggtgaatgccaggagctgtgccaacaaaaaagtgttacctggggaccaagcatatccaacgtgaaggctccatcttccttttttttgttaccatgtgtacattaaaggaatgggcaacatggtaccagccaggcagagaacccatctacataataaaagattagggtgggggcagccagcttttcaagccctatgcaaatggcacacctagtcctaatcatttttttgtgtcctatgcaaatggcacacctggtccaaccaatcttttgtaccctatgtaaatcagacactgctt

SEQ ID NO: 286228 - DNA, 406 bp, Homo sapiens
cttaacccatatctagaaataggtcctcattaaactctatttcacttttaatacaggaggtagaaagaaattatttaggcagatagtgagggtaaaagagttgtcgacagggctttctttctaacaaaaagcagccccaaaatagtttctttcytaacaaagaggagcctgaaaaattgagctacaaacatagataagcaagctgaaagcttgcacgggtgaatgccaggagctgtgccaacaaaaaagtgttacctggggaccaagcatatccaacgtgaaggctccatcttccttttttttgttaccatgtgtacattaaaggaatgggcaacatggtaccagccaggcagagaacccatctacataataaaagattagggtgggggcagccagcttttcaagc

SEQ ID NO: 286229 - DNA, 406 bp, Homo sapiens
cttaacccatatctagaaataggtcctcattaaactctatttcacttttaatacaggaggtagaaagaaattatttaggcagatagtgagggtaaaagagttgtcgacagggctttctttctaacaaaaagcagccccaaaatagtttctttcctaacaaagaggagcytgaaaaattgagctacaaacatagataagcaagctgaaagcttgcacgggtgaatgccaggagctgtgccaacaaaaaagtgttacctggggaccaagcatatccaacgtgaaggctccatcttccttttttttgttaccatgtgtacattaaaggaatgggcaacatggtaccagccaggcagagaacccatctacataataaaagattagggtgggggcagccagcttttcaagc

SEQ ID NO: 286230 - DNA, 512 bp, Homo sapiens
cttaacccatatctagaaataggtcctcattaaactctatttcacttttaatacaggaggtagaaagaaattatttaggcagatagtgagggtaaaagagttgtcgacagggctttctttctaacaaaaagcagccccaaaatagtttctttcctaacaaagaggagcctgaaaaattkagctacaaacatagataagcaagctgaaagcttgcacgggtgaatgccaggagctgtgccaacaaaaaagtgttacctggggaccaagcatatccaacgtgaaggctccatcttccttttttttgttaccatgtgtacattaaaggaatgggcaacatggtaccagccaggcagagaacccatctacataataaaagattagggtgggggcagccagcttttcaagccctatgcaaatggcacacctagtcctaatcatttttttgtgtcctatgcaaatggcacacctggtccaaccaatcttttgtaccctatgtaaatcagacactgctt

SEQ ID NO: 286231 - DNA, 636 bp, Homo sapiens
atataccaaattttgggtagaagacactgcataccatttggggccacacagtggttgtacttggaaacagagtgaacaagcaggggctgtgggagacaggctttgtagtatcaagagggtaaggtgacctcttgttcctgctggaggatgtgattggcttgtttgaataatttcatgggctggcaaggaactaaaatytgctacttggcgataagcaggaactgtgcctggtccagggttgatttgtgcagagactgtatccttgggaatagagtgggaagggcagctgtggtgaggccttttgatgccctccttgtttcaaatgtcaaaggatcacataatagtgagtaattttaggacttacaccacagggactgaatgataaactctctgatgaccacatttactcggaattggttttcactacaatgcctgggataaacagagatcatattcatatggaaagctgcctatatttctaggttctacattttgtgaggaatcctttgtctatgtttggactttcttcactttcggcctggctaccttgctccctggctaggctctgctttcatttgttgaaataacacaacctgctcatggcctaaatttgaggcacatctccttgagttcttt

SEQ ID NO: 286232 - DNA, 604 bp, Homo sapiens
acttgaaatgactgtggttctccagacacttgctttttattcacatttcttaaaaatttccataatcagaacaaataagacagcaagcaacacaaataattacctaaacaaagcaaaaaatatgcattgaygaatctaagactttgctattcaaccagttgttctccaacaagcaacatcagcatcttgcttaaaaacttggaaatgcagcctctcaagtctcatttatacctactatatcagaattgcatttaacaagatccctaggtgattcaaatgcatattaaagtttgagaaacactagtctaggattcttctcaatttcataaatacatcttaaaaaatggagaaaagtatatttttcaaattttgttaagtggattgtgaaggaagtagccaaggacaaattttttaaataatagagtgtgacaaaaggacgattatctacgttggagcctaaatgaaagagtcaccagaaatgaattatcagagtgccttgagcattttacagcaaagtatgtaatgcttaaattaacataacaattattataatcaatactaaataattatagatatcactatgtaaaaaaatactcatagcatg

SEQ ID NO: 286233 - DNA, 473 bp, Homo sapiens
tcagccgttctgaaatacagtctacccataatctgcatagcatcctatgaagaactgtaggtaaaacagaaaaataatcacttgtgaattaccaaataaatgccatgtcattgcagtggctaatttaatcacatctcttatttagtttctctaataaaaatgaataatttctgtcaattatgatttacattgaktgaaatggaaaagttgaattttgaagacgaaaagcattactggattaaaacaaacaagtaacaatcaagatataatgacaatcttctaaacaatatcattatgaatctgaggaataattggtcaaaataacaacagaaaaaaaataaacttattggaaacaaagagaaaaataagttccaagaattttactgcattagcaatgggggaataagagacaggaaagtgaacaatgacataaaaaccatttgatgcaggtcatatgcctagctatgaaccca

SEQ ID NO: 286234 - DNA, 482 bp, Homo sapiens
tatggcctgtttcaggagagagggaggtggaagaaggtcctcaattaatttcagcttaaaatactmagaacaccaaagggccatgtttgggggtagcatttctacaccccattaaaagttacttaattaccatatgatttattactttatgaatttgattaattaattggttgataggttctttttctattaaaattacatattataattggaacagcattgatttgagagccaaatgtcctcattttaggacatacaaacgtatgacttttactgattggtgtaatctcattgaagcagactcagttttctcatttggtggaaaaagagcattctatgaagataaaatcctttttgttctcaataacagtttagagccaatcatgcttttttcctaatttttaaagatatcatttttagtgtgttccctaaaactaaacatttttaaaaattttagatacttttagatttgcttaatatgc

SEQ ID NO: 286235 - DNA, 578 bp, Homo sapiens
catactaaaacgtaaagtgttttctttataattagaagtakgacaaacacacttcttataccctcacttcgttactaacatattagaggtcttggctgttgctttatggcaagaaaaatcaatagaaatatgactatagaaaaggaagacattaaattgatatttccctttagtcacaattgtgtatggaaaatttcagctgaatggtattagtttaaatgggttacattatcctgtgataatgaagacacattaaattccagaaatttaaaatagtaaaaacctatcttctgttcacactacattctaacaaaagtgaatagggaattcctcactgaattctctcaaggactgcagatgatggtggcccaattgagacacatgatttcatcattatcttgagagtgagaatgaaaattaaaattgatcaccagcaattacatttttccacccagaagtgacaagtgtaatttccactcacattttatttcactgaccaaagcaagtcaggaatatgcctaacatcaaatggatgagaaaatgcagccctccagatggtcccagtgactggaatattt

SEQ ID NO: 286236 - DNA, 591 bp, Homo sapiens
tcagttgcctttgacagctccaccccagagaaacacagagccactatcaactggagatatcaactgggaatggaatggctgctgctggcrcaagctgagggtccctgcctggtgaagagtggtggacagggacttactggtaagacagcctgtccttttctctgtaggttgatggtggcatgctaaagatgtgagtaaagcaatcaggatttttgtgccctcccactgcttagaggtagcaagggcaggtatcacagtaggggtagtggcagaggggctgtcagttgccacagggaactccacttgagggaaatgcagactctctgccaatgagatgatcagctgggcataaggtaaccatgctgagggtccaagcttgggggctctgcctggtgaagaggaggaatatcaggagttcatgcagaagatagtctggcctcttctccataggatggcctctgaatgttctaggcatgcaaaagcaatcaggctgtttattctctcgctagcctgacatgagcaagggtggtaatggcagagagactgtcatttgtctctgggagctccaccccagagaaatgcacagctgcc

SEQ ID NO: 286237 - DNA, 641 bp, Homo sapiens
ggcagctggtgctggggtgctcagggatccaagacccatggagcttcatgtgggcttcaccagcagctctccccagactccaggcagctctccatgttagtctggagtcccagagggtcagggggaatctcccatgccaaaggttgtaaaggcttatggcagaagtgtgggtacctaagggctcttgtttactcacactttcccttccagtagggagcctcccttggatctgtgccaatcccaggtgggtggccrtcatgtctcactggtctctgctctccatgggtcaccattgcttccttgatgaaccccaatgtgggcccctggatgatccacttgaagaactaatgtttactcaccactctgtctcttctcaatgaaagcaatctgtatcaatgtgtattacctgtttctagacagccattttggtgcttctcctctaattacagtcctaataatggaaacaaatgactatagagtaaaagtctactacatttagcataaaaattttaaaaatttccatataagggaagggtaaggcagacagatctctgcataaaagagagttcttttaccccttaaaattcagttcaaaaacaataacgaatataacagtgaatcttatataacacttacatgac

SEQ ID NO: 286238 - DNA, 641 bp, Homo sapiens
ggcagctggtgctggggtgctcagggatccaagacccatggagcttcatgtgggcttcaccagcagctctccccagactccaggcagctctccatgttagtctggagtcccagagggtcagggggaatctcccatgccaaaggttgtaaaggcttatggcagaagtgtgggtacctaagggctcttgtttactcacactttcccttccagtagggagcctcccttggatctgtgccaatcccaggtgggtggccgtcatgtctcactggtctctgctctccatgggtcaccattgcttccttgatgaaccccaatgtgggcccctggatgatccacttgaagaactaatgtttactcaccactctgtctcttctcaatgaaagcaatctgtatcaatgtgtattamctgtttctagacagccattttggtgcttctcctctaattacagtcctaataatggaaacaaatgactatagagtaaaagtctactacatttagcataaaaattttaaaaatttccatataagggaagggtaaggcagacagatctctgcataaaagagagttcttttaccccttaaaattcagttcaaaaacaataacgaatataacagtgaatcttatataacacttacatgac

SEQ ID NO: 286239 - DNA, 549 bp, Homo sapiens
aagggaaccactgcattttccaaagcccacatctgaaccactgttaagtctggtctttcatgtggaccattctgaactgtgactgcactgttrcctgaaatccaagttaatcacctgcttcacactctacttctatgcttctttatgcacaaaatacactggatatggtactcagcatgtttaaatcttccttatcccccaatgttccacttaagtcctacttttcccttgaagccattcacgacccaactgtattgcttccttctcttacccttaaaatcattgtatgtcatattcaaatgcaacacatttcgtgagaaaattgatgcttcattcattcaacaaataactattgaatgcaatattcagtaataatgaagaaaatcgctgtagaactaaactctgtgggttcaaatccctgaatttcccacctacaataaaattaatgatctttattaagttgtatctatgtttatacataatttagtctctaggaactgttatttactcatccataaaatgactttaatggcaatgtccatctcatag

SEQ ID NO: 286240 - DNA, 549 bp, Homo sapiens
aagggaaccactgcattttccaaagcccacatctgaaccactgttaagtctggtctttcatgtggaccattctgaactgtgactgcactgttgcctgaaatccaagttaatcacctgcttcacactctacttctatgcttctttatgcacaaaatacactggatatggtactcagcatgtttaaatcttccttatcccccaatgttccacttaagtcctacttttcccttgaagccattcacgacccaactgtattgcttccttctcttacccttaaaatcattgtrtgtcatattcaaatgcaacacatttcgtgagaaaattgatgcttcattcattcaacaaataactattgaatgcaatattcagtaataatgaagaaaatcgctgtagaactaaactctgtgggttcaaatccctgaatttcccacctacaataaaattaatgatctttattaagttgtatctatgtttatacataatttagtctctaggaactgttatttactcatccataaaatgactttaatggcaatgtccatctcatag

SEQ ID NO: 286241 - DNA, 594 bp, Homo sapiens
aaacccctgctcttcttgtgtcagccatacatttgtgtcaggtatatgattctccatagacggcaaaagatgaagggtagaagaacatatgcatgcactgtttttcctcatatccctccatctcttgcttctcatctcagctacctgcagtcctaagtgtattccctatcacaatcactttgtgacttgctcaggttctggtcaacagaaactgcctgaagtttagtgtgtgtaactgtatcttagcttttcctttcccaacgaattagraaaggtttcccctagtaatggcagttaattatttcttttatgaaatcatgattagaaataattgagtagtgtatggtcagtgtataactatagattgacaaattgattacagtgtttgtccttataactaaagttgcctctaatgttgggtagaaagaaatacccgaaatctgcttttctttctttctttcttgagtaggaagtgggtagagtgatgtgtaaggaagtgaaggtgaaaatatttggatataattgaaactaaaaaggaaatcccatgaccactgagtactatagtatttttggctttattctctagaaaacaag

SEQ ID NO: 286242 - DNA, 594 bp, Homo sapiens
aaacccctgctcttcttgtgtcagccatacatttgtgtcaggtatatgattctccatagacggcaaaagatgaagggtagaagaacatatgcatgcactgtttttcctcatatccctccatctcttgcttctcatctcagctacctgcagtcctaagtgtattccctatcacaatcactttgtgacttgctcaggttctggtcaacagaaactgcctgaagtttagtgtgtgtaactgtatcttagcttttcctttcccaacgaattaggaaaggtttcccctagtaatggcagttaattatttcttttatgaaatcatgattagaaataattgagtagtgtatggtcagtgtataactatagattgacaaattgattacagtgtttgtccttataactaaagttgcctctaatgttgggtagaaagaaatacccgaaatctgcttttctttctttctttcttgagtaggaagtggrtagagtgatgtgtaaggaagtgaaggtgaaaatatttggatataattgaaactaaaaaggaaatcccatgaccactgagtactatagtatttttggctttattctctagaaaacaag

SEQ ID NO: 286243 - DNA, 594 bp, Homo sapiens
aaacccctgctcttcttgtgtcagccatacatttgtgtcaggtatatgattctccatagacggcaaaagatgaagggtagaagaacatatgcatgcactgtttttcctcatatccctccatctcttgcttctcatctcagctacctgcagtcctaagtgtattccctatcacaatcactttgtgacttgctcaggttctggtcaacagaaactgcctgaagtttagtgtgtgtaactgtatcttagcttttcctttcccaacgaattaggaaaggtttcccctagtaatggcagttaattatttcttttatgaaatcatgattagaaataattgagtagtgtatggtcagtgtataactatagattgacaaattgattacagtgtttgtccttataactaaagttgcctctaatgttgggtagaaagaaatacccgaaatctgcttttctttctttctttcttgagtaggaagtgggtagagtgatgtgtaaggaagtgaaggtgaaaatatttggatataattgaaastaaaaaggaaatcccatgaccactgagtactatagtatttttggctttattctctagaaaacaag

SEQ ID NO: 286244 - DNA, 521 bp, Homo sapiens
tattgattgcctattatgtgcaagatactatgagagacagagagataaatatatgtggtctcgggcctagaaaagcttacaaccttctcttttgttccaaagtttcagaattcgaccaaaattgtaacagcctattccccacaatgggtgaggtagaatacagtattagccttataaaaaatgtaaagcatatggttacatttttcttgtttatcaaaaagtatgtcattacagctacacttttataaatcaaaagaataattcagtatttaaacaaaaccccattattttgctatcccatgcccactaattggatgcaatggaccatatcgacttctcttgggagttttaatttttcaaacaaatgtatgaagtcaaatacaaagttaaaagtttctgtttactgttagtttatttggaagctaaacacaaaagatttgcttmttcagtcaacaatgtataccgagcctctctagagtgctaggaactgtgcaggcactgcagatagaaagatggcaagc

SEQ ID NO: 286245 - DNA, 521 bp, Homo sapiens
tattgattgcctattatgtgcaagatactatgagagacagagagataaatatatgtggtctcgggcctagaaaagcttacaaccttctcttttgttccaaagtttcagaattcgaccaaaattgtaacagcctattccccacaatgggtgaggtagaatacagtattagccttataaaaaatgtaaagcatatggttacatttttcttgtttatcaaaaagtatgtcattacagctacacttttataaatcaaaagaataattcagtatttaaacaaaaccccattattttgctatcccatgcccactaattggatgcaatggaccatatcgacttctcttgggagttttaatttttcaaacaaatgtatgaagtcaaatacaaagttaaaagtttctgtttactgttagtttatttggaagctaaacacaaaagatttgcttcttcagtcaacaatgtatacygagcctctctagagtgctaggaactgtgcaggcactgcagatagaaagatggcaagc

SEQ ID NO: 286246 - DNA, 956 bp, Homo sapiens
agtaggtatatgaaggcaatttatgtcctggtgagataacaatggtrggtcacttgagagtattcctggtagttacctctaccctcatttcagaaactctcttaaactttataatacagaagaaggctgtctatacacacacacatacacatacacatatatacaggtgcacctgtttgtctctgaataatatatttacctaattagttaacatttggcatttgctatagttaatatgttgaacactgctttttgttctgaacatctgaccttgaggttcaatcactttaacagcactcttattattattcatgagatgcattcaaggtgagtttttactgaaaaattgttttggggtctgattatgatgcaaaaacccagttgactaccctctagttctgatggctttgtcttagctctgagaagagtagctgttgatatwagattattttagattactcatttagggtcttgaagtaatcaagacaacagtgtaacacttttaatatattggtctataatgtattggttaaaaaaagatactgcatataaaataaaaattaaatgaaaataacaggagtaaattaaaagcacaataggttctacatatacaaaagtggtcatgaatggaatgtaagtgccatctataccaaatttagtgatgcagtaaaataaaaagaatatatttaaatagaaagaatatttttatttttctaacgctttgctttagagtgaaattcccatgaattttcattgacaagaagtcaatgaaagcaaacatcatcacatcaccaggggccattggaawgatgcaaagattggatgattgtaattaaatatacagagaactgagagaagaaaatgcatgtacattcatggcacgtggaaagatacaaacaaagaaccacattacacatgtgctgctgcccaggcaggcaaggaaacattattcataa

SEQ ID NO: 286247 - DNA, 514 bp, Homo sapiens
agattattttagattactcatttagggtcttgaagtaatcaagacaacagtgtaacacttttaatatattggtctataatgtattggttaaaaaaagatactgcatataaaataaaaattaaatgaaaataacaggagtaaattaaaagcacaataggttctacatatacaaaagtggtcatgaatggaatgtaagtgccatctataccaaatttagtgatgcagtaaaataaaaagaatatatttaaatagaaagaatatttttatttttctaacgctttgctttagagtgaaattcccatgaattttcattgacaagaagtcaatgaaagcaaacatcatcacatcaccaggggccattggaaagatgcaaagattggatgattgtaattaaatatacagagaactgagagaagaaaatgcatgtacattcatggcacgtggaaagatacaaayaaagaaccacattacacatgtgctgctgcccaggcaggcaaggaaacattattcataa

SEQ ID NO: 286248 - DNA, 585 bp, Homo sapiens
ctgttgcaatagggaggaactattgatgtacaagccaacagaaatctaaatcactcgacatttttaaaaaacattcatgctccttgggaacctatggattatattgggaaaaaattcatgctgcttaatgacataatgtaaaatgtacaacttttactccttaataataaattcacrtgttggtatttccatcagtttaccatagtgagacttcatgtttaaagactctatgaatataaaggaataattcaaacatgacttctttactctactagcagatataggtttctgttttcagcatcaaaactctaaattatatgtatagctgaaggcctaacattcaaaacttctctgctgatacgataaaaatttatttagcctaagaaaattgcagccagttactctgctcatatgtcatgatggcacctttatgattttgatattgacacaacagccatatattatatttaacaggaatatattattcattcttttaacaagtatttattttgccaagcattgatgctgataaaaataattatacttgctcatttgactctggactgtatcataatttaaacgtct

SEQ ID NO: 286249 - DNA, 584 bp, Homo sapiens
ttgtgtatgctaatggcattgacttagtaaactgctttgtggagaaaatgttggcatcttgaaagagaaggaaaacataaacagaaaatctagggagcttcatgagagaatagggtggcagtgggggaggaagtggagggtgtggacctagggcaccacacctgggagagtgtagtggaactggttttgttttctgaactgttcaaccaaaagctttttayatttccccatggttttccaggcaactgattgaggagggtatatgcaagatgataaatgggcttttcacttctttccactggggcagcagtgattctatggcgatgtagctaatatgacgtgagagagtcggttgctttctagcctctgccaggctcactatttctgtaatagtgacactccatgaaatagttatttctgtgacatcactgacacttttaaacaacagatagaggaaagatgtgaaggttccatgtctctacatgtggctgaactctcaaatgtggttagagaatcatgttttctccagtgcatttgagctgaacagtaagcaggattgcttggtgagtcgtcattagatagtg

SEQ ID NO: 286250 - DNA, 603 bp, Homo sapiens
caagggtgaccataattcagtgtcaatctgcttctacactgtccttttctgctgatgggcatcttgctatagtagagtagggaattttctctgttttcattgacttttactttatagaaattccacaaaaaattaaaaatagaactaccatctatctaaggtctaagacttgtcaggacttactattctttcctaaaagcagtaagatgtcttcagatgaccacagaggaagactacaggaaaagaaaaaaaaaataaataaggtttcaaaataagttttcagagagatgacattctcccaaaaaggaaaacttgaaattttgcatccaaatgtaactgatatttcagaaatagcttgttctatgccagtatgctgttttccttgttttaacttttcttcttccttgtgatcattatttttaagatgcaaagatttaattsatcttaaaaccctccaagtgcacaaaagaattcccaggaacagatcaatcatatcttatgtttggaattaggttctaaatgccctttttaagttgcaattagcagcttccatctttgttcctttttaatctcctcaattaccttgctaagtcataactgggc

SEQ ID NO: 286251 - DNA, 1153 bp, Homo sapiens
gttgggagcacaagaaatcttattttggtttattaaagtttagatatccataaagaacagattaatatgtaacaaactttatttccaaaatataaatgagtcaagaagaataaatcctttgttgtttcttggggcattaaataccatacatcagcagtttcaaaacttcagcacatatcagcctgaagcgcttactaaaacacaatttttgattcgacaggacttgaatctgagaatttgcattctaacaagctcccaagtgatgctgctgctgtgggcccagggacccactttgataaccaactgccattgagtgacttttcactgctgtatgctaatttgacattaagtaaatattcaacctctggcacatgctgagcctatagcagctaagtagatgtatcaattcacatctttggcagcccagctgcaataagagaggaaggagaagtgctatgattcagtaaaaggaatcaagtcttgttyatttcagttcctgctaaatagttcacaaaagagccatcaatcagctcattagaaaactgacttggattgcttttctgtaggattgaaaatttatgtaawtacatttatctgagtgattttataggattgtcacactattcataaatgaggaatatggagtagaaaatattcccaggcaggctacagttacagaggtcagattgttacaaagttaagaaacatttgcaacatcaatatgtgacatgcttactgaattccctgtcctggtgtcttctttaggtaatgtttcatgtttgagcatctttcttttataactgacctatttctaacttaaaagtatcttctgtattttactgatactcccgaaagaaacatgttcatattagcataattattaccacaaaaccaaagcaaagaataaggatggaactatcttgttcttccactcatacaactttccttatcccactctttcaatatcccacccttgcccctggaccagtagcaagaaaaaactcattagttccactgtggagttggattcatgggaaagtccatacaaccacatctgtttcctacaaaagatggtgaccaattgctcttcatctctgttagggwtttaaacaataaattcttaacatattaaagggcatataaggtacaaaga

SEQ ID NO: 286252 - DNA, 634 bp, Homo sapiens
tccagttattgccatctatatttttaaacaggttaatgctcacaggatagccttttatgtcacttgttttataaaaagacaaaagataacacacagaactctaaagtattgatttatattccattaactgtttattactttaatctatgaatccaagtggggaggtagaaagatgaaatcacttgcctcttatctttgaaagatgtgagctcattattaaaccctgacaaaaacagcaggtagctcaggaaacattttccaaagaacacttagagattttgattcatgactgaagttctrctgtggcattttcctctccatcacccttcatggggaagcctcatcctattatcatctgttgtcatatttaactagggtcatcagaatgtgttgttatatgtcacttgtttcttcttcctttttctttatatagcactatgacttttattttcccaaacagtttgtgtgtttgaaactgcagttgtttcttttgggggcagcctccttaagtccaccatggtggttagttttaagatattaataaacaaggcaaaattcaaatgtgtatcacactcctggatcttagttaccctatttttctatttaccttgtgatatggcttggctctgtgtcc

SEQ ID NO: 286253 - DNA, 1222 bp, Homo sapiens
tccagttattgccatctatatttttaaacaggttaatgctcacaggatagccttttatgtcacttgttttataaaaagacaaaagataacacacagaactctaaagtattgatttatattccattaactgtttattactttaatctatgaatccaagtggggaggtagaaagatgaaatcacttgcctcttatctttgaaagatgtgagctcattattaaaccctgacaaaaacagcaggtagctcaggaaacattttccaaagaacacttagagattttgattcatgactgaagttctactgtggcattttcctctccatcacccttcatggggaagcctcatcctattatcatctgttgtcatatttaactagggtcatcagaatgtgttgttatatgtcacttgtttcttcttcctttttctttatatagcactatgacttttattttcccaaacagtttgtgtstttgaaactgcagttgtttcttttgggggcagcctccttaagtccaccatggtggttagttttaagatattaataaacaaggcaaaattcaaatgtgtatcacactcctggatcttagttaccctatttttctatttaccttgtgatatggcttggctctgtgtccwaggtgcctgcttccccttcacctttcaccatgattgaaaatttcctgagatcttcccagccacgtttcctgtacagcctgcagaaccgtgagccaattaaacctcttatctttataaattacccaggtagtttataaactactcaggtagttctttataccawtgtgagaatggactaatacaccttgtttctggaattatgggtaaaatccagtatttggtatcatataattaaaagtatttaaaatatgaaatttctcatttttaaaatgtggattctgttcatgcagataaaccttaacagttattttatagtttcttgaatacttgaagcaagggtattccagaaatctaaaaactggtcttataactctttaattctattaagcagagagcaacctgacaatcatgaggggtgaggtcaaagggcagtgtgactgccacctgatacttctgtgccatttgctgtcaggtgactttgtcactagttttgtagaatggagaactttctctcatgattctcactcgctccctgatcttttaggtctgaatatgtattctctgaagctttattggtggtagcatta

SEQ ID NO: 286254 - DNA, 617 bp, Homo sapiens
acttgaagcaagggtattccagaaatctaaaaactggtcttataactctttaattctattaagcagagagcaacctgacaatcatgaggggtgaggtcaaagggcagtgtgactgccacctgatacttctgtgccatttgctgtcaggtgactttgtcactagttttgtagaatggagaactttctctcatgattctcactcgctccctgatcttttaggtctgaatatgtattctctgaagctttattggtggtagcattatgaacttgtcaccatgggagccccatgagggatagatagtatatcggcagggaggaaaaacacccccaaatctcctatgatgtgggctcttttagaattgattttttttctcaataattttaatgaaatccttctcagcatggcaaagtaaaccattagtctgttttgaaaagtgcatatttcttccaagttgaaaagaatcattgttctgcatggataagatcacagttcatttaatagctccatataaatagttctagaaaatccacaagtataaatcataactacacaacagtacacatagacagacaacagggatgtrccattcctttaggaagagcaggacacgttggtg

SEQ ID NO: 286255 - DNA, 522 bp, Homo sapiens
ttacatattactcactgaaaataacattttcttcagtgtatacttgagcactggctttrgaaaatgcatgctcctagaatgattaagagaaaattccctttttatatttaggaggcaagcaccaaaactttgaatcaagttgagatcaaattttatgatttagatcatctttattaagtatttaaactgaggtattattttgcgtgctttgggagcagaaagttgatggtatgttttccgttctcaaggagatttttagtcaaggaaaatataggtccgcacatactgtgataaataattccaaatacaagtttggttcctgctcatgtgacatgagcagtgaggttggcacagggatctggtcactgtggtcactgagggacacaggctggcaagggtttcatctggacatgcatttccaagttcaccacagcggttgagagagactggggactctgtgggctctcctgatgtatctttttcatttgtttaacttttaaattttaggttcaggagtacatg

SEQ ID NO: 286256 - DNA, 597 bp, Homo sapiens
tgggagcagaaagttgatggtatgttttccgttctcaaggagatttttagtcaaggaaaatataggtccgcacatactgtgataaataattccaaatacaagtttggttcctgctcatgtgacatgagcagtgaggttggcacagggatctggtcactgtggtcactgagggacacaggctggcaagggtttcatctggacatgcatttccaagttcaccacagcggttgagagagactggggactctgtgggctctcctgatgtatctttttcatttgtttaacttttaaattttaggttcaggagtacatgtgctggtttgccatataggtaaattgcacaccgtgagagtttggtgtacagattatttcatcatccagatgataagcacagaacctgataggtagttttttatcctcactgtcctcccaygctccaccctcaagtgggccccggtgtcgtctgttgttctcttctttgcgtccatgtgtactcaatgttttagctcccactcttaagtgagaacatgcagtatttgttttttttgttgttgttcctgcattagtttgcttatggaaatggcctccagctacatc

SEQ ID NO: 286257 - DNA, 597 bp, Homo sapiens
tgggagcagaaagttgatggtatgttttccgttctcaaggagatttttagtcaaggaaaatataggtccgcacatactgtgataaataattccaaatacaagtttggttcctgctcatgtgacatgagcagtgaggttggcacagggatctggtcactgtggtcactgagggacacaggctggcaagggtttcatctggacatgcatttccaagttcaccacagcggttgagagagactggggactctgtgggctctcctgatgtatctttttcatttgtttaacttttaaattttaggttcaggagtacatgtgctggtttgccatataggtaaattgcacaccgtgagagtttggtgtacagattatttcatcatccagatgataagcacagaacctgataggtagttttttatcctcactgtcctcccatgctccascctcaagtgggccccggtgtcgtctgttgttctcttctttgcgtccatgtgtactcaatgttttagctcccactcttaagtgagaacatgcagtatttgttttttttgttgttgttcctgcattagtttgcttatggaaatggcctccagctacatc

SEQ ID NO: 286258 - DNA, 582 bp, Homo sapiens
tgatcatcttccctttaaagatagatacatattcatgtggtatataaattcagggctgtcatgaagcaaacacygatgatgaggtgagagaggcaggttatctatggggaagggggcaggagaaggccgtggagccttcagaccaaagctcaggtctgatcctgtcatgaaagaaagggggaaggaatgaggatcctcgtactgcaaggtgtttctaagaaaggtttgggcaggctgatgggtggcctgcaagccaaagtcactcctaagagcgctagcactgtttgctagctgtgcctgtcttcatacttctgatgtgcttagtcactggccagaagcggcctggggaaaacacaaaacttgacataaatgtggtagattcagaatggccagaaactagccctcagacagttatgatcccacagcatgagatctgggtggtacatttttatggctacaacacatggtttttagatcctgtcaattctgtattagcattggtcttccttggatagtacaattccaaaggaagctaacaagtggtgaactaataagcaaacaacctcaaaagtcaaggactgt

SEQ ID NO: 286259 - DNA, 582 bp, Homo sapiens
tgatcatcttccctttaaagatagatacatattcatgtggtatataaattcagggctgtcatgaagcaaacactgatgatgaggtgagagaggcaggttatctatggggaagggggcaggagaaggccgtggagccttcagaccaaagctcaggtctgatcctgtcatgaaagaaagggggaaggaatgaggatcctcgtactgcaaggtgtttctaagaaaggtttgggcaggctgatgggtggcctgcaagccaaagtcactcctaagagcgctagcactgtttgctagctgtgcctgtcttcatacttctgatgtgcttagtcactggccagaagcggcctggggaaaacacaaaacttgacataaatgtggtagattcagaayggccagaaactagccctcagacagttatgatcccacagcatgagatctgggtggtacatttttatggctacaacacatggtttttagatcctgtcaattctgtattagcattggtcttccttggatagtacaattccaaaggaagctaacaagtggtgaactaataagcaaacaacctcaaaagtcaaggactgt

SEQ ID NO: 286260 - DNA, 542 bp, Homo sapiens
tgaacaagatggtgactatagttaataaagatgcattgtatacttgaaaattgctacaagagtagaattttaagtattctcaccgcaaataaatggcaaatctataaggtaatagatatgttaattagcttgatatatgtatatgaatatatgatacgtgtatgcatgtttcaaaacatcatgttgtataccacaaatatatacaatatttatttttcaattcaaaaaataaataaatttgtaaaaagcgacctgcaaaaatggtcagtaataagcatatggacaaactatcgggaccctagagagagaacagtgcagtgaaaattgctgagcgttttggtttttttcctttccggaaaggagtaggaaagctatgtggcagaaacacctgtacatytaagcaaagctctggtattcagctaggaattaggagatgcccttccttttgcaaacacatttaaatcacattgaacaaaattactatgggtaaagatgaatatcccacttcattttggacacaaattattataatgccgtaagca

SEQ ID NO: 286261 - DNA, 486 bp, Homo sapiens
aagaatttgccaggtttaagttttattgctatttagagaacaagattttctaaacctattgccctgtgactcttcaaaaccatcagccaggaattctttttggatacactgatatttctctatgttatccttagtacagcttagcttaccaaaggatagatggacaaaagagtcttaaargttaagtcttggaacaatataaaatgcagtctgcaaacacttgggggtgcatcataccagtcaattacacataccaatacttttttagaaaaaacaaaagaatagaataggcaaaatacattggacttatttacaaaacatgtttcaggtatacatgcacacatatgtgatattatgtcatatatatgttagcatacattttataaatgtcttatgtatgtatttccctgtatatatactggttaggatgtaaaatttgttaccatcggtagcagtcaaaaaaaatgttaagccactgatttagag

SEQ ID NO: 286262 - DNA, 416 bp, Homo sapiens
acattattcttaagggctttaccttcctttttctttgtacaaagtcttcgaaatctagggctcaatggtcacatgtggccagtggctgtcacagcagatagcctaggtgttggacgtgagctgaaggggcttacactagagatcccatagaagatacacctacagccttggtgagggacaaggrcatatatcaaggtacttgcaatggaaacaaagaatcaatccataatcacactgaaaatatgaagcagagaaccagaaggcaaatgtaatccaattaagtataaaattgcactaaaaaaaaaaaaaaaaaaaacagcccaaagtacacagaagagaatggagcttcaaaggtaaaggataaaaacaaaccacagcccaggagagaagctcagagacaaactgtacaagaaagg

SEQ ID NO: 286263 - DNA, 585 bp, Homo sapiens
aaggaagcagtgtatatcaaatatctattatgtgccagaaactgtgtatgtctcattaagtactcaaaacaactttgtagagtattatttactttagttttatagacaacaaaacaggcacaaatgcttaaatcatttgcccaggaacacataaacagtaagtgggggagctagcacttgatcccaaatctacccaactccgtaatatgcttcagtaatggaaatgagtgcrtattttttattttattacttgatttattttgtggtaaatgtatgtgtgcatttgacctcatatgcatgtgagaagttaagagggcatggatatgaaattagactaacaatgaaacaactgattatgtccctaatttgattcaagactaacaaagatgaaattagtaatcaccaataataaagtctaaatactagcaaagctctgcttctctctttgcggaattatcacttagaattcgcttaatttaggccattgccatgattctgtagaaaatgagaagtctataagtatttagcctctgcctgacattgacttaggaatcaaatactgtagcttgaaatcgttgcaagtcc

SEQ ID NO: 286264 - DNA, 585 bp, Homo sapiens
aaggaagcagtgtatatcaaatatctattatgtgccagaaactgtgtatgtctcattaagtactcaaaacaactttgtagagtattatttactttagttttatagacaacaaaacaggcacaaatgcttaaatcatttgcccaggaacacataaacagtaagtgggggagctagcacttgatcccaaatctacccaactccgtaatatgcttcagtaatggaaatgagtgcatattttttattttattacttgatttattttgtggtaaatgtatgtgtgcatttgacctcatatgcatgtgagaagttaagagggcatggatatgaaattagactaacaatgaaacaactgattatgtccctaatttgattcaagactaacaaagatgaaattagtaatcaccaataataaagtctaaatactagcaaagctctgcttctctctttgcggaattatcacttagaattcgcttaatttaggccattgccatgattctrtagaaaatgagaagtctataagtatttagcctctgcctgacattgacttaggaatcaaatactgtagcttgaaatcgttgcaagtcc

SEQ ID NO: 286265 - DNA, 653 bp, Homo sapiens
tgacaaattaatgtgtgcacagatagtaaaaaagcagatggagacatcagatatctacaaatctgtgtctccacaagggctttataaaatctttaattgacacatgatctccttagatctgctaggtgctcttagaggatattatatggctggtgattgaaatatgatcggttgttttccaggaccaggattctgaatagttactgttgctttgcaaaattaacatttatgatgattgctctttttgggggtgggggtctgcttaaataaggtaccacacaagatcactgaggaagcattcataagcatgaatccaggatcttttaaatacaggtaaaattatttttttcaataattggttcaagattatttccatctttgcccagtgggagttttctttccctggctgagttttcctccctcttgtgttagaacaattttaagtctcccaattcagttaaaactactttacatgcaatttatgaaagtgctgaacagttctgctaatgactttggctactgggatgtttctttgctgcctttttctgaaatcccatccaccacaktcattgatgattttctttatttttaatttaaattgccctaataatccagcaagtgaatgtcaaggttcctgaatggatttcctattg

SEQ ID NO: 286266 - DNA, 643 bp, Homo sapiens
attatttgtaatatgatctttgttacctgattatgccattctttcactttaaattcttctcagaccctctacactttttcaatataatctaagcctttgaatgtgactcaaggtgggaggctccctgacccggcgtccatctgccagacagccctgtctccccaccccataccccacacagctcagctccagtgacactgggctccttgtattcttccccacaygccacattccccattgactctgtgtttcatgctctctaaaatactcacttccattctctatacaaattcttatcccttcttgaagagtaggtacaaatatagcctccttcttaaaatattccctgactaaaggaatcatggagatgataggcttcatctaatttacgatctagttgagaaaataaatcacataaacgtgaacaatcagcaaacaatacaagtcagaatctaatcaagtgctagattgtatggtacatgtcgcatatataatgcaccaagtgaaagcctttggaaaaaagaagtctggaagatgcaagagttaaggagtgtgaaaacatctcaatttaggaggtgtagctggctcagagcagcacattcttcaaagacaaggtttttaggacagtgtgcaattcctgttc

SEQ ID NO: 286267 - DNA, 643 bp, Homo sapiens
attatttgtaatatgatctttgttacctgattatgccattctttcactttaaattcttctcagaccctctacactttttcaatataatctaagcctttgaatgtgactcaaggtgggaggctccctgacccggcgtccatctgccagacagccctgtctccccaccccataccccacacagctcagctccagtgacactgggctccttgtattcttccccacacgccacattccccattgrctctgtgtttcatgctctctaaaatactcacttccattctctatacaaattcttatcccttcttgaagagtaggtacaaatatagcctccttcttaaaatattccctgactaaaggaatcatggagatgataggcttcatctaatttacgatctagttgagaaaataaatcacataaacgtgaacaatcagcaaacaatacaagtcagaatctaatcaagtgctagattgtatggtacatgtcgcatatataatgcaccaagtgaaagcctttggaaaaaagaagtctggaagatgcaagagttaaggagtgtgaaaacatctcaatttaggaggtgtagctggctcagagcagcacattcttcaaagacaaggtttttaggacagtgtgcaattcctgttc

SEQ ID NO: 286268 - DNA, 552 bp, Homo sapiens
tacctccttttaataaaggatatgcaatcgtatttttaaaaatatttttcaaaaaccattatttgtaattaagtccaaatccctccattttagaagcaggaaaattgagataacattacaagcataatgtatggacacccatggatttacgtatgactagcacagtattcatgctgcaaatatgcatggggaaaatggtcctagggttcttttgcagcagatcttttaaacctcagatgaatcacactataaaattctcttaaccctagacacaaccacaaacaataagagccatatttacagcatgtatttcactccactgggtctaatatttgttggatgttttataggaagaatggagaaatctaagatgtctgtgagtttgttaggttgaccattcctttcagggggaagtgatagtaccatgaaaaacattttagaagatcctcctacaatagctgactctaacatttaatttgttgttttgtttcayaccagatgcctcattggaaaaatagcaatattgaaatggcaaaggcagcaatgttagta

SEQ ID NO: 286269 - DNA, 593 bp, Homo sapiens
ataacattgtcatttttaacagaacaaacatattgtaagtttccagagtttagatctctgccttctaaggttactgttttccatctgagttctattttctgctrataattactaagttttgaaaataattcaagccatatatatacaatttataaatatcatatatacacatatataaaattgttttacatgactgctaagggattcttcaaactgacatttttaaaagccaagtgaatatattgaaggtatttttaaaaaacagttactttgatttgaaacaatctcttgttatgataaaagtagtctcatctctaaaatagccaaatatagacagccataagataattaaatcagaatctgttttctcttcccaggaagtgaatctaagtgtcaagacagtccccactcttttcaggcttatagtattaacagcatcacatcacaaaatgttgtcaggttcttgcggcagcaataatgctttcatttataaaaggtgaccacggttcttaagttggttcctcttgacctctgtcatctacacacacaaacatgcaaagtcactagttaggttaagttgaatttagtttaag

SEQ ID NO: 286270 - DNA, 592 bp, Homo sapiens
ccctgctgtcttgtgaacttcctcttgcaccacacttctccttgcttccaatgctccagctactcctgtctccttgcattcatttattcaagaatattaactgagcaaataccatctatctgacattctcctgggcacctggggtatagcagtgaatgaaatagacaaacaagtctccctcatagaagtaggattctaatgatctaaaaacccatcaagtacaacagaggctcgcgaccttgcacctgcacttccctcggccaagaatgccctttcccagatttctacatgcgtcgcacyctcatacatctaagtctcagcttgaacgtctcctcctcagagaggctttttctcatccccttacacttcttctccccaggcccttctttattttccctcatacctcctgttgtatctggtattatgtgttcatctgcagtcaaatctctaccactgagctgcaacccccatgcattcttctgtttcatgttcagctccctagtcagatgaaagcttcaaaaggacagggagtttttaatgttttccaatgactgggccaatagccccaaactattgcccttttttaacgtgt

SEQ ID NO: 286271 - DNA, 540 bp, Homo sapiens
ccagttagtgcctagcaccaagtggtcaaatggacatggaatgagtatttagggctgggaaagtgattgtttttgcactgatcctgttcatgttttttatctatgagatagattgacagagaccaggccggactcctccaaatgtagccctgtccttgctgcccttgtcacatttcatactttctccccattgtcagccacaccccctttggccacgtgggaagcacaggaggtagatttggcttctgctggtgggcagggcctaggctcccccscaagggtatttctgcaatgttccatcttagaggctgaaatcacagcttcattctggcacagtccttgtgggggttgttcccatctgccactgagcttagaagatgcacatgaggcactttttgttgatgttattggccggctgtctagagggaaaaattgctcaagggaactttttgactcctgcaatctgtgggaggtgggatgtcatgaattctttggcctgggctatatgtgtgtactcacctaccaacctcaagctgccag

SEQ ID NO: 286272 - DNA, 556 bp, Homo sapiens
cctgaggtcaggagtttgagaccagcctgctcagcgtggtgaaaccccgtctctactaaaaatacagaagttagctgggcatggtggcaggcgcctataatcccagctactcgggaagctgaggcaagggaattgcttgaacccgggaggcagagkttgcagtgagccgagactgtaccactgcactccagcctgggcgacagagtgaggctccgtctcaaacaaaaacaaaaacaaaaacaaaacaaaaacccaaaaatgaaagtaaataacaatgtgaatccactatcagatcatcacaaaatataaagaataattcattatgcaaataagaaaaaataattggcaaaactaaaccttgcaggaaattattcaaatcaatggaaaagctggtcctagactgacatgacctctgtaggatttgagggcatgacagcggtcacccgggtgatcacagacccttattaaacaaatctcccattacagccacagaatgcttggcttcttcccacagaatccaagcacagaatggtttcagtgggacgttcgacaacat

SEQ ID NO: 286273 - DNA, 576 bp, Homo sapiens
taaattaatatataggtgtgtgtataaatatatagacaggaatatrtatataaagtgtatatacactttatatataattatacatatatatacacacctatatatgtatatacactatatatatataaagtgtatacatatatactttttctttagccacagaaaaggtatttttcctatggctaatactttacccatgctttttctatggctaaagttttatcactccccacaaattcaactgtaattgaatttaatataaattaaatgccttttgtattattagttaacaaaagtacagaattcatgacctttcctcaattttgctacctacttttatctccctcacactagactctatataattgctaaagatatctgaagtgggggaaaaatacaccaggggatgcaaaaatcattttctgggatacaagaaagaaaattagaatttttacccaaaattacatcttttgttttcttgagataaggtattgccctgttgcccaggctggagtgcagtgatccagtcacggctcactgcagcctcaaccttcagagctcaagtgatactcccac

SEQ ID NO: 286274 - DNA, 576 bp, Homo sapiens
taaattaatatataggtgtgtgtataaatatatagacaggaatatatatataaagtgtatatacactttatatayaattatacatatatatacacacctatatatgtatatacactatatatatataaagtgtatacatatatactttttctttagccacagaaaaggtatttttcctatggctaatactttacccatgctttttctatggctaaagttttatcactccccacaaattcaactgtaattgaatttaatataaattaaatgccttttgtattattagttaacaaaagtacagaattcatgacctttcctcaattttgctacctacttttatctccctcacactagactctatataattgctaaagatatctgaagtgggggaaaaatacaccaggggatgcaaaaatcattttctgggatacaagaaagaaaattagaatttttacccaaaattacatcttttgttttcttgagataaggtattgccctgttgcccaggctggagtgcagtgatccagtcacggctcactgcagcctcaaccttcagagctcaagtgatactcccac

SEQ ID NO: 286275 - DNA, 539 bp, Homo sapiens
ctatatataggaatatatgtgaatatatatacatatatacgtgtgtatatatgtataattcctatacatatgtgtataaattaatatataggtgtgtgtataaatatatagacaggaatatatatataaagtgtatatacactttatatataattatacatatatatacacacctatatatgtatatacactatatatatataaagtgtatacatatatactttttctttagccacagaaaaggtatttttcctatggctaatactttacccatgctttttctatggctaaagttttatcactccccacaaattcaactgtaattkaatttaatataaattaaatgccttttgtattattagttaacaaaagtacagaattcatgacctttcctcaattttgctacctacttttatctccctcacactagactctatataattgctaaagatatctgaagtgggggaaaaatacaccaggggatgcaaaaatcattttctgggatacaagaaagaaaattagaatttttacccaaaatt

SEQ ID NO: 286276 - DNA, 576 bp, Homo sapiens
taaattaatatataggtgtgtgtataaatatatagacaggaatatatatataaagtgtatatacactttatatataattatacatatatatacacacctatatatgtatatacactatatatatataaagtgtatacatatatactttttctttagccacagaaaaggtatttttcctatggctaatactttacccatgctttttctatggctaaagttttatcactccccacaaattcaactgtaattgaatttaatataaattaaatgccttttgtattattagttaacaaaagtacagaattcatgacctttcctcaattttgctacctacttttatctccctcacactagactctatataattgctaaagatatctgaagtgggggaaaaatacaccaggggatgcaaaaatcattttctgggatacaagaaagaaaattagaatttttacccaaaattacatcttttgttttcttgagataaggtmttgccctgttgcccaggctggagtgcagtgatccagtcacggctcactgcagcctcaaccttcagagctcaagtgatactcccac

SEQ ID NO: 286277 - DNA, 661 bp, Homo sapiens
ttatatatggagagagagagagagagaagtaactagagaaggctaattagcacctcttataaagaacagatctagaacacacaaaaacagaagtgaaaaatgtaaaactgtacgagcgaaggaaaaatattgctcctcccagaaacctatgagaatggctaacacactagctgcattaaatgatcaatgaatgactgatattcrttccacactagctctctaagcaatcctcaccaccgatgagaggaatacgtgttgaaatgtgaaaccatttcttcaatgagatgctgcattttaaaggaaagttgtatttctagaaaatacccaagcgtgcactcaccattgcaggagggcagcacttggtcccaggagggtttcccatcagccccaatcacacaggtgatggatgaggggtcaagaatcttatagccagagtcacactggtaggtgatggtggagccaagcttgaagtctgttccaactcttgtcccattcattatatttcctgggtcaaaacaagcttcccgtggtttctctgtggaagaaatgaatgtaaactgcatgagagcagggatcttattcttgtttgtgtttttgtttgttgggttggttctttaattgtgttatttagggcctagaacaatgtcctaaataagtaaga

SEQ ID NO: 286278 - DNA, 511 bp, Homo sapiens
tatgatactgggtatcaagatgtattataaagtaaatcaggaattaagttaggttttgtactagataagcaaatagataaatgaaatggaatacagtttggaaacagatctgcatagatctagttgtctcgttaattactaatttgtactatagtgcaataaagaaataaatcacttcagcaaattgtcaattgaacttaactgtggacaaaaatctgtgacacttcagtctccatactgtacacaaaaatttatccccagtggaatagagatgtaaatgtgaaaggtaaattaagttttgtagaagaaaacctaagataatatttgtatagctttggggagggaggagctagcartctggacacaaaatcactaaagccaaccttaacaaagtttgtggcatagcatacatttaaatatagtttaaaaatttgctaaccgtaaagaaaaaaaatgagtaaaaattattatgactcattggaattaaaaacctgtgtttatcaaaagaaat

SEQ ID NO: 286279 - DNA, 1143 bp, Homo sapiens
tagactcaccaatttagtaaatttcaggatggggtagaaactccagtatttcacttgtatacatattaaaatctcgaggaggaatttgtcatgtcaaatgagaaaagacamatcatgtttaacaactaatcattgtaatggagttgtaatgtcattttaaataaaataacctaccccttacagacaaagaaaagctaatatcagactgaaaatttcaattcttttgaatacttaagaatgatatgcatcctgggttctcattcattcattcattcactcattcattcaggccatcaggattactgagtgtccgtaaacctgcagcctccatgctgagagctaagcaggactgagtgaacgaagtcaagattcctgctttgcagagctcacatgctaactagaaatccatgagttttcaaagaaactcataaatgcatacgtcttccattctgtaatcaggttattaattttagaaaacgcctttcagattatttaggtgtctttgttaatacctggaatawggaatgtcgtttatacccatctgtaattcctcatccattttcwcaggcccttcacttcaagcctctgtttgcagaacactttaaagatgttcctgactatgggttctcttctctatcaaaaaagtgagacttttaagagccaagggtaggggggttgccttaggaaagctagccagctgtctttcaaaagcattccctgggtgatttggtaggctcagaattctggttccatcggtgtacccaaaatagatttatctcatcagagggccaatgggactttaacatcagaatgccagttccgtaatttgaaataattgacgaagctggtccatgtaccggaaaccctatgtcaatatcaataaattactctcagagggctactctgatatccaatgcttctgttacttcaggtgaaactcttacttcttgcctgatacagctctgtggaccctcagtgtcaccagggaatacaatttgaatgacaatcatccattctaagcttcttatgtcacagatcacacatctgtgtaaggtgcgaagaagtacaaacaagtggacactcattgtccccgatttcacagagctatgggttatggctccattggacatcattatacaccag

SEQ ID NO: 286280 - DNA, 622 bp, Homo sapiens
ggaatgtcgtttatacccatctgtaattcctcatccattttcacaggcccttcacttcaagcctctgtttgcagaacactttaaagatgttcctgactatgggttctcttctctatcaaaaaagtgagacttttaagagccaagggtaggggggttgccttaggaaagctagccagctgtctttcaaaagcattccctgggtgatttggtaggctcagaattctggttccatcggtgtacccaaaayagatttatctcatcagagggccaatgggactttaacatcagaatgccagttccgtaatttgaaataattgacgaagctggtccatgtaccggaaaccctatgtcaatatcaataaattactctcagagggctactctgatatccaatgcttctgttacttcaggtgaaactcttacttcttgcctgatacagctctgtggaccctcagtgtcaccagggaatacaatttgaatgacaatcatccattctaagcttcttatgtcacagatcacacatctgtgtaaggtgcgaagaagtacaaacaagtggacactcattgtccccgatttcacagagctatgggttatggctccattggacatcattatacaccag

SEQ ID NO: 286281 - DNA, 622 bp, Homo sapiens
ggaatgtcgtttatacccatctgtaattcctcatccattttcacaggcccttcacttcaagcctctgtttgcagaacactttaaagatgttcctgactatgggttctcttctctatcaaaaaagtgagacttttaagagccaagggtaggggggttgccttaggaaagctagccagctgtctttcaaaagcattccctgggtgatttggtaggctcagaattctggttccatcggtgtacccaaaatagatttatctcatcagagggccaatgggactttaacatcagaatgccagttccgtaatttgaaataattgacgaagctggtccatgtaccggaaaccctatgtcaatatcaataaattactctcagagggctactctgatayccaatgcttctgttacttcaggtgaaactcttacttcttgcctgatacagctctgtggaccctcagtgtcaccagggaatacaatttgaatgacaatcatccattctaagcttcttatgtcacagatcacacatctgtgtaaggtgcgaagaagtacaaacaagtggacactcattgtccccgatttcacagagctatgggttatggctccattggacatcattatacaccag

SEQ ID NO: 286282 - DNA, 575 bp, Homo sapiens
gctctgcacttcatttatgcaatgctcactctcactcttgaccaggacaatttatcttggatcagattcttttctggagtaaaccagatagtagctgtcatcatcttaaagactatgtccctctttccaataggaaaattgaaaacgctacatagtcaaggtttttatttatgtctgagacagcactcactctgcatataaagcaggtaaaaattctaatgttagacgtatttgagataaagcatttttaacatgtgacaagaaagatatttgatgtgtaagaaacttgtgtgtgggagccagtgtttttgtaaacttctattgtgtcatgattcccgggcctcttacgaatgtaatgcacaccctccccaaaccttgctgttccctttgttatgataaatgggcagtaatacttaaaatgggttctggattccaaattttaagttggacyaaattctttaaagtccctcatttaactttagccttaattctgaatttgaatgaaataattttttttttttttacctaaatgctcagcagtattcccctgattatcacaaaaaagtcttctgttc

SEQ ID NO: 286283 - DNA, 517 bp, Homo sapiens
cagcgtttgcagggtggtcagtggaaacctggtgagttaggagggtctacccagcgaaggaaccaagtggtgggcagggaggagagtttgggaggcttcagatggggtctaaatgagaaatgaagctcacagaagtgtgggagctagtgaaacttgccctggaggtcttgacatgtggatatgatattaacagagattattagtacagaaggaaggtaactgatgaagagaaatgatgagatcagggaacaacacagaatatttctggatgggataataaaaatgaatttttgctgagccytaagagatgggaagaaactggaggtgagtcaatgaggagaaactcaagacagtgtgtgtaaagagagcaccacagtagcacaggctatgatcagagatcagtcaagctttctttgtcctgaagtcgaaagtatccatgagcagccaaagatacacctggaaagccgcactaagccaaattctagagggtattatggttctgggtaaggagctggtg

SEQ ID NO: 286284 - DNA, 535 bp, Homo sapiens
ggagctagtgaaacttgccctggaggtcttgacatgtggatatgatattaacagagattattagtacagaaggaaggtaactgatgaagagaaatgatgagatcagggaacaacacagaatatttctggatgggataataaaaatgaatttttgctgagccctaagagatgggaagaaactggaggtgagtcaatgaggagaaactcaagacagtgtgtgtaaagagagcaccacagtagcacaggctatgatcagagatcagtcaagctttctttgtcctgaagtcgaaagtatccatgagcagccaaagatacacctggaaagccgcactaagccaaattctagagggtattatggttctgggtaaggagctggtgcttgtcaacgtacagtgagggtatttgagagattggagagaataaaggatggatttgggaaggtcagttragagaagactaaagtaacaggaaagtcatgggaattcataatggtggataagaagaaaggaaacataaagagatggagaaatgacag

SEQ ID NO: 286285 - DNA, 594 bp, Homo sapiens
gaaaaccccatcgatttgcccagtgtaacagagcctggtcagtgcttcccctactaatcagagcaatcactctccctccacgctgtcctggatcagagtccctcattccctggctctccagmgtgcacccagtgctcagccagcagcctcctgcagacagatggagccctctcaggcccacagagcaccagggctctttctataaggttggtgcaaaagtaattgcggtttttgccattacgtttttttgttgttgttgttttgttttgagatggagttttgttcttgtcacccaggctggagtgcagtggcacgatctcggctcaatgcaacctctgcctcccaggttcaagcaattctcctgcctcatcctcccgagttgctgggactacaggcacatgccaccacgcccggctaatttttgtatttttagtaaagacggggtttcaccatgttgaccaggctggtctcggactcctgaccatgtgatgtgcccgccttggcctcccaaagtgctgggattacaggcgtgagccacagtgcccggcctcaagttgtcttcatctctttgtctccctcctcagactgctggct

SEQ ID NO: 286286 - DNA, 594 bp, Homo sapiens
gaaaaccccatcgatttgcccagtgtaacagagcctggtcagtgcttcccctactaatcagagcaatcactctccctccacgctgtcctggatcagagtccctcattccctggctctccagagtgcacccagtgctcagccagcagcctcctgcagacagatggagccctctcaggcccacagagcaccagggctcttkctataaggttggtgcaaaagtaattgcggtttttgccattacgtttttttgttgttgttgttttgttttgagatggagttttgttcttgtcacccaggctggagtgcagtggcacgatctcggctcaatgcaacctctgcctcccaggttcaagcaattctcctgcctcatcctcccgagttgctgggactacaggcacatgccaccacgcccggctaatttttgtatttttagtaaagacggggtttcaccatgttgaccaggctggtctcggactcctgaccatgtgatgtgcccgccttggcctcccaaagtgctgggattacaggcgtgagccacagtgcccggcctcaagttgtcttcatctctttgtctccctcctcagactgctggct

SEQ ID NO: 286287 - DNA, 494 bp, Homo sapiens
ttacttccagccattatgttaagaaacatctctgttaaatgtgaggcattgtataggctcgaggttatttaggtggacaagttgcttcagctgtagaatttgaatccaatttaactgtattgaataggcagattgagaggttatatattttcacctactttttaaaataattaaataaatagttatttaatgtccccaataaaatgaccttgccgaatattgaatatgcattaatttatacagacattttggttaatgctatggatttggggcttcctagcctccacgtctgtctgttgttgaggccactctgtctgtggtacttygttacagcaggccaagcagactgagacaggaaatttcacaggtagattcctttgtacagaagaattgactgaaaaatcaattaactcctttcttctgtgttaatttcattttaattagtttcattcaattgcaaaaatctaagtgacaattcaattatagttaacatt

SEQ ID NO: 286288 - DNA, 494 bp, Homo sapiens
ttacttccagccattatgttaagaaacatctctgttaaatgtgaggcattgtataggctcgaggttatttaggtggacaagttgcttcagctgtagaatttgaatccaatttaactgtattgaataggcagattgagaggttatatattttcacctactttttaaaataattaaataaatagttatttaatgtccccaataaaatgaccttgccgaatattgaatatgcattaatttatacagacattttggttaatgctatggatttggggcttcctagcctccacgtctgtctgttgttgaggccactctgtctgtggtactttgttacagcaggccaagcagactgagacaggaaatttcacaggtagatkcctttgtacagaagaattgactgaaaaatcaattaactcctttcttctgtgttaatttcattttaattagtttcattcaattgcaaaaatctaagtgacaattcaattatagttaacatt

SEQ ID NO: 286289 - DNA, 622 bp, Homo sapiens
aagattctgcaaagtaaagaattttctcctaatttgtttcacttttgttttgcattgaaaaaatgaccacataaactgttcatacactttcagaagcttggattaagtctttgcgtggagcttgtcatgactgtaaaggttgagatctggaagaaatgatcttgttcagagataaactgtgtgttcaaaaataaaaagcaatattttagtttttctaggtctcaattttgctggargctacagatactaatggccactgttaagtattttcttcagatctggagaaaaattttttcttagcaatggtttctttcctttaataaagattcctccagaaaacattattgatactattacgtattttttaaaaaggtggagtataacagtgttatattatgtatcaatcgtttctaatcatctcaaattgggaaattcatgacttcaaaacagttcagtgtaaaaacccttcagttttcagcaattagatcatttaaagagtaatgggaagagaatgaggatgatgcttaacagttaatcaggagacaaagatctctctgatcctgtgtaagtagccattgaatgaatggagatgctaatgcattaaaaggtgttacattgttat

SEQ ID NO: 286290 - DNA, 619 bp, Homo sapiens
ctggaaaacatggtttccacattcytgtcggtgtggttgttcttgtgggttgaagcactcttcattggcctaataagtcatttgtctacacatgaacatacgaaaatagtttcttttcccaggggtacattcaataacatacatcttcattgtgcttgcattgcataaactctagcaagattctgttgaaaatgcaaccaatgatgaaatatatcaagggtttttttaaaacaaaaattacattatccttagaataaatacatacatacacacagactgattttctcttcagcaatattttaatgaaaccccatactgcaaattacataaactagttaaagtacaccaacctcaaggaaaacaaaataggaagaatttccttaaggtctgtgccttcaaaggtgatccaataacctttgttgagatgccaagggtggaaggtctagaggagatgaccagtgagttatacccaggatcccataggtgacattgccacggcaaaattattaataaccccctttcactcacccaaaaaattccaagttggacaatatattatatggccaccctaatattaacaaaagctctgaaaataatatcctgcctttctgcatatata

SEQ ID NO: 286291 - DNA, 619 bp, Homo sapiens
ctggaaaacatggtttccacattcttgtcggtgtggttgttcttgtgggttgaagcactcttcattggcctaataagtcatttgtytacacatgaacatacgaaaatagtttcttttcccaggggtacattcaataacatacatcttcattgtgcttgcattgcataaactctagcaagattctgttgaaaatgcaaccaatgatgaaatatatcaagggtttttttaaaacaaaaattacattatccttagaataaatacatacatacacacagactgattttctcttcagcaatattttaatgaaaccccatactgcaaattacataaactagttaaagtacaccaacctcaaggaaaacaaaataggaagaatttccttaaggtctgtgccttcaaaggtgatccaataacctttgttgagatgccaagggtggaaggtctagaggagatgaccagtgagttatacccaggatcccataggtgacattgccacggcaaaattattaataaccccctttcactcacccaaaaaattccaagttggacaatatattatatggccaccctaatattaacaaaagctctgaaaataatatcctgcctttctgcatatata

SEQ ID NO: 286292 - DNA, 226 bp, Homo sapiens
acctcccatatgcagccatcgactctgcctgcgcytaatcacagaaggctaccgcaagcccagagttttcaccagagtatcccccatcactctaaaatacagcagcctcaagaaatagcagttgttttctccagtttctataactgctgtgtattatgtgtcgcactgaaaattagaaagataggtactcctgaaaaatccaaagcttagattttttctcattttt

SEQ ID NO: 286293 - DNA, 226 bp, Homo sapiens
acctcccatatgcagccatcgactctgcctgcgccyaatcacagaaggctaccgcaagcccagagttttcaccagagtatcccccatcactctaaaatacagcagcctcaagaaatagcagttgttttctccagtttctataactgctgtgtattatgtgtcgcactgaaaattagaaagataggtactcctgaaaaatccaaagcttagattttttctcattttt

SEQ ID NO: 286294 - DNA, 597 bp, Homo sapiens
atggcttggattagtttcacatttacttggccgttcatatagtatttggtttcctattcatatttttattctcttttttttcatgattacagtctgaatccgataagaattccaatttctcatgtaaactaagttgtttgtaagttttcacatttgtacttctgttctggggaacttgacttatggtaattctttgcattctgctttgaaggtacacccatccagaggagagtcacattagattacaggatctgcctggaacaacagaaaacctccttttttcaaaaataaattaacagcttgaggcattttggatcccagggatggtagaaattcacctacagactagtgtgaatcccgccggcggttgtgagttgcatgcatctatgtctctgtcaacatcgatgtctgtstattctccccactctgtgagtagaacaccctttggtgttccagctatacatgagggtctcctatgatattttcaacctcagaaagaccttagatttgctttctattccctgagccaagggactctgagagtggaagctccacatcacagaggatcagcagaggcaatcagggcagggctggctt

SEQ ID NO: 286295 - DNA, 597 bp, Homo sapiens
atggcttggattagtttcacatttacttggccgttcatatagtatttggtttcctattcatatttttattctcttttttttcatgattacagtctgaatccgataagaattccaatttctcatgtaaactaagttgtttgtaagttttcacatttgtacttctgttctggggaacttgacttatggtaattctttgcattctgctttgaaggtacacccatccagaggagagtcacattagattacaggatctgcctggaacaacagaaaacctccttttttcaaaaataaattaacagcttgaggcattttggatcccagggatggtagaaattcacctacagactagtgtgaatcccgccggcggttgtgagttgcatgcatctatgtctctgtcaacatcgatgtctgtgtattctccccactctgtgagtagaacaccctttggtgttccagctatacatgagggtctcctatkatattttcaacctcagaaagaccttagatttgctttctattccctgagccaagggactctgagagtggaagctccacatcacagaggatcagcagaggcaatcagggcagggctggctt

SEQ ID NO: 286296 - DNA, 605 bp, Homo sapiens
agactggaacacagggaaatccaagcatattactccaagagaagcctgggagagcagaggaaggcaggatagatgtgaagatgcaacacttacagttagaaagtcacgaaggtctcacccataagccacacatttttctaacgtagaacactaatcatagaatacaatcaccagaatcacaaggcaattggccatcatcttggtaccaaaggggtacccttcctgaaccagcattttacacraattcttgaatttactctttgagtgatattcctatagaatctatgatcaactgttgttgagatttctctggttttcagaaaataatcaaaagcaaatcctactgtacatgcacaatcttgttcatctgaatgaacttcccatcttcaaaggaaaattcttcctttcctcaagcaagtggtgacatgtataattaagcactcatttgcaagtgataatttctgtcacagtttatataggttaaaaaattaacaataagtgtataatattaaaataattgtcatacagtgatagtcactgtaaatatcgcaacatttatacaatgaaatgaatgttatataatagtacaagaatttaaaaacaaa

SEQ ID NO: 286297 - DNA, 605 bp, Homo sapiens
agactggaacacagggaaatccaagcatattactccaagagaagcctgggagagcagaggaaggcaggatagatgtgaagatgcaacacttacagttagaaagtcacgaaggtctcacccataagccacacatttttctaacgtagaacactaatcatagaatacaatcaccagaatcacaaggcaattggccatcatcttggtaccaaaggggtacccttcctgaaccagcattttacacaaattcttgaatttactctttgagtgatattcctatagaatctatgatcaactgttgttgagatttctctggttttcagaaaataatcaaaagcaaatcctactgtacatgcacaatcttgttcatctgaatgaayttcccatcttcaaaggaaaattcttcctttcctcaagcaagtggtgacatgtataattaagcactcatttgcaagtgataatttctgtcacagtttatataggttaaaaaattaacaataagtgtataatattaaaataattgtcatacagtgatagtcactgtaaatatcgcaacatttatacaatgaaatgaatgttatataatagtacaagaatttaaaaacaaa

SEQ ID NO: 286298 - DNA, 605 bp, Homo sapiens
agactggaacacagggaaatccaagcatattactccaagagaagcctgggagagcagaggaaggcaggatagatgtgaagatgcaacacttacagttagaaagtcacgaaggtctcacccataagccacacatttttctaacgtagaacactaatcatagaatacaatcaccagaatcacaaggcaattggccatcatcttggtaccaaaggggtacccttcctgaaccagcattttacacaaattcttgaatttactctttgagtgatattcctatagaatctatgatcaactgttgttgagatttctctggttttcagaaaataatcaaaagcaaatcctactgtacatgcacaatcttgttcatctgaatgaacttcccatcttcaaaggaaaattcttcctttcctcaagcaagtggtgacatgtataattaagyactcatttgcaagtgataatttctgtcacagtttatataggttaaaaaattaacaataagtgtataatattaaaataattgtcatacagtgatagtcactgtaaatatcgcaacatttatacaatgaaatgaatgttatataatagtacaagaatttaaaaacaaa

SEQ ID NO: 286299 - DNA, 572 bp, Homo sapiens
tcttctcatctcagccagggtgacttctcattctccccactgccaaaaataaggccacaaaaccctctgaaaacttcccctaagcaattttcaacatcatcctcaatcaccatcctccactctggcaaagcctacagaaacctctactcagatgctagcctctctcagcttggatgtgtgttcctgttacacactggactgaccttccccgccttgttgcacaagaaattccagtgtgcctatctcacattcaaaggtttctttagcgaagacaatcacattgtcacttccagtccccaaacacaatgtttatacttctataatagtgcttagcccattgtgggttaccattttattaatacagyggattaagttacttgagggcagatggtctttgttttcctagaacatgacatataatcaatatccaacaagtgtctgctaattagatatgcgtgaaaattttccacgtgcataaatgttgaaaatattagtatgactttgcataatgaatacctcttcatctactgtaaacaatatgctttgtaattgagctgagcttaattcaaaat

SEQ ID NO: 286300 - DNA, 1040 bp, Homo sapiens
tgttttctttttgtaaccctgttgaataatttctattgacctgtcattaagktaactcatcctttcttcagatgtgtctagtaaactggtatatttgtcaaaaaagtcttcatttctgttatctatttctttatttctaggattttcatttgattttaaacagttttctatttctatgaaaataccccacctcttcattcacattatcaaccatcatgccagaccctttaacatattatttacagttattttcaagtctctgctgtctctaagttcgtttctgttaatgccttatcttttaaaatgggtaattatagtgtttatttgttaattttgatgtatcataggttttattgaagagcagacattctctataaacaacaaaaaattagagactgaggtaaataataattaaaaccataatttggcacatcttttctttggccactactttgagatgttgagwaacgcatttgttgtccacatcactttctgttatgctagcaagagtacaaatatcttttaaaagtcaagagaaagcaagagagggagttaaacagaagaggtatggctaatatatttcttaaagttacagtagaaacatcagcacaaacactttaaaggaagcttgtccaacctgctgcctctgggcaacaagctgtccaggatggctttgaatgcagccgaatgcaaattgtaaactttcttaaaacatgagattattattattatttttttagttcatcagctatcgttactgttagtgtattttgtgtgtggcccaagacaattcttccagtgtgactcagtgaagccaaaagattggatacctctgctttaaagagtgtgaacagattttatgctgctaaatgtataatacttttagttacacatattaataatatctgggattcttctgatagctactaaattwtaaattttatttgaaagaatttgaacccatttttgagtgataagtgcattgcagcttactgtactgaggactggtgaagtttctaaataaatcatgtattttgtca

SEQ ID NO: 286301 - DNA, 529 bp, Homo sapiens
tgttcttatacatctttcttataaaggaagaataaagtaaagaatcaatctaatagagaatatagatgcatgtctaattggtctctgggtaggaaaaactttgcaagcataagaatatgaaaaaaaactgaaaattcaatagatttgatcacataaatgtttcaaacttttacacatcagaaaccaatataaatggagttaaaattccaaaataaataattaaatatttggcaacagggccagatgcagcagctcatgcctgtaatcccagccmtttgggaagccaagatgggtggattgcttgagctcaggagttcaagaccagtctgagcaacatgatgataccttactctacaaaaaatacaaaaattagccaggcatggtggcatgtgcctgtagtccctgttactcctatagtctcagctaactcaggaggctgaggtgggagaattgcttgaacccaggaggttgaagctacagtgagccatgattgtgccattgcactccagcctgcgtgacagagtgagac

SEQ ID NO: 286302 - DNA, 529 bp, Homo sapiens
tgttcttatacatctttcttataaaggaagaataaagtaaagaatcaatctaatagagaatatagatgcatgtctaattggtctctgggtaggaaaaactttgcaagcataagaatatgaaaaaaaactgaaaattcaatagatttgatcacataaatgtttcaaacttttacacatcagaaaccaatataaatggagttaaaattccaaaataaataattaaatatttggcaacagggccagatgcagcagctcatgcctgtaatcccagccatttgggaagccaagatgggtggattgcttgarctcaggagttcaagaccagtctgagcaacatgatgataccttactctacaaaaaatacaaaaattagccaggcatggtggcatgtgcctgtagtccctgttactcctatagtctcagctaactcaggaggctgaggtgggagaattgcttgaacccaggaggttgaagctacagtgagccatgattgtgccattgcactccagcctgcgtgacagagtgagac

SEQ ID NO: 286303 - DNA, 529 bp, Homo sapiens
tgttcttatacatctttcttataaaggaagaataaagtaaagaatcaatctaatagagaatatagatgcatgtctaattggtctctgggtaggaaaaactttgcaagcataagaatatgaaaaaaaactgaaaattcaatagatttgatcacataaatgtttcaaacttttacacatcagaaaccaatataaatggagttaaaattccaaaataaataattaaatatttggcaacagggccagatgcagcagctcatgcctgtaatcccagccatttgggaagccaagatgggtggattgcttgagctcaggagttcaagaccagtctgagcaacatgatgataccttactctacaaaaaatacaaaaattagccaggcatggtggcatgtgcctgtagtccctgttactcctatagtcycagctaactcaggaggctgaggtgggagaattgcttgaacccaggaggttgaagctacagtgagccatgattgtgccattgcactccagcctgcgtgacagagtgagac

SEQ ID NO: 286304 - DNA, 628 bp, Homo sapiens
acacacacacgcacacacagactaaaagctcagaagttaccatagcaacagtagcatctgctcctgacccatgtttggagaagttgcaatacacacagtccaaccgggttgggctgtgtaattcttctttcctgggactagagattcaaatttggttcaaattatacactttaataaagttcatcttgatttaaattctgaacttctcaagtcctgtttcctgagctccagccttatcatagcattcacaggaaaataaatcagctacagggtcacttagaacattgtaatggagtcacacacaamaggaatgaaatgcatctccaaacaagatttttggttagctatttttggttagcttgtggaaaataagagttcttgatgtgttcacaatgggccctgtccatgtgactaaacacaaaatcaatttacagacaaaaaattctcacggaaagaaaagaagagtacccttccctctgggaattcacctccctgctatcatacaggatagtaatattaaccattgtattttggtatcacagccgacctcactcttgattcttcatcttctctttgattattccttctcagtctctgtttttaccttcctcatcttctcaatgtttgt

SEQ ID NO: 286305 - DNA, 1216 bp, Homo sapiens
  misc_feature (1)...(1216): n = A,T,C or G
tttgaaaggtttacattacataaaattagggctgtataaactgtgtgcttcatctctttctctaaggtgattgcgccttcccttgaacacagtagcctgactgatagyccccattgtatgcaatgcacgtcaataaataccgaacatgaatgtgaatcaatattgtgttagtattgggattaagcaagctcttttctcctccttttttttttcttctggggagatgaatatgagtaaataaaatgagtgtttgtctgaaactgtgttgggggattaggctttgtgttttccttttgaggagcagcatgccaactggcaagccttggctggctacctgggccgagcacaaaaaatgagatgctcacccttgtggcagcgaggcctgctgctttgaaggacgcagggaggcaggcctcctctcacccagaaaagccaggtgcagtttctgcagcggagaaaggttatgcttcatatgacttcgttttctctctgcaaattaagggacaatttatgagtgtctagacaggaattaatcggaataatattggctgcttttgacccaagagtgctattaaaataaagwgaagttatagttaagagagagagtctgtnagtgcttatgagataaggagattggtaatgatggtnaaataataaaacagacggctggtgggagaccgcagatctaagacagaagtagtttctacgatttatacgaagtgagtatgtgagaatcttccacgatccctgtaagtactaaacctggagaatatatgttcaaatctaaatgtactaaattcctgtcaaatggaaacagaaatcttgtacwtaaaacaaaaaacaagaaaatgctagctttctctatgacaaaagtatgaaattcataaaaatttggaagttgccatttctatacaaataaaacatattatttttcaaaaatttttaaaaatgtttgtaaattcgctggctgagggtaggaagtatttacagaattaattcttaaagacaacaatttaaaccatctgattcatgatacgtcacctgatttcattgtatgttttctgactttgggtagtttatggaataaaaataaatggtttttctttaaccttttatttggtagaatataactgtttttactcaataagaaaaaaatacgatgtacattttgttattttaaaataacttttctcaattatcaattgtttaagtaaca

SEQ ID NO: 286306 - DNA, 578 bp, Homo sapiens
cttctagcacttccgagtgacttggaaaatgttatttgtttcttcttcctgcaaacatggctaacctttcttaagtttatgaattattgtaagtttcttattacggtatgcttgcccctcccccaatacagctagaaattacaggaagggccacgcatggtggctcacgcctgtaatcccaaaacttttggaaccctgaacaggaggatagcttgaggccaggagttggagaccagcctggtcaacacagtgatattcccttctctacaaaaaatagtaattaaagaaattagctgggtatagtggcacacgctggtggtcctagggagtctggaggctgaggtgggaggattgcttgcatctaggggtttgagactgcagtgagctatgctcacaccactgcattctagcctgagtgacagagtgagacccagtctccaaaaacaaggaaagaaaagaaatataccagcttcacgcagaatcccaaagagtaattctgagaagacagttcyagttaaaagctctgggaactgaactccaatgggaacccttaatacatcaaaactaaaaaaaagtgt

SEQ ID NO: 286307 - DNA, 543 bp, Homo sapiens
tgtccccttcctatctgattggatctttgctggagggagaattacaaggaaggagaaggttgatctcactctggctccccgaagactgggttaccagtactctcttgggtgtgcagtggagtcctgaccccaatatcttcattccttgccttggcagcagctcctcttggctaagagtccatcagcaagcctgactagattagaatgcaaaatatttaasttgcatatattaaagagaagagttctttcacattctgaaatccaaagatgagccattgatattcatttctaaataaatcccattttcattattggggagagcaggttattttggtaactcaagcaggatgacctaattaaaacttgatataaaaattcagcatgccatacagtactttacctgctcaaagtaaacacagacaagcacgatttattttactggagcatccctcatgcaaaattactagtgagtatatcacaaccaattacaggccactgtatatgcaaattattactctttcaattatttatagagaactgtga

SEQ ID NO: 286308 - DNA, 569 bp, Homo sapiens
agcgagactccatctcaaaaaacaaaaaacaaaaaamaaaaaaaaaaaaagaaagtcaccctaaacagagaaatattaatgccattaatgttgctattatccagacaaatattataacttaaaatcaatcagtttcatttttatatagaataaaccaaacatctgtcagaaaaaataaaaatgacagtaggaaagattaacataaagatatttttatttgtttttctctaaaaagaacttacatgttaaaaaagaaaaattaaagacagagaagagacttttataatttatgaattttctgtaaaaaatttctatttcctatattcctaaaaccacttccttcttctggcctccacattttgccaccccacacaccaccacatgcacacatttataaccaactcttttacattcatttaacagttgagctacaacaagagatgtatttcactgttgttgtgtctcttgtttgtttgttgttttttgttcctggcatcatacctctcttgctttcacctctttcctgccttttcacttataaatcttaattggacgtagtaacattgcca

SEQ ID NO: 286309 - DNA, 602 bp, Homo sapiens
attcagttgccctttgttcccttcttagtttcaattttcttgggaactttgtgatagtgaactaagttttttgcttaataatacttttcccagtttttaaggcaaacatagacatatgtacattaaaactttgaccagcaggcagaaacacttaatttttactgatttgatataaatatgttgagggtcatttccatttgactcttttatagtgaaggaaacagtttcttgaaagtcccttagcagtaagttaagggatcttagtatccagggatctcattaggaatgcctgccccattccatagctgtttcttactgactgtccaaagatccacaggtcttgcaatgccacagtgaaattttagagcttscactaaggaggcagcatcagacacacccgagaagcatcctctactcaattccagcccagtcatgttaccctgtaacttttagagcagcaatgattctgctttcttgtaagtaagataaaataatggttgaaatcaaccaagtgaataaagaattgacagaaaactccacaaccaatatcacaaggaaaaattagtcataaagaatttcagagttgggtttttttttccctt

SEQ ID NO: 286310 - DNA, 551 bp, Homo sapiens
aagaaattacagttgtcccttggtatctgtggaggattaattcctgcagataccaaaatctgmggatactcaagtccgttatataaaatggcatataacctatgtacattctctcatacactttaaattatttacagattacttataataactaatataatataaatgctgtgtaaatagttgttatactgtattgtttttatttgtattattttaattgctgcattatttttattttattttctattcacatattttccatctgtggctggttgaatctgcagatgcgaaatctgaggttaggagagccaactgtataaggaacaggtgtgtttccactttgcagggacacttcagtaactgccactctctgcttgatcaacagtagttccgactgcactgaaaggaatgtccgcctcttgtacacacgagcaagttaacctgtggcaagatctcacagattaagtcacgtggagataacacacaggctcaacgggttagacgcacggcagagcacctggataagccagataatttgtgcaacatattct

SEQ ID NO: 286311 - DNA, 589 bp, Homo sapiens
atgctgatgcaaggagcagctctgcttctgtgccgctgcctgtatagaccctgcagctgctttcatgggctgacattgagtgcctgcagcttttccaggtacacaggscaagttggtggatctaccaatctggggtctggaggatggtggcccttttctcacagttctactaggcagtgccccagtagggactctgtgcaggggctcaaacctgacacttttcctccacattgcccaagtagaggttctccacaagggcaccgtccctatagcaaacttctgcctggacatccaggcatttctatacattctctgaaatctaggttgaggtccccaacctcaactcttcccttctgtgcacctgcaggcccaacaccatgtggaagccaccaaggcttgggtttgtaccctctgaagcaatggcctgagctgtacttggccccttttaggcacagttggagttggagcagctgtgatgcagggtgtcatgtcccaaggctgcacagagcagtggggccctgggcctagtccatgaaatcatttttacctcctagatatccaagcctgtgatggaaggggctaccacaaa

SEQ ID NO: 286312 - DNA, 585 bp, Homo sapiens
tggagtgtgtgaaagtgcttcctctccccattccttccttggcagtggcagtggtggtggcagctggctctgggctgtagctgctcagggatcaaaatcctgtgggagtccacatgcactcaagcagtgcctctgcacagtctccaggcagctccctgtgttagcctagaggtccaggggcacttagggaggtctctcaggactagaattgtaaaggtctttggcagaagtgtgaaaccccaggagtctctcacctactcatcccttccccatgtgagrgagcatctcttggatcctcgctgctcccagcccagcaggctgcccagctctgctctcctctgctttctgtgattcctgtcacttctctgttgaattccaatgtcctctcagagatgatctacctgaagtcttaatatttactcactgtttggattcctctccgtgagggcagtacccactagctgcttctagtcaacttgcaccagaactagttttatatttaaattgaaaagatattaccaccgagttttccagaaagattgtatcattttactaccatatgaacaacatcatgggagttattcc

SEQ ID NO: 286313 - DNA, 643 bp, Homo sapiens
gttcattgtaatacttttctatttggttctgagtggccccatgtattcatttttaaattgcaatttggatgcttcatactaaatcattttgatagcatatattttgttcccctttggagattaaagaacacatgtcttgactcagtttgaagcaaataatcctcttaataagaagatgatctcagccacgtgtttctttgattctttttggtacaagtgtgttaattagaaatgagtcaatggtagcaggaagagttgatacccaatttaattacatttccttgaaataatacaagtgggtaactgatacattatatttctcagatatacagtaagaacagtttggtattattagtaagaatttaagatagtgtaagtaatagtttaayttgcattagatgtatttttctaggtttacttttaattgaagtatgataagaataacattctttcagaatttgtctgatgtgtttaaaactttttcagaaaatgagaaatttttggttaaaactataaagaatttaatacagaacaaatagattagtaaatagagaggcatcttattttaaccctaattagaagaataatcttgaaacattttgaaagtctgaaggtgacctcttcatgagctttttatacatgg

SEQ ID NO: 286314 - DNA, 630 bp, Homo sapiens
ataatgcaaatttctgaaatattaatgtcaaaatcaaatatatttaaatattatctttctcatttctaaccttagaaatgtttaagattacaattttatatgtataatcaccaggcctatgcatcattgttctaattaaaattctccttctgcgtgcttttagctgtgatttttgaagcagcttataaaaataaaaataaaaagtcacaaatattttcgataagctgtgatacatgtttcccagaattgttgttaagcgtttcttggaatttctcaggaagtttgtgaaatatttccatgcatatagtgttaattaaaaggtaatataaaagtatctttagctcagaggctttacaaatatggtttcatggtaatggacagactctggaaactgatagccataaaggcttatttcagcatatggaagcttagatctctctgataattaaaagtyaacaaattcacattaaaaaaattatgcagcagagactgcttgattttgttggtaaagaaatgctttccttcaacaggcctgctgtgtttggttaaaatatcttaaacattttatgtattgttaatttttttacactttgaaagcttccacttctgctaaggaagaagacaatataa

SEQ ID NO: 286315 - DNA, 630 bp, Homo sapiens
ataatgcaaatttctgaaatattaatgtcaaaatcaaatatatttaaatattatctttctcatttctaaccttagaaatgtttaagattacaattttatatgtataatcaccaggcctatgcatcattgttctaattaaaattctccttctgcgtgcttttagctgtgatttttgaagcagcttataaaaataaaaataaaaagtcacaaatattttcgataagctgtgatacatgtttcccagaattgttgttaagcgtttcttggaatttctcaggaagtttgtgaaatatttccatgcatatagtgttaattaaaaggtaatataaaagtatctttagctcagaggctttacaaatatggtttcatggtaatggacagactctggaaactgatagccataaaggcttatttcagcatatggaagcttagatctctctgataattaaaagttaacaaattcacattaaaaaaattatgcagcagagactgcttgattttgttrgtaaagaaatgctttccttcaacaggcctgctgtgtttggttaaaatatcttaaacattttatgtattgttaatttttttacactttgaaagcttccacttctgctaaggaagaagacaatataa

SEQ ID NO: 286316 - DNA, 561 bp, Homo sapiens
tttttgaaaatcattgaggctgccacttccatcggctcagaatgccaaggctttgagggcaaaacagtttcaaggaaggggaataaggcacacctggaactgcagggctgatttctcagggccacctcaagtctctgttccctaaattgtgttgcagcacttgccaccccagctgtggctcaagttagcccaggcatggcttaggctgcccttctcaaaggcagtacaagtagtaaaccttggcagtgtccatgtggtgataaccttgcatattagcagagtgcgagagctgtggaggcacgactacctccatttagatttcagatgatgtctcagagagtcttgggacccaggcacagaactgccacaggaacatggctggtgcagagtccccactagggcaatgcctagtgaagccatgaggacagcttcaccactaagacctcagaactgtacaaccaccaamatggaactccagcctgggagagtgacagacactagacttcaaccctggagagctctggtgtgggctttgccccacaaagctatgaaggcaggatc

SEQ ID NO: 286317 - DNA, 622 bp, Homo sapiens
tgaatggtctttactgtattgaggtaagttcctttggtaaccaattttgtttagaatttttatcatgcatatatgttgaactttgtcattgtcaaatgttttgtctacatttattttacgatagaaaaatgtaatccatttatgtttaaagtaattattaataggtaaggacttactagtgccattttgttgtattctgactgttttgtagtttaatctttgttttattctttctctcttgtcttctttttaatgtgattaattttttgtaatggtatgctttaattcctttatcttttttgtatgtggtacasgcttttgcctttgtatgttgtggctactatgaggcttacatagaatatcttttagttacgatattctattttaagttgataacaatctaacttttactgcatacaaaaccctacattttaacttcccctccaccaacttttatgttactgatggcacaatttaccttttacatattaagtttccattgccaaattattatagctagttcttttgaatacatttgcctttttactttaatactagaattaaaagttattcatgcaccatcattagagtattagaatattctgaatttgaatatagtttt

SEQ ID NO: 286318 - DNA, 622 bp, Homo sapiens
tgaatggtctttactgtattgaggtaagttcctttggtaaccaattttgtttagaatttttatcatgcatatatgttgaactttgtcattgtcaaatgttttgtctacatttattttacgatagaaaaatgtaatccatttatgtttaaagtaattattaataggtaaggacttactagtgccattttgttgtattctgactgttttgtagtttaatctttgttttattctttctctcttgtcttctttttaatgtgattaattttttgtaatggtatgctttaattcctttatcttttttgtatgtggtacacgcttttgcctttgtatgttgtggctactatgaggcttacatagaatatcttttagttacgatattctattttaagttgataacaatctaacttttactgcatacaaaaccctacattttaacttcccctccaccaacttttatgttaytgatggcacaatttaccttttacatattaagtttccattgccaaattattatagctagttcttttgaatacatttgcctttttactttaatactagaattaaaagttattcatgcaccatcattagagtattagaatattctgaatttgaatatagtttt

SEQ ID NO: 286319 - DNA, 420 bp, Homo sapiens
attgtaagtgaagaaggagagtctgcaattaaagaatactcctggctaggtgcggtggctcactcctgtaatcccaacactttgggaggccaaggcggktgaatcacgaggtcaggagttcgagaccagcctgaccaacatggtgaaaccccatctctactaaaatacaaaaattagccaggcatggtggtgtgcacctgcaattccagctacccaggagcctgaggcaggagaatcatttgaacctgggaggcggaggttgaagtgagccaagatcatgcctttgcactccatcctggacaatagagcaagactctgtctcaaaaaaaaaaaaaaaaaaaagaatactcctttgcacattaactttatatttttgctctctaggatgcaaacaataaacctcagaacatctcaaaccca

SEQ ID NO: 286320 - DNA, 420 bp, Homo sapiens
attgtaagtgaagaaggagagtctgcaattaaagaatactcctggctaggtgcggtggctcactcctgtaatcccaacactttgggaggccaaggcgggtgaatcacgaggtcaggagttcgagaccagcctgaccaacatggtgaaaccccatctctactaaaatacaaaaattagccaggcatggtggtgtgcacctgcaattccagctacccaggagcctgaggcaggagaatcatttgaacctgggaggcggaggttgaagtgagccaagatcatgcctttgcactccatcctggacaatagagcaagactytgtctcaaaaaaaaaaaaaaaaaaaagaatactcctttgcacattaactttatatttttgctctctaggatgcaaacaataaacctcagaacatctcaaaccca

SEQ ID NO: 286321 - DNA, 583 bp, Homo sapiens
ccattgtcacatgtaataaaaactctgaacctaatgttaattagaggcttcctcaagacctggcttaaatcaggaatgctactgttagtgacccctcaagagttggcgtgtcaaagccataagaggaagaggagcagaaagactttgtcatggacagtgtagatggtctggcttggacacactctggacttggcagaagttttagatgattttattyctgtactagcttgctaaggctgctgcaatgaaataccacaaactggtagcttaaaccacagaaatttgttctctcacaattcaagaggttagaagtcagagatcaaagtgcagaactggtttcttcacaggcactgagagggagaatctgttggcttctctccaaggttctgttgggttttttggtgatcattggtgttccttggcgtatagacatatcattataatctctgcctgtgaagaccttcaacttcacctggcattctagcgtgtgagtctctgtgtctaaatttcctcttttttgtaagcacaccagtcatactggattggaacactcagtggcctcattttaatttgatcatgtctg

SEQ ID NO: 286322 - DNA, 589 bp, Homo sapiens
gtgttttaggtaagaatcaggcactagactactagatgtccccaaactttgtgaaatacatgttaaatgggccagtgttttgcatgttgtccacaagtctgtggcagtcaggtatgttgctcaaatcttcaggctaacctactgtgaggagcatagctgactgacagtcccttctgctgcctcttcaattacaatgtttgcatcaaggctgcacttactctggttgctctcaygtaatgactaaggtactactgctagtccatttctacctgatagggattacctgtaattagggtagccagataaaatgcaggataccaattaattttgactataggtcaacagtaagtaatttttttgtgtaagtatacatacaatatttggggaatccttctactaaaaattattttttgttgatttcaaaatcaaattgaactggttatcctatataattattttctaaaactacctataatgacaatggttgcttgagtgcatcccaccatccttgctgaaaattactagaaatgcactagtgtgaggctcttctgtccaacccttctttacctccactgttttacaaatgtca

SEQ ID NO: 286323 - DNA, 647 bp, Homo sapiens
acctgctcctgtactggattcagttgagagcaatcactccataaatcacttgctcaagaatccttgtctcaggctcttcttttagcgaaactgacttacggaagaagggcttaatgctctcaaagaagataagtaataatatagtgaaacaagggagaagttcagtgacttgccaagtcatgctgttgttggatccagcccatgttctcactaggattgaagttgctatttccccartcataaaatgtaaacaaacatttccatgttcaagggccagagttcctctccatgaatgtgatatctgacaggccctactaaattcctctatgatctttctgaaccttgttgcataatgagaaaccacacaccttatcttgttcctggttcttggattttcctctaatacatactgacccagaaaatctgatgaaaatcatatcttgtgtttctttgggcaacagaaaataacccctatagttactaaggaaaggataaaaaattgaaagaaagtaactgtgtgacttctgtctttacatccaaattatttgagtggatagaaagattttgtagattaaattattcatatttcagtcactctcaataacttgttcattttaatgtaaaatatctctctcttttcttttttt

SEQ ID NO: 286324 - DNA, 647 bp, Homo sapiens
acctgctcctgtactggattcagttgagagcaatcactccataaatcacttgctcaagaatccttgtctcaggctcttcttttagcgaaactgacttacggaagaagggcttaatgctctcaaagaagataagtaataatatagtgaaacaagggagaagttcagtgacttgccaagtcatgctgttgttggatccagcccatgttctcactaggattgaagttgctatttccccagtcataaaatgtaaacaaacatttccatgttcaagggccagagttcctctccatgaatgtgatatctgacaggccctactaaattcctctatgatctttctgaaccttgttgcataatgagaaaccacacaccttatcttgttcctggttcttggattttcctctaatacatactgacccagaaartctgatgaaaatcatatcttgtgtttctttgggcaacagaaaataacccctatagttactaaggaaaggataaaaaattgaaagaaagtaactgtgtgacttctgtctttacatccaaattatttgagtggatagaaagattttgtagattaaattattcatatttcagtcactctcaataacttgttcattttaatgtaaaatatctctctcttttcttttttt

SEQ ID NO: 286325 - DNA, 539 bp, Homo sapiens
cgtatcatatactcacataaacatccaatttgacaactagaacttgagcagtacagttaaatattatacacctccccatacattaattaaaatattgtatgaattaaagcatgtatcatctctctagaagttgttaccaatttcatgtctattcttccaggctccccccatctgtgtgtgtgtgtgtgtgtgtgtctgtgtgtctgtgtgtatgtgtccttgatatttcacatatagtgtcatacagtaaagggcattttgattttttcttaaccatatgtcacagatataatatcctctgtctctctctgtctctctctctctcacacacacacagacacatatatrcacatacttatatttatttattttgaaataaatgttgtactgctcattcttgtctatatttctttgtccatgtgtgccaactatttttataagatatatttgtagaaaggatgtaaggctggcactacattaggttgcatcactttcaagttatttggcctggagcaggcctatatgaactattcttgaag

SEQ ID NO: 286326 - DNA, 532 bp, Homo sapiens
aaggctggcactacattaggttgcatcactttcaagttatttggcctggagcaggcctatatgaactattcttgaagactaaatgaaattcatattctcttggtttatcctgacacaggtagtaaaaaatgattattgttctgctaagttcagtgtagtttattaaaatttgaagtctattcacaaaataatgaaaatcaagctaacatctctttttaaaaaatytcacttgattgctgtaggctgattctggaactccatgaaaattaatccatggagtttcagtagctagtccaggcagagctgtcaatgcaaatgtccagaacaagccggcaaccgtggccctaaagactacccagagacacagcctttctgttatctgaccttccttctgccctgaaaatacatcagtgtcagtcatggccctggaggtaaagacagagcatccttgaacttaatctagcaaatcacatccaacagaatgtcgacttgccttgcagggatcatattgactgaaaatttgcatttgctg

SEQ ID NO: 286327 - DNA, 600 bp, Homo sapiens
agaacaagccggcaaccgtggccctaaagactacccagagacacagcctttctgttatctgaccttccttctgccctgaaaatacatcagtgtcagtcatggccctggaggtaaagacagagcatccttgaacttaatctagcaaatcacatccaacagaatgtcgacttgccttgcagggatcatattgactgaaaatttgcatttgctgtcttctgatgtttctccttttccatgtcttctaatttatacaattctgtatttcatgtttaatgagctcttggcagagrtgctataatacgaagtcacaaacatcaatttctctcagtggttatattattataaattagtaatatgacactgtacctgaactagatttatttttattgacttgttttcttgttccgtgggtaacatggacaaatatatgatgcaaagcaccaaattggctgcagcacattctctcctgttatctgttttaccagacaggctcaaccacagtttataccacctattggaattatcacaaaaaaaaactaagcagtttatttttcttaaggcaaagtgttgattatgagaatcatcagcatatacagccta

SEQ ID NO: 286328 - DNA, 495 bp, Homo sapiens
tttctccctttccaatgaattgttatttaaaatatttttttcttggcgaatttygaatgccttgcatgcacgttttatgtgattttcacagtatttattgtgaggtagacatatttgttgctattgctgccaccttagtataacaaaatgtgaataattttaaattattttactaagcccacatgtattgtaagtaactgaaaagtctataaaaatgtgtgtttccttgttttgcagcattctatccactctatcattctactccaataaaacttggtctttgaagggtaaatattaaaatatgtcaattactcatgtgattaaatgcctagacacaaaaattttgctgaattatataaatatatacaacaaagccttgaagaagcttaaaatttagagagatatgactggagcatgagacataaaaagtgaatattatatagttaaagcgttaatgacattgtatgaactttaaattgccataggaactcctac

SEQ ID NO: 286329 - DNA, 1068 bp, Homo sapiens
tttctccctttccaatgaattgttatttaaaatatttttttcttggcgaattttgaatgccttgcatgcacgttttatgtgattttcacagtatttattgtgaggtagacatatttgttgctattgctgccaccttagtataacaaaatgtgaataattttaaattattttactaagcccacatgtattgtaagtaactgaaaagtctataaaaatgtgtgtttccttgttttgcagcattctatccactctatcattctactccaataaaacttggtctttgaagggtaaatattaaaatatgtcaattactcatgtgattaaatgcctagacacaaaaattttgctgaattatataaatatatacaacaaagccttgaagaagcttaaaatttagagagatatgactggagcatgagacataaaaagtgaayattatatagttaaagcgttaatgacattgtatgaactttaaattgccataggaactcctacwtattaccattccacattctctggagtatctaagggtcattatcttccaatgttaaagtagcttattttaagtcttaattcatgaatgttgtctgctgagagtaaggctgttcaggactaagttacaagacatgaatatatgagttgctgagtgggtaaagagggcaagatataaattcaggttcactaaaatttgtttgagcagtgaaaatactagctttgctgtagaaaactaaatgcattttttttctacataaactgataagcttcctttttggtgatataacaactctttgaaccagatggcacactttttgctgagcatgttctaaggtcttgcctaagttgcagaacaaaagagaacaaattgtgggaagatttaaatagtaaaaaattccaaagtttcttttggtttgattaaaataatatgttaaagctgggcatggtagcttatgccwgtaatcccaacacttagggaggctgaagcaggaggatctcttaagcccgggagttcaagaccagcctgggcaacataacaagacctcatctctatttaaaaaaataaaaataaaa

SEQ ID NO: 286330 - DNA, 501 bp, Homo sapiens
tggggagatttataagtctgagagaggcaatgatggcaaagcatgaggtgtgaacacagcttagattcaaactctgacttagacattattagctgtatgttcctacttatcctttttgtgcacagttctctcattggtaaaatgcatctattaatatctgcctcaaagcgtcatttcgtaaattaaatcagaaaatatatgaactatgtaaagaattaaatcaaaacttatacaaaacacagaagctggcacagcaggcttcagcatgctatccgctcgctccattcactccattagcattgtcatctgtgtctccacacccctttcagattccatacacctctgaaagtctgattttcctgtacttgcctcagcatcttgtgtaacaatttccaaaatacagataatgctcatgcattgtagagggtggagactgggaaaagtgaataccccaaaacytaagctgttgatcaggttcatggactagtagtgagaagatcc

SEQ ID NO: 286331 - DNA, 634 bp, Homo sapiens
cccttgtgatccaagagatccaagagtgtgactggtatgagttcatgtttttttttttttttaatttgttgatatttgctttatggctaagcacgtggtcagtcttggagtatgtcccatgtacagatgtcaagaatgtatatcttgtggctgatgggtgatgtattctgtagatgtctattaggtctaattggtcaagtgtcatgtttgggttcaraatttgttagttttttgccatgatgatctaattctgacagtggaatgttgagtccccagtattattgtgtgactgtgtaagtcttgttgtaggtctggaagtacttgttttatggatctgggtgctccagtgttgggtgcatatatatttaagatagtcttgtcgttgaactctttatcattaagtaatgcccttctttgtacttttttactattcttaatttaaattattactcagcatttttcaaacaatgtcaaataacaatgaaggcaaatgtccacatttttgctttattcctaatgggaataactaatatcttaccactaggcactagtggtaaatgttgcatatgttaaaggtaaattttctttattttgtcaaggaagaatcctctatgtagtacattaaaactatttt

SEQ ID NO: 286332 - DNA, 622 bp, Homo sapiens
aaatgtcttcatagaaccaggtagaagctatgttgccttgtcttgcatgatctagccttgaaagttacttttatcacttttgccatgtttgtgaggctgcccagattaaagagacagaatacaaatcgcatttatgtaaagtcatattataagaagagcacgtgggctaggaaatatcattgcaattgtcttttggaaaatgcaatctgccactctgtgcaatggaaaaccactgcattattttgagcagagcagtaacatgatytaactcacatttaaagaggacctttctgattgctatgttgagaatagactgaaagggaacaagggtagaagcagcaagacaaagacaaattaagaagctattataataatccagacaagaggtgatgagagcttgaatgaaggagcagcagtgagtgtggtgaaggtgaaacgggcaagactagagtcaaattaagcctttttttttttttttttttttttttttttttttgcagggtgttgttgaattgcaaacaggaactcagtttcagacatgtgaagcttgttggatgccagctgatattattactatttagagctaaagaaagaaaaacaagttggagatataaatgctaaa

SEQ ID NO: 286333 - DNA, 653 bp, Homo sapiens
ctggctatagtacttcatgacagttttaaactgtacaaattrgcaataagaataccagttctcctccaaagttggaacctggccaagtatagcaaaattcttaagcattttcttaaatccaatgagcagactttacaccttatgcggtaaaatggtcatggctttttctaattatatccaaagtacaagaggtcctatttaattatgaggaggattaatagcagaaatcgagggaagaaatacctcgttggggtctgtatggtatgtttacgtaatgtcaaatatggttcatcttttaaggaaactcaattcagttgttggaaaacaagtgcacaacatgtaagaacgtcaatagcgttccttggccattaaagggctacaggctcaatgtgttaaacgaatatatatacacacacatatatacacatatacacacacatagatgtatacatatatacacgcgcacacacacacatatatctcaaactgggttacgggacttcacacaattagtgacactgaaacctaatctcttttaaggcgttatcctatttaatccacttcagaatgtaagtaccaagctctgcgttcaagaccctgggttgtgacggaaagtccttccattctttatgggactttaaacatttcagagg

SEQ ID NO: 286334 - DNA, 581 bp, Homo sapiens
catggtgtctttctctcagaaaagcaccctgaacacaatcagtatgatgattgatatcatagttttacattattttctgccccaaaaccatggtctctcaattgagagaatatttaattttacaaggcagagtcctccttcttcaataaacatggataaaaatgatcctcatgtaatgaagtaagcctttccatactgtggttctttcccagataggcaccacgaaaggtgcttaaggatgcaaaatagccacagatccatagttcaggttgaaagtcacaaacagtagcctttttgagaaacctcaaacaatggaataaaagattttataacctgaaggtaagtagccatttccaaatgtcctttgacctttgaaatatataatgtcttaagttttaccatattggaacgtgtaattattgtgcagtttatcattttaaaagtgaatcaargaactagagactgagtcactctttgtatgaatcctcacctacagttacagtcttagagtaagagcttcaggatgctcttacacattacatttgtgtggttccatcaaatacgtagattttaatgcctgc

SEQ ID NO: 286335 - DNA, 586 bp, Homo sapiens
aggtgctgcagttgtcctgtggccaagatgagaactgtgcatcctccaaagaggggagacacaaaacactcaaaataatccatgcagaagggcgtttctgccygggcatggtggcccatgcctgtaatcttagcacattgggaggccaaggcaggcagatgacctgaggtcacaagcatgagaccagcctggccaacatggtgaaaccctgtctgtactaaaaatacagaaattgggtcgggtgcggtggctcatgtctgtaatcctaggactctagcactctagcagtctggaaggccaaggcgagcagatcacttgaggtcaggagttccagaccaccctagccaacatggttaaatcccatctctactaaaaatacaaaaagtagccaggcttggtggctgtctgtaatcccagctactcgggaggctgatgcaggagaatcgcttgaacccaggaggtggaggttgcagtgaactgagatcgtgccactgcactccagcctggatgacagagtgagactcaaaaatatgccaggaactgacatgacccactttagatttcgctgtgatgtcctcatacagag

SEQ ID NO: 286336 - DNA, 586 bp, Homo sapiens
aggtgctgcagttgtcctgtggccaagatgagaactgtgcatcctccaaagaggggagacacaaaacactcaaaataatccatgcagaagggcgtttctgcccgggcatggtggcccatgcctgtaatcttagcacattgggaggccaaggcaggcagatgacctgaggtcacaagcatgagaccagcctggccaacatggtgaaaccctgtctgtactaaaaatacagaaattgggtcgggtgcggtggctcatgtctgtaatcctaggactctagcactctagcrgtctggaaggccaaggcgagcagatcacttgaggtcaggagttccagaccaccctagccaacatggttaaatcccatctctactaaaaatacaaaaagtagccaggcttggtggctgtctgtaatcccagctactcgggaggctgatgcaggagaatcgcttgaacccaggaggtggaggttgcagtgaactgagatcgtgccactgcactccagcctggatgacagagtgagactcaaaaatatgccaggaactgacatgacccactttagatttcgctgtgatgtcctcatacagag

SEQ ID NO: 286337 - DNA, 519 bp, Homo sapiens
cagaaaaaggaaagaggtgtgcatggctggagcagagggagtgaggaggacacaggcaggagatgacctcagagaggtcctggaagtgaagatccctagggacgaggtcttgaaacatttttctcccacacctcaaaagaattttggaaatgatgtatttcctcactcctttcatgtatacatgcaactttctctttacattgtaagttacaacactcacaaatagtggaatttatttcccatatttaaaatacatgctgtcagtttcagctaagctcccagaagtacactgtcrccctcatctgagaggtgtaggactgcaagggaatgtgtttgggggttcaagaagtcacttatggacacatgaaggtggagatgcctgtttgatgtcccagcagagagctgaagagacaactggacacagaattgtggagctcaggggcgaggcctgcaggggacgtggagtcatacaggtgggctaaagcggtgagatgataaggttcaaggtgatttgattct

SEQ ID NO: 286338 - DNA, 519 bp, Homo sapiens
cagaaaaaggaaagaggtgtgcatggctggagcagagggagtgaggaggacacaggcaggagatgacctcagagaggtcctggaagtgaagatccctagggacgaggtcttgaaacatttttctcccacacctcaaaagaattttggaaatgatgtatttcctcactcctttcatgtatacatgcaactttctctttacattgtaagttacaacactcacaaatagtggaatttatttcccatatttaaaatacatgctgtcagtttcagctaagctcccagaagtacactgtcaccctcatctgagaggtgtaggactgcaagggaatgtgtttgggggttcaagaagtcacttatggacacatgaaggtggagatgcctgtttgatgtcccagcagagagctgaagagacaactggacacagaattgtggagctcaggggcraggcctgcaggggacgtggagtcatacaggtgggctaaagcggtgagatgataaggttcaaggtgatttgattct

SEQ ID NO: 286339 - DNA, 595 bp, Homo sapiens
gaatgtgtttgggggttcaagaagtcacttatggacacatgaaggtggagatgcctgtttgatgtcccagcagagagctgaagagacaactggacacagaattgtggagctcaggggcgaggcctgcaggggacgtggagtcatacaggtgggctaaagcggtgagatgataaggttcaaggtgatttgattctaatctcattttttccttcttgtgcttttgttttttacatttttggaggactgaaatccatttaaaattcaaattacagctaagcacctccctgtcctaaaggaaaagccacacactccattgtgcccatcatttcaggggtcagtgtcactctgagcttttctggtcttctccctcacctgtatattacaggtgggctcagtgaggttcacagcgggggmcgtttcaccaagttatcctgagaagctctgagttttgtaagaaggaagagtcgctgattttcatgtgatggccaggaagggtcaacaggctgcgttggtcatcttcctctataaaattccaggactggccacatgtggtggctcactcctgtaattccagcactttggaaggctgaagcaa

SEQ ID NO: 286340 - DNA, 595 bp, Homo sapiens
gaatgtgtttgggggttcaagaagtcacttatggacacatgaaggtggagatgcctgtttgatgtcccagcagagagctgaagagacaactggacacagaattgtggagctcaggggcgaggcctgcaggggacgtggagtcatacaggtgggctaaagcggtgagatgataaggttcaaggtgatttgattctaatctcattttttccttcttgtgcttttgttttttacatttttggaggactgaaatccatttaaaattcaaattacagctaagcacctccctgtcctaaaggaaaagccacacactccattgtgcccatcatttcaggggtcagtgtcactctgagcttttctggtcttctccctcacctgtatattacaggtgggctcagtgaggttcacagcgggggccgtttcaccaagttatcctgagaagctctgagttttgtaagaaggargagtcgctgattttcatgtgatggccaggaagggtcaacaggctgcgttggtcatcttcctctataaaattccaggactggccacatgtggtggctcactcctgtaattccagcactttggaaggctgaagcaa

SEQ ID NO: 286341 - DNA, 550 bp, Homo sapiens
gtttttgttacatattatctgtatttcttgtaggtttttattgttgttcttcatttctcatttcctactttttgtgtttaattactttttttctgtagacatgctttgactctcttcttatttacttttttttgtggtgaagtctcactctgtcactcgggctacagtgcagtggtgcgatctttctaaccgtagcctccacctcccgggctcaaacgattcttgtgtcccagcttctgagtagctgtgactacaggcgctcaccaccacgcccagctaatttttgtgtttttagtagagacggggtttcatcacattagccaggatgttctcgaactcctgatctcaagtgatccacctgtctcggtttcccaaagtactggcattacaggcgtgagccaccgtgcccagccattattattattttaaatagttttgtcttttagtttttagtaaacatataagtggyttaagcatgattccaatgtgaacataacaaccacgttagtgtccattcctttcaatatgaagaaccgaagtgtgttgtata

SEQ ID NO: 286342 - DNA, 418 bp, Homo sapiens
aaaacaattgaactcatggagataggragtagaaggatggtttaccagaggctgggaagagtagtgggggagaggggaagtggggatgtttaatgggtacaaaaaataattatacagaatgaataagatctagtatttgatagcacaacagggtgactatagtcaacaataatttgttgtacatttaaaaataactaagagtgtaattggattgtttgtaacacaaagcataaatgcttgaggtgatggctacctcatttacccaaatgtgattattatgcactgtatccgtgtatcaaaataaatccataaatctatatatctactatgtatccacaaaaataaaaaataataaattttataaagaataaaagaattactatagaggtgcagccactaattgctacagactcaccac

SEQ ID NO: 286343 - DNA, 588 bp, Homo sapiens
gagtattagctgagacttttgtgaaagtgctcagcacatttcttgatacatagctcagtacaatgaatgtttgcagtttttgctaccactgttatcacagacttttaaaagtctgatgtggtgatccacacatgtttcgagacagtcatattttagaggtcagcctggctgaaaggagagcattgagaagcgggtccagggaggtcctactgctctgagaactcaagaattgtgcaggtgagctggygtgaatgaagaccccagcttccgacttaatgacaaagttggtttatatgcagtaatttcataaaataaaggaagaaaagcaagtttgactccatgtggtgcagggaagggctaggataaacaatgtgaaaatgctgggccatttgttactattgatttatgttttgggtgatggtgtggtaattgctcttgctttgtgtgcctgtttcctagaagctgtgatgctaacaggaggtgggagagttcaatatggatcaagataattgaaagcgagttttgcacagagagccaagtggtatagagcagcctcctttgtgctgttttcagtgtgggaatgtgcat

SEQ ID NO: 286344 - DNA, 566 bp, Homo sapiens
catggtgtaaatattttcactggggctgatttcaaacctccaacttgatgtcattgaatgaagctaaaggaagagatgtacacagttaagagatatacacagtataagccagctccagcatcccactaaccctttgtgcaggcagaataataataatgctttctttcatttatggagctgtttgaaattaacaaggtgctttgacatattttcctttacctgcacctcaccctgagtgtgatgttagaggatatggtttgargaatatggaaaaatctctttggctagccacaaagccttacattaccactgaggtaactctctttggtatagcattcatgaatgaagaccatgccttttaaatagtaaaatacaagatatgtaagtgttgttaatccagggtaagacaagaaagatctcaattacaggatactattggagaaagaagtcccaaaagaagccatggagaaggaggatgggtagatatgtaaggaaaatggtcaaaagagagatccaaggatattaaagacattttttctatgtcataattttgcttagggtatgac

SEQ ID NO: 286345 - DNA, 566 bp, Homo sapiens
catggtgtaaatattttcactggggctgatttcaaacctccaacttgatgtcattgaatgaagctaaaggaagagatgtacacagttaagagatatacacagtataagccagctccagcatcccactaaccctttgtgcaggcagaataataataatgctttctttcatttatggagctgtttgaaattaacaaggtgctttgacatattttcctttacctgcacctcaccctgagtgtgatgttagaggatatggtttgaggaatatggaaaaatctctttggctagccacaaagccttacattaccactgaggtaactctctttggtatagcattcatgaatgaagaccatgccttttaaatagtaaaatacaagatatgtaagtgttgttaatccagggtaagacaagaaagatctcrattacaggatactattggagaaagaagtcccaaaagaagccatggagaaggaggatgggtagatatgtaaggaaaatggtcaaaagagagatccaaggatattaaagacattttttctatgtcataattttgcttagggtatgac

SEQ ID NO: 286346 - DNA, 566 bp, Homo sapiens
catggtgtaaatattttcactggggctgatttcaaacctccaacttgatgtcattgaatgaagctaaaggaagagatgtacacagttaagagatatacacagtataagccagctccagcatcccactaaccctttgtgcaggcagaataataataatgctttctttcatttatggagctgtttgaaattaacaaggtgctttgacatattttcctttacctgcacctcaccctgagtgtgatgttagaggatatggtttgaggaatatggaaaaatctctttggctagccacaaagccttacattaccactgaggtaactctctttggtatagcattcatgaatgaagaccatgccttttaaatagtaaaatacaagatatgtaagtgttgttaatccagggtaagacaagaaagatctcaattacaggatacyattggagaaagaagtcccaaaagaagccatggagaaggaggatgggtagatatgtaaggaaaatggtcaaaagagagatccaaggatattaaagacattttttctatgtcataattttgcttagggtatgac

SEQ ID NO: 286347 - DNA, 576 bp, Homo sapiens
tgtattttaggaaggcaaatggkcttctcccccttgtcacatttggtgaaaattaaaaggacagaaaatcatcaggactcttagaaaacatgaaaagaggttagattccatagtaaccttaatactccttaatttggagtccttaatactccaaatcaccccaactccagctagcaaaactgagacttggtgttctccaatccccagtgagctagagtttaacccacacaaatctagaagactcctttccagcagatggatcctcagcacatttgcattgaagtcactacacacagagtcaaggtttaagtaattccaggtgctgggagaagaagattaaagacaaagtcagagttggaaacatcccactcctcactggcacctcagcacagagtgaatgtaatttaatgttgtgtttaatttaattcggttcatgactttgaaataatgtgtctcatatttaaaaataaaagtcattactacatagtaatgttactgacttttatataactgtgtaagaacataaacatcaaaatgaattttcctcttctaaatggacaactcaggaggggagct

SEQ ID NO: 286348 - DNA, 576 bp, Homo sapiens
tgtattttaggaaggcaaatgggcttctcccccttgtcacatttggtgaaaattaaaaggacagaaaatcatcaggactcttagaaaacatgaaaagaggttagattccatagtaaccttaatactccttaatttggagtccttaatactccaaatcaccccaactccagctagcaaaactgagacttggtgttctccaatccccagtgagctagagtttaacccacacaaatctagaagrctcctttccagcagatggatcctcagcacatttgcattgaagtcactacacacagagtcaaggtttaagtaattccaggtgctgggagaagaagattaaagacaaagtcagagttggaaacatcccactcctcactggcacctcagcacagagtgaatgtaatttaatgttgtgtttaatttaattcggttcatgactttgaaataatgtgtctcatatttaaaaataaaagtcattactacatagtaatgttactgacttttatataactgtgtaagaacataaacatcaaaatgaattttcctcttctaaatggacaactcaggaggggagct

SEQ ID NO: 286349 - DNA, 556 bp, Homo sapiens
ttttggcaggcagctagtctaggggcattcaggtcacattaatccagtcaggaattgagatgatttaaagctgggcttctgtccctgtagkgattcctgtgtggcactgtctatctctctcccttcttgacaaaggatgagcccaagtttagttcccaggttgccaggaatgatgcttgcactcagccctaagctgtcagtcctctacagatactgtccatagctaaagagaagcattttggcctaggtcataccctcttcccaaaggcagcctgcatgcaatgactggttaatgtaggggtataaagtcttggcttccttctcccaactagggaaaatgctaaagggctacttcagcttcaaagcttcctgaggaattggctgagtcttttcttgagactatcatagctcaacttcttcctatgcccaaatttgcttctttcccttccctcataggtgataatccaaggaaacttctgaataaatttcctgaatgataatatctaccagtaagccttttactctttttttttttttttttttttttttgagacgg

SEQ ID NO: 286350 - DNA, 510 bp, Homo sapiens
aagtgaattgttcctgtagtaggttgaatggtaattcccaaagaggtatttctatgtcctaacccctggggcctgtgagtaggtctcatttggaaaaaaggctccttacagatgtaattcagttaaggatcttgagatgagctcatcctgaattatgcaggtgggccctaaatcccatgacaaatgtgcttataagatacagagaggagaaggcacagacacagtggaggaggccaggtgaagagtgaggcaaagattacagtgatgcagccactgaccaaggaatgcgtggagctaccagaagctggaagagccaaggaaggtgtctcccctcgagkcttctgagggagcatggccctgctgacaccttgatttcagactcctggtctctagaaccctgagagaatacacttctgttgttttaagccaccaaatttgcagtaattttttatggcagtcacaggaatctaatacattttcctctaccttctaacgttaatctcatggcaa

SEQ ID NO: 286351 - DNA, 583 bp, Homo sapiens
ctcttgctgcctctctcgccatgtgacatggtgtctccctttgccttccacgatgattgtaatcttcctgaggccctcaccagaaggagttgatggcactaggcttcatgtacagcctgcagaaccatgaaccaaataaacctcttttctttataaattatccagtccaaggcatgtgtatgtattagtctgtttatataggtatgtattagtttgtttatagtgacacagacagactaacacatacctacttgccaaatctggtaatcacctccatcactcgtttcttggaaatctctccacatctgaattttgtgatatcatcattcctgcttttccttatatctcctttgktcttgcatctctgacccctttgctgcatccatttcctctaaccatcctttaaatttggcgattttcagtattcttcatcttccctttccccctttcatgctgcatactctctggttaaacttattcgttcccatggcttcaaattagttgctatagttaataattcccaatctacattcctagccttctcgtctcctgaactccatccatatctatgttgccaagcatc

SEQ ID NO: 286352 - DNA, 628 bp, Homo sapiens
gaaagcaatggatccttgggatgcaatgattctgggacacaatggaatattttctggactcaagaaacatctgaaaatattttacttgttaacagcaaatcttgtcccctgccagcactctctgctccccatttcccaaccttggtaacagaataatggtcttaatgaaaaacatccaaaacagaaatgacactcttttaaacaccaatcatcaagtttaggtacctggaataggggaaaaataaaatcacatcctctgtcacataatctctggctaacratgcctgtttctaatcactgacgttatacctattactctccagcatatgatactacaaggctcctaattttccactcatgctccactagttctaacttttatttttttagctctgatcacatgtgctttgcctttcacctacactacacttcacctaagctacaactatctcaagacttctgtgctctatctcttgtacatttcattctgtttcagagtgttttcagctgcaagtaaacagacaagtaataaacgttggcacattaaggacattgttatgatctgatatggtctagctgtgtccccacccaaattttgtcttgaattgtagcccccacatttcccacg

SEQ ID NO: 286353 - DNA, 646 bp, Homo sapiens
tgtgcttatagccacaacctttattgctcatttctcctggtaccaagcatgaagtatttctcctcttgtctaarggtcattcttctacttattctctggattcctccattcctgtctccccagggacattctatttattagtaactctctcctatgatttcaaattctgcctcttttattatcatttttgtgagcaattataaatgccaaagaatttcccatctttaaaaaaattgtccccaacctcatatacattacagcaacatcttttgaagagaattagtcacatcctcagcttccattttaccacctccttattggctataatctggtttctggttccactatttcaccaatgtctaattccagatttatattgccaaatatttactagatatttcatttgtacatgataccaaagtcacagagatagcagaatttaatatgttcccaattggtgtcatggccttactctcccaccccaacagtttccctgctaccaaatttccattgtctaccaaccattctggccaccatttttcattctcctttgctaaaacatcctcctccatctgacttttaaatttttgtttccttttattttgcgtagcagacttagtcaatcacataattttccatgatttca

SEQ ID NO: 286354 - DNA, 1852 bp, Homo sapiens
ccacatcatatgtcgtcagggaaatgcaaattaaaacaatgagataccactatgaacctactggaatagccaaaacccagaacattgactccagtaaatgctggtaagaatgtggggcagtaggaacactcactcactgctggtaggaatgcaaaatggtaccacaaccttggtaaacagtttggcagtttctttaaaaaacagacaaactcttaccacacaattcagcaactggactctttggtatttatccagaggagttttaaatatatacccccacaaaaacttgcatagagatgtttatagcagctttattcataattaccagaacttgaaagcaaccaagatgtccatcagtaggtgaatggataaataaacattgatacatcaggcaatagaatacaattcagtgctaaaaggaaatgagctrtcaagccataaaagatatgggggaaacttaagtgcatatgactaagttaaagaagtccatctggaaagagtacatactgtatgactatacgctattctggaaaaggcaagtctctggaaacagtaaaaagatcaatggttgccatgaattagcagcaggaagggggaaaggatcaacaggcaaaatgcagaggtcagtgaaactactctatgatactataawccacatcatatgtcgtcagggaaatgcaaattaaaacaatgagataccactatgaacctactggaatagccaaaacccagaacattgactccagtaaatgctggtaagaatgtggggcagtaggaacactcactcactgctggtaggaatgcaaaatggtaccacaaccttggtaaacagtttggcagtttctttaaaaaacagacaaactcttaccacacaattcagcaactggactctttggtatttatccagaggagttttaaatatatacccccacaaaaacttgcatagagatgtttatagcagctttattcataattaccagaacttgaaagcaaccaagatgtccatcagtaggtgaatggataaataaacattgatacatcaggcaatagaatacaattcagtgctaaaaggaaatgagctgtcaagccataaaagatatgggggaaacttaagtgcatatgactaagttaaagaagtccatctggaaagagtacatactgtatgactatacgctattctggaaaaggcaagwctctggaaacagtaaaaagatcaatggttgccatgaattagcagcaggaagggggaaaggatcaacaggcaaaatgcagaggtcagtgaaactactctatgatactataawaagtacataaaatgtgaaattgatcattttggttttgawgacaaatgcccttgtttcaatatttgttttattgtcaccatgctctgaattcgaccatcagtaaatataggtaggattgtggtagggatagagtgaaaaagagggataaaagtaaacaaaattgttaagctttatgggttcattatattttagtaataattagggaaatcttttactaagtgacatttttgatagagaaaaataagtggggagaagaggagagcagtaagttccagatgtgtttggtgaaggacagaggcagaactctctttcgagggaaaaagaatacagaaaagagaggaaaagagagatcctgatagcttcacctatatcatatttagtgttaaatctacatgcagctattcagttatgaaacagtataaatcaaaaatagtcttcactgaatatacttaaaataacagttaatgtcatgtttagccaaagttttcattatgttctgtttataaaaagtaaagaatttcacaattaatgagatgttgatttttatt

SEQ ID NO: 286355 - DNA, 560 bp, Homo sapiens
aaaataattttaaaaattagaagtgacagtatcttcagctggaagaaaccagtgcaaaaattctggcactatgaaaaatctcaatgatctgacaccactaacggattgcactagctctccagtaatggttcctaaccaaaatggaaactcaaaaatgacagataaataatttaaagcatagattgcaaggaagcttaatgagatctaaaacaaggttgaaaaatcaacacaaataagcttctaaagcaatctaagaaacaaaagataaacatcttaacaataaattagagtttctggaattgaaaaactcagttaaggaatttgaaaatacagttgaaagctttatcaatagactggacaaagcagaaaaaagaattttaatctgaagactgggacttttgaactaacccagtcrcacaaaaattaaaaaaaaaaagaattaaaacgtctttgagaaataagggattatgtaaagtgaccaaacctattagttattggcattactcagagagaaggagaaaaagcaaataatttgtaaaacacatttgaggggataactc

SEQ ID NO: 286356 - DNA, 621 bp, Homo sapiens
tgtacccatcaattcttccgaagatgctcagcagaggaataggcctttcctttaatatgagccatccctctcaggagtagtttgggtataaccagcaaaaatttattctgtyatatttttagcacactctcctcaatattctactaccatcaaacatatagaatagccattttcagatcatgcctttgagaatagcaataccacaatcactttctatttaggatcatctctttagataacccactgctctcagttttttttttaataccaaaatttgagaatagtcttgacaatacattagacaattttctttatgcataaacatagctgtcattgcaactgtcaatctataaatgtccatattctctaagaactctctggactccttactgtcaataactattttttctatgtcttgataacttcttaaccttctcatagttctcattctcatgcatcttttctaaatcaggattttaaaatgagccaacattctctaaagcactgaagattaactattaatttaatgtatctttttacttagtagatctacatatatgtatagcactccatctccctggatatattggcaaaaggccacacttaatctcaaactcgttt

SEQ ID NO: 286357 - DNA, 621 bp, Homo sapiens
tgtacccatcaattcttccgaagatgctcagcagaggaataggcctttcctttaatatgagccatccctctcaggagtagtttgggtataaccagcaaaaatttattctgtcatatttttagcacactctcctcaatattctactaccatcaaacatatagaatagccattttcagatcatgcctttgagaatagcaataccacaatcactttctatttaggatcatctctttagataacccactgctctcagttttttttttaataccaaaatttgagaatagtcttgacaatacattagacaattttctttatgcataaacatagctgtcattgcaactgtcaatctataaatgtccatattctctaagaactctctggactccttactgtcaataactattttttmtatgtcttgataacttcttaaccttctcatagttctcattctcatgcatcttttctaaatcaggattttaaaatgagccaacattctctaaagcactgaagattaactattaatttaatgtatctttttacttagtagatctacatatatgtatagcactccatctccctggatatattggcaaaaggccacacttaatctcaaactcgttt

SEQ ID NO: 286358 - DNA, 663 bp, Homo sapiens
cttccctcccaagaacatgaagtagatttaaaattaaatgaaaaaaaagaaagtgaaatggagggagcatttattactagaattcagagggttcaagtacacgcaggcttcaatatgtggaaatattgcttctctaaagtatttttggatttttttgtatgtaagttaattcaagctcaaaacacattttctgtaagraaatatatgtcaataattatctaatttcccaagtcagttcatattttatgatgcacttgaaataccaaccctttaacagttaataaacaatgatggcaacagaaggagtagctttctctttttaagcttatcatacaccaggtcctgtgctaggtattctacaggcgctttctcattttactcccctaaaacactaaaattgttattatcatctctatcatacagtagaataaattgaagtttacaaaatttagtaacttgcccaaattttcccagccaggaaggtataggagattttgttttcttttgctatgttttgtaggaaactgtttcatatccagatctgtatgaatacaaagccatttttctttccattgtacacttataataccaattatgaaaaagcacaaaaaacagtgactctgaataaaaacacatttaaacacatcttaactgccactactt

SEQ ID NO: 286359 - DNA, 399 bp, Homo sapiens
agctagttctcaaattagggtaccatcatattcaggtaagttttgacacagtagatttaatttgctgacaaacccaccattacgagatggtatgaaagtcaccaaaattgatgtgatagatttcatggttcagagatttgagggatttctcctctctgatttttatatattcttctgattaatatgaaccatagtaatctgctcacaattgcagaatttctacaaatctagaaaggagttgacattttcattagaatgtactgatttgygaaatgtccttgcctctcctggtctcaagcagtaccttgctagccatttggtttttggagtatagcttttaaactgatattacactggttttgacatacctacatttctgtagttttgattgcctttatt

SEQ ID NO: 286360 - DNA, 588 bp, Homo sapiens
acttctggcttgaagaaccactcctgatgttagtatctaaaagtcacttagtttgtggttatgtagggctattaaaactacttcagaccaatcaaccttggatcagtcagtttaatccaacagcgattctaatatattagctgcatacaatgtttttgtctcataaaagatcctctcctgggtataagaaagagtgacgaaagatcaccattttttgccaggtttggcatgagaacctagaatttaagctcactcaactgaaataatcaagaacacataaataaattcagtaaataaaataatgttattagattttaaaatttactagagtaagcatagtcatgtatttcttaatgatgaggataagttctattaaatgcatccttcrgcaatttcattgtgtgaacatcatagagtatgcttacacaaacttagatggtatagcttactatacacctaaggcatatggtatagcctattgctcctaggctgtagacatacacaacatgatactgtactgaatactgtaggtaattgtaacacagtgctatttgtgtatctgaacatagaaaaattacagtaaagata

SEQ ID NO: 286361 - DNA, 550 bp, Homo sapiens
gaacttattcactatcaaaagaacagcaagggggaaatctgtccccatgatctgatcaactcctactaagcctcacctccaaattggggattacaatttgacatgayatttggatggggacataaatccaaaccatatcagaccttgcaaaaaagaaaaaaaagaaaaagaaaaacctgaagatggcagataggtggcagaactagcttgcagctcctgctcagatggacagagcagcatgtgaaaactcacatggtgaacttgtgctccaagaactaccaaaggaacataccagaaagcccaagagaatccacagtccctttgaaggaactggatcaccactgaaagctccttgagatgctaaaaaactgagtcggcttggtttttcaacgaggaggcatgcagtctgggataagttctcagtcttgatcactggctgcccggaaataaactcagtgctattggaggggggcgtggtgggagtgagaccagcctttaggactgcaggctgtgtaagagcaggttgaggcttgttactgctgggttttcc

SEQ ID NO: 286362 - DNA, 550 bp, Homo sapiens
gaacttattcactatcaaaagaacagcaagggggaaatctgtccccatgatctgatcaactcctactaagcctcacctccaaattggggattacaatttgacatgatatttggatggggacataaatccaaaccatatcagaccttgcaaaaaagaaaaaaaagaaaaagaaaaacctgaagatggcagataggtggcagaactagcttgcagctcctgctcagatggacagagcagcatgtgaaaactcacatggtgaacttgtgctccaagaactaccaaaggaacataccagaaagcccaagagaatccacagtccctttgaaggaactggatcaccactgaaagctccttgagatgctaaaaaactgagtcggcttggtttttcaacgaggaggcatgcagtctgrgataagttctcagtcttgatcactggctgcccggaaataaactcagtgctattggaggggggcgtggtgggagtgagaccagcctttaggactgcaggctgtgtaagagcaggttgaggcttgttactgctgggttttcc

SEQ ID NO: 286363 - DNA, 557 bp, Homo sapiens
  misc_feature (1)...(557): n = A,T,C or G
gaagactgaactaggggctgaggactaaatgttacctgtttagcatgattccttccagctcatcacatggccagagaccattagggagactgattccagagacaattagggagaactgttatgttgtagaastaatccatgttctgggaataatgattaagtttccagatttgtgagcagtagatttataagtggatgaatacaggaaaatgagaataggtgctatcaaaataatatgaatctgtgcaagcagagaagggagagagcacgagtggggaaactaaataaatgttcacagagaagtcaaaatttgaactagggattgacataattaggggtttatctggcaaatttccctagtcatacagcaatccagtgcctcagtactcatatatatgaataatagggtttttattctagtaggatttaggggaatgcttgtattaagagcctataatgcattaggttatgatttcatttctaccccagagaactggtttgaccctgtgattatataatgaattcataataaagtatgttcctnnnnnnnnnnnnnn

SEQ ID NO: 286364 - DNA, 567 bp, Homo sapiens
ctcatgtgggagttgtcccatggagggatgtcggggacgctgcggctgcagtgtggggaaagactgtgcaggctggtgagtggccataggagccgccctgcttaagctctctgcctttcagtcagggtctgccagaggagaagctattgtgaggcctctcaaggctcccgagggcgccctgcaagcaggtgtggccatactgaggctcggggagaggccagcagactaaggtgttgcttaggtgggactggccmcatctgatgggcaaaactgccttacagagttcaggacagacagaaagttcccctagggctaaagtctcctatggagcaaatcgaacctagggggatggccatccctgaccatgcttcactacagatgctcttgcaccaaaccctctgggctccacatcagctggcttgcagctcctaccacttctgtatgcagctctccctgccaagtccagagtccgtggtggtctagggggtctccttctgctggggttccagaggcctgtggcaagagtgggttgctccttgccagttcaactcaccaattcccccagag

SEQ ID NO: 286365 - DNA, 618 bp, Homo sapiens
agttatcagattatctaaagtcaagacaaaggaaaaaatcttaaaagcagtgagtcaaaagcatcaggtgacctaaaaaggaacatctatcagattaacagcagatctctcagcagaaaccctacaaactagaaggtattggggtcttattttcagcctccttaaacaaaacaattatcagccagtatttttgtattcagtaaaactaagcttcataaaggaaagatacagtcttttccagaaaacaaatgtcaagagaccttgccacaaccaagtcagcactgtaagagctactaaaaggagctctaaaccttaaaacaaattctcaaaatacatcaaaatagaatctctttaaagcatagatctcacaagacctataaaacaacacagtaaaaaaaagaacatgcacacaagttactcaggcaacaaacagcacaacaaatagaatagtacctcacatctcaatatgaacattgaatgtaaatgacctaaatgctccacttataagaaacaaaatggcagaacrgataagaattcaccaaccaagtgtctgctgtcttcaagagactcacctaacacataaagacccccatcaacttaaggtaaaagagtgaaaaa

SEQ ID NO: 286366 - DNA, 574 bp, Homo sapiens
taatgtaaaaatacttttttgctaaaaatgctaataatcatctgagccttcagcaacatgtaatctttttggggcagaaggtcttgccttgatattgtagactgctgcttgaacaggatggtggttgctgaagctggggggctgtgggaatttcttaaaataaaacaccagaagagtttgctgcatagattgacacctcctttcatgaaagattcttcagtagcatacaatgctgtttgatagcactctatccacagtggaacttttttcaaatttggrgtcatttctctcaaaccctaccactgctttatcaactaagtttatgcaatcgtctaaatcctttgttattatttcaacaatattcacagcatcttcactatgagtcaattccacatgaaaaaaccacttcatttgctcattcataagaatcaatccctcatttattcaagttttatcatgaaattgcagcaactcgattaacatcttaaagctctacttctaattctagttctcttaatacatccaccacatctgcagtcatttcctccactgaagtcttgaacctccaagtcat

SEQ ID NO: 286367 - DNA, 631 bp, Homo sapiens
tttgactgtgctgattattttttctgttgggtatcaaccccgggccttatttccttgtgtgttttgaccatatgatatttatcttcttttggaatttcacctgtggctattttttgaggcctggattagaggttattcctcaggagaaaaattacaactgctttagacatatccctgsactcccttctctcccagggcactttgaattaaatttcactagaagttttttgaataacatataatgcatgactttggatagaaagacattaagaaactttttgtttataaattcctaggtaagactttttttttctttttctacccaatgctagttttaaaacagatgtgtctcttatttgcatgccaactttattgctcattaacctttacactcaaggataacgctttgaaattatgccccctcttttttggccctcccattaaacttccctcttcatcagcctctaggcttatattctattcccacttctctctctatagttctccaagcagaagctcaaaggctctatattttagcaaagatagtaaggacaaaagatgaccctactgctcacttacctccttatgtgtttgctcaatttttcttactagtactgtaagcttagcaatg

SEQ ID NO: 286368 - DNA, 605 bp, Homo sapiens
tctctttggtttttgtaaacggagaggacagttcttagtccagtaaaaatatgcagattgtatgtaatgaatttttgtaaacaaaggtaatttctgtcaaatgtattctttacttttttaatatgttgggattttattttatatctgatgactccgagtgtgtgccatccatttgttaagtaactggcctttagcagatctgtttcaaaaacaaatacaaaagtgagaatgaaaagtttgcttaagactaagtccagtgtttttcattttccctttggctgaatatttcaattgacaaaccagcaggacatatgaaaaatgcttcagtgatgtggtccattataagataagtacacaaaaattttcttgaaaaatattgtatgattgcatagtgaaatagcaagatttgtcaatatgctattctatatgcacccctagagcaagtcattagggtagggaataagccatttacattagtgcaagatagaaagcgagtccagatgaatttcaktgctatagtttttcataaagtactatgttatctagcagcaaatataataaatatttatttttaataacaaaagatggtttaacatcaccaaaaa

SEQ ID NO: 286369 - DNA, 527 bp, Homo sapiens
atctccacactgttttccatagtggttgtactagtttacattcccaccaacagtgtaaaagtgtaactttttcaccacatccacgccaacatctattatyttttgattttttcattatggtcattgttgcaggagtgaggtggtatctctttgtggttttgatttgtatttccctgatcattagtgatgttgagcatgtttccatatgttgggtggcagttggcatatcttcttttgagaattgtatatacatgctctttgcccacttgatgatgggatcgtttattttcttcttgctgacttgagttctctgtagattctgatattagtcctttgttggatgtatagactgtgaagattctctcccactctgtgggttgtctgttaactctgctgattatttctatcgctgtgcagaagctttttagtttaattaagtcccatctatttatctttgtttttgattgcatttgcttttggtttcttggtcatgaagtatttgcctaagctgatgtctagaagggttt

SEQ ID NO: 286370 - DNA, 657 bp, Homo sapiens
tttgtgagtaaaaaattaaaaaaaaacaagtgaacattttggggaaaatttccattttgagaaactaagaaagcaaaagagggctttcttctatgatttgattcacttctatttaattcattttttgaaagtatgtgatttcaaatttcaactaatgatctaagttttaaaaacatttgttttactacttgaaatcagctccgtgaggttttcttactgctgctaatttattttcaagacaagatagcccatcttcaacttaatgtaaagaaataagatcatccttctcttaccttacctccaattttaatgaacaataactgacaagagaggcattatggctcaccgtgttttaatagcatatgtgtataagtaacagctactcaaattttaaaaaaagtttactagrtataatcggattcactaatggaaaactttaggctgtaatagctgcagctcatgcagtgttttgttgtcatgggcacagtgtttgaattgggtactctaattccaattggcttaaatttcctaattacatgcagctaatcagcgaaacccatgtacattcattttcttttcaagttggtggcacacagttattatctctgcactgatggagtccactggttttaattatatccctttataaaacaacat

SEQ ID NO: 286371 - DNA, 657 bp, Homo sapiens
tttgtgagtaaaaaattaaaaaaaaacaagtgaacattttggggaaaatttccattttgagaaactaagaaagcaaaagagggctttcttctatgatttgattcacttctatttaattcattttttgaaagtatgtgatttcaaatttcaactaatgatctaagttttaaaaacatttgttttactacttgaaatcagctccgtgaggttttcttactgctgctaatttattttcaagacaagatagcccatcttcaacttaatgtaaagaaataagatcatccttctcttaccttacctccaattttaatgaacaataactgacaagagaggcattatggctcaccgtgttttaatagcatatgtgtataagtaacagctactcaaattttaaaaaaagtttactagatataatcggattcactaatggaaaactttaggctgtaatagctgcagctcaygcagtgttttgttgtcatgggcacagtgtttgaattgggtactctaattccaattggcttaaatttcctaattacatgcagctaatcagcgaaacccatgtacattcattttcttttcaagttggtggcacacagttattatctctgcactgatggagtccactggttttaattatatccctttataaaacaacat

SEQ ID NO: 286372 - DNA, 248 bp, Homo sapiens
gaaaactttaagagccagggtgtgtcatacctctcttctctctgccaccctgataagcaatattccagatagaggctgctmcataagcttgagtcccggggtgaatttaacataaagcagagtagtggctggcctatgaaagacgtacagcctgaccagaaacttgtatgttataagcctctaagatccctgggttgtttgttactgtagcaaaacctagcctggtttgactgatgactagctgttaa

SEQ ID NO: 286373 - DNA, 590 bp, Homo sapiens
gttgtttttactttataacctgggtaaattactttcatcgtgtaaagaaaaatattttccatttttgagatcattaaaaattatggctgaatatactttagtcaataagcttttttggcatttctttagtaacaccagtaatggtgagtcttacgtgctataattagtaaggattctagatagagaccccaaattataggagttgtaaaaataaaattttatttgtttaaaaacatttatttgaaaaaataagtcaaggtaagaaaactttgatttgaagtttttgtttcattttcccaatcatttatatataatgtattaataaaataggcagttgattctgaattggggaatgtaaatacaacaaaataaagtggcacatgtttattgacctgaagaaaagtcataaatatgcyaaataaattaccaaattggattcagcttctcaaatggaaagttattttgagtggaaattatttgtattattatttggtataacagacaatcctttccaacatcttgctggttctctatgcttttagtccttacttgttagtgaaaactatgatatcttgaaattattactatta

SEQ ID NO: 286374 - DNA, 590 bp, Homo sapiens
gttgtttttactttataacctgggtaaattactttcatcgtgtaaagaaaaatattttccatttttgagatcattaaaaattatggctgaatatactttagtcaataagcttttttggcatttctttagtaacaccagtaatggtgagtcttacgtgctataattagtaaggattctagatagagaccccaaattataggagttgtaaaaataaaattttatttgtttaaaaacatttatttgaaaaaataagtcaaggtaagaaaactttgatttgaagtttttgtttcattttcccaatcatttatatataatgtattaataaaataggcagttgattctgaattggggaatgtaaatacaacaaaataaagtggcacatgtttattgacctgaagaaaagtcataaatatgctaaataaattaccaaattggattcarcttctcaaatggaaagttattttgagtggaaattatttgtattattatttggtataacagacaatcctttccaacatcttgctggttctctatgcttttagtccttacttgttagtgaaaactatgatatcttgaaattattactatta

SEQ ID NO: 286375 - DNA, 553 bp, Homo sapiens
aaactctccctttccccgatgagcaagaagttttctgcttcaaatgttccaagaatcctaggggcaagttcagttttaatgggtcaagcccrcctcaaactaccttgtgggaagagaaatgattagtgtcctgtgtccctattttattaatttttgtaagtgacacacattgtgcttaagaagaggtggcccgctattatagtggtgccactcttggttggcagtaatttttgggatgtagtaggaatcaaaaggattctccttctgagtatcatgcccagccctggtcattctatattagtgtgcaccttcagatggtacagttctttcactgctgtgtggggatccttgccaagggtgcagtagctgtcttcaacgtcatactcagaagacgggctccaagcttgtgttctctgggttatagctctttagtttatattctcagctattatttctaaatatatattcctgtcccattgtgtcaggaggagctttcatccttggctgccctgtgaaaacccgcgttctgaggagaatccaaactctgggttaa

SEQ ID NO: 286376 - DNA, 556 bp, Homo sapiens
ccctctcccaaactgtaacaacccaaaatgccttcaacactgccaaacatcccacagggggcaaaacttcctgttatctctatatagtggcctctgaaaamcattcaacttgtagtaaaacaattgatttataattcctacatcaagagaagggtttcttttcccatggtctaataacaatcctaggcctaatgtccataatccaatgtttaatatatttaatcataattaaaataattttacattgataatatttatatagatgggcataagacagggacccaggatgctgtgatagtctacacaaatataatatacctgttttccatgctggatggagactttatgctaatttccatagacttctatcaatttatgtgaaggattctttttatattagttgttaaatttcttcttagaattttgacctttacctaaattattggtatttataacatttgcaaccttcaggagtgttatctactttatatacattttggtctgcaataccagttctactctcatatcactgacccaaacttagtcacatgtaaca

SEQ ID NO: 286377 - DNA, 556 bp, Homo sapiens
ccctctcccaaactgtaacaacccaaaatgccttcaacactgccaaacatcccacagggggcaaaacttcctgttatctctatatagtggcctctgaaaaacattcaacttgtagtaaaacaattgatttataattcctacatcaagagaagggtttcttttcccatggtctaataacaatcctaggcctaatgtccataatccaatgtttaatatatttaatcataattaaaataattttacattgataatatttatatagatgggcataagacagggacccaggatgctgtgatagtctacacaaatataatatacctgttttccatgctggatggagactttatgctaatttccatagacttctatcaatttatgtgaaggattctttttatattagttgttaaatttcttcttagaattttgacctttacctaaattattggtatttataacatttgcaaccttcaggagtgttatctactttatayacattttggtctgcaataccagttctactctcatatcactgacccaaacttagtcacatgtaaca

SEQ ID NO: 286378 - DNA, 556 bp, Homo sapiens
ccctctcccaaactgtaacaacccaaaatgccttcaacactgccaaacatcccacagggggcaaaacttcctgttatctctatatagtggcctctgaaaaacattcaacttgtagtaaaacaattgatttataattcctacatcaagagaagggtttcttttcccatggtctaataacaatcctaggcctaatgtccataatccaatgtttaatatatttaatcataattaaaataattttacattgataatatttatatagatgggcataagacagggacccaggatgctgtgatagtctacacaaatataatatacctgttttccatgctggatggagactttatgctaatttccatagacttctatcaatttatgtgaaggattctttttatattagttgttaaatttcttcttagaattttgacctttacctaaattattggtatttataacatttgcaaccttcaggagtgttatctactttatatamattttggtctgcaataccagttctactctcatatcactgacccaaacttagtcacatgtaaca

SEQ ID NO: 286379 - DNA, 573 bp, Homo sapiens
ttgtttatcaccttgaaattcctccacattcttagatacagtaaagaacaagaggagtgagactgccttactatttctgtttatgggcttagttcctcctcttcctttcaagcttaccagatacatgccttaagcactgtgaaaaagccaccttttcacagccgacaccaagctgggaagaaaaatgtcaaatgcagctaccagaatttatgttattgggagggaagcagagaacagaaaaacttacaaggcacaccttacagtactacttctcaacctatttcccaatggaacatggataatagatgacattcatacmcagaacatgcttttataagtgtgtatgtgcattctccactctatccctttcttttcctcccaataaagcgtatcagaatgcaaataaaattaattattttagagaaaaccttgaattgacatgtttttcaaagaaaaaatcatttgcaaatgttgatgcttgatcaataaatcacttgggatatgaccttaactctcacaactctgaggtttactattgccctagagtactgtcagaaaaagtttcaaatggtt

SEQ ID NO: 286380 - DNA, 437 bp, Homo sapiens
attagttgtaaaacactgagaacagcaactgtagcataaaaaagcgctagaaaacagcttgttaaataaaaaatattgtcatgaaaaatttatctgccacattagtgagtgaaaaaagatcacagaatattatgaataatctcagttctgaaaaatacatatgggtgtacaaagaatggaggagggccttctctttttcrgtgtaacagtcattgaccccaggcagtgaaattttggaatattttcactttcttagtattttctgtttcattacaggtattaaaaactaaaacaaacaaaagtaataatatccaataggcattctcagacacttctggaatataagttgatgtgagctttctgggcgcaatattaacacactttccaacccagcaatctggttctaggaatttatcctacaaaaatcataacacaag

SEQ ID NO: 286381 - DNA, 594 bp, Homo sapiens
tccatactcaactctccacttgtctattacaagagtgcttgaagcctggataattcttttcaaattttacccaaaaacttcttaattaaaatgtacaggggcagtttggatcagggggaggggagagacccaaaggaattagaaataaactccaaagacttttattatttcatgatttaaggattcctgtttgattacataacataaaggcactgtacagcttaaccttccccatctgctatgggtgggcagaatcgtgtataaacctccagacagcacatcatgtctagggctttttaaagtcaaaagtgggaaactacattacagcatgatctttgcattaaattcttacatcctgttggcatacacacaaagggtttaatcgagccctttatagatcaatttctcyctttgtacatattgactggcaaacttttttaactgaaaccttcacccagaatgagctatcttttctaaggtacagtaatgagttcctttgggaaacaggaatgccacagatagggatctatcactttaagccagcaaatgtgaaaaattggattcacaagtagttagaagaaagggtaattgtaa

SEQ ID NO: 286382 - DNA, 594 bp, Homo sapiens
tccatactcaactctccacttgtctattacaagagtgcttgaagcctggataattcttttcaaattttacccaaaaacttcttaattaaaatgtacaggggcagtttggatcagggggaggggagagacccaaaggaattagaaataaactccaaagacttttattatttcatgatttaaggattcctgtttgattacataacataaaggcactgtacagcttaaccttccccatctgctatgggtgggcagaatcgtgtataaacctccagacagcacatcatgtctagggctttttaaagtcaaaagtgggaaactacattacagcatgatctttgcattaaattcttacatcctgttggcatacacacaaagggtttaatcgagccctttatagatcaatttctctctttgtacatattgactggcaaacttttttaactgaaaccttcacccagaatgagctatcttttctaaggtacagtaatgagttcctttgggaaacaggaatgccacagatagggatctatcactttaagccagcaaatgtgaaaaattggattcacaagtagktagaagaaagggtaattgtaa

SEQ ID NO: 286383 - DNA, 588 bp, Homo sapiens
ctgtgttaagagaatcctgagttgcctgacttcatgaaaaataatggactataaaaaaattacaaagatgttaagaaaaagcagaaagtgcaaaaatgatggcggtatgcaacagaattcacatagcaagcttaaagttgctgtaaattcctttacaaaagtaaaagggaaaataagatggataaaagccattcaagacaggttagatgcaaaaaaaaaagactgtagttaagctgtagctcacctactaacaaaaaccaattaaatatttcccatctttctaagcttcttattacaaaacaaaggaaaaattcttagattgacattttctgaaactggcatatctttaaaaactacataatgataagccttctaattaacttggatattgaagccaatgattcattatactttcatgttttttttttttttaaagaaatgctatatcctgtcctgaaagtgcttttatatatactttsttgtaagttgaagggggagaaagtaaatatagattcccgcaaagatgaagtgtacaccagaagcttagagtcagataaatgatcttggaaagatgtgataaatttagta

SEQ ID NO: 286384 - DNA, 550 bp, Homo sapiens
tttaaattgcacatggctctgagtagccacgatgaaatctcatgctgtcatgcctgttcaacccaggatgtgaatcatccctttggccagatgtccatgctgtgtgcgctagctgctcgttagtctcttagtagacttctcagttaataaaatcaaaaagacatagtatatatagggttttgtactatctgaggtttcaggcatccactgggcatctctgatcacatctcccttggaaaagggggaactactgtatttacccatatatttacaaygtgtaatgatgtttattccctgttatactttaatgcctccaaaagagtttacctttagtatttattttactttgggcctgtcagtaatgaagtctaagatttgtttttgataacatttatttattttgatttaattttgaaagctatgttcactggttatagcattctatatggacagtttgtttttttcgttcagcactttaaaatattccatttcattatcttttgatttctgtaatttcccttgagaagtcagctgaccttcttgctgttag

SEQ ID NO: 286385 - DNA, 550 bp, Homo sapiens
tttaaattgcacatggctctgagtagccacgatgaaatctcatgctgtcatgcctgttcaacccaggatgtgaatcatccctttggccagatgtccatgctgtgtgcgctagctgctcgttagtctcttagtagacttctcagttaataaaatcaaaaagacatagtatatatagggttttgtactatctgaggtttcaggcatccactgggcatctctgatcacatctcccttggaaaagggggaactactgtatttacccatatatttacaacgtgtaatgatgtttattccctgttatactttaatgcctccaaaagagtttacctttagtatttattttactttgggcctgtcagtaatgaagtctaagatttgtttttgataacatttatttattttgatttaattttgaaagctatgttcactggttatagcattctatatggacagtttgtytttttcgttcagcactttaaaatattccatttcattatcttttgatttctgtaatttcccttgagaagtcagctgaccttcttgctgttag

SEQ ID NO: 286386 - DNA, 577 bp, Homo sapiens
aatggaacctggtgactggtaatttcatttgagttgagaagacaggkttcaaagttcaaagagtccttggtagctagagttcacagagaagagtactaaagaaagaagagtgcccagggagagagagtcctggagatatgcaagttccctttgagcatttagctaaggactgatcagtaaaaacatatgaaaaaagtatcaaggccagggaaagaacaagtagaaaaagcaggcagaacaatctccagggctcatgcagtctcaaaatagtcagtagtcccactagccatggtggaaaggcctcataacatatgaggtattagatagagttctcagaagagtattgactcagaattgggcccaagttagccatagactgacatctgtcatgtaacaaagttcaaagcaagccataaagggatcaaactattttcaagtaacttatgtgtataccagtccaaatgtcaaaaatatttgaaggaatattttaaaaatgaaatccaggatccaataatgtaaaattcacacgtctagcgtcccatgaaaacattaccaggcatgcagagaaatgggaaaa

SEQ ID NO: 286387 - DNA, 1191 bp, Homo sapiens
aatggaacctggtgactggtaatttcatttgagttgagaagacagggttcaaagttcaaagagtccttggtagctagagttcacagagaagagtactaaagaaagaagagtgcccagggagagagagtcctggagatatgcaagttccctttgagcatttagctaaggactgatcagtaaaaacatatgaaaaaagtatcaaggccagggaaagaacaagtagaaaaagcaggcagaacaatctccagggctcatgcagtctcaaaatagtcagtagtcccactagccatggtggaaaggcctcataacatatgaggtattagatagagttctcagaagagtattgactcagaattgggcccaagttagccatagactgacatctgtcatgtaacaaagttcaaagcaagccataaagggatcaaactattttcaagtaacttatgtgtataccagtccaaatgtcaaaaatatttgaaggaatattttaaaaatgaaatccaggatccaataatgtaaaattcacaygtctagcgtcccatgaaaacattaccaggcatgcagagaaatgggaaaawtaaggaataaaatcaattaatagaaacagatcaagaaagggcacagataataaaatcactatatacaaatatgaaatagatattatatctagactttatatgtttaaaatggcaggagaaagcaggaatataatagggatacttactgaagatatttataaagatttcagaagatggttatgaaaagatagttattgaaaatattataaagacccaaattgaagttctaagatgaaaaatataatgcctgatattaaaaaaaataatgaaattgaaaacagattaaacactgcagaagaaaatgagcaaataactagttattagttagtggtaggacaacatggagtgacctaagagatatataattagagttctagagaaggataaataaataaagaacaaaatattttaagaaatgatcactaaaacatttccaaatttgattaaaattataaatacacagwcccaaagagttcagaaaatgtcaagcagaaaagaaatgaaaattacagcaacacatatcatatcaaatggtttaaaatgtataacaaactaaaaatctttaaaaaaagccatcaaaaaaagacatattacatacagagtaaaaaagata

SEQ ID NO: 286388 - DNA, 534 bp, Homo sapiens
aacaaagctagaccctgtatctacaaaaaataataataattttttaaaaggacactattaatgaaatataaagcaagccataggctaaagataagatttgcagatctatgtccaataaagggctggtgtctagatgtaaagaactcttacaacttaaaaacagaaaaaaaaatttttttaaatggggaaaagatttgaacagatatgtcaccaaagaaggtatatggatggcaaataaacacatggaaatgcaaattaacatcacaaaatcacactacacattcactaaaatagctaaaatgtttaaaattcaccatagcaaatattagcaagaatgcrgagcaactgaaactttcatacactactggtggtaatttagggcatgtaaaattttatgaccactttggagactattttagcagtttcttaaataactacacattcacttataatactcaaccattccattcttcaatatctatccaagagaaataaaaaatatatccacacaaaacttatatgtaaatgttcata

SEQ ID NO: 286389 - DNA, 578 bp, Homo sapiens
tgatttctttaagcagtgatttgtagttctccttgtagagaactttcaattccctagttagctgtatttctaggtatgaaataaaatgatatctactgctgatgatatgatcttatatagagaaaatcataatgaattcaataaaattattagaactaataaatgagttctgcaggttgaaaaatactagatcaatatacaaaaataaattgtatttctatacacttgcaatgaataattcataaccatacaaacagcagcaaaatgatacaatatttaggaataaatttagcaaaaaaaaactgtaaaacatrtactctgaaaactacaaagcattgtggaagaaattaagaaagctctaaatatgtgtgaaaacatcccatgctcatgaatcagaagacctaacatggttaagatggcaatactcaccaaaataatctatagattcagtgcaatactgtagggagaccccctgaaactattgctatggaataaaagatgaaatgctcctgattatcataaatacaaagttgcatgcaggactgtgtaaagacaatgccaggttggactgccagaat

SEQ ID NO: 286390 - DNA, 464 bp, Homo sapiens
cattatatttttatagtaacactgagcagctatggatgtcaaaccatgctaattgggaatgttttgccctatataatccccagtagccgctcctaaatttacaagtaaatattctaagaaaagccagtgtatttgctgtgcaaataaatacagcttctagaaaaaatcctcagccctttctttccaattagaacaacactctattcttgcagyaattgattgcctcaatggccccagttcttcattcttctcctaccatatcctttatagtgtgactttgaagtttctcccatcaggaggtggagactatttcccccgccttgattttgagtttggccatgtgacttgctttggcagtgttgatgcaaacagaattcaaacaggcctgcaagtttctgctgatactcttgctcttcttctagccgtcaaaagagaatgtctaaactaaactgctgtgagaagat

SEQ ID NO: 286391 - DNA, 577 bp, Homo sapiens
acacaaagtgaagttattggataccttatctggaactgcccaaaatgttgactgagatccaaagaacacacagtaccttctggatcagggaaaaggagccaaatgtttttatagtcccaacaattttcttaactacaattttgcttcatttctaacaacgaagtgaagtacttttaaggattccaaatactagagaacaaaagccttctcagagttgtaatcatgtcatacagaaatagagacagtaagtatcctggttaaggaaaatgtgaatatgtggatgaacaaaagtgactggtagttaggacaggtagccagactgtcacttactggctggatgcttttgtgtatttgggtttmacaaagataacatggtgagtcccaaacatgttgcacctcactttataaagtgtgatatcactgtagctgtaggaaagtgtattgtgcttgtattagcctttttctaaaatgtcctagaataattctaagtcacaaatcaaattagagagagtaaacttccttaatagattaagaaatcaaattctgatagactagtacttctttgtagttttttaaa

SEQ ID NO: 286392 - DNA, 604 bp, Homo sapiens
ggtcatgtactgtgtggtaggcagctgctaagatgtcccccacttatccctgtctcctggtattgacgctgttctcttcagtatcactgaacttacatctaatgaatagaacatgatagaaaacgatgggatgttcttaacaaggttaggttagaaaaagactgtggcttctgtcttggatgccctctctggatctctctctctgggagccttcaggctttgggaagtatgctgccatattgtatatggccctatggggagatgcccagatgacaaaaaccaaccaaccaaacaaaacccacaaaacctaaaaataaaaaataaacccttataaacctggtcaacagccagtgagtacctgaagcttgccaagagtcgcatgagcagtcttggaagcagatcctcccctagtcaggctttgagatgactgcagccccagctcataccatcattgcagctttgcaagagacctggaaccagaatgcactcagctaagccatgcccagattcttgactcatagaaattgtgarattgtaaatgtttgttattctgaacagctaagttttgggcatatttgttacatagcaattgataacttacaaa

SEQ ID NO: 286393 - DNA, 600 bp, Homo sapiens
cttctgggtcttatgatttctggacttagtacattcaccttctaggaacattcttttttctcttaagacactctgaatgccagactgtgtccagtgacgtatcatcttaagtggttgaaagacaaaatatttaaattgccatacattttgtctgcctcttcatagaaatgatgcaaatcagtttcatatttccagtgaattctttgactcttgtggtctcacatagggcctatgaaaaacacagcttttccccaaagaagaccttcatcacttgmattttattagcctccccaaaggcctagtttctgtctagtgtccagtcttggaagcatctgctttaaatttcctttaaacaactgttatatggaaatgacttcctttcttctctctccactcctcatcctaaactgagctgcccgtctacttctcactgtaacaatctttgatgtcagcttatttgtggacctcgcacacaggaatgggacaagtcaccagctcagaagtctcaggaccagcgacatcaagagcaggaagtggccagtgcctcaacttcactcccctctccctcctggaacaggccctccatcaccgtagataatt

SEQ ID NO: 286394 - DNA, 600 bp, Homo sapiens
cttctgggtcttatgatttctggacttagtacattcaccttctaggaacattcttttttctcttaagacactctgaatgccagactgtgtccagtgacgtatcatcttaagtggttgaaagacaaaatatttaaattgccatacattttgtctgcctcttcatagaaatgatgcaaatcagtttcatatttccagtgaattctttgactcttgtggtctcacatagggcctatgaaaaacacagcttttccccaaagaagaccttcatcacttgaattttattagcctccccaaaggcctagtttctgtctagtgtccagtcttggaagcatctgctttaaatttcctttaaacaactgttatatggaaatgacttcctttcttctctctccactcctcatcctaaactgagctgcccgtctacttctcactgtaacaatctttgatgtcagcttatttgtggacctcgcacacaggartgggacaagtcaccagctcagaagtctcaggaccagcgacatcaagagcaggaagtggccagtgcctcaacttcactcccctctccctcctggaacaggccctccatcaccgtagataatt

SEQ ID NO: 286395 - DNA, 481 bp, Homo sapiens
tgataggaatagcactgaatctatagattgctttgggcatcatggccatttttaacaatattgactcttccaatccatgggtattcttccatttgttcgtgttatctatgatttctttcagaagtacatagcagttctctttgtagagatctttcccctccttggctacatgtattcctaggtattttattttttgtggttattgtagataagattgcattcttgatttggctctcagtttcaacattattggtggacagaaatgctgctgattctgtacattgattttgtatcatgagactttactgaagtcttttatcagcactaagttcctttcagtggaatctttagggttttttaggtatggaatcatatyagcaatgagggacaatttgacttcttttcatatttggatgcctcttatttccttctcttgtctgattgctatggctaggactttcagtactatgttgaataggag

SEQ ID NO: 286396 - DNA, 555 bp, Homo sapiens
ggaaattgcttcaaacttttgcacatttargataatgttggctgtgggtttgtcatagatggttattattttaagtatgttccttcaatgcctagtttgttgatgttttcttcatgaagaaactgaattctatcaaaagctttttgtacatctattgagatgatcatatggtttttgtttttaattctgtttatgtggtgaatcatatttattgatttgtatatgttgaaccaatgttgcatcccaggaaaaagcctatgtggtcatagcaaattaacttttgatgtgcttctgtattcagtttgctagtattttgttgaggatttttactctatgttcatcaggcatgttggcctgcagttttcttttttcattgtgtctttgccaaattttggtatcggggtgatgcaggctttgtagaattagtgagtgagtccctcctccttgattttttggaatagtttcagtaggattagtaccagctcttctagaagataacagaggaagaatgctagataaccatgggtttggacaccttgtataacactgaaagca

SEQ ID NO: 286397 - DNA, 1189 bp, Homo sapiens
cataactcactctcagtcatctgtatttgtaaataaagttttattggaacacaggcattccctttcatttacatattgttcagggttgcttttgggctaccacaacagagttgagtagttgcaagaaagggaggatrtctcataattatttactatctatctctttatgaaaaaaatttcctaattcccattttaataagtactaggttgatgataatgtctttaagaatggtaaatcaaatagagattagttacataataatggtaccttatgggaataatatattaaaatacttaggcttctctggcgatctggatgactctcccgggaactctatacaaggctgttcccctgtgcccttagtcactcaggtgaaaaaaattgcatttctttgatagggaaaaccaaccaattagctaacaaaaacccctgaggttctttctttcatgtctatagattgtggtaaaattggtggtctgattaacagataatttactccttattttctcttactcaagccatgtactgttgaggagggcttatcagcattacagcacagacgtatattcaactcaagctcaggggaagtgtgaaatatacatacatacatatacacatatwataactcactctcagtcatctgtatttgtaaataaagttttattggaacacaggcattccctttcatttacatattgttcagggttgcttttgggctaccacaacagagttgagtagttgcaagaaagggaggatgtctcataattatttactatctatctctttatgaaaaaaatttcctaattcccattttaataagtactaggttgatgataatgtctttaagaatggtaaatcaaatagagattagttacataataatggtaccttatgggaataatatattaaaatacttaggcttctctggcgatctggatgactctcccgggaactctatacaaggctgttcccctgtgcccttagtcactcaggtgaaaaaaattgcatttctttgatagggaaaaccaaccaattagctaacaaaaacccctgaggttctttctttcatgtctatwgattgtggtaaaattggtggtctgattaacagataatttactccttattttctcttactcaagccatgtactgttgaggagggcttatcagcattacagcacagacgtatat

SEQ ID NO: 286398 - DNA, 567 bp, Homo sapiens
ataactcactctcagtcatctgtatttgtaaataaagttttattggaacacaggcattccctttcatttacatattgttcagggttgcttttgggctaccacaacagagttgagtagttgcaagaaagggaggatgtctcataattatttactatctatctctttatgaaaaaaatttcctaattcccattttaataagtactaggttgatgataatgtctttaagaatggtaaatcaaatagagattagttacataataatggtaccttatgggaataatatattaaaatacttaggcttctctggcgatctggatgactctcccgggaactctatacaaggctgttcccctgtgcccttagtcactcaggtgaaaaaaattgcatttctttgatagggaaaaccaaccaattagctaacaaaaacccctgaggttctttctttcatgtctatagattgtggtaaaattggtggtctgattaacagmtaatttactccttattttctcttactcaagccatgtactgttgaggagggcttatcagcattacagcacagacgtatat

SEQ ID NO: 286399 - DNA, 567 bp, Homo sapiens
ataactcactctcagtcatctgtatttgtaaataaagttttattggaacacaggcattccctttcatttacatattgttcagggttgcttttgggctaccacaacagagttgagtagttgcaagaaagggaggatgtctcataattatttactatctatctctttatgaaaaaaatttcctaattcccattttaataagtactaggttgatgataatgtctttaagaatggtaaatcaaatagagattagttacataataatggtaccttatgggaataatatattaaaatacttaggcttctctggcgatctggatgactctcccgggaactctatacaaggctgttcccctgtgcccttagtcactcaggtgaaaaaaattgcatttctttgatagggaaaaccaaccaattagctaacaaaaacccctgaggttctttctttcatgtctatagattgtggtaaaattggtggtctgattaacagataatttaytccttattttctcttactcaagccatgtactgttgaggagggcttatcagcattacagcacagacgtatat

SEQ ID NO: 286400 - DNA, 607 bp, Homo sapiens
aagaactgtttgaactgggcatcaaaggatgaaaataagccagacacatgaaattctggtacaataattctacaggttgaggaacatcttgcgcaaatgctctgcagagtataagtgtaaaattgtataagcttcaagtatttgagaacattctatgtagaacaaaatgaggttagaattgtgtgctgaggaaaacatcatgcaggatcatataggccatgatcatttagttttgttttaaatgcaaaaggaagccactgaaatattattcatcatgcagactgacataatgaggtgcatattcaccaagtatgactccaacaactayttgttgatgagatggagtaaaagaaagagtataaaaattaaggtgctatttagattagggcatcggctcaagggggctggagtagagatgaagacaagtggactaatttgagggaagtttatgatataaaccatgaactttgggattaattggctatgcggaatacagggaatagagggaagcaaatgctctcctctcatagcattagcacataggacgctgggttttgggaggaggaaaaaaagagattgattcaggaataaaaaatttttcttgcca

SEQ ID NO: 286401 - DNA, 610 bp, Homo sapiens
aagaactgtttgaactgggcatcaaaggatgaaaataagccagacacatgaaattctggtacaataattctacaggttgaggaacatcttgcgcaaatgctctgcagagtataagtgtaaaattgtataagcttcaagtatttgagaacattctatgtagaacaaaatgaggttagaattgtgtgctgaggaaaacatcatgcaggatcatataggccatgatcatttagttttgttttaaatgcaaaaggaagccactgaaatattattcatcatgcagactgacataatgaggtgcatattcaccaagtatgactccaacaactatttgttgatgagatggagtaaaagaaagagtataaaaattaaggtgctatttagattagggcatcggctcaagggggctggagtagagatgaagacaagtggactaatttgagggaagtttatgatataaaccatgaactttgggattaattggctatgsggaatacagggaatagagggaagcaaatgctctcctctcatagcattagcacataggacgctgggttttgggaggaggaaaaaaagagattgattcaggaataaaaaatttttcttgccacat

SEQ ID NO: 286402 - DNA, 607 bp, Homo sapiens
aagaactgtttgaactgggcatcaaaggatgaaaataagccagacacatgaaattctggtacaataattctacaggttgaggaacatcttgcgcaaatgctctgcagagtataagtgtaaaattgtataagcttcaagtatttgagaacattctatgtagaacaaaatgaggttagaattgtgtgctgaggaaaacatcatgcaggatcatataggccatgatcatttagttttgttttaaatgcaaaaggaagccactgaaatattattcatcatgcagactgacataatgaggtgcatattcaccaagtatgactccaacaactatttgttgatgagatggagtaaaagaaagagtataaaaattaaggtgctatttagattagggcatcggctcaagggggctggagtagagatgaagacaagtggactaatttgagggaagtttatgatataaaccatgaactttgggattaattggctatgcggaatacagggaatagagggaagcaaatrctctcctctcatagcattagcacataggacgctgggttttgggaggaggaaaaaaagagattgattcaggaataaaaaatttttcttgcca

SEQ ID NO: 286403 - DNA, 603 bp, Homo sapiens
aatcaatgcgcttaaaaagcaaacacgaaaagaacactctaattgttgattaatgcaatgaattgtagttctttgaaaatattaatgaataacttaagatttggcaagcctggccaggtgctgtggctcatgcctgtaatcccagcactctgggaggtcaaggcgcgtggatcacctcatgtgggggagtttgagaccagcccagccaacatgggtgaaaccctgtctctactaaaaatacaaaaattagccgggcatggtggtgcatgtctgtaatcccctctactygggaggctgaggcaggagaatcacttgaacccgggagttggagtttgcagtgagctgggatcgtgtcagtgcactccaggcctgggtgacagagcaagactccgtcacacacacacacacacacacacacacacatacacatacacacacacacacacacacatgcatgcaaaaataaaagaagatgagagaaaaaagagaaagggcaaaaatatgcaaatcaagaatattagcaatgataataatagcacagaaaaaagtatgaagcaaaataatgctgctaaaggtgtttgaaaaataacaaaaatttgtgcg

SEQ ID NO: 286404 - DNA, 675 bp, Homo sapiens
agtggcggaagttgctttgtgagctgagagactgatagtcataccacccttgttttcctacaggtgtgttacagtgatttgcccagtgataaaatagaggcatgtgtgaggaactcaactgaagcaaagatgtgagtggttactcctacctgatagagatgaaggatgtcagggatgrcttaacaaaagaaaatgttttcactgtattttatgaatcgtttgagaaatgtttattttaaaaggaactattttactaaggcatggggattgggtaacgaattacatcaggtagtgcaggatcctggggctagtaaaagcaggattgtgtaaactttctgaaagggataagaggagagagaaacggctaaaactcagaagagggaaattatgaagtggctacttgaataagaccagtgacttctacagaagggatcacagaaaggaaaactccatacctattgtcaggcctctccctgaccacattcaatgaaaagatcgaagttagagaagacagctagggtgttcatagaggtcgaccttctgaaataacatggcagagaaaagtggacactggctctttaggggcaaataaaaaaacatctatgccaacctcctgtttttattgggctggattttaaaggaatctgaatctcaggtagactcagctttcatcag

SEQ ID NO: 286405 - DNA, 675 bp, Homo sapiens
agtggcggaagttgctttgtgagctgagagactgatagtcataccacccttgttttcctacaggtgtgttacagtgatttgcccagtgataaaatagaggcatgtgtgaggaactcaactgaagcaaagatgtgagtggttactcctacctgatagagatgaaggatgtcagggatggcttaacaaaagaaaatgytttcactgtattttatgaatcgtttgagaaatgtttattttaaaaggaactattttactaaggcatggggattgggtaacgaattacatcaggtagtgcaggatcctggggctagtaaaagcaggattgtgtaaactttctgaaagggataagaggagagagaaacggctaaaactcagaagagggaaattatgaagtggctacttgaataagaccagtgacttctacagaagggatcacagaaaggaaaactccatacctattgtcaggcctctccctgaccacattcaatgaaaagatcgaagttagagaagacagctagggtgttcatagaggtcgaccttctgaaataacatggcagagaaaagtggacactggctctttaggggcaaataaaaaaacatctatgccaacctcctgtttttattgggctggattttaaaggaatctgaatctcaggtagactcagctttcatcag

SEQ ID NO: 286406 - DNA, 641 bp, Homo sapiens
atgtcagggatggcttaacaaaagaaaatgttttcactgtattttatgaatcgtttgagaaatgtttattttaaaaggaactattttactaaggcatggggattgggtaacgaattacatcaggtagtgcaggatcctggggctagtaaaagcaggattgtgtaaactttctgaaagggataagaggagagagaaacggctaaaactcagaagagggaaattatgaagtggctacttgaataagaccagtgacttctacagaagggatcacagaaaggaaaactccatacctattgtcaggcctctccctgaccacattcaatgaaaagatcgaagttagagaagacagctagggtgttcatagaggtcgaccttctgaaataacatggcagagaaaagtggacactggctctttaggggcaaataaaaaaacatctatgccaacctcctgtttttattgggctggattttaaaggaatctgaatctcaggtagactcagctttcatcaggataatgatgagcttaactgtggaactggacatataagattatgaaatcatgaaaatgtattctatyctctgtaaattgtatgttttaggtgctttcaagcatagggattatacttaaaagctgaggctct

SEQ ID NO: 286407 - DNA, 629 bp, Homo sapiens
ctttgactctattcaaaaatctatccaatcttgacttttaaatttgttcattgggaagaacagaaaaactatgcatcataatttcaatataattccttatttctattcaggccaataattatttgactaataggmaagagctgttaaaagtaaatggcttgatgcctttaagaatccccaatgcattctgtagggaggcaatactggcaatacaactctttttctttcaaagaagaattgtaaagtataaatttggtattctcaaatttttggattgttcatctgaattttattttaggcatgccgttagttatattccaagtaaaccctaaaatagattttgtggaccatgaaaagtgaaaagtattggagaataaaaagtggaagggttgtgtagtgtgtgggtcgtacttaaaaatagaatataaaaatcaaactgcagcaaagcatggcatacatttcaacaatgccttgtaaagatcaggaagccagaccagaatcaagggccttctgcaaataccagttcgtcctgtccaacatggttgattttcaaatagagtagtcattgctgtcttggtgaggctttaagtacacactgcaaaggaagccatacaagacactacaaagtc

SEQ ID NO: 286408 - DNA, 629 bp, Homo sapiens
ctttgactctattcaaaaatctatccaatcttgacttttaaatttgttcattgggaagaacagaaaaactatgcatcataatttcaatataattccttatttctattcaggccaataattatttgactaataggcaagagctgttaaaagtaaatggcttgatgcctttaagaatccccaatgcattctgtagggaggcaatactggcaatacaactctttttctttcaaagaagaattgtaaagtataaatttggtattctcaaatttttggattgttcatctgaattttattttaggcatgccgttagttatattccaagtaaaccctaaaatagattttgtggaccatgaaaagtgaaaagtattggagaataaaaagtggaagggttgtgtagtgtgtgggtcgtacttaaaaatagaatataaaaatcaaactgcarcaaagcatggcatacatttcaacaatgccttgtaaagatcaggaagccagaccagaatcaagggccttctgcaaataccagttcgtcctgtccaacatggttgattttcaaatagagtagtcattgctgtcttggtgaggctttaagtacacactgcaaaggaagccatacaagacactacaaagtc

SEQ ID NO: 286409 - DNA, 1168 bp, Homo sapiens
ttaggtaagttaaaatgtaatcactaaaaagcagcaatagtatcagtaattgattgattaagtagataaaacaatcacttgaaggttaaaaaaagaatgctttcaatggacagacatggatattcctggaatttgaaaaattagtaagtttacattgtgatgaaagttttgccatcatatttcaaaaggttaacatgtcaaataaagagacaacaggaggtaaccagagagttagtacataatgaagggaaatttgtagtattttgttttatagagacttgaacacatgaatagataaaatagaaaacattaaaaagagactgatcmccaggcatggtggtgcacacctttcatcccagctactcaggaggctgaggcaggagaatcacttgaacccaggaggcggaggttgcagtgagccgagatcgcaccattgctctccagcctgggcgacagagtgagactcggtctcacaagaaaaaaaagaaagaaagaaaaaaaaagaataaaagaaagaggctgatcatacagtaaaagggaattaaatgatggattaaagttttagtgaacatgaaagtttataatatctggaggatagatgagggatacaattwtgtaagaatgggatgctttaaawgttcacgcctggggacatgtgaatatctctcggtgagttactttgtgaattacctgatagaaaaaatgaaaaaaaaaagtcagcgcaacccagtaagtgcagcttattttatatgaaccatattgtaaaaacttgcattgtttgtgtgtacatatgtgtgtccgtgcgtgtatcttgtctatttaaggaaacattttcagaaacactggctttgagtttggattatatataagcctaattaaatgagccagtaagtgtacagattactgggtgctccttctatactccaaattatcaaaaatcctaacttagatttccatagaatatcataagaaaatactatttgtattgttttggttacccaccccactcccccattatatccatccccaagtctcttcatttgcagggatgggtgtaagaagtttgctgataatatagaactaataggaggatgggggtgtattaggggtttccagagagacagaactaataggatagatgtatatatgaaggggagtttattaagga

SEQ ID NO: 286410 - DNA, 554 bp, Homo sapiens
tgtaagaatgggatgctttaaaagttcacgcctggggacatgtgaatatctctcggtgagttactttgtgaattacctgatagaaaaaatgaaaaaaaaaagtcagcgcaacccagtaagtgcagcttattttatatgaaccrtattgtaaaaacttgcattgtttgtgtgtacatatgtgtgtccgtgcgtgtatcttgtctatttaaggaaacattttcagaaacactggctttgagtttggattatatataagcctaattaaatgagccagtaagtgtacagattactgggtgctccttctatactccaaattatcaaaaatcctaacttagatttccatagaatatcataagaaaatactatttgtattgttttggttacccaccccactcccccattatatccatccccaagtctcttcatttgcagggatgggtgtaagaagtttgctgataatatagaactaataggaggatgggggtgtattaggggtttccagagagacagaactaataggatagatgtatatatgaaggggagtttattaagga

SEQ ID NO: 286411 - DNA, 631 bp, Homo sapiens
ttttacctcatttaaattgtaaatctcaagttttttatttgaatacaatttctattaagaaataaaaatatctgacttaagattttgaattccttactatttgtgtgacttttagaaaatgtgggtattatattctctcctgtrtaaaatgccaataacaatagccctgactcatagtgttgcttttgaggaataaataacctaatgcgttttggtacagtaccatagttactgttatttcagtgttatttcttgttgaacagtgaacattttctcaccagctttgttttgtcaggaagccttatgcaaacttatgacaaaagaaaagaaattttttcgccttcctactctcccttattttggctgtaacttaacacttatatattattcttatcccctgcctcaaataaatcccacaggttgtcctcagtctcactttataatgtactatctagttctgacttcttcaggtaattcaaacttctcaatctaccattttgatatcaatttgtctatcctgacttctcatttcctctgaggtgtatgacctgataaccaatttgataaaatgtcattggtaaatataggctacttaacaaaaactataatagtttaaatacatgaacttacc

SEQ ID NO: 286412 - DNA, 631 bp, Homo sapiens
ttttacctcatttaaattgtaaatctcaagttttttatttgaatacaatttctattaagaaataaaaatatctgacttaagattttgaattccttactatttgtgtgacttttagaaaatgtgggtattatattctctcctgtgtaaaatgccaataacaatagccctgactcatagtgttgcttttgaggaataaataacctaatgcgttttggtacagtaccatagttactgttatttcagtgttatttcttgttgaacagtgaacattttctcaccagctttgttttgtcaggaagccttakgcaaacttatgacaaaagaaaagaaattttttcgccttcctactctcccttattttggctgtaacttaacacttatatattattcttatcccctgcctcaaataaatcccacaggttgtcctcagtctcactttataatgtactatctagttctgacttcttcaggtaattcaaacttctcaatctaccattttgatatcaatttgtctatcctgacttctcatttcctctgaggtgtatgacctgataaccaatttgataaaatgtcattggtaaatataggctacttaacaaaaactataatagtttaaatacatgaacttacc

SEQ ID NO: 286413 - DNA, 631 bp, Homo sapiens
ttttacctcatttaaattgtaaatctcaagttttttatttgaatacaatttctattaagaaataaaaatatctgacttaagattttgaattccttactatttgtgtgacttttagaaaatgtgggtattatattctctcctgtgtaaaatgccaataacaatagccctgactcatagtgttgcttttgaggaataaataacctaatgcgttttggtacagtaccatagttactgttatttcagtgttatttcttgttgaacagtgaacattttctcaccagctttgttttgtcaggaagccttatgcaaacttatgacaaaagaaaagaaattttttcgccttcctactctcccttattttggctgtaacttaacacttatatattattcttatcccctgcctcaaataaatcccacaggttgtcctcagtctcactttataatgtactatctagttctgacttcttcaggtaattcaaacttctcaatctaccattttgatatcaatttgtctatcctgacttctcatttcctctgaggtktatgacctgataaccaatttgataaaatgtcattggtaaatataggctacttaacaaaaactataatagtttaaatacatgaacttacc

SEQ ID NO: 286414 - DNA, 598 bp, Homo sapiens
aagtgttcaacacattcagctataaccacatggttccgcatgcatcccatgcataataaaatatgaaaatatacttaaaataacaataatcatgtaggtggcaaaaaatacttgagatgacaacagaacaggtgaaaaacctcaaacaggttatatttgaaaacttttttaaaatgaaaaccaatcctcataatagcatccatggaactagtactgccacggaaccccaaatcaaattctgttagtcatgactgggactaaactttacttctacatgacttcttttaaaatgcaaacacgttacctgaaatgtataatgttaaatatgcaatctaaaaagtattttaaatggaagatggctaaaattatatatgcatagacagctaaaaaaaaactgtatgcaacataaggaaaaaatcaaagttyttagaccctgtaaacatgaatgacagtaggttgtagtgtctgagaggagggatttacgatccaatacatggctgcccatgaaagacatggcccattagagtgtatgcaagagagttttttgcaagagagttacagagacaaaaaaatagtcaaggaccagagcttaatagag

SEQ ID NO: 286415 - DNA, 507 bp, Homo sapiens
tgctacatgtccatctagggacaaataagactccaatgttctcttctttcaacaacccatgctgatagagtgcgcacaaatttatatttgttcttcaatattctgtttggaaatggcaatattcttttccattcatgtktcatactaagatgccaagactggggagaagtgcatccctcctacagggagagcagcaaaaatctgcaaaacacacacaccaatgtaatttattacatgatcattttcaatctctttcaaatctcaatgatttcattaatttgatcttctccactccaccttcagatgctcttttttcttcaacttttgccgtttgtactaataatattgcacatcttacaatgcgctaggaggggtcaaaacatttattttttaaatgacagatagtaaacattttaggattcatattgtaagtctctgtggctactacttgactctgccattgtaatgcgaaagcggtcatggacaatacataaagaaatcggcacc

SEQ ID NO: 286416 - DNA, 578 bp, Homo sapiens
ctgtaaaactgtgcataggccttgatagactgtcttgtgtgaatcattgtctaaagcctataggaccatactaaatgataaggattagaaatggtatcatactaaaatcagaagggaaaacagtaggtcaatatcttctgtstgctaaaatctgtctgagaatagcaattgcacatccccctcacctcgcaaataaattttcttgcctgaagataacctattgtgtgtgtgcatgtgtgtgtgtgtgtgtgtgtgtgtgtgtgtaaggaaattgagggtcagtcttatgttcttggaaagcagacagtgaggcagagatttgcatacaagaagtttatcggaaggtagtctcaagttcaagccctgttggtgagtaaataagataggattgggcagagggagaagttgaattgcaatgcaattgcaccaaaagtctcagcagagcacacaaagaacaaaaaaatcagaacctggaattactcttcaggaataaatcaatgaaggcaagtaaatcagactctcatacctttgcatcagccagtcactgcatgtggactgtccattggacagataattta

SEQ ID NO: 286417 - DNA, 578 bp, Homo sapiens
ctgtaaaactgtgcataggccttgatagactgtcttgtgtgaatcattgtctaaagcctataggaccatactaaatgataaggattagaaatggtatcatactaaaatcagaagggaaaacagtaggtcaatatcttctgtgtgctaaaatctgtctgagaatagcaattgcacatccccctcacctcgcaaataaattttcttgcctgaagataacctattgtgtgtgtgcatgtgtgtgtgtgtgtgtgtgtgtgtgtgtgtaaggaaattgagggtcagtcttakgttcttggaaagcagacagtgaggcagagatttgcatacaagaagtttatcggaaggtagtctcaagttcaagccctgttggtgagtaaataagataggattgggcagagggagaagttgaattgcaatgcaattgcaccaaaagtctcagcagagcacacaaagaacaaaaaaatcagaacctggaattactcttcaggaataaatcaatgaaggcaagtaaatcagactctcatacctttgcatcagccagtcactgcatgtggactgtccattggacagataattta

SEQ ID NO: 286418 - DNA, 436 bp, Homo sapiens
gtagaaaagctgtggactcactcatttcaccgaggaataaaagaattaactttcaaaatggggtgtcgttttcctattgtaatggaaaaataaatttaattcctgcttgtatctcacacgttttttttaaataaacaagttgcacatatttctgttataagctaaatttaaacttaactaagaaatgtaaaagtatatgagagcaaaattttacgcaaggtatgcagaaaccatgcctgatttgtatgcrggatccacagtcagtgtatttgtataagtttgtttgtctccatagttcacagcacaatcttaaaccacttcctttggtactaagaaggctgtttgatggtgactatgaaaatactagcacttagaaagaatcctaatgaaattaaagatgtggattttttaccatctcatatacaatagctacaaa

SEQ ID NO: 286419 - DNA, 536 bp, Homo sapiens
acctaggaaacaccattttgcacattggcttttgcaaaaacttcatgactattcctcaaaagcaattgcaataaaaacaaaaatagacaagtgggacctaaactaaagagcttctgcacagtaaaagaaattatcaacagaataaatagacaacctacagagtgggagaaaatactgaaaactgtgcacacaacaaaggtctgatatccagaatctataaggaatgtaaacagttcaataaacaaaacatatataaccctattaaaaatgagaaaaagacatggacacttcttgraagaagatatacaaacagccaacaaatatatgaaaaaataatcaacatcactatcagagaaatgcaaatcaaaactacaatgagataccatttccctccaatcaaaatggctagttattaaaatgtcaaaaaacaacatatactggtaaggctgtggagggaaaggaacactgttggtgggaatgtaaattagttcagcccctgtgaaaagcagtttggagatttctcaaggagtttgaaa

SEQ ID NO: 286420 - DNA, 543 bp, Homo sapiens
tgccacttgtataactctagaaagcctttattcataatattatttttaactcacctacctgagaaaactaattttcagtaagttatctgattttaacaaagtctattctaactccattttctaccgggtttattaaagccagtgtgagccgtgaaactaagcaaaggtcgagggaactgagctgaactcattaccattcatctcacagctttgcctttacctcaggatgcaattcactgggatagtgtgtctcatgtatttataaacaaagtggatcttttccatggggttttatgaacattactactgatacaacatttaaagtggcacgtgcatatttataaatatgtkacaacattaaaaagatccaaaatgtggcttcagttttgagcctatgtcctaaaagcaaaacctagtcattttcatatgatattgaaattaccaaaatttattctttgcgttgtgttatgaattagccacacagcattccttaatttatataaagcactaaaatggcacctagatctacatccctttgctttt

SEQ ID NO: 286421 - DNA, 592 bp, Homo sapiens
ttggtcaattaaaaagattttccaagacagatgatgaaattctggtataatgtaatacatcttgatttaatcaaatgactgttacaatattatacattatgattattattttaaaaaacttgccaattatgtgctcctaaaagaaaagaatatattccgacagagagcttttcaaataattaaaaacactgartaaacaaagaaaagaaaccatgacctagttttcctgtgttttctaaaataactctatattccaaatatgtacaaactcttattttgcaagttcttgatagttaagtgaaaatattttgctatgcaattagcagtaaggtactcaatgtttgtatcaattatttagcaatgaaaaggtgtgtcttttttaattgtaatatgactttcacatcaacattctgcatagtttgcattttaaaccttcttggtgatttcacaaaacaggtggctgtaaggcatcttcactgaatctcaactatgtggccagcactgtgttctggcctgtagagaatatgatcaatacagttttctccttactttctttgtactcttctccagccagtgagctagcagcacagca

SEQ ID NO: 286422 - DNA, 578 bp, Homo sapiens
acctttgacctgggagttgtgtggagccaagggaggctccccactgtggtgaaatgctgagtgagagttcccagggacccacacttatgccatgaacctttgcaactctaggctcagaaaatcctccaataattccattacccttcactctggggattccagattgacatgaaaatgtatgtggagtcttagcaaagcttccactcaggcacatgagtgactctgcatttctctgaggtggacctccccagaggcaactgaaagcctctttgccactacccctactgcccatgggctakggaaggaacaaagatcctgtgagctttacccgcacctccagtaagccactgctaccctaagaagaggccagtctctctccctcatgtccccctcctcccctggtttatcaccaggcagaggatcttggcttgagcccacgacacagctaccctactccaagccaatcatgtcaattggtagtggctctgcaattctctggtggagccccaagagacaagtaaaaggacctctgctacaatgacagccaagatttcttcccctgctgcctccaagctgga

SEQ ID NO: 286423 - DNA, 586 bp, Homo sapiens
acaggataacctttgacctgggagttgtgtggagccaagggaggctccccactgtggtgaaatgctgagtgagagttcccagggacccacacttatgccatgaacctttgcaactctaggctcagaaaatcctccaataattccattacccttcactctggggattccagattgacatgaaaatgtatgtggagtcttagcaaagcttccactcaggcacatgagtgactctgcatttctctgaggtggacctccccagaggcaactgaaagcctctttgccactacccctactgcccatgggctatggaaggaacaaagatcctgtgagctttacccrcacctccagtaagccactgctaccctaagaagaggccagtctctctccctcatgtccccctcctcccctggtttatcaccaggcagaggatcttggcttgagcccacgacacagctaccctactccaagccaatcatgtcaattggtagtggctctgcaattctctggtggagccccaagagacaagtaaaaggacctctgctacaatgacagccaagatttcttcccctgctgcctccaagctgga

SEQ ID NO: 286424 - DNA, 497 bp, Homo sapiens
gactaaggcataagtgactattcatgtaaattgtgtatttagtaaaagactaatcagaaactcaaaataacgcatctatttgtcttttatctacttatgacctggaagccgyctccctgcttcaagttgtcctgcctttcccgacggaaccaatgtacatcttacatatactgattgatatctcatgtctccctaaaatgtataaaaccaagctgtgccctgacaaccttgggcaatgtcatcaggccctcctgaggctgtgtcataggcatgtccttaaccttagcaaaataaactttctaaattgattaagacttgtctcagatgctcttggtttacaacttcttcattctttcttatttattattttttctgactgtattatttctaaagacttggcttcaagttcagaaattctctcttctgctcaacctattctattgttgaagctgtgattgtatttttcattttattcctgaaattatttagcccaactt

SEQ ID NO: 286425 - DNA, 497 bp, Homo sapiens
gactaaggcataagtgactattcatgtaaattgtgtatttagtaaaagactaatcagaaactcaaaataacgcatctatttgtcttttatctacttatgacctggaagccgcctccctgcttcaagttgtcctgccyttcccgacggaaccaatgtacatcttacatatactgattgatatctcatgtctccctaaaatgtataaaaccaagctgtgccctgacaaccttgggcaatgtcatcaggccctcctgaggctgtgtcataggcatgtccttaaccttagcaaaataaactttctaaattgattaagacttgtctcagatgctcttggtttacaacttcttcattctttcttatttattattttttctgactgtattatttctaaagacttggcttcaagttcagaaattctctcttctgctcaacctattctattgttgaagctgtgattgtatttttcattttattcctgaaattatttagcccaactt

SEQ ID NO: 286426 - DNA, 497 bp, Homo sapiens
gactaaggcataagtgactattcatgtaaattgtgtatttagtaaaagactaatcagaaactcaaaataacgcatctatttgtcttttatctacttatgacctggaagccgcctccctgcttcaagttgtcctgcctttcccgacggaaccaatgtacatcttacatatactgattgatrtctcatgtctccctaaaatgtataaaaccaagctgtgccctgacaaccttgggcaatgtcatcaggccctcctgaggctgtgtcataggcatgtccttaaccttagcaaaataaactttctaaattgattaagacttgtctcagatgctcttggtttacaacttcttcattctttcttatttattattttttctgactgtattatttctaaagacttggcttcaagttcagaaattctctcttctgctcaacctattctattgttgaagctgtgattgtatttttcattttattcctgaaattatttagcccaactt

SEQ ID NO: 286427 - DNA, 605 bp, Homo sapiens
tctttctactctggcttgtccttgagaattatatgggatgccagtaatgtgtttaatattccatatagagaaaaatgtagctagatcttggctagtatagcctggggaattatctgttttaatggaagctggaatgcccatctccacaaaacactgcaaaaggtggcatttaacacaggcagaagactttcctgattggtatgtagcccaaagtgrgaaaaggtgtccacacatacatgtacataagctagtctctcaaataagggaacatgtgtgacatccatctgccaaagagaattaggttccaattctcgaggattaactcctcctgtaaaagatgaggaatgcactatttggcaagttggacatcactggataatagctttagcttctttccaggtaatgctgtatctgagtttgagaccagaggcattaacatgtgttaaattgtgaaagtgtctggcattagatattgcagtagcaactaggtgatcagccatttgattcactgcagtcaaaggtcctggaagaggtgtatgagccctaatgtgagtgacataaaaagggtgcattctactcctgactcctgtttgcaattgggtaaa

SEQ ID NO: 286428 - DNA, 357 bp, Homo sapiens
tatgttgactttgagggctatataattgttctggaattagaacttgtgctccccatttttgtaataaatcctttccccayagatttataggtacagaagtcataattggttgaatagtcccaggttttccatcgggcccttcacaatgcaaaatataactactttgatatacttcagggactttaccaactccaactatgttaaattgagggggttgaattggccacatggacagccagtgctgtagagaaatgattgaaatgtctgctcctgtatctaccaaacctttacatttctttccctgaatagttattttacaggtagggtgtttatcagtaatttgattcacccaaagct

SEQ ID NO: 286429 - DNA, 528 bp, Homo sapiens
gcgaccattgttttatcagataattggcttatctgttaacccttttaaaggtataggttctggaggcttaacaatggctgccatcaaaaatgatatcctaaatcttggcaagaagtttgtcttcccacttgaagggcttccttcaaaccttgcaaattttttcctagtcccataccagggacataccccattgcatgcatcatatgttgactttgagggctatataattgttctggaattagaacttgtgctccccatttttgtaataaatcctttccccatagatttataggtacagaagtcataattggttkaatagtcccaggttttccatcgggcccttcacaatgcaaaatataactactttgatatacttcagggactttaccaactccaactatgttaaattgagggggttgaattggccacatggacagccagtgctgtagagaaatgattgaaatgtctgctcctgtatctaccaaacctttacatttctttccctgaatagttattttacaggtaggg

SEQ ID NO: 286430 - DNA, 537 bp, Homo sapiens
tgtggagtgggaaatcaggggactcacagccttcagacccgagagccctgaacagagtttgaccaacatatttattgacagcaagccagtgataagcattatttctatagattatagattamctaaaagtattccttacaggaaacaaagggatgggctgaaacaaagggatgggctctggctagttatctgcagcagaaacatgtccttaaggcacagatcactcgtgctattgtgtgtggtttaggaatacctttaagcagttttctgccctgggtgggccaggtgttccttgctcttattctagtaaacccacaaccttcagcgtgggtgtcatggccatcacgaacatgtcacagtgctgcaaagattttgtttatggccagtttggggaccagtttatggccagatttgggggcttgttcccaacacattacaactgatacaacagaaattcaaatgatcattattaggtaccatatgttgatatactggaaaatatagaagaaatggataaatttctaggaacataaaaca

SEQ ID NO: 286431 - DNA, 599 bp, Homo sapiens
cagaggaggaggaaatacttccaaactgattcaatgaggctagtattactctaataccaaaacaagacaaaggcatrttaaaataaataaataaaaactacaagctaacatctgtgatgaatattgatgcaaaaattgtcaacaaaatactagcaagtgaaattcaacaatatattataaagatcattcatcatgaccaagtgggatttactccaggaatgcaagaatggttcaacatatgcaaatcagtcaatgtgatacttcatatcaacagaatgaaggacaaaaaccatatatttcaatggatgctgaaaactcttttgataaagatctacatctttcaggattaagaaaaaaacctcagaaaactgggtataaaaggagcatacctcaacataataaaagccatatatgacagacccccagctagtgttatactttatggggaaaaactgaaagattttcctcttaaatctggaacacgacaaggatgcccactttcaccactgttatccaacataatactggaattcttagcaagagcaatcaggcaagagaaagaaataaggagaatccaaattgaaaaagaagtcaaattt

SEQ ID NO: 286432 - DNA, 475 bp, Homo sapiens
gtttacatttaggtatcagtgttgtctttgaagtataagaaggtggtcatctttttgctatatgcttaaaaggatttatcagttagtgttgactggagtgcccagactctgaatctacatggagagtcacccttgcagtacttgagcagccccatgtctaaaaattttgttcctttcaatatgattatgtttccctgcctcttcatgtctggccccccacttgggatgttacagaactaccctcagttgcccaatgagccactgatgtaacagaatgtgtacctgcccttacagtgtcttccaggacccactttctgatgtcctgtgtttttctggatacatttggtactcctatacacacrctttcttcacttctccttgttgaccctgcctggagaggagagatcctataatattccttttggttagagaccgcttttgtgttcatttcatagagctgccataacaaggtaca

SEQ ID NO: 286433 - DNA, 571 bp, Homo sapiens
agttttcaataaaataacccacaaaaattgattatatattagtgtctggcaggtagtcrgattactcaaatattaatcctcactcattcccagggctgacatctatccgatatgcctggaaatggcaagtcagctggcatctattaaattaagctgtggatgcactgattgatcagtgccatgtattttaggttgataaatattttgaatattttgaatattacatctaccaatcgtgtttcttatgcggaatctgttcaaagttatagtgccaggcagtatatattaacaaattggtaccttgtttatcaatttttcatgtacatgattaatgtgaatcagattccagaatctaatcaacctcagaatctaatcaaaatcaggctctcaaacttacatagctgagaattttttagacccaagataacctcatcatactataggaatcccagggagatgggattcaatatcatcctggatctgcccttaaccaccttaaaaacaatctaaaactcatggggcacctgggtggagaacaaaagcagaaatacccggttcactgtaagagcag

SEQ ID NO: 286434 - DNA, 571 bp, Homo sapiens
agttttcaataaaataacccacaaaaattgattatatattagtgtctggcaggtagtcggattactcaaatattaaycctcactcattcccagggctgacatctatccgatatgcctggaaatggcaagtcagctggcatctattaaattaagctgtggatgcactgattgatcagtgccatgtattttaggttgataaatattttgaatattttgaatattacatctaccaatcgtgtttcttatgcggaatctgttcaaagttatagtgccaggcagtatatattaacaaattggtaccttgtttatcaatttttcatgtacatgattaatgtgaatcagattccagaatctaatcaacctcagaatctaatcaaaatcaggctctcaaacttacatagctgagaattttttagacccaagataacctcatcatactataggaatcccagggagatgggattcaatatcatcctggatctgcccttaaccaccttaaaaacaatctaaaactcatggggcacctgggtggagaacaaaagcagaaatacccggttcactgtaagagcag

SEQ ID NO: 286435 - DNA, 504 bp, Homo sapiens
actttaataaaatagttattttaacagtttcaaggaacatttggttacagaaatgaatagtcaggtgtctaagcatgtgtttatcagatatagatttgctctcactatacttcaacatgtgagcaattttctaataattctgtcgggatgactttctttctaatcccagggcagcatgtatgatttataaagtagaaaaaagttaattcagagttttgtttgtatgccctttctggaggtgctaagtcagtgcacctcacacagttattaattaaaccgtcaacataaacttttctctttttaaagtttgaaaagtttctttattttgacaaagcctttggctgctggctaaaatgagtgcaaactatgtacattcacagagttacattatagagggggtgatcagcatatatagaagtycttgattctagagtcaaaatttgctggaagtcacccagatcatgtgcaccactttaggtccaccaggacacaagccactctggg

SEQ ID NO: 286436 - DNA, 603 bp, Homo sapiens
ctctggtcgcacatctagtatagggtgttgggattcaaacccaaatacaaatttgcacaaattatataatgatagataccttgcctgaaagaactgataatttaataaagttaggaccatgctggaggtttaatagacctttgatacagagatgtttaaggattcttagaagtagagaataaagctgatttgtattaattctaagctacttcattcttgtgaagattagaaakgtaacatttacactagaattaatgccttttctataaaccaacttttgatgaacacttttaagaaaagaagatatttgcgactgagaattttatatatagtgtgtgtgtggtgtgtgtatatatatacacagataagaaaaatatatgcacataatttagagaatacaggacagaagaagccgctaaaaaaaatctgtaatcttacgacctcggagtaatcatggtcaatgttttcttgaattctatcagctttttctagatacagatacactttctattgtcctttttgaaaatttgggatcatcttataaatacaatttatatgatttattttatgagtttaaaattacattttaagaatttgccaatg

SEQ ID NO: 286437 - DNA, 603 bp, Homo sapiens
ctctggtcgcacatctagtatagggtgttgggattcaaacccaaatacaaatttgcacaaattatataatgatagataccttgcctgaaagaactgataatttaataaagttaggaccatgctggaggtttaatagacctttgatacagagatgtttaaggattcttagaagtagagaataaagctgatttgtattaattctaagctacttcattcttgtgaagattagaaatgtaacatttacactagaattaatgccytttctataaaccaacttttgatgaacacttttaagaaaagaagatatttgcgactgagaattttatatatagtgtgtgtgtggtgtgtgtatatatatacacagataagaaaaatatatgcacataatttagagaatacaggacagaagaagccgctaaaaaaaatctgtaatcttacgacctcggagtaatcatggtcaatgttttcttgaattctatcagctttttctagatacagatacactttctattgtcctttttgaaaatttgggatcatcttataaatacaatttatatgatttattttatgagtttaaaattacattttaagaatttgccaatg

SEQ ID NO: 286438 - DNA, 1207 bp, Homo sapiens
ctctggtcgcacatctagtatagggtgttgggattcaaacccaaatacaaatttgcacaaattatataatgatagataccttgcctgaaagaactgataatttaataaagttaggaccatgctggaggtttaatagacctttgatacagagatgtttaaggattcttagaagtagagaataaagctgatttgtattaattctaagctacttcattcttgtgaagattagaaatgtaacatttacactagaattaatgccttttctmtaaaccaacttttgatgaacacttttaagaaaagaagatatttgcgactgagaattttatatatagtgtgtgtgtggtgtgtgtatatatatacacagataagaaaaatatatgcacataatttagagaatacaggacagaagaagccgctaaaaaaaatctgtaatcttacgacctcggagtaatcatggtcaatgttttcttgaattctatcagctttttctagatacagatacactttctattgtcctttttgaaaatttgggatcatcttataaatacaatttatatgatttattttatgagtttaaaattacattttaagaatttgccaatgwctctggtcgcacatctagtatagggtgttgggattcaaacccaaatacaaatttgcacaaattatataatgatagataccttgcctgaaagaactgataatttaataaagttaggaccatgctggaggtttaatagacctttgatacagagatgtttaaggattcttagaagtagagaataaagctgatttgtattaattctaagctacttcattcttgtgaagattagaaatgtaacatttacactagaattaatgccttttctataaaccaacttttgatgaacacttttaagaaaagawgatatttgcgactgagaattttatatatagtgtgtgtgtggtgtgtgtatatatatacacagataagaaaaatatatgcacataatttagagaatacaggacagaagaagccgctaaaaaaaatctgtaatcttacgacctcggagtaatcatggtcaatgttttcttgaattctatcagctttttctagatacagatacactttctattgtcctttttgaaaatttgggatcatcttataaatacaatttatatgatttattttatgagtttaaaattacattttaagaatttgccaatg

SEQ ID NO: 286439 - DNA, 544 bp, Homo sapiens
taaaaaaaatctgtaatcttacgacctcggagtaatcatggtcaatgttttcttgaattctatcagctttttctagatacagatacactttctattgtcctttttgaaaatttgggatcatcttataaatacaatttatatgatttattttatgagtttaaaattacattttaagaatttgccaatgaagtctttttcatttctaacagttgcttrgaatttattaaatcatattcttaatgttggacttttctaatgtttctaaatattgatattactgatagtaaataaacatgcttaaacatatatgtatgtttgagttgattatttctatagaatagatttctagaaatggtattgctggaacaaaggatctaggttttttttggaggtttctgatacaaattaccaaattgctttcccaaaaggatgtatcaattactatgaaagtatatgaaagcatccaagtcaccttactcttaccaatattgatatcacaatttttattctttgcttattgataagattttatttacatatgcgt

SEQ ID NO: 286440 - DNA, 504 bp, Homo sapiens
agggacagtctgccatctttgctcttttgcagttttccctggtgatacctccaggtactggaaaatccgaggagactagaaacaggagcaggcctccaacatactgcagcagccctacagaaaagtggccagactgtcgcttgggtgcctattcccatatctcctcagcgggcaggtcctccaggcctkggccctagctgacccctcccagacctattaagccagttgcaattcaacaactccctgaacagagtctccaggggcaactaaatgcctttctaccactgcctctgcagtggaactgcacttgctacccttggaccagtgaaggagcaaagaccctaagtgctttaaccatacctccaacaagctgcaattgacccaaggaaaggagatcagtctgtctcccatgggtctcacacacccagcactgcttgtcaccaggcagagacccctggcttggacccacagcacagaccctccatcctgagatgattgtactga

SEQ ID NO: 286441 - DNA, 565 bp, Homo sapiens
gtcagttgatcctcaattatttcagatgtagtaagaccaataattcaatagtactgtcctggtagcatccgttttaggtttaaaagtaattcatattgtttacagcagcacaatttgcaattgcaaaaatatggaaacttcctaaatgcccatcaaccaacgagtggataaagagaatgtggtatatgtacaccatgagatactactcagccataaaatggaacaaaataatggcctttgcagccacttggatgaagctgaaggccattattttaagtgaagtaactcaggaatggaaaaccaaataccatatggtctcacttataagtgggagctaagctatgaggatacaaaggcataagaatgatatakaggactttggttagggataaaagactacacgttggatacagtgtacactgctcgggtgacacatgcagcaaatctcaaaaaccaccactaaagaacttatccatgtaatcaaaaacaacctgcaccccaaaaactattgaaattaaaaataaataaattttaaaaataaaaataatgcatgtaactcactcag

SEQ ID NO: 286442 - DNA, 653 bp, Homo sapiens
cagctgaaatacctgccgagggcaaagggaacacagaaagagtggtggaatatgatagtcataaatacaagctacaatcatatgaccagytgtagaaacgaggactatagttgttatgaatattcatattttggtatgagtctgtttatatatatatatgtatatatacatatatatgcttatataaaaatattttcctttgcacacttatctctttatcttttaaaatgtattaatgatagttaattttccattacagtatataagttagagcagatcaatgagaagaatgaacatcacccaaggtctttgcatattttttgggggaaagtattagcacattttttattgtatacagaatagttacatctgtgaagtgaaaatacaattttattattgtcctttttttaaaaaaacttttattttaggtgcgggggtacatgtggaggtttgttataaaggcaaattgcaggggcttggtgtacagattatttaatcacccaggtaataagcatagtacctcataggtagttttacgatcctctccctcctctcatcctccattctcaaatagcccccagtgcatattgttgccttctttgtgtccatatgttctcaatgtttaactcccacttataagtaagaacatgtga

SEQ ID NO: 286443 - DNA, 653 bp, Homo sapiens
cagctgaaatacctgccgagggcaaagggaacacagaaagagtggtggaatatgatagtcataaatacaagctacaatcatatgaccagttgtagaaaygaggactatagttgttatgaatattcatattttggtatgagtctgtttatatatatatatgtatatatacatatatatgcttatataaaaatattttcctttgcacacttatctctttatcttttaaaatgtattaatgatagttaattttccattacagtatataagttagagcagatcaatgagaagaatgaacatcacccaaggtctttgcatattttttgggggaaagtattagcacattttttattgtatacagaatagttacatctgtgaagtgaaaatacaattttattattgtcctttttttaaaaaaacttttattttaggtgcgggggtacatgtggaggtttgttataaaggcaaattgcaggggcttggtgtacagattatttaatcacccaggtaataagcatagtacctcataggtagttttacgatcctctccctcctctcatcctccattctcaaatagcccccagtgcatattgttgccttctttgtgtccatatgttctcaatgtttaactcccacttataagtaagaacatgtga

SEQ ID NO: 286444 - DNA, 608 bp, Homo sapiens
atctcagaattacataattagttactctaaatgtaacatcaatattacatgatattctgtaaagaatataatgaattctaagcattatgtcttttgaaaatgagaacctgtgctttataagactttttggactttaaatctctgtaggaaaaataaaaacatttccattgtactttgaggattttttaaacaaaaaattacagctagatggtattatttagtctaaattatttcacacatgataaaattaagggccctctgagattatgcaattttttcaggtcacatgtagttggtgaaatatctagaaygggaattctgtattttcttatatcccttgctaatatgggggtctgatcacaggttccttaattctctaggttattgcgtatttggattaaattactgggttaacatgatagatgaataatcatgcctcctgtgcctccacccaatgaagccaacaattactacaaaagctagtatccacaatataaattcaaaggccatagtcagaatagatttttcatctgtattgagaagcacagtttttgaggcataccacatactctagcttttgaaccatatgccaaaggaaatatgaaaat

SEQ ID NO: 286445 - DNA, 608 bp, Homo sapiens
atctcagaattacataattagttactctaaatgtaacatcaatattacatgatattctgtaaagaatataatgaattctaagcattatgtcttttgaaaatgagaacctgtgctttataagactttttggactttaaatctctgtaggaaaaataaaaacatttccattgtactttgaggattttttaaacaaaaaattacagctagatggtattatttagtctaaattatttcacacatgataaaattaagggccctctgagattatgcaattttttcaggtcacatgtagttggtgaaatatctagaatgggaattctgtattttcttatatcccttgctaatatgggggtctgatcacaggttccttaattctctaggttattgcgtatttggattaaattactgggttaacatgatagatgaataatcatgcctcctgtgcctccacccaatgaagccaacaattactacaaaagctagtatccacaatataaattcaaaggccatagtcagaatagatttttcatctgtattgagaagcayagtttttgaggcataccacatactctagcttttgaaccatatgccaaaggaaatatgaaaat

SEQ ID NO: 286446 - DNA, 653 bp, Homo sapiens
cagctgaaatacctgccgagggcaaagggaacacagaaagagtggtggaatatgatagtcataaatacaagctacaatcatatgaccagttgtagaaacgaggactatagttgttatgaatattcatattttggtatgagtctgtttatatatatatatgtatatatacatatatatgcttatataaaaatattttcctttgcacacttatctctttatcttttaaaatgtattaatgatagttaattttccattacagtatataagttagagcagatcaatgagaagaatgaacatcacccaaggtctttgcatattttttgggggaaagtattagcacattttttattgtatacagaatagttacatctgtgaagtgaaaatacaattttattattgtcctttttttaaaaaaacttttattttaggtgcgggggtacatgtggaggtttgttataaaggcaaattgcaggggyttggtgtacagattatttaatcacccaggtaataagcatagtacctcataggtagttttacgatcctctccctcctctcatcctccattctcaaatagcccccagtgcatattgttgccttctttgtgtccatatgttctcaatgtttaactcccacttataagtaagaacatgtga

SEQ ID NO: 286447 - DNA, 645 bp, Homo sapiens
tgtaattgtagccctaggaagaaaaggaaaacatttttagaagataatggttaacatttttcatatttcatgaaaatcataaacttacaacttcaggaagctcaataagccccaggtacaaacaataaggagaaaactatgtcaaggcacatcatagtcataaccaatgttaatgagaaaaatttttaaaatattggtgatgcttagcagacacaagtaagcaagacaatagatttattactggaaatagcacaagagagaacagagtagaaagcattgaaagaaaatacctttcaatctaaaattctatacccagtgaatatctttccaaaatgaaggtgaaataaagactattttcagcatgtaaaggctgaaagaagtaatcaccgtcagattcacagtacaaaaaatactaaagaaaatccttcaggcagaaggaaaaytgacagtggcagcaataagatcagtagttgtgttgggatggggaagacagggaggggcaggaataggaatcacagtgtggcacaaagatctttgtggcataatggacatgttcattaccttgattgtgaatatatataaacagttatcaaattgtacactttatatctgtgcagtatattgtatgtcagttacgagtcaaag

SEQ ID NO: 286448 - DNA, 524 bp, Homo sapiens
ccagcaatttcttttttgtttctcattgctatttacatctaaaattatttatatttttatgtaataagtaactaaccaaggccccataaactagtttatagtattcatcttcttcatgcataggtatttgtccatttttttattccttactccctcacagagttagattcccttcattaaggaaaatctcgattacctaggccaccagctttaggttccagtagttctttccaccatgtatctgactttgtctgttaccctatagggtacagaaaagtgacggatgccttcactgaaagtccattccgttttacatgtaaagtgtcagaagataagaattatgttctaagttctttctcaaaacagtacctagtattaatagaacgttttgtrcccaatggacactacgcaaacattcttagctgatttaacaattgaattgagaagattatgtatttctggctgtgtcacgtgtccagctcattaaatgcatcttcatgttagccaaagaattgagtgaaata

SEQ ID NO: 286449 - DNA, 511 bp, Homo sapiens
tttgccttctgccatgattgtaagtttccaaagccgtgctgaactgtgagtcagttgaatcyctttcctttataaattacccatccttgggcagttctttatagcagtgtgagaatgaactaatacatccacattctctcacttcaagccttagagcaggatacctcacggtcccagcatggacaggatgtgtagaatgtagaggagatgctctgttcattgtgaccagctctgcttgagccccagcagattcttgttcatgtaggagagaggggaatagaccaccacctgaaaaggatggaggtaatgccaaacacctaggcgtaggttttatctctgccctccttctttccatcagagcaggaactctttcttattcctccgttttctttaagaagaaggatacttatctttcattggcttgtttctctcttaaaatcaaggcagaggattcagggtctaattaccatggatttacctccattatcattcattggagacaagctcggtt

SEQ ID NO: 286450 - DNA, 612 bp, Homo sapiens
cttatctttcattggcttgtttctctcttaaaatcaaggcagaggattcagggtctaattaccatggatttacctccattatcattcattggagacaagctcggttctaagcttagttctactttgggaattacgatattcttctggtgagatttactgagtttcaaaatgtttactcagtactcaccaaaaacatggtctttgtgacttaatttttcatttttctttagaaaatcaccaatacttaaagagaaattttgctatcttcttgtctttcttcaggataattacaaagagaacttcaagaaatttcacataccttgcctcttgtcttaytcccttcagatatagctttcccactgtccccagactgtaatatccaaaaggcaaatctgaccatgccacttctgcttaataaatattcaggggctttactttgcctccaagattattaataggcatcaagggcccctcgagatgggttcccattgctccctgcactacccaacattctcagacaacattaaaatgctgcgcacaccatgcagggttttattttctttcttgctttctgtcttgctactcctcctccttgaatattctctcatcctt

SEQ ID NO: 286451 - DNA, 590 bp, Homo sapiens
ttgggcctttcaggattggtttcctctgcagtacttatgagggcaggaaggtggcagcatttagctatcagtgagttcatgctgacgctaggaagagaaacagaaataaccactcctatcttgggacatttttccaactgccttgattgcttctcttttccagcagaactgagaaaataaggccacagttgagaattttgtgcttgatggagacatcaaacccagaaatgctggactggctgagcaacttgagtaaagctcatcctcccacttttgtcatgcaggccctgggaactgctttaggaatgagaaaaatggacataaaatgrtctgatcagtatgtaaattattatcttgcttacagtttcatatactaagggaattattgggggagattgcttatatcttcaatgtgacttcaagtctatctttttatactttatttgcatttattagtgtttaatcccacagaatgatcccattctcctattttaagtgttctaattcctgcacacaattcctctacctataggttctaaatttataattgtaggttgaaagaatggttttgttcattcaaccctaagcat

SEQ ID NO: 286452 - DNA, 590 bp, Homo sapiens
ttgggcctttcaggattggtttcctctgcagtacttatgagggcaggaaggtggcagcatttagctatcagtgagttcatgctgacgctaggaagagaaacagaaataaccactcctatcttgggacatttttccaactgccttgattgcttctcttttccagcagaactgagaaaataaggccacagttgagaattttgtgcttgatggagacatcaaacccagaaatgctggactggctgagcaacttgagtaaagctcatcctcccacttttgtcatgcaggccctgggaactgctttaggaatgagaaaaatggacataaaatggtctgatcagtatgtaaattattatcttgcttacagtttcatatactaagggaattattgggggagattgcttatatcttcaatgtgacttcaagtctatctttttatactttatttgcatttattagtgtttaatcccacagaatgatcccattctcctattttaagtgttctaattccygcacacaattcctctacctataggttctaaatttataattgtaggttgaaagaatggttttgttcattcaaccctaagcat

SEQ ID NO: 286453 - DNA, 588 bp, Homo sapiens
aactgaggttttggggtgccagtggagctcctttgccttggttccagcagaagagtgatgcatgcgaagcatgtggttatgagtgccccaggtccttttgggctttagctgcttaccacatggtgaaaaggaatggtgatagaaatcacaaagtgaactttttaatattattattakggctttatatatagtcaagagagctcaccttcttctcctagctcagacatgggtttggctaaggcaggagaaatggggttggggaggttgggagcagggcatgcaatgctcttctgaaaaaatagggacataaaggagatatgcccgcaactctccatcaggttgaaggattctttctattagcctttcagcatttggatccttatgattttggtgcttctctgtagcattggagacatagaaggagactgcctcctgctggggtcagtattttctgcatcccatgaacggaagtgagaacagccttgggagctaatgccgaaggtgggagaatctgatgccctcagtctccagtgaactaaagtaagagtcttactactttcagtgcttgggaactgctgcaatacatgg

SEQ ID NO: 286454 - DNA, 554 bp, Homo sapiens
tatgagaaactctgatgcttccatgcacatggagtgggtagatgggtagggcagggcaatggacatgtttggatgtaccaagaaggaaagaggaaaggtcagagtcatcttcttccttataggcaatgctcaatttcctatttataaaatgggtaaaatcccctgccccatccccttgctggagtaatagtgcaaagcaggtgaatcaggaaggataatcaggtcctcagtkccatcagtggattcttacactgtctgaacccttaaggttagaggcaagcaatgtttttcctaagagtctgcagagaagtcatgaggagtttaagtttctgttattctactaactgtttaacctttggaacagttacttcaaatcactcagcttcagtttttgcctgtataaaatataatagtaaatatcttctagcatttccatgataaactatggagatggtgaggtctgcccaattgcagatgagagaaattcaccctcaagctttgttgagcagctctccctgtgtggttgccatcccctcctactgcaatctgctttc

SEQ ID NO: 286455 - DNA, 554 bp, Homo sapiens
tatgagaaactctgatgcttccatgcacatggagtgggtagatgggtagggcagggcaatggacatgtttggatgtaccaagaaggaaagaggaaaggtcagagtcatcttcttccttataggcaatgctcaatttcctatttataaaatgggtaaaatcccctgccccatccccttgctggagtaatagtgcaaagcaggtgaatcaggaaggataatcaggtcctcagttscatcagtggattcttacactgtctgaacccttaaggttagaggcaagcaatgtttttcctaagagtctgcagagaagtcatgaggagtttaagtttctgttattctactaactgtttaacctttggaacagttacttcaaatcactcagcttcagtttttgcctgtataaaatataatagtaaatatcttctagcatttccatgataaactatggagatggtgaggtctgcccaattgcagatgagagaaattcaccctcaagctttgttgagcagctctccctgtgtggttgccatcccctcctactgcaatctgctttc

SEQ ID NO: 286456 - DNA, 554 bp, Homo sapiens
tatgagaaactctgatgcttccatgcacatggagtgggtagatgggtagggcagggcaatggacatgtttggatgtaccaagaaggaaagaggaaaggtcagagtcatcttcttccttataggcaatgctcaatttcctatttataaaatgggtaaaatcccctgccccatccccttgctggagtaatagtgcaaagcaggtgaatcaggaaggataatcaggtcctcagttccatcagtggattcttacactgtctgaacccttaaggttagaggcaagcaatrtttttcctaagagtctgcagagaagtcatgaggagtttaagtttctgttattctactaactgtttaacctttggaacagttacttcaaatcactcagcttcagtttttgcctgtataaaatataatagtaaatatcttctagcatttccatgataaactatggagatggtgaggtctgcccaattgcagatgagagaaattcaccctcaagctttgttgagcagctctccctgtgtggttgccatcccctcctactgcaatctgctttc

SEQ ID NO: 286457 - DNA, 551 bp, Homo sapiens
cagaagaaagaaaacttccctctcctagaatcttttcttaaaaatcccaaagaagagctcaaacaagcatggctggggccatgtgttcatcccagagccaatatctttgaatggaacaatgtgatgctgtgattgaacagagttgggtcttgtgcttatctccatggctgggttgttgcagtggcaggttcattggaaaaacatggagtaagggaaggataattcccaaatgaagaggatttattataaaaagaaggaagaatcgaatgctctggattcagtaacaacagacatccatgacaaattgagaatgtgttaagtcatggaatacaaggaagtgtgaacaaccaaaccaagaacagcataggaaggcacttaggcctcggcaatgccagaacagaacttggcttcagcacagggttcctctttactgttatatctacttctttgtgtaagtttgcttctttttacttcactatacactggctttctccacatgtcatgaaacatagtgggyattagtaccactcccaccaacgattcatgtcctc

SEQ ID NO: 286458 - DNA, 609 bp, Homo sapiens
  misc_feature (1)...(609): n = A,T,C or G
tgtcctccattcccaccaatgactcatgttcttttcatagaagggttgatatggaagcagggtgtttaggcaactctgagacacagaaggccttcactttgtgatcccccatgttcatcttctgccccttttcttcatctctggagtcatccatctcctgtgtattagccaacattggtaaatggctatatagctcattatcygaccagtacaatttttttaatttttattttttggcggtatatagtaggtatatatatttatggggtatgtgaaaatttttgatataggcatgcaatgtgtaataatctcatcaggataaatggagtatccatcatctcaaccatttatcctttatgttatgaataatctaattataccctttcagttatttttaaatgagcaattaaattattattgactatagtcaccctgttgtgctgtcaatttgttattcattccaacaatatttggtacctaccatccccacttcccatgatccgcccattacccttatcagcatctggtagcctctttctactctatctccatgaattcaattgttttaatttnnnnnnnnnnnnnnnnnnnnnnnnnnnnnnnnnnnnn

SEQ ID NO: 286459 - DNA, 588 bp, Homo sapiens
tttcttataatttaaatctttcaaaaaatatttgacgtaayaaataaaagtaataataatgaatcacaaaggttatagtgcataaagtaaagatacataacactaggataaaggccagaaagggaggcataatgacactagaaagcagactatgataaattaaagatgtattccggaaaccctaaagcagcctctgaaataagaaaacggttatagctaataaagcaacaaaggaaagaaaacggaatgaaataaaagctatgtaaacactatgctggaacaactactctccaggcctccaccctatagaaatacaccagtggccaatgagagtgtacaagaatgatgactgcagcattacttgtaatcataaaatgataaaaccaacgtaattttaaagatataggaaaagggttttatttatttaacggacagacaattgaacaagcaaacaatgggagcaagtcctttgccaaaaggaacacagagggtcatgatgatgctactcctccaaggatttcagagttcccagacgcctagttttctgtctagttcttctggaagatgttattcttggggagcaatagg

SEQ ID NO: 286460 - DNA, 590 bp, Homo sapiens
ttgctccttaacacaggctaaggaccagcttctttgggagagaacagacgcaggggcgggagggaaaaagggagaggcagacgtcacttccycttggcgactctggcagcagattggtcggttgagtggcagaaaggcagacggggactgggcaaggcactgtcggtgacatcacggacagggcgacttctatgtagatgaggcagcgcagaggctgctgcttcgccacttgctgcttcgccacgaagggagttcccgtgccctgggagcgggttcaggaccgctgatcggaagtgagaatcccagctgtgtgtcagggctggaaagggctcgggagtgcgcggggcaagtgaccgtgtgtgtaaagagtgaggcgtatgaggctgtgtcggggcagaggcacaaggtttcatacttacctggcaggggagataccatgatcacgaaggtggttttcccagggcgaggcttatccattgcactccggatgtgctgacccctgcgatttccccaaatgtgggaaactcgactgcataatttgtggtagtgggggactgcgttcgcgctttcccctgactttctggagtttc

SEQ ID NO: 286461 - DNA, 590 bp, Homo sapiens
ttgctccttaacacaggctaaggaccagcttctttgggagagaacagacgcaggggcgggagggaaaaagggagaggcagacgtcacttcctcttggcgrctctggcagcagattggtcggttgagtggcagaaaggcagacggggactgggcaaggcactgtcggtgacatcacggacagggcgacttctatgtagatgaggcagcgcagaggctgctgcttcgccacttgctgcttcgccacgaagggagttcccgtgccctgggagcgggttcaggaccgctgatcggaagtgagaatcccagctgtgtgtcagggctggaaagggctcgggagtgcgcggggcaagtgaccgtgtgtgtaaagagtgaggcgtatgaggctgtgtcggggcagaggcacaaggtttcatacttacctggcaggggagataccatgatcacgaaggtggttttcccagggcgaggcttatccattgcactccggatgtgctgacccctgcgatttccccaaatgtgggaaactcgactgcataatttgtggtagtgggggactgcgttcgcgctttcccctgactttctggagtttc

SEQ ID NO: 286462 - DNA, 590 bp, Homo sapiens
ttgctccttaacacaggctaaggaccagcttctttgggagagaacagacgcaggggcgggagggaaaaagggagaggcagacgtcacttcctcttggcgactctggcagcagattggtcggttgagtggcagaaaggcagacggggactgggcaaggcactgtcggtgacatcacggacagggcgacttctatgtagatgaggcagcgcagaggctgctgcttcgccacttgctgcttcgccacgaagggagttcccgtgccctgggagcgggttcaggaccgctgatcrgaagtgagaatcccagctgtgtgtcagggctggaaagggctcgggagtgcgcggggcaagtgaccgtgtgtgtaaagagtgaggcgtatgaggctgtgtcggggcagaggcacaaggtttcatacttacctggcaggggagataccatgatcacgaaggtggttttcccagggcgaggcttatccattgcactccggatgtgctgacccctgcgatttccccaaatgtgggaaactcgactgcataatttgtggtagtgggggactgcgttcgcgctttcccctgactttctggagtttc

SEQ ID NO: 286463 - DNA, 581 bp, Homo sapiens
tctctgttgccaagctagagtacccataactcttctgttttgttgaacattcttccccaccacaaaccctctttagaagactggtggctcctaaaacattgaggccaacagtcctgtccttgtgcatgtttgggcattgatccagggccaaatcagtgggagactcctccacgcacatgccaggtccccaggtgacaactgcagtctctggatctgaggtcatccactttcccattcctagctcacctcacccatcatgaagcctggtcaggattgccagagacccgagtgggcaggtgcccgcactaaagacagaacctgctgtgtgcccactttgctgatccctccatctttctagacaaggctttgtgagccaaggactttgggtttgctcacaaggcagcccctcacctagtaggcattagttcattatgtatagtatacgtatatgtrtatgtatatgtatatgtatatgtatatgtatatgtatatgtatatgtatatgtatatgtgtatgtgtatgtgtatgtgtatgtgtatgtatgtgtatgtgtatgtgtatatgtatatgtagtcctcag

SEQ ID NO: 286464 - DNA, 610 bp, Homo sapiens
tgtattaattttctattgctgcatactaaattactgcaagcattagcggcgtaaaataagaatgatttattttcttgcagtgtccacagatcagaagttcaggcctggattctctgggtcttcttctcagggcctcacaggctgaaattaggctgggtttctttctggaggttctggggaagaacttcctctcaagtttcctcaggttgtcagctgagttcagttccttgtgactgtaggactgagatctctgttttcttgctggctgtcagccaggggcctctcgctgctcctagaggcctcccatgttcccactgcatgcttcctccagccagcagaggaggatcgccctgcatggaaaccctcctgcacttcacatctctccaggaagtcctcagtccctccaaggaactcacsttcactaggtcaagctcatcagataatctgtctatcttaaatttgaccgatttgggatctcgattacatctgttaacttgtttttgccataaattgtaacacaatcacaggagtgacatctcctcagtagctttgtctacactcaggaggaagtgattatataagagcaaagatcactgggggtcatcttagg

SEQ ID NO: 286465 - DNA, 610 bp, Homo sapiens
tgtattaattttctattgctgcatactaaattactgcaagcattagcggcgtaaaataagaatgatttattttcttgcagtgtccacagatcagaagttcaggcctggattctctgggtcttcttctcagggcctcacaggctgaaattaggctgggtttctttctggaggttctggggaagaacttcctctcaagtttcctcaggttgtcagctgagttcagttccttgtgactgtaggactgagatctctgttttcttgctggctgtcagccaggggcctctcgctgctcctagaggcctcccatgttcccactgcatgcttcctccagccagcagaggaggatcgccctgcatggaaaccctcctgcacttcacatctctccaggaagtcctcagtccctccaaggaactcaccttcactaggtcaagctcatcagataatctgtctatcttaaattkgaccgatttgggatctcgattacatctgttaacttgtttttgccataaattgtaacacaatcacaggagtgacatctcctcagtagctttgtctacactcaggaggaagtgattatataagagcaaagatcactgggggtcatcttagg

SEQ ID NO: 286466 - DNA, 629 bp, Homo sapiens
  misc_feature (1)...(629): n = A,T,C or G
nnnnnnnnnnnnnnnnnggggtgatattcctgttcccagtggcccttactgacccgagagatgtcattgccgcaggcaggacctatgggcgcatataggttgtaatgaaactgtagtctccgctggaagcctagacatgaaatgggtcagtgagcaaggctctattcctagtctccagccatgcctgtatcaacctgagcccgctctcagcacattggacccaggcagatgtaaaaaattcacagaactatgatttggactcaagggtttgtagatttcctccctcattctaatttcagtgtctaaaattcttgcatccatgaacgagctgggcatttgatgagacagggctgaatactgcagttttcctcctagaaatcatctggggcattgtctttgaactgatgggaacaataaggcataactgtttgcacaaacttgggataaatgattttgggataacgatctaccagaatagggatatttcacccttggttctgagatgcaaaccaaagaatatcatgaccagctttcaggcctcctgaagtatatctctcacattgtcctgttctcytgctgaggagcctgagatccctgtgtggggattagacagtggactgttacgggtg

SEQ ID NO: 286467 - DNA, 620 bp, Homo sapiens
tttctctttcattcttttccatttggccctgttctgtcccaacatgaaggcaataatttgttacctcattaatggatctatccttttactttttyaaccacttccttatgctacccatgaaacctagttggggctctgttgtgtctgatttcccctggcttattctttactttttcctccttttccaggctcagcagggagctgctggaggcagtagagcctgaagtcttgcaggactcactggatagatgttattcaactccttccagttgtcttgaacagcctgactcctgcctgccctatggaagttccttttatgcattggaggaaaaacatgttggcttttctcttgacgtgggaggtgagtacctttctatgaaggtgataaggatccactgagtcttccatataaagatcatattcctgctccaagtggccattactgagctgagagatgtcattgctgcagtgaggacctataggcacatgtaggttgaatgaaactctagttctaactggaagcccagacatgggatgggtcagtgagcatggctctcttcctagtctcaggccatgcctgtggcactctgattctactctcatgacattggacctgggca

SEQ ID NO: 286468 - DNA, 571 bp, Homo sapiens
catttactaacgtaccataggatgaccatacttcaaaagctgtactctcatggccactgcatcgaattttgagcatattttatggaaaactattgagctcactcttttcatgatcgcagtgtgctgtgtgtcatgagggcactaactcagagtgtccttttactcccttaccagtatgtcacctggccaattcactagctcactttctctctgtctctgtctctgtctctgtctctctgtctttctctttcattgttttctacctggccctgttctatcccaacataaagacaataatttgttacctcattaatggatctgtcctttttcttttcaaactcttccttatgttagccatgaaatctagctggggctgtgtggtttctgatttcccctggcttattctttactttttcccactgttccaggctcarcagggagctgctggatgagaaagggcctgaagtcttgcaggactcactggatagatgttattcaactccttcaggttatcttgaactgactgactcatgccagccctacagaagtgccttttacatattggagcaac

SEQ ID NO: 286469 - DNA, 493 bp, Homo sapiens
tttctgtttaaacagttccttatgttagccatgaaatgtagctggggctgtgtggtttctgattccccctggcttattctttactttttcctacttttccaggctcagcagggagctgctggatgagaaagagcctgaagtcttgcaggactcactggatagatgttattcgactccttcaggttatcttgaactgcctgacttasgccagccctacagaagtgctgtttactcattggaggaacagtaccttggcttggctcttgacgtggacagtgagtaccttactatgaaggtgataagcctccacctggtcttccagataggggtgatattcctgttcccagtggcccttactgacccgagagatgtcattgccgcaggcaggacctatgggcgcatataggttgtaatgaaactgtagtctccgctggaagcctagacatgaaatgggtcagtgagcaaggctctattcctagtctccagccatgcc

SEQ ID NO: 286470 - DNA, 466 bp, Homo sapiens
gtgaggagtttgagactagcctgggcaacatggagaaaccccatctccactaaaaatacaaaaagtagatgggcgtcrtggcgggcaactgtaatcaccactaatcgggaggctgaggcagaagaatcctttgaacccagcaggcagatgttgcagtgagccaagattgcactattgcactccagcatgggtgacagggcaagactcatcaaaaaacaaacaaacaaaaagataaataaaacaaaaataaaaataaaaagcagagagtaccttggtgagagtgaagtcctgcttcctggtgcacaggctcttgttcctaaagaggaagaaagatcacacccgagaatgtgtggaagcagcagtgcagtgtgcaaagcagggaccctcagcctgtctcctgggctccatccaagttgcttgtcttgtatgtccctcagtttcctcatctgttcagagggtactacaa

SEQ ID NO: 286471 - DNA, 285 bp, Homo sapiens
tgatgaatgtcaggatgctgtaaacattctcccaggtagcctctattttccttgtgtctcatacctctgtctaggctatggaagatcaattctgaggacaggctgtatacgcacatattgttttagtcagaaactaggatggagctaggtkctgtgactcacacatataatcacagcactttggaaggcccaagtgggaggatgacttgagttcaggagttgaagaccagcctggacaatatggtgaaacccatctttacaaagaatacaaaaaattaggcaggc

SEQ ID NO: 286472 - DNA, 285 bp, Homo sapiens
tgatgaatgtcaggatgctgtaaacattctcccaggtagcctctattttccttgtgtctcatacctctgtctaggctatggaagatcaattctgaggacaggctgtatacgcacatattgttttagtcagaaactaggatggagctaggttctgtgactcacacrtataatcacagcactttggaaggcccaagtgggaggatgacttgagttcaggagttgaagaccagcctggacaatatggtgaaacccatctttacaaagaatacaaaaaattaggcaggc

SEQ ID NO: 286473 - DNA, 572 bp, Homo sapiens
agaaaaggaagtccctgaggactcactggaggaatgtgccatcacttgttcaaatagccatggcccttatgactccaaccagccacataggaaaaccaaaatcacatttgaggaagacaaagtcgactcaactctcattggctcatcctctcatgttgaatgggaggatgctgtacacattatcccaggtagcctctgttttccttgtgtctcatacctctctctaggctgaggaagataaactctgaagacaggctctataaacacaaattcatttgaataaaaamctatgatgggtttctaaacagatatcagggagtttttttgtccttctcagctaatgtcatgcctttgtctgccagtccccagtatcaagttactcgaccccaggcaagtgtgacaatctcatagtcacctgagtgcaggaggtgcacaggcagtatctgtcaggcctcctagcttcgattcagtatctcttgtcatctgtgattaagtcatctgtccctgaacaatgtccatggagtttctatgcctgtttcaggaagctggcagccttgcctttgtatttggaa

SEQ ID NO: 286474 - DNA, 590 bp, Homo sapiens
tgctaggaccacaggtgcacaacatcacatctggctaatttttgtatttttagtagagacagggtttccycatattggccagggtagtcctgaactcatgacctcaaatgattcacctgtcttggcctcccaaatcacagattctttttaaagcaagagttgttcaaatttatctatcatgtgtgtttcatgtatagatgcctctaaacatttaatgtccatgttatctggtgatataagtccgtattgcagcaacactcttagaaaatggaccaatttttggagatttttttggggaaaaaattttgtttaactttgactcaggcagggaatatggcattatggtctacacgtagagggagattttggcctgtgggtctggaaagcagggtcatctaattctcaccaaagttaatctagggcaccctagaatattcctgtcagaatccttattcttgcactgagaatagttatgtccttgtgctatgactggacagtgatttggtcatatgtgaagtatgaattgcttaatgtgacctgcttctctgaatttatttacagaaaatgaaagtgatgatgaggaagaggaa

SEQ ID NO: 286475 - DNA, 590 bp, Homo sapiens
tgctaggaccacaggtgcacaacatcacatctggctaatttttgtatttttagtagagacagggtttccccatattggccagggtagtcctgaactcatgacctcaaatgattcacctgtcttggcctcccaaatcacagattctttttaaagcaagagttgttcaaatttatctatcatgtgtgtttcatgtatagatgcctctaaacatttaatgtccatgttatctggtgatataagtccgtattgcagcaacactcttagaaaatggaccaatttttggagatttttttggggaaaaaattttgtttaactttgactcaggcagggaatatggcattatggtstacacgtagagggagattttggcctgtgggtctggaaagcagggtcatctaattctcaccaaagttaatctagggcaccctagaatattcctgtcagaatccttattcttgcactgagaatagttatgtccttgtgctatgactggacagtgatttggtcatatgtgaagtatgaattgcttaatgtgacctgcttctctgaatttatttacagaaaatgaaagtgatgatgaggaagaggaa

SEQ ID NO: 286476 - DNA, 590 bp, Homo sapiens
tgctaggaccacaggtgcacaacatcacatctggctaatttttgtatttttagtagagacagggtttccccatattggccagggtagtcctgaactcatgacctcaaatgattcacctgtcttggcctcccaaatcacagattctttttaaagcaagagttgttcaaatttatctatcatgtgtgtttcatgtatagatgcctctaaacatttaatgtccatgttatctggtgatataagtccgtattgcagcaacactcttagaaaatggaccaatttttggagatttttttggggaaaaaattttgtttaactttgactcaggcagggaatatggcattatggtctacacgtagagggagattttggcctrtgggtctggaaagcagggtcatctaattctcaccaaagttaatctagggcaccctagaatattcctgtcagaatccttattcttgcactgagaatagttatgtccttgtgctatgactggacagtgatttggtcatatgtgaagtatgaattgcttaatgtgacctgcttctctgaatttatttacagaaaatgaaagtgatgatgaggaagaggaa

SEQ ID NO: 286477 - DNA, 532 bp, Homo sapiens
ttgtttaactttgactcaggcagggaatatggcattatggtctacacgtagagggagattttggcctgtgggtctggaaagcagggtcatctaattctcaccaaagttaatctagggcaccctagaatattcctgtcagaatccttattcttgcactgagaatagttatgtccttgtgctatgactggacagtgatttggtcatatgtgaagtatgaattgcttaatgtgacctgcttctctgaatttatttacagaaaatgaaagtgatgatgaggaagaggaagaaaaaggrccagtgtctcccaggtaatgttgtggaattgttggctgttaattcagtagtgacatctggagattgtagatttagggaaaatgaggaagtgatgaatagaactatttcttccattcacccagctacaaattgtgctgatttacaatgttgtatgttatttgtggcacttgtattggttttaatttcatagtcctctcaagataggaacttgccatcagatgagccaggtgaactagcc

SEQ ID NO: 286478 - DNA, 532 bp, Homo sapiens
ttgtttaactttgactcaggcagggaatatggcattatggtctacacgtagagggagattttggcctgtgggtctggaaagcagggtcatctaattctcaccaaagttaatctagggcaccctagaatattcctgtcagaatccttattcttgcactgagaatagttatgtccttgtgctatgactggacagtgatttggtcatatgtgaagtatgaattgcttaatgtgacctgcttctctgaatttatttacagaaaatgaaagtgatgatgaggaagaggaagaaaaagggccagtgtctcccaggtaatgttgtggaattgttggctgttaattcagtagtracatctggagattgtagatttagggaaaatgaggaagtgatgaatagaactatttcttccattcacccagctacaaattgtgctgatttacaatgttgtatgttatttgtggcacttgtattggttttaatttcatagtcctctcaagataggaacttgccatcagatgagccaggtgaactagcc

SEQ ID NO: 286479 - DNA, 589 bp, Homo sapiens
tgggctcaagtattcctcccgcctcagcctcccaagtagctgagactaaggcatgcgccaccattccaggctaattattttattttttgtcaagacggagtctcactatgttgcccagggtggtctcaaactcctgtcctcaagccaggctcccaccttggcctcccaaagcactgggatgacaggtgtgagccactgagtgagcttccaggacacaaggaataagttaagtgagttcctgtccagggattcccttttttcctgcaaagtacaagtcaagataattttatgagtatgatgaggataccaaggaatgtatagaaaaggcttaaggaaagcatccaaaggttagaatggccactcacgggagtgggacaggatacagactagaaggtttgctgggcagggagagggcgcaatggaagaggaaaggcccaaaatgtgacacgctcaaacccatcatagtgtggggtttccagcagtctgtgcatggaagtagacagtgacatcaatggagcaactgtttggagttctgsaggacagttaaggaggcaagacaggagaataaaagtcagttcagggtgctgtg

SEQ ID NO: 286480 - DNA, 475 bp, Homo sapiens
attggccaaggtagaagaaccaactgcagataagcctcgtacagaaaagcatgagctgagaagcaggagaagacagcaaggttggatccagcacagagtaactgagaatcaaaccaggaaagaaactcagctccacaacagttttcaatggcttcacttttcaaataattcatgtgtcttttcatcacagtaacatgtttgttacagaaaaagtttaaatatagagaagcaaaaagatgaaaatcagaatcacttccattctattaccgggaaagagctactattaacagtttggagtattcttccagactcttctgatctcccagttatatatgtacacatgtgtatgtgtgtgtagaagtgtgtgcacacacacagatatacattcatacatgcatgcakacatacatatacatgtctatatctgtatatacatatgtatatgtatgtataggatttttttacaaaaatgaaa

SEQ ID NO: 286481 - DNA, 605 bp, Homo sapiens
tgatgctgctgaagagtgagtaagatgaggactagggattgacagctgagtaagttgaatgagcctgagtgaaaagcaggagagaaagaatgagagacagaggggtaagagaaaaactctgtccagaaccaatacttcttttggaaaatgtagtaaaagtggagcactagcaaaatcaatatgcaagcccatttttttccttattaaattcaayagacatacattttactctcatttactctaaagtcttgtaaatgtgttctctcagtttccatactacctcattgtagtctgtaacggtttgctgagtggactggtacttgtccatggaagccactttggcaacatgaactaaaatggattcaacatggatatcatagagtactgggtatgatgcaagaggtacctgttagagaataaacattggtctcatcctctcagaggccatatatctctttgttcagaaaacatgaagcctgaagtttggtcccacctacgttataatcatgagcaagtgaaaaatcttgcacaaagcattatccttttctacaaatgataacagttatctgctctcttccttataattttgacatttgtttggtatt

SEQ ID NO: 286482 - DNA, 1275 bp, Homo sapiens
tggatggacataaggagcctacttgagtagacctttttgcccccacttcacaggatggcagctctactgatgtctcccagttttctctcatagacccagacctgcaagaactcgagggaaaggaagatcttgaaagcctctcattcactgggtgcttccagctccaagtgtgtggtaatggtttcagagggatttggagagaaacagaatagtygaacttacctcatcaaacgactccagtttttattgtccccccataaagatagtctaaacctgctcccctgcttgtgaactcagagtcctgttgggggactcagaaggttgtacatatatatgtgtgaatagttttcaaatgtttcacacatgtatgtataaataattttaaatgtttgtgtatattgtcatgattaataaaaagcccattcatttaaaagcatcacgttatagctttccctcattatactcacactaaaaatattactatcaagcaggatgaaattttcatccaaaggagtcctcatttttgaaaaggttaagactcattggtctaagctgtagtctggagctctattgacaaaggtgtaacatttagagctaaagccaagtttcacaccaacaatttcctctccttattttawtggatggacataaggagcctacttgagtagacctttttgcccccacttcacaggatggcagctctactgatgtctcccagttttctctcatagacccagacctgcaagaactcgagggaaaggaagatcttgaaagcctctcattcactgggtgcttccagctccaagtgtgtggtaatggtttcagagggatttggagagaaacagaatagtcgaacttacctcatcaaacgactccagtttttattgtccccccataaagatagtctaaacctgctcccctgcttgtgaactcagagtcctgttgggggactcagaaggttgtacatatatatgtgtgaatagttttcaaatgtttcacacatgtatgtataaataattttaaatgtttgtgtatattgtcatgattaataaaaagcccattcatttaaaagcatcacgttatagctttccctcattatactcacactaaaaatattactatcaagcaggatgaaattttcatccaaaggagtcctcatttttgaaaaggttaagactcattggtctaagctgtagtctggagctctattgacaaaggtgtaacatttwgagctaaagccaagtttcacaccaacaatttcctctccttatttta

SEQ ID NO: 286483 - DNA, 613 bp, Homo sapiens
  misc_feature (1)...(613): n = A,T,C or G
nnnnnnnnnnnnnnnnnatacctccattgggccctaatcttacttcattgagagcacccgttatacattgttgcaattcctaatttgcaagtctgtacatttctrttatgtcttattcttttttttatttttatctctagagtctagaacaggacgtggcatatgttatgtgcttgtacttaccagtttttcttcctttctcttccctccctcacgctctccttcacaggtaaagtcttattaccagtaatngatatttgtgagctctcaatgttgagacccacctcctatgaaaccatgcaaagaatgggctcttaaagttgttcaatgtgctctgttaacactccttagtaactaggaagtctgaagaaagaggcattttacattttatgtgagaacccagatcctgggggtggggaacaggtattcatatatatcagaggatacagaacatcggtgattgcacaaaagcagggccagccctgggtctgtgttgtgatgcattttcagatactcgctggattatcgaggctgacagcttagctgaatgcctttctggaaattatgaccattctgaaaggtcatcctagctcctgagctctctttgagattg

SEQ ID NO: 286484 - DNA, 1076 bp, Homo sapiens
ttatagagattaacatgtggtcactgttggagcaaaagaagkgggtagtacctgccaggggcaagaaaggaacttctaagatctgaaaataatttattccttaacctaggtagtaattataaggacatttgttttgtgataatccattgtactacacaagtatatttttagcattttagtatgggtgctacttcaatgaaaacaaaactgattttaaagtatatatcagccaaaataaagaataaaaaacagaaaattctggtacactaatactatgtattagtaagtaataaactaagtagtgtactctttagtaagctatttttactaaaactaaacttaaaactaataataaaacaatactaaactatcaattactaccaatatcaactaattatgcttcagatgtagataaaataatagtaaacagtgaaacaattcaaatatttttattttaattgttctaaatccagtctcaaatagtatgcaaatggtattaacaataattttgagacgattatgtaaaatacatataatttattttttaaaagtgtaaaatcccaaataccaacaaatactaagagattggagggaaaggwcatcttcccaactatttgcacaattccaaattgatggagtacctcagaatgtacatcaawcactttcatcttctgaagcacatacagtttatggtaaatgaggtagagggcacttagcacatgtggaaccatcttgggagggtggaaaaccaggccagaacaaagtacagcaaggcctccattcagtttagggggtgacagggttcaccttacatacatctctagtgaaatcagcaggagcttctctcttctcttccttcaggaaaaaaaaaaaaaatatggtggattggctgaaacatcagactggaccccttttgtagacttacccctaactatgatcccaaccatgattgggagaaaactggactaaataaggctctacttaaagaggcctcagtagcaaaatcaattctaaaggaatcccagaggagagtggctataaccaaccttattcattaaagccaagagttctttgga

SEQ ID NO: 286485 - DNA, 454 bp, Homo sapiens
tagcacatgtggaaccatcttgggagggkggaaaaccaggccagaacaaagtacagcaaggcctccattcagtttagggggtgacagggttcaccttacatacatctctagtgaaatcagcaggagcttctctcttctcttccttcaggaaaaaaaaaaaaaatatggtggattggctgaaacatcagactggaccccttttgtagacttacccctaactatgatcccaaccatgattgggagaaaactggactaaataaggctctacttaaagaggcctcagtagcaaaatcaattctaaaggaatcccagaggagagtggctataaccaaccttattcattaaagccaagagttctttggaaggagggcaagtgggaggagtggttatgagtctgagtttgtctcattcccagtcaaaggtgtgcagtgtgaagaagtgctgcaacttctca

SEQ ID NO: 286486 - DNA, 531 bp, Homo sapiens
atcctttgtttaaagtctttttttagcacttacattacacaatcccagatggaatatatctatcatctatctatctatctatctatctatctatctatctatctatctatctatcatctatctatctaatctatctatctatctctatcatctatctatctatcatctatcttttgtattttttagcrgtggcttgggagtttctgcaggggagggtttcaaattgttctgagatgaaactgactaggattctgaagaaagaagcactaaatgccagagtgatcattgcaaagtgtttactaggggaacttatgtacagaggaggctgctgtgtatcctggtgatggacaataagacaagggatgttctgcttaggtatatccacagtgagagggtcaggttatgatatttatctgagagcttaaggaatctggcttaggtccagggttagtatcctttggtgtttggggcaataacctaaatacctttatcagtggctgaaaatgttcaaggcccaggcctgggtttagg

SEQ ID NO: 286487 - DNA, 371 bp, Homo sapiens
catctgtgctgaggctgcaggccacagtgcgcatgattaaatcttgagttcattattttctctagctggttatttatttgtggtgtagttagtattttctggagaaaactattgaaccgagtgaaaaatgaactatccatgggatacccattatcccaaacacggtgtaaaatccatgatccacgtctagtactaaggaatayatgagggaggcagagatagagcaaaccagtgaaggagagagaaagagaacattttacaagatattattttattcatatgctacccattatgcagatttaacagtgttggctactaaggattaggtggtaaaatactacacagtggtcgccatgctgtgcttgaccaga

SEQ ID NO: 286488 - DNA, 1203 bp, Homo sapiens
cttcaacagttgaatttaaggctgacagaaaggacccttacaatgccacaccaaagtcttgttagaataggttctgttgggcaaaattcttcaaccttatattcaagtgaaatattcaaaacattacttctttataagtggtgattttctagggtggaagctcactgatgatctcttcctctgatcatacctgaagatgccaaatatagctcatgtgtgtacaactgagtgtgtctgcacacatacatgcatgtgtgctcacatgcacacacacatytactatgcaatgattcatttagattttaccttaaaacgaatgtaattcaggaggccaaagtgtgtggcatacatcccgaagtagtccatgagtttggagttgtgcatgtagttgggaaaatgatcagggacagggaagtcactgaagcacatcatctccttggaagtattgatggtcacagatttgtagatactaggcattttctctgaagtatttttctatagaagaaagcttctcttaataaaataagctttacaataacaagggaatctaaataaaatattttagagaagaaaagtaatcgggtataataaataacattgwagcccagcaatagatcatcctaccctaccctatacccwtgctaagtcaggggaaaaaatagtgtgacatctctaactttgagcacaatatcatctgatcagttgaaagaatcctcaaccactatatctttctaatatttttgatgaccacatggaatctcagctaccctgaagagaatctgataaatttcatggcttaatctgaaattgacatatattcatataattcctcagttaatccataatataagcaagaatattagagtcattacataattcctaatatgtgatgtgctgtatgtttcctctgaggaaaccagcatcaaattgttctagctatttttttttaaagttacatgcctaaaaccaaatgaaatctaaacttacttgaaatttccagagatgtccaatatcatcatttctttcaaagcaggtgggctccagatcttcatccaggcagcacttgatggcccccagtccgctaattccagctccaatcacagcaatcgctttttggccattgtgtctcagctggttagtagaaatttagagctctgtcactgtcatccatcccatttaaaaaaaattacttgtcacaaggac

SEQ ID NO: 286489 - DNA, 602 bp, Homo sapiens
agcccagcaatagatcatcctaccctaccctatacccatgctaagtcaggggaaaaaatagtgtgacatctctaactttgagcacaatatcatctgatcagttgaaagaatcctcaaccactatatctttctaatatttttgatgaccacatggaatctcagctaccctgaagagaatctgataaatttcatggcttaatctgaaattgacatatattcatataattcctcagttaatccataatataagcaagaatattagagtcattacataattcctaatatgtgatgtgctgtatgtttcctctgaggaaaccagcatcaaattgttctagctatttttttttaaagttacatgcctaaaaccaaatgaaatctaaacttacttgaaatttccagagatgtccaatatcatcatttctttcaaagcaggtgggctccagatcttcatccaggcagcacttgatggcccccagtccgctaattccagctccaatcacagcaatcgctttttggccatygtgtctcagctggttagtagaaatttagagctctgtcactgtcatccatcccatttaaaaaaaattacttgtcacaaggac

SEQ ID NO: 286490 - DNA, 589 bp, Homo sapiens
tctgtgtcctaatgcattatagcaaatggaatcacacatgtaccttcatttggaaaattgtcatttgtccatgtgacagttgatacttattcacattttttatgggccacctgccagacaggagaaagtacttcccatgttaaaagacatttattatcttgttttgctgtcrtgggaattccagaaaaaattaaaacggataatgggccaggatactgtagtagaacatttcaaaaattcttaaatcagtggaaaattacacatacaacaggaatcccctataattctcaaggacaggccataattgaaagaactagtagaacactcaaagctcaattggttaaccaaaaaaggaaaaagacagtgaggactacaacccttcccagatgcaacttaatctagcactctatactttaaattttttaaacatttatagaaatcagaccactacttccgcagaacaacattttactggtaaaaagaacagcccacatgaaggaaaactgatttggtggaaagacaacaaaaataagacttgggaaataggaaagatgataacatgggggagaggctttgcttgtgtttcacc

SEQ ID NO: 286491 - DNA, 633 bp, Homo sapiens
cactgtatcctcagtgcctggaacagagttgggtgtcatagttaattttatatgtcaatttgcctaggctggggtgtctctggtcaaataccaatttcratgttgctgtgaaggtattttttaaaaatgtcattaacatttaaatcagtgactttgaataaagcagataactcttcataaaatgagtgggcctcatccgataagttgaagaccttaagggaaaaagaccgagtgacctgagaaggaaggcatttgcctccacactcgagactgcaacatcaattcttctctgggtctccagccagccagcctgacctgcaaatttaagacttggtagtccccacaatattatataatatctatctaggtatctcctattggttctctttctccaaagaacgctaatacagtgggcacgcaataattatctgtgtgataaatgattaggagggagaacggggatgtggcacagccatgcctgctccaagtaaataaattgtcctaggagtgttgggatagtatattctgcattaagacactatttcatgacatcaattgcctggagaactcatcaaagtatacattatcttttataggtggtccaaaataaattagtgaattaagagatatgta

SEQ ID NO: 286492 - DNA, 633 bp, Homo sapiens
cactgtatcctcagtgcctggaacagagttgggtgtcatagttaattttatatgtcaatttgcctaggctggggtgtctctggtcaaataccaatttcgatgttgctgtgaaggtattttttaaaaatgtcattaacatttaaatcmgtgactttgaataaagcagataactcttcataaaatgagtgggcctcatccgataagttgaagaccttaagggaaaaagaccgagtgacctgagaaggaaggcatttgcctccacactcgagactgcaacatcaattcttctctgggtctccagccagccagcctgacctgcaaatttaagacttggtagtccccacaatattatataatatctatctaggtatctcctattggttctctttctccaaagaacgctaatacagtgggcacgcaataattatctgtgtgataaatgattaggagggagaacggggatgtggcacagccatgcctgctccaagtaaataaattgtcctaggagtgttgggatagtatattctgcattaagacactatttcatgacatcaattgcctggagaactcatcaaagtatacattatcttttataggtggtccaaaataaattagtgaattaagagatatgta

SEQ ID NO: 286493 - DNA, 588 bp, Homo sapiens
ttaaaactttctgacctctgaaagattttgtacagagtattatctgatgtcaaaaattataacacacatgcaatgattgtttctttcaaatagaaaccatcaaagatttaggataagcatatggtaagagacatgttcagaaaatgctttgcatttacacygaactcctccagcatatttgggttcagtggaacttgattatttgggcataagtatttattgtgaatatccactggtgtgagctaggtgttgtgtgtatagaagctgttagagtaggtgtttttttacccagcgcagggccagcctcaggcagaactggctgtgaccaaggaagaatctctctctaggtctttgcctcacctaaagagggtgctgacctggttgtctcagggtcctgaaggtctggtatctaccatctctacattgcccatgagattgctctcaaagtgtggtcctcagatagcagcaacagtagcggcagcatcttacaatttgtagaaatggaaattctttgtccttaccccagatctgtctaatcatgatctttgggggtaaagtgccgcaatctgtattttaaaaagcactcta

SEQ ID NO: 286494 - DNA, 552 bp, Homo sapiens
atctctctctaggtctttgcctcacctaaagagggtgctgacctggttgtctcagggtcctgaaggtctggtatctaccatctctacattgcccatgagattgctctcaaagtgtggtcctcagatagcagcaacagtagcggcagcatcttacaatttgtagaaatggaaattctttgtccttaccccagatctgtctaatcatgatctttgggggtaaagtgccgcaatctgtattttaaaaagcactctaggggactatgatgcatgttaaatttaagaaccattgttggagaggaytatttgtcagtgagaggtcagaccaaaactatgaaaaaaacaaaacaaaattctcctttttgcttgtaattacccttatgtgattatgtctgtagcaatgtgggaaaagaggagacatggtaaagacgtgtctccttggaagtctcatctactgagagaggttcgaggtggaggcaattgaaatatgtatcacattcaaatttgagttccaacatcacctttctggattaataaagtaaagaaagcttaaat

SEQ ID NO: 286495 - DNA, 594 bp, Homo sapiens
taaaaaaaatttggtaagcaaacagctccacctaaaccctttcaatttacttttaccaaaaaacatgtttcttataccttttccaacttttttctcttctttcttatgtcagccatcatgtcactcactgaaagtagtttgttcaatcctaggaaagaaattctggatttcaacatggctttcttattgagaagatgyggtttcaggaaaatatagacaccccaaaggtccgtttggtaaagaacatcatgagtgaggtagcacaggcatggggaagatgaatccagggacagctctggaatgccctccactcattgttttaacagtgcacatgcctgccagatgcaaacatacaactttgtcacatgcctgatgagttcacattttgattagcagacctcaaagccctcaaagcccacgaagaaggatggactaaagggttgagtctcacccaactgacaaggcacaaatgagcatgtttgtagttccattatcagaatatatactctggttctcctttaaacagggagttaaacttgttcatttctattactacttagtttacaaatatggattgtagctattaatggtaat

SEQ ID NO: 286496 - DNA, 534 bp, Homo sapiens
agggatatagctctgttaatggaaggtctctctttctggggccagaaatgtaaatatactgagatggcagctatgaaattgcttctttcccatcaaattaaggcaaagactgtgcctttctcaagtgcctcccacaagtcttttctgggagacaaaggaagccagcccagagaggcacacatcagatgaagggtgttgcctttccacccaagcttgttgtctctgatggcctcaagacagccacgactgagtagaggaagggacagcctgcacacaaagaccagtgaataacagaagagtcatcaggcttaagaatactaagaagcactttgactatgattatttgtatgtccctgttttatgtacagtaaaacaggtggatgctaatatgctaaaagcttatgaaggttttgaaggtattacaayaccgaaagaaaaaacacataaacattgtttacaaaggtctatgttcaactctaaagcagcccatggactttcaaacccatatcactaggaaatgagctgtgaaatctg

SEQ ID NO: 286497 - DNA, 613 bp, Homo sapiens
tacaggtgcccaccaccatgcctacctaattttttgtacttttagtagagacagggtttcaccattttggccaggctggtcttgaactcctgacctcaggtgatccacccacctcagcctcccaaactgctgggattacaggcatgagccactgcacccagccctgtatgtgtttttaaagtccctgtgacattgagttacagggctttggctyctcagtctgaaaagcacaccaagtcctggtaaattttaaacactgacagcaattaaagccccatcttcaggcctggtagaagatgccaatcaatgtaaactgcattcctgaatcacagggccaaaagttaaagctcttcagctcctcaaggcccaggaactatcacaaaagaggtgagcatgtgagattgtaagggctgattttgagaataaaataagttcagtttctctataaattgatcattaatgtcaaaggcacactgatgcaagaccagaatgtgggcttctgtgtcagattaacaaggttttcctgaagcattaactgactccttaaggaaggttataaaggattatggaagttatattttatgaccaagatgaaaattttatatattgttta

SEQ ID NO: 286498 - DNA, 595 bp, Homo sapiens
ttaactgcatggactaaattaatagaagtctaaaatactatttttaactttttgcttaaaatgttgctgatcctttgtttttaagagttaagaaaccttcttttaagctatttacagcttttaataattgagtaaattatactcctataaacaaaattttgagcacatttgtttctctctatatgatttctccagaatttggaaactatttgtgagtattcttaactgatgacaatgacaatacagttatttgcataagtgcaataagaatccattttcatttgtaacaggacacagttggagaaactggttactttatcaaggctttgactggagcggtgtgcttttctttaaggaatcaaacttgacttatggagccaataaagccycttggaaaaactggcctcatacctttgtctacagagtccctgtacagagttactgacctttggcaagtgaagaatgtcacgttctgaaaggcccaggagccccacgtttatcttggaacctcaagaggagagaaattcattcaactcatagatatttaatgatacaaatttatggctggccttggctttaaaaaagtcttatttga

SEQ ID NO: 286499 - DNA, 1045 bp, Homo sapiens
taggattgtatgaggagaacaattttatttagatttggactacctatcttttaactagatctctgagctctgggcagtgcccacactgaatcctgggtctccaaaaaagggagaattattatgaggttagaccacgtgatgcttttacaatacacttagatgctggttgttaatctacttttagccaagataaacaccaattcagttacttacctagggatgggtctcaggctgaagactgctctctatcatcctagaagcaggaaaaaattcaaattcgtcctccttgttagaagcaatctcaaaytccataaaggagttacctgccttccatcatcacgagagcaggaaaaactgccttccttgtattggaagcaagcaaaactccaaaaaagaaaaggagttgtacacaaaattaactttagawtagtttggctttatcaatgaaactcatgtttattaaacatacatggaaaggaattcctcttttaaataaaaaaggtaaaattattattatttattcatatgatttattacaataagatctacagtttttataagaatattctgtaatatctttgaaaataaaattttctaataaagcagaactggaggtctatcagaatctcttgtggtacttttccaaactacaagagattttctatctactttactcctcaagaaattttgwtttatctagataacttctaagtagtctgtccatattattgatgaattcatttcaagagtgaagttgttagtactaacaccaagacaaaaggcaaaaccaggactagtctaggtaaaccaggacatgtagatacttagctttaaatcccttttgaattctaagggagtggttctcaactctgtctgtacattaagatcagcatgactacctcttgaaaatatcaatctctggtccctaccagaaaaactgagtcagatttttgtgtgtgaggaacagttatcagttctgtaggttatttttatatgcagccagaatatcccacagttctaggaaagccaagaacaaacaagaaag

SEQ ID NO: 286500 - DNA, 618 bp, Homo sapiens
tagtttggctttatcaatgaaactcatgtttattaaacatacatggaaaggaattcctcttttaaataaaaaaggtaaaattattattatttattcatatgatttattacaataagatctacagtttttataagaatattctgtaatatctttgaaaataaaattttctaataaagcagaactggaggtctatcagaatctcttgtggtacttttccaaactacaagagattttctatctactttactcctcaagaaattttgatttatctagataacttctaagtagtctgtccatattattgatgaattcatttcaagagtgaagttgttagtactaacaccaagacaaaaggcaaaaccaggactagtctaggtaaaccaggacatgtagatacttagctttaaatcccttttgaattctaagggagtggttctcaactctgtctgyacattaagatcagcatgactacctcttgaaaatatcaatctctggtccctaccagaaaaactgagtcagatttttgtgtgtgaggaacagttatcagttctgtaggttatttttatatgcagccagaatatcccacagttctaggaaagccaagaacaaacaagaaag

SEQ ID NO: 286501 - DNA, 551 bp, Homo sapiens
gacttttaactgttgatttccttttaaaaaatctttccaaatctcattaccatatttcagctagtacagattgctgctatttcagaagtaccaagtatcaaatcagaaagggcttcatttaggatccaaacccagttttttctggtggaaaaaaaaaggcaaaacccttagctatgaaactgcaatgtggggtgacagccattgctctttcaatttggcatggatagcaaaaaggtggccttgttatgtaaataaaatcccttaagtagccaaaatcagaargctttcctttatttatttatttatttatttatttatttatttatttatttatttatttttttgctggccatttttctctacccaccacaccacctttttgtgtttatgtgggaatttagtcacttcagaggccttgttccccataatttggaactttcctttggatttgatcaagttggatacagttgatcaagcccagtgggaaaaagactgaaacaacgacaaaaacagaaacagacaacaacaacaaaacagttaaggaaaacaaa

SEQ ID NO: 286502 - DNA, 551 bp, Homo sapiens
gacttttaactgttgatttccttttaaaaaatctttccaaatctcattaccatatttcagctagtacagattgctgctatttcagaagtaccaagtatcaaatcagaaagggcttcatttaggatccaaacccagttttttctggtggaaaaaaaaaggcaaaacccttagctatgaaactgcaatgtggggtgacagccattgctctttcaatttggcatggatagcaaaaaggtggccttgttatgtaaataaaatcccttaagtagccaaaatcagaaggctttcctttatttatttatttatttatttatttatttatttatttatttatttatttttttgctggccatttttctctacccaccacaccacctttttgtgtttatgtgggaatttagtcacttcagaggccttgttccccataatttggaactttcctttggatttgatcaagttggatacagttgatcaagcccagtgggaaaaagactgaaacaacracaaaaacagaaacagacaacaacaacaaaacagttaaggaaaacaaa

SEQ ID NO: 286503 - DNA, 589 bp, Homo sapiens
atcttccctgttggaagcaagctcaaactccataaaggagttacctgccttccatcatcttgggagcaggaaaaacttgccttccttgtgttggaggcaagtaaaactacaaaaaatggagttgtacagcaaaatgaactttagatcttagccaaatttggggatatcagagattctttggagggagtgcttccaggcctctgtaagttgtcctgytggtttgagctataaagatagctcaagctggtgcctagcaccgataggagatttttcaaagatcagggcaccttcactcagaacccctctgtagttaccaaaatgtgaacccccaaaatctgagacaggtctcagttaatttagaaagcttattttgccaaggttgaggatgcacacctgtgacacagcctcaggaagtcctaatgacaggtgcccaacgtggccggggcacagtttggttttatacactttagggagacgtgagacatcaatcaatacatatacgatgtacattggttctgtctggaaaggcaggacaacttaatcattgagggggcttccaggtcacaggtagtctagagacaaatggttg

SEQ ID NO: 286504 - DNA, 570 bp, Homo sapiens
taattacattatataagtgtaattagtataaagatgtgagcaattattactttctctacctaagttgatatagtttggatgtgtgtccctacccaaatctcatattgaaatgcagtctccaatgttggaggtggtacctggtggaaagtgattagattatgagggcagttttctcatatatgatttagcatcgtccctcttggtactgtcctcatgatagtgagtgagttctcataagatctagtgatttaaaagtgtgtagctctccctcctcatccctcctcactccatcttgctcctgcttttgccatgtgacatgcctgcttcccctttgccttttgccataattggaagcttcctgaggctcccccagaagcacatgcagctatgctttttgtacagcmtgcagaattgtgagccaattaaacctctttttaaaataaattactcagtatcagatttttttttacaacaatgtgagaatggactaatacataaatatatttctcaaaacagaaggaatcagacacacaagattttcatcaactatgttctaaaattcagtaagtt

SEQ ID NO: 286505 - DNA, 574 bp, Homo sapiens
gcataaatcacacagcacctataaaacaaatatacaagttaaaaatcaaaaatagaaagaccaaagtacccaagtgaaaaagagcatgatgaatgcaacagtactccacatttcaatactaacattgaatgtaaacagcctaaatgctccacttaaaagatatggaaccacagaatggatatgaactcaccaaccaactatctgctgccttcagaagactcacctaatacataaggactcacataaacttaaaataaaagggtggaaaaaggcatttcattcaaatgracaccaaaagcaagcaggcgtatttattcttatattagacaaaacaaactttaaagcaacagcagttataagagaaaaagaagaacccattatgtaatggcaaaatgccttgttaaacaggaaaatatcacaatcctaaacatatatgcatctaacagtggagctctcaaatttatgaaacaattattaatagacctaagaaatgagatagacagcaacacaaaaatagtgggggacttcaatacactactgacagcactagacaggtcatcaagggagaaagtca

SEQ ID NO: 286506 - DNA, 585 bp, Homo sapiens
cctggcctgcagtgcaaaggaaagcacacagacatgggcctgtcagcaccctgtccctgtgcaaatatcatcatcatcacaaccatcgacagcagggatcccctggtcccacagccgtgttacttctgccactgtggtgaatgcctgcttggagccaggcatctcagcaccggctagcaccctgccaaagtgaaggagcatgggcccaccatgctgccgctgcttctgcggcttgcatatgcaaacaaagattgaagttattgtcaatgcagtacaatgtgttttggctgacaccacctatcagactatagtaaccagcagactaggagcagctcagacccctccagtgcagtggatacctagcctcaaagagtcagagaatagtcatgcccaatacaagttttgcagagttagagaatgcagtccaggggttgggagctgagtgctggctccataaaatatttcagaaatgaactcagttgactgaatctacctsaaactacaatcaaatcttgaagtttttaatatatgacaaaagaaaaagagccatccaaaggtaagtgacttcaaagatccaagggacat

SEQ ID NO: 286507 - DNA, 491 bp, Homo sapiens
aaagacatctgcatgcatatgttcattgcaacactattcacaatagcaaagacatggaataaacataaatgcccatcaattgtataytgagtaaagaaaatgtggtacatttacactatggaatactaggcagccataaataagatcatgtcctttccaggaacatgaattgagttgaagtccattatctttagcaaagtaacacaggaacacaaaaccaaatgtcacatattcacacttagaagtggggaggtaaatgatgaaaacacatggacacatagaggtgaaaaacatacacttgggcctatcagagggtggacagcatcaatggggagaggatgaggaaaaataaccaatgggtactacgctaaataccttgctgatgagataatctgtacaaccctcatgcaaaaacttacttatataacaaacctgcacatgtatccctgaacttaaaataaattcaaattttaaaaaattgaaaaaacaga

SEQ ID NO: 286508 - DNA, 491 bp, Homo sapiens
aaagacatctgcatgcatatgttcattgcaacactattcacaatagcaaagacatggaataaacataaatgcccatcaattgtatattgagtaaagaaaatgtggyacatttacactatggaatactaggcagccataaataagatcatgtcctttccaggaacatgaattgagttgaagtccattatctttagcaaagtaacacaggaacacaaaaccaaatgtcacatattcacacttagaagtggggaggtaaatgatgaaaacacatggacacatagaggtgaaaaacatacacttgggcctatcagagggtggacagcatcaatggggagaggatgaggaaaaataaccaatgggtactacgctaaataccttgctgatgagataatctgtacaaccctcatgcaaaaacttacttatataacaaacctgcacatgtatccctgaacttaaaataaattcaaattttaaaaaattgaaaaaacaga

SEQ ID NO: 286509 - DNA, 1083 bp, Homo sapiens
gaagctaccaaaatgtgcttcaagaggtgaataaatattccatagtacatccataaattggaatattattcagaggtttaaaaaagccagtatgaaaaggttacattgaatattgaagcaaatatcctggataaaatattagtaaactgatttcaataatacattaaaaagatcattcatcatgaycaagtgggatttgtcccagagatagaaggatgggccaacatatgcaaatcaatcagtgtgatacatcatattaaaataatgaatgataaaaaagataatttaattgatgctgaaaaagcatttgatgaatttcaacatctcttcattagaaaaactgtcagaaagttgggacagaagaaacaacctccaaataataaaagccatatgtgacagacccacagctagtatcatactgaatggggaaaaactgaaaatgtttcctctaagataggaaatgtgacaaatatggtcactgtcaccactattattcaacatagtactagaggtcctagctaggggaatcagacaaaagaaawgaagctaccaaaatgtgcttcaagaggtgaataaatattccatagtacatccataaattggaatattattcagaggtttaaaaaagccagtatgaaaaggttacattgaatattgaagcaaatatcctggataaaatattagtaaactgatttcaataatacattaaaaagatcattcatcatgaccaagtgggatttgtcccagagatagaaggatgggccaacatatgcaaatcaatcagtgtgatwcatcatattaaaataatgaatgataaaaaagataatttaattgatgctgaaaaagcatttgatgaatttcaacatctcttcattagaaaaactgtcagaaagttgggacagaagaaacaacctccaaataataaaagccatatgtgacagacccacagctagtatcatactgaatggggaaaaactgaaaatgtttcctctaagataggaaatgtgacaaatatggtcactgtcaccactattattcaacatagtactagaggtcctagctaggggaatcagacaaaagaaa

SEQ ID NO: 286510 - DNA, 592 bp, Homo sapiens
tgaagggcacaaaattcacctgcaaaaatctgtagcatttctatatgccaacattgaacaatgtaaaaaagaaatcaaaacagtaacttcatttgcaatagccaaaaatgcaagtattaataagtacttaggaattaacttaaccaaaggcatgacaaatctctacaataaaaacaataaaacactgataaaagaaattgaagaggacacacaacaaaatgaaaggacatttcatgtttatggattagaataatcaatattgttaaaatgttcatactacacaaatcaatgtctaaattcaatgcaatctctatcgaaatactaatcacattcttcacagaaagggaaaaaatattcttacaatttatacaaagtaacaaaagatccagaaggcccaaaaccatcctgagaaaaagaacaaaactggaggaatcccattacttgacttcaaattatactgtagaactacagtgaccaaaaaartatggtactgtcatgaaagcagaaatacagaccaatgaaacagaataaataacacaggaacaaatctacacacttacagtaaactccttttcaagaaagatgccactaa

SEQ ID NO: 286511 - DNA, 581 bp, Homo sapiens
attctggtatgttgtatctttgttcgcattagtttaaaaatttttcttattttttgccttatttaattttttaccccaaagtcattcagaagcatgttattttatttccctgtaattgtggtattttgaatgattttcttagcattggtttctcttttcatcrccctgtggtccaagagtgtggatggcacaatttcagttttttgaatttgctgatgattgttttgtgtctgatcgtgtggttcattttagagtttcttccatgttcagatgagaagaatgcatattctcttgttttgggatggtgtattagtctgttcccacactgctatgaagaaatacctgagactgggtaatttataaaggaaagaggtttaattgactcacagttccacattgctggggaagcctcaggaaacttacaataatggcagaaggcaaaggagaagcaaaaatcttcttcacagggcaccaggacagaatgagtgaaagcaggggaaatgccagatgcttataaagccatcagatcttgagagaactcactcactattacaagaacagcatgggggaaaccaatcccc

SEQ ID NO: 286512 - DNA, 633 bp, Homo sapiens
ttagctcatttacattcaaggtcagtattgatatatgcacatttgatcctgtcatattattagctggttattatgcagacttatttrtgtacttgctttatagtgtcactagtctgtgaacttaagtctggttttgtattagctggtacaaatctttcttttctatatttagcacttttttcaggacctcttgtaaggcaggtcttgtggaatagactttctcagcttttgcttgtatgaaaaggatattatttctccttcctttttgtagcttattttggctggatttgaaattcttggttggaaatttgtttctttaagagtgctgaatattggccctgatctgttgtggcttgcagggtttctgctgaaaggttcactgttagcctagggaggtttcctttgtagctgacctgcctcttctccttatctgatttaacattttttcttcaattttgaccttggagaatctgatgattatgtgtcttggggatgatcttcttgtttagtatctttcatgggctctctaaatttcttgaatttcaacgtcagtctctctagtgaggtaggggaatttttcatggagaataccttgaaatatgttttccaagttgcttgctttcttctctttca

SEQ ID NO: 286513 - DNA, 633 bp, Homo sapiens
ttagctcatttacattcaaggtcagtattgatatatgcacatttgatcctgtcatattattagctggttattatgcagacttatttgtgtacttgctttatagtgtcactagtctgtgaacttaagtctggttttgtattagctggtacaaatctttcttttctatatttagcacttttttcaggacctcttgtaaggcaggtcttgtggaatagactttctcagcttttgcttgtatgaaaaggatattatttctccttcctttttgtagcttattttggctggatttgaaattcttggttggaaatttgtttctttaagagtgctgaatattggccctgatctgttgtggcttgcagggtttctgctgaaaggttcactgttagcctagggaggtttcctttgtagctgacmtgcctcttctccttatctgatttaacattttttcttcaattttgaccttggagaatctgatgattatgtgtcttggggatgatcttcttgtttagtatctttcatgggctctctaaatttcttgaatttcaacgtcagtctctctagtgaggtaggggaatttttcatggagaataccttgaaatatgttttccaagttgcttgctttcttctctttca

SEQ ID NO: 286514 - DNA, 552 bp, Homo sapiens
cgtcagtctctctagtgaggtaggggaatttttcatggagaataccttgaaatatgttttccaagttgcttgctttcttctctttcagggacacaaatgagtcatacattyggccttcttttataatcctatatttctcaggagttttcttcattctttattattctttttcctttatttttgtttgagttatttcagagatccagtcttcaaactctggaattatttccttagcttggtctattaggctcttaatacttgcaattgtattatgaaattcttgtagtatgttttccagatctataagaccattttggttctttttgtataatggctatattgtctatcaactcctgtattattttgttttaaatcttagatttcttggattgggtgtcaactttctcccaaatctcaatgatctttgtttctatccatattctgaattctatttatgtcatttcagccatttcagccttgctgcaaaccctttatgggaaattagtgtggccatttggaggaaataagcccctcttactttttcagttgcca

SEQ ID NO: 286515 - DNA, 1235 bp, Homo sapiens
tcacatagcaaaagattttattttaatgaaattcaacttattaatattcaccttcatggatgatacttttggggttgtatctataagctcattgccaaacccaaagtcacctaggttttaccttattttgtcttctaaaagattcatagttttgcattttacagttagggctatgatccactttgagttaatttttgtgaaaggtatgaagtcagtggcacaattcatattttttgcatgtagatgcccagttttttcaatgccatttgttgaaaaaactattttccattgaatggcctttgctatttattccaatattatattaatatatttgcatgggtctatttctgcactctatattctgttccattgacttgtctattctttcaccaaaatcrcttttttgattactgtagctttacagttagccctgaaattagacagtatcagtagtcatatttttttctttttcttctatgtcatgttgactattgtgggtcttttccctttacatataaaatttagaatcaatatttccatatatgcaatgtaacctgctaggatattgatgagaattatgttgaatttgtgggtcaagtagggaaatactgacawtggaagtaactaacttgcttttgattttacaggctcataggtggaaagaaattgccttgtcttaaatgagactttggacttgaacttttgagttaatgctggaatgagttaaaactttgggggaactgttgagaaggcatgatttgttttaaaatgtgaaaaggatatgagatttgggaggggccagatgttgaatatgatttggctctgtgttggcacccaaatctcatctggaattgtawtccctgcctgttgagggagggaacctggtgggaggtgattggattatggggacagtttcccctatgccattctcataatagtgagagagttctcatgagatctgatggttttaaaagtggcagttttccctgtgagctctctctctcctgctctgccactgtgaagttgtacatgcttcccctttacattccaccatgattgtaatgtttctgagcccttcccagctatgtgaaactgtgagtcaattaaacctcttcgttttcataaattacccagtctcaggtaatatctttatataagtgtgaaaatggactaatacaagataatttctttttgtttgtatatttataaatctcagaatatgactaaaattccaa

SEQ ID NO: 286516 - DNA, 569 bp, Homo sapiens
ctcttgaccagtctcttttcacttgactgaatcacttctgcctatgaatagccattgctctgattgtgctttgttttgaaggtcatattggtaaagccatctttcattccctattaaaattattggagaaatacttcaggatcttgatcctcatttgtttaaaatttcctttgaaagctctgctcatttctgcagctgatttgggctcaacagttgtgatatccatcgatttcacaatgtgatacccattaakatttctcagctataatttttcagtcataattgtgtaagctgaatcaactgtcatgtctatggtattggctattttttaatgttaatcattggcgcacttcaattagagtacaaacaaaataattttttttctcacaaactgttgggataatctgccattgcatgttttatcttcaacattgactcctcccttttaaaaacacattatctatttttaaacctctaatttttctggggcattctcccaataatttttttctaaagcgtcaatgattttattcttcttccacccaaactccaccataaatttgatgttt

SEQ ID NO: 286517 - DNA, 632 bp, Homo sapiens
caatacttttaatggaggtctcctttgaatatgtgtgtgtgtgtgtgtgtgtgtgtgtgtgttgtctctcttttactcattcactgtcaggtttcaatcatagaaacattaccatttttcatttataccctgttgtttccaggagtatttatttttaattttttgtttattaatttttagcttactaatgcaggtctagttactgaaaacaacactattggtgattctgtcccttcaattttttcttctatttgtattatgacaaaataatgtctctgaagaattccacaagtrccttcctcacatttcttcttaaacaactctcaaagaattggcttgtttgttaacaattctagcattaaaatatattaattatatatcttaaattctatcttctaagtgaatatattgcattactattacttataaaattcacttccacctcaaatatttttagttttatattggtgagttgaaatttggaaataaccttagtaagtactgtaacatttatacacattggccttcaatgttcttctatgatgtttttgatgtgagacttcagcaactgaaatattgtacattaatatgaatggttgaaaaatgttttgctatcaagagccataacaaat

SEQ ID NO: 286518 - DNA, 521 bp, Homo sapiens
ttgtatactttgggttaaatgtgcttggtgttctataaccttcttgtacttggatattgatatatttctctaggtctgaaaagttctctgtttttatctatttgaagaaacttcctactcctgtttctttctctgtgtcttctttaagggcaataattattagatttgcccatttgagactattttgtagattcygtaagtatgtttcattgtttttatcctattttcttttgtctcctatcactgtgtgttttcaaataacctgtcttcatgctcactaattccttcttctgcttgagtcattctgctattaaaatactctgatgaattttttactacgtcagctgcatttttcagctccagaatttctgctggattctttttaattatatcaatatccttgttaaatctatctaatagaattctcaattatttccctgtattatcttgaatttctttgagtgtccttagcacaacatttttgaattctctatctgaaaggtaacatatctctgtttgcc

SEQ ID NO: 286519 - DNA, 601 bp, Homo sapiens
ttattgatttcaggcaagcaaatgcttatgcrgaacttaggtctttgactctacctgtgattttgctttttgggaaaaattaatttttgagcataaactaatttaagttatactgtactgtttgttaatattaataaaaacaaacactacaaaataaacctcaactctaatgatggccagattttcacatttgtcttatgttacaaattaaccaagttctaaacaatgtggtcacacaaaacctagagaaacaaatgttaagtatagagcatttacataaagaaatgttgaaataacttattcaaaataaatatgtttctactgccaccaaaattgtttgtactgtcagaataaacttataacttatgaataaaaccaataggtctcatcgggaaagtgaccccatgatattgccatcaaaatttattatttgtttcaatataaggtagctttaaaacatttttaccctacaaaattcactatgcataatattcaaattaagaagtttcagatgacaagtataaattaggtaaacttaaaatgtcattttcttaagttaaaagtctttcccttccatagctaattctcaaactcattattc

SEQ ID NO: 286520 - DNA, 1141 bp, Homo sapiens
ctcccttcccttcttcctcagggctctggacgctactctatctacattgccaattacgcctacggtaatgtgggccctgatgccctcattgaaatggaccctgaggccagtgacctctcccggggcattctggcgctcagagatgtggctgctgaggctggggtcagcaaatatacaggtatgcagagtgacatgggaggtagtatgctggaggggctggggctgggggccagggccctgcaaggctgagtctaattcatcagagaccacaaggaaagggtggccttatgtccctggtgaggggagatgaaggctccattccatcctgccacccacagaakgcttctcccacactgcctctccaagcattggtgagatatctggcaggtacgagttttggggtacccaagaggggacatctggcttgctggaaagtgggatgtgagaacaccacatcattttctccctggaacctcttgccccactgcctctggtaacctcaatgatgggtgagcaggttctgtaggagaaaactgacaaatcacaaaagccgagatttaaagcattctttattgccaaatwtcagaatctggaagtgacccagccctctctcaaacctcaggacactctggcattagtatttaatgagcacctgcaatgtaccaaactctgtgctttgccctttacacataatcttatttacgaaggagatgctactgtttctgatttataaaagagaaaagtgagaacaggagggcagatctctcgctgaaggtcacccagttagtaagggtcagagccgggaggtggttgtggcctgtttggcaccaaggcccagacttttccttcctgcccctggttcccaaagcagggcagggccagtctgaatgaaattgttgtcatcttgtagcaaaattaactaaataagaatgatgtactaataatattttcataacgctaaaattatttaaaggactgatttttcaattctaagattttgtaattcwtgtttttctggtgttgaaaagtatttttatggttatatcatagatgatgggggttttgctttgttttttgtattgtcctcagttggcaaaataaaacactcgcaatcctgcatgagtgctctcaaggttgtttt

SEQ ID NO: 286521 - DNA, 572 bp, Homo sapiens
tgtgcacaggctcagggcagtgctgacatgccagccgcctgctgcctcttccccctctggactttgggtgccaatgagcacagaagggaagccaaaggggtgctgagggcagcttagtgcaggcctgcaaatgccccttggcacttacaacctgggtgtcatgaatggcagcaggaggcagacaggtttctgagaagaagggggcaggtccacatttaggccctacctttagggcagggagggcctgacggctgggtttgggctgccagtaccatggacaggagtgggaacttgtggtgccttttctgggcctgcccatggctgtccatggaccaattggcgtgcacttcctcctctctgaggcccataaaagccctgggctcagccagagttgagcatacatcaggacgaccagctgcaaagaggagctatccactccagggccccctcactgctgagagyggcagagatgactgacgccctgtctgcaaagagaagccacccactctagggcctcctccctgctgagagctgcccagatgatggaatgaccagctgcagagaggagttac

SEQ ID NO: 286522 - DNA, 535 bp, Homo sapiens
tgatagttctttaataagccttcacaatgaacagctaacttatgtacagtaaagaggaaaatgatcattggaatgactatgttttgtttacccatttkattttataactcattaacattcattcagtcattcaacaagcacttatagagcacccgttattcatctgctattctctgggctgtgggaattcaacagtgagcaagatgcgaactgtaccctttagaagctcatagtccaatgggaggaaatgcacatacatgcatgaaagtaaaaagtattactggaaccatgagacagaaccccctaagttccccttacagaagaagtgtgattgattgataaaggaagaaagcaccccaggcagagggggacatatatgcaaaggtatgcaaagcatcaggtgctcgatgtttgagagaaattgggtagaagagtgattaagtggtgcaggttccaaccctcatcagtaaagtggagataattctcattttcaaggtttgttgtgagaatcaaataatgtaataatgttaaatac

SEQ ID NO: 286523 - DNA, 564 bp, Homo sapiens
agtatgaacacctgaaagtgtctccagagacaggtagaagaggatggggctgtagataatgattaaataaaaatttagctttatttatcacattttctatctttaaaatatacagtggaagaatatatgttaatttctgaagggtataaggttatttcttatatatgctttctatttctctgtatctcctaactttccaaaaatcttttatagaaaacaaagttaatttctcatgtttgaatgcctagtgtgagaaaatatcattattttcctactttttgtctaaattaaatagtgtatgacctgagaagcataaataaatttataaaattaaacattgcatgtgtataacattttcctcatattaaaagggagctctgaagaatggggctagcatgttttttactcrtatctttacacctgtggcaacggatacatactttgaacaaatgcaaaagatttatacttaatttttcttgaaaatagttgatggctatttatatattccatctatagaataatgcttagtatagggctatagcgcatttcaaaataggtttagaa

SEQ ID NO: 286524 - DNA, 564 bp, Homo sapiens
agtatgaacacctgaaagtgtctccagagacaggtagaagaggatggggctgtagataatgattaaataaaaatttagctttatttatcacattttctatctttaaaatatacagtggaagaatatatgttaatttctgaagggtataaggttatttcttatatatgctttctatttctctgtatctcctaactttccaaaaatcttttatagaaaacaaagttaatttctcatgtttgaatgcctagtgtgagaaaatatcattattttcctactttttgtctaaattaaatagtgtatgacctgagaagcataaataaatttataaaattaaacattgcatgtgtataacattttcctcatattaaaagggagctctgaagaatggggctagcatgttttttactcgtatctttacacctgtggcaacggatacatactttgaacaaatgcaaaagatttatacttaatttttcttgaaaatrgttgatggctatttatatattccatctatagaataatgcttagtatagggctatagcgcatttcaaaataggtttagaa

SEQ ID NO: 286525 - DNA, 565 bp, Homo sapiens
cattttcctcatattaaaagggagctctgaagaatggggctagcatgttttttactcgtatctttacacctgtggcaacggatacatactttgaacaaatgcaaaagatttatacttaatttttcttgaaaatagttgatggctatttatatattccatctayagaataatgcttagtatagggctatagcgcatttcaaaataggtttagaatattttacaatgatatttacagtacctgcttttgggaatcacaaatctttgccatttacctagtataccatttagctcatagttgtaaaatactatctatatgtaacacatatctttagagtaggcaaaatgtaaaaaaaacaaacaaacaaacaaaaaaatacagttaaagtgatgacagctcagtctaaacatgtaaaaaatctattatcttggttaaaattttcttccaaaactttagcagtttggcctatacagttcaaatttcttcttctaagcttttttgaggaaattctacaatggtttaaaacacattgcaatgaaactgacagggaaaaaaataccaaagaat

SEQ ID NO: 286526 - DNA, 565 bp, Homo sapiens
cattttcctcatattaaaagggagctctgaagaatggggctagcatgttttttactcgtatctttacacctgtggcaacggatacatactttgaacaaatgcaaaagatttatacttaatttttcttgaaaatagttgatggctatttatatattccatctatagaataatgcttagtatagggctatagcgcatttcaaaataggtttagaatattttacaatgatatttacagtacctgcttttgggaatcacaaatctttgccatttacctagtataccatttagctcatagttgtaaaatactatctatatgtaacacatatctttagagtaggcaaaatgtaaaaaaamcaaacaaacaaacaaaaaaatacagttaaagtgatgacagctcagtctaaacatgtaaaaaatctattatcttggttaaaattttcttccaaaactttagcagtttggcctatacagttcaaatttcttcttctaagcttttttgaggaaattctacaatggtttaaaacacattgcaatgaaactgacagggaaaaaaataccaaagaat

SEQ ID NO: 286527 - DNA, 581 bp, Homo sapiens
tactttgtgttcctcttatcaacctcttaacgaacaatggtactttaattacatatgaaaaagttgaaagtctttgaaaagttttcctgagtgtaaagtaatatctttagtatggaggctgcccaaatattgaaatctgtcttaaatgttaattattaatgcacaataaattcaagacctataagttcaaaacctactgatgcctgattcaatactttagaataaaaaaaatgttgagggttttaaaatctcaagatacagatataaaataattaaattagaatatttaccgagcatataggaattctaccataaataggcaggaaaagaaaggctgaacttaatctgtttacctaagttcagttattaaaaatatcacagaaatcaacagatactacccaaatcctcaagttggtaacctgaaaaatttcccagtagatgagaatctgggatcttgacatcttccatcccaagctttggttattatgttagmgcccagaaagactataccaatgtattaactaaagagaatttgtctgtatctatgtaatatttggggagttactttatcagtagagaat

SEQ ID NO: 286528 - DNA, 525 bp, Homo sapiens
ttacatcgtcctggtaacttcctttttagaatatttgtggctggtaacaaaaatgggctaattgtctttgaattttcactgattgaatagattcttcccaggcctcctgcccaggtaaactcaaaggggatggtctgggtctccagaaagaggtgccaagtgtaacagtcatatmaagtgattgaaattctctcctactcatcagaaacaggatttatttcttgccatttcattcatcagaaatgggacttcagttttcattggcttatggttacttctcggaggagatgggttctaattatagttggctgatctgactttattttgcctaagacaacaattttaaattaacacaaaaaccaaaaactttttcatggcagttcttgctgattattgcctatttatccccaattcacttatctgaaacagtgttcagagttatttttactcacaatacttctgacaccaattttataggtttttttcttccacccaacaactaactcattgcttctctaaactcca

SEQ ID NO: 286529 - DNA, 588 bp, Homo sapiens
ttgttaagttacttgtaggttttggcttggttgaaaaggttttggcagtcaaatgtatagctagtgtaggaatgatttgtagctataacctcacccatatacctagctttctatttgttatgaagtcacagtatttctagaagagtgatttgtatggtttacctcacccagtgcatgatcyttcacttgaaaaaaaggttgtggtaggggttgttacaatttcaatccaccctaattctgttactgtttgctttgttcagcaatcactgtgatcctcctggcagggaacaagatccagagaacaaaactagtagtgactgtgtagataaaaaggtaatgaattctgcttttaaggcaaagggggaatagtctacaaaagaatgaaaataggaataaaagtgtagcattgttaacctgaagatctattgtacttttgaaaaatcttatactgaaaaaaaaaaaaaaaggtggcactacaaagatacataattatgttgctaaaaatcttgaaaagggtcattgtttagttactggccaaatacttgacaagaaaatagcctagattattcacagttgaaaaaccataga

SEQ ID NO: 286530 - DNA, 588 bp, Homo sapiens
ttgttaagttacttgtaggttttggcttggttgaaaaggttttggcagtcaaatgtatagctagtgtaggaatgatttgtagctataacctcacccatatacctagctttctatttgttatgaagtcacagtatttctagaagagtgatttgtatggtttacctcacccagtgcatgatccttcacttgaaaaaaaggttgtggtaggggttgttacaatttcaatccaccctaattctgttactgtttgctttgttcagcaatcactgtgatcctcctggcagggaacaagatccagagaacaaaactagtagtgactgtgtagataaaaaggyaatgaattctgcttttaaggcaaagggggaatagtctacaaaagaatgaaaataggaataaaagtgtagcattgttaacctgaagatctattgtacttttgaaaaatcttatactgaaaaaaaaaaaaaaaggtggcactacaaagatacataattatgttgctaaaaatcttgaaaagggtcattgtttagttactggccaaatacttgacaagaaaatagcctagattattcacagttgaaaaaccataga

SEQ ID NO: 286531 - DNA, 1183 bp, Homo sapiens
  misc_feature (1)...(1183): n = A,T,C or G
aaccttgtgtgaatccttaatttaaattcataattcaaaatcattggcttgccaaaatggggtaaaaaaaatcaatgttagtgaaataaatgtgtaaacacttgtgcttccattgatgtagattaacattattttcaaaaggtgaaatggagagaatgagaaaaatagaaattcaganaatgtagactatatgtgcttgttagttataacttagtttaaagtatattttaataagactgctgtacttccacaaatatagagatttataatatttgatctaaaatactgagcatagttatagttttrccacagtaaaatggtaatatgtttatagttttaatgttaaacatgaaaatatacgtgactcttctcattttagataaaaatttataccagtatgatttagtacagcattttatgttttaataagatcatccatgtaaaccttagtcatattataacatgtctatcattaatagtaaaatactgttttaaaatattaatatttacctttataattttatacttaatttgcatttttataaataaatacattgttatcaagttcaattaagtggatctaattattaawaaccttgtgtgaatccttaatttaaattcataattcaaaatcattggcttgccaaaatggggtaaaaaaaatcaatgttagtgaaataaatgtgtaaacacttgtgcttccattgatgtagattaacattattttcaaaaggtgaaatggagagaatgagaaaaatagaaattcaganaatgtagactatatgtgcttgttagttataacttagtttaaagtatattttaataagactgctgtacttccacaaatatagagatttataatatttgatctaaaatactgagcatagttatagttttgccacagtaaaatggtaatatgtttatagttttaatgttaaacatgaaaatatacgtgactcwtctcattttagataaaaatttataccagtatgatttagtacagcattttatgttttaataagatcatccatgtaaaccttagtcatattataacatgtctatcattaatagtaaaatactgttttaaaatattaatatttacctttataattttatacttaatttgcatttttataaataaatacattgttatcaagttcaattaagtggatctaattattaa

SEQ ID NO: 286532 - DNA, 467 bp, Homo sapiens
gagatcttgcttctgaggcacttccagtgaccttcaatttaaggtacttggcaagccaaagtgacatactttggtgtgttgtattctgagycccaacgtatgtaaaattttaatgagttgtccccaaacttaaatggatttcagtcaacagaaaaaaaatgctaatttccagaattggaatctcaaatttaagatatttatttgttatatttgtttataacataatttaattgaaatatacagctgatttaatggctaattcagactattcagcacaagtaattatattttagttacagcagttttattaggtagatgttaaggtgaatgataatagaaacagtaataatgataatgataataaattgtttactacttactgtcaggaattatggtttatgatcacatttaatactcccaacaaaactgcaagatgtaggtattactatcctcatttcacagatgag

SEQ ID NO: 286533 - DNA, 467 bp, Homo sapiens
gagatcttgcttctgaggcacttccagtgaccttcaatttaaggtacttggcaagccaaagtgacatactttggtgtgttgtattctgagccccarcgtatgtaaaattttaatgagttgtccccaaacttaaatggatttcagtcaacagaaaaaaaatgctaatttccagaattggaatctcaaatttaagatatttatttgttatatttgtttataacataatttaattgaaatatacagctgatttaatggctaattcagactattcagcacaagtaattatattttagttacagcagttttattaggtagatgttaaggtgaatgataatagaaacagtaataatgataatgataataaattgtttactacttactgtcaggaattatggtttatgatcacatttaatactcccaacaaaactgcaagatgtaggtattactatcctcatttcacagatgag

SEQ ID NO: 286534 - DNA, 467 bp, Homo sapiens
gagatcttgcttctgaggcacttccagtgaccttcaatttaaggtacttggcaagccaaagtgacatactttggtgtgttgtattctgagccccaacgtatgtaaaattttaatgagttgtccccaaacttaaatggatttcagtcaacagaaaaaaaatgctaatttccagaattggaatctcaaatttaagatatttatttgttatatttgtttataacataatttaattgaaatatacagctgatttaatggctaattcagactattcagcacaagtaattatattttagttacagcagttttattaggtagatgttaaggtgaatgataatagaaacagtaataatgataatgataataaattgtttactacttactstcaggaattatggtttatgatcacatttaatactcccaacaaaactgcaagatgtaggtattactatcctcatttcacagatgag

SEQ ID NO: 286535 - DNA, 576 bp, Homo sapiens
tgttgtattctgagccccaacgtatgtaaaattttaatgagttgtccccaaacttaaatggatttcagtcaacagaaaaaaaatgctaatttccagaattggaatctcaaatttaagatatttatttgttatatttgtttataacataatttaattgaaatatacagctgatttaatggctaattcagactattcagcacaagtaattatattttagttacagcagttttattaggtagatgttaaggtgaatgataatagaaacagtaataatgataatgataataaattgtttactacttactgtcaggaattatggtttatgatcacatttaatactcccaacaaaactgcaagatgtaggtattactatcctcatttcacagatgaggaaactaaaggtaaaataacttaaatattttaccagctaaagcaagtagagttggaagtgagatatagacctgattcaaaattctgtttcccctaaaacatactgcttcttaataatatttttgtatcaccaaagtcactgtttaaaraaaaaatgtggaccaatcaaggcaacacaatgcgacc

SEQ ID NO: 286536 - DNA, 585 bp, Homo sapiens
tcaactactgtcgatttggtattcagaaaaaatactgtcagatcctttgaaatatcttgggaggtcttgttctgagcttattgactgaaatttgcatgcaaaattagccacaactgcatgagtacttgaataggtgccaggaaacccaaaagaaggcaatgcttgatttctttcagtgatgctattttcatgcagtcatgaggcttgaaattgacagtttggcaggttgatttaatytgctggccctttgcatattcaccactgacagctaaggattcccaggcaagcctactaagtcggtttagttatcttgtgacataccaacctgggaggagaaacaattttcccccttaatttagttagataaattttgaatgacccatttcagcttgttaccagatgtctacaagctgtttaacatcctttaaattaagaaccatcttcactaattattttatgtatgtattatgcaaagtcattgtattaactttaattgaatggtggttaaaaattagttctttaaagttatagctctaaagattcctagtcttaagatatgtacccctagtgaacagcaacaggagg

SEQ ID NO: 286537 - DNA, 608 bp, Homo sapiens
ttgcgtatgtatctaggagatcaaacaaggatggctggctaggttatcccctctccacctcattccaaaaatgaagcacggcagcgtctaaaatacaggctaatgaagagcgacacctccaacagatgagagccacactaattaacacaatccctagatcatattatccagtttctgttagagctagcaactgtgcaacttgttattgcataatacatatatatatttttaaaagctagtctttttttctttacttttattggcaaaaatcagattatttcaaattttataaagtgtttctttaatagcttttaagccatgaaaaaatttctcccaagtattttatctaagtccatattgttaaaaatgaaactcacttttgaatcattagctcctggttttcccttttgaaatatgccagttcattccacacagcrtcagaatcttcttgtcgaagttgttggggatctgctctctttattttcctgatttcagtcctatttttaaaacaaagttgctttttcaattaacatgtctgaagtgcaataaaaattattttatacattccttaaaatttaaaaatatctattgaccaaatttctaactcg

SEQ ID NO: 286538 - DNA, 586 bp, Homo sapiens
tataaatcaaatatggtccctctcattatacaaattgcaggttagaattaggaaaattttgcgtatcctctcaaaaaagaaaaaagcaggcacaattggaaaaggatgatgtttcccattgttggttcaaaaaagttaaccgtatatatttttctcatagtacttaggaatatcatttaggaaggatggggcccttcatcagtttaagtgcaaatattttcagggctactagatccttattgataatgttagaatcataagatttgacatttgtttgcctgtaagtcaacaaaaactgttttcatgtgattctgtgtttttgtttttgtaaatgtagttgttaatttgaaacagcgaatttgcatgggttttaatggcctcraatacattcagtggagatggtagtcaaattttgcagaattccagttttcatgaacaggtttcctacaagattagttttcctgtgacttctgttgttaaaatgtggagcttaccattagcagtttatctgaaacatgaataaatttcaaaggagaatgctgtaaactatattgacttaaaattgtcagggttctttgaggagttg

SEQ ID NO: 286539 - DNA, 485 bp, Homo sapiens
gttactgataccatttaaaatgggattttaaaaaactaaggaccaacatatgtaaaaataccaaaaaaagtctttcatagcatagagtagaaaattcctttatatagaaaaaagagatttgcaaagttttgacctatactatattattcaaggtatttctcatagatttcactgaaaagctattttttccaacacacaaaattccacataggaacttctaccatcagccttcccttcattttctattcagaattgttttctgtttatcatattctttcaagtaaaaaggcttgacctaacaaagtaggtcactcaataaataaagtcaaataaatacctgactctcaggcagttatgctacatcaaggacaatgattcatgtagayctttagtaagagggtaagtctaggtgttcttccatttttattaatcaagccagttgatctgcttttcttctaaatcagtagttctcaaatagtacatac

SEQ ID NO: 286540 - DNA, 565 bp, Homo sapiens
tcataacaacataacttcaatcacatacaaaatattcatacgtttacttctcacatgtaatttggtgaaacaaattacatctttttatattatgtattcattatcatatttttagttatgttttttaatacctattattgtaatttctatgccagaataaaaagtgattacacaccactgtttacctttaccagtgacctttatactttcacatgcttttaagtattgctgtttagcatctttttgtttcaacttgaagaactcagtttagtatttcttctaagaaaggtctagtggtgatgaagtccctctacttttgtttgtctgggaaagtctctttcactttcatttttgaagacagttttgccagacataatattcttggttggcacgtttttatcttttaaaggtggtgtacacttctttaagtttatttcttaaggatgtttygtatatttacagagttgtgcaattatcaccacacactaattgtagagtacttctaaagaacctcatgcccatttacagaaactcctttcccatccctggctctagtcaaccactg

SEQ ID NO: 286541 - DNA, 565 bp, Homo sapiens
tcataacaacataacttcaatcacatacaaaatattcatacgtttacttctcacatgtaatttggtgaaacaaattacatctttttatattatgtattcattatcatatttttagttatgttttttaatacctattattgtaatttctatgccagaataaaaagtgattacacaccactgtttacctttaccagtgacctttatactttcacatgcttttaagtattgctgtttagcatctttttgtttcaacttgaagaactcagtttagtatttcttctaagaaaggtctagtggtgatgaagtccctctacttttgtttgtctgggaaagtctctttcactttcatttttgaagacagttttgccagacataatattcttggttggcacgtttttatcttttaaaggtggtgtacacttctttaagtttatttcttaaggatgttttgtatatttacagagttgtgcaattatcaccacacactaaytgtagagtacttctaaagaacctcatgcccatttacagaaactcctttcccatccctggctctagtcaaccactg

SEQ ID NO: 286542 - DNA, 587 bp, Homo sapiens
catgttagctattgtcattcttgttttagtagtagcagcagcagcagcagcagtagcagtggttctcacagcatctaccattttatacttaatagttcatcaacttatgctaaacagctgtgtggattgaatctcaaattatattaaattagaagatattatggctaatttagtttcattacaagagtttgcatttgtttattgaagtataagatttttttcttatcatttttatgcttttgattatcttcatatatcactttgatttttcacagcaatgtaaaaatgtaatttaaatgaaatagttctaagttttcataagtgttattaatttttctcatttcttatatattttgttttaatacatatatgtaattatataattaccaagtcacaactatagattttacaagtgttcaaaatattaaaagaacaatatcttatgcagtgcaattcattttactgatttacagtgtcaatatcacgtagcatttaaaaastaacagtaggtataatattggataaaatgtaagatatcaccactgttaaggtattttctgtcactcttgatgtcacctttttttttt

SEQ ID NO: 286543 - DNA, 607 bp, Homo sapiens
tcgtgtttgtttcatttttaacattgttgctttttccttcccaaaaccacaagctacttaaacacttcagataagtgcaaagaggatttgtatctctacatgaaacgccaaacattggtttaacattaaagatatttctgtattagagaaaacaggttgtgtttgtcttgatagtttttaagaaatgaaaactattattgaacactggtatttatacaagtagatctaaattttgtaggcccacttaaactttcaaactaaatgtttccatgttatgtggaggatcttttggtctaaaatagcttccrtgcttttaattatttgtaatctttaaaaatcataaactaatttagatgataagtatatgagaatatgtacttaggatgttttattgaaagttaatgaaaataatcattaattttacccaaataataaatacatagagagaataataaaatattttccttatttgacatgtataactaactcttccaaatctgtttataaaatatcttttattttatgactgctgatcttttgcaggatctcaagcttactctcctagtatcaagaataagtgagactgaatctgcaatggcagaaattg

SEQ ID NO: 286544 - DNA, 539 bp, Homo sapiens
cttagaggaaacaaactgcaaagctcatacaggtgcagtagtagtttatgctctgactagccgagggaaaaaagkggggcacgctatactaacgtgaacaaagtaagaatgacagcagaattcttatcagaaacaattcacaccagaagacagtggagtaattaactgctaaagaaaaaaaaaaatctgtcaatgtagcattctatacttactgaaaatacctttcaaaatgaagaaaaatagggattttttcaggtgtatgacagctgaaagaatttcactaccagcagatgtgcactctaagaaatattaaagaagtccttcaggcagaaagaagataacaccagatggaaatatggatctacagaaaggaatgaagagcagcagaaatggttctcagcaaaaaacactgagaactaccaggcctggttagatccaacacactctgctgaagccagacaacaatttgaaatcctgggtcaccccttctacaatagaaaacactctgtagttggtggagcaaagtgtacatttaacaa

SEQ ID NO: 286545 - DNA, 539 bp, Homo sapiens
cttagaggaaacaaactgcaaagctcatacaggtgcagtagtagtttatgctctgactagccgagggaaaaaagtggggcacgctatacyaacgtgaacaaagtaagaatgacagcagaattcttatcagaaacaattcacaccagaagacagtggagtaattaactgctaaagaaaaaaaaaaatctgtcaatgtagcattctatacttactgaaaatacctttcaaaatgaagaaaaatagggattttttcaggtgtatgacagctgaaagaatttcactaccagcagatgtgcactctaagaaatattaaagaagtccttcaggcagaaagaagataacaccagatggaaatatggatctacagaaaggaatgaagagcagcagaaatggttctcagcaaaaaacactgagaactaccaggcctggttagatccaacacactctgctgaagccagacaacaatttgaaatcctgggtcaccccttctacaatagaaaacactctgtagttggtggagcaaagtgtacatttaacaa

SEQ ID NO: 286546 - DNA, 601 bp, Homo sapiens
ttcttttcttttactaattttgggtttgattagctctagcttttctagctcttcaagatgcatcgttaagttatttgaaatttttcttcttctttgatgtaggcatttatagctataaacttccctcttagtattgcttttgctgtatcccataggttctagtatgttgtgcttccattatcatttgtttcaagaaatttttaaatttcctccttaatttcttcattgacacacgggtcattcaggagcacattgtttaatttccatatgtctgcagagcttccaaaatttttcatgttattgattactagtgctattccattgttgtcaggtaagatgcttgatattatttcaagttttttgaatgttttaagagttgttttatggcttaacacacagtctgtcctcragaatgatcgatgtgctggggagaagaatgtgtattctgcagccattggatgaaatgttctgtaaatattagctccatttggtctacagtacaaattaattccaatgtttctttgttgattttctgtctggaagatctgtccaatgctgaaagtgggatactaaagcctgcagctatcattgaattagggtc

SEQ ID NO: 286547 - DNA, 533 bp, Homo sapiens
cttactctgttgcccaggctggtgtgtggtagtaccattgaggttaactgcagcctcagccttccaagctgaagcaatcctcccacctcagcctccagagtagctgggactacaggagcacaccaccacacctgactaatttttgtaatttttttctttggtagagacagggtttcgccatgttgcccaggctggtcttcaacttctgggctcaaatgatcctcccacctcagcctttcaaatgcagggattataggcgcaagccaccacacccagtctaatttccttgttttttaaaataaaatattgagcttgtatatgtttttccagcaatatagttttctaggaagtgtctattttataattttakttaaaacatctttatttccttgctgagacaaaatgtggatatacacatacgaaaaaaaagtaagctcaaataattgactttggacaattctacacttttattcagtgtaaacatcgaagttcttccacactgatgtcactatcattcgctcccatttcggtcc

SEQ ID NO: 286548 - DNA, 560 bp, Homo sapiens
tgcttaacaaatggaagcatgggcaacgtggagaaacaccacctctaccaataataataataataataaaattagccagggacagtggcttgggcccatagtcccagctactgggggtgggttggtagctaagatgggaacagcaccagagtctggggaggtcaaggctgaagcaaaccrtgatcttgccactgcactctagcctgggtgacagactgagaccctgtctctggggaagaaaaaaaaaaaaaaagcaaccaaccataacttggtcaattatctgaaaagctgctgccatttttgccttagagaattagttggttagaagaatttaagtttatgacttaatgaaactttgtaactactttgaccataacagactttaaggtatattttcttcttagcatgttgcctccgcatattttcattttcgctttgtggaaataccctatgctcttccttaaaatttttaacattcatactgtgcctggaattggtgggttgttggtctcactgacttcaagaacgaagccgcggacccgcgcagtgagtgttacaga

SEQ ID NO: 286549 - DNA, 560 bp, Homo sapiens
tgcttaacaaatggaagcatgggcaacgtggagaaacaccacctctaccaataataataataataataaaattagccagggacagtggcttgggcccatagtcccagctactgggggtgggttggtagctaagatgggaacagcaccagagtctggggaggtcaaggctgaagcaaaccatgatcttgccactgsactctagcctgggtgacagactgagaccctgtctctggggaagaaaaaaaaaaaaaaagcaaccaaccataacttggtcaattatctgaaaagctgctgccatttttgccttagagaattagttggttagaagaatttaagtttatgacttaatgaaactttgtaactactttgaccataacagactttaaggtatattttcttcttagcatgttgcctccgcatattttcattttcgctttgtggaaataccctatgctcttccttaaaatttttaacattcatactgtgcctggaattggtgggttgttggtctcactgacttcaagaacgaagccgcggacccgcgcagtgagtgttacaga

SEQ ID NO: 286550 - DNA, 560 bp, Homo sapiens
tgcttaacaaatggaagcatgggcaacgtggagaaacaccacctctaccaataataataataataataaaattagccagggacagtggcttgggcccatagtcccagctactgggggtgggttggtagctaagatgggaacagcaccagagtctggggaggtcaaggctgaagcaaaccatgatcttgccactgcactctagcctgggtgacagactgagaccctgtctctggggaagaaaaaaaaaaaaaaagcaaccaaccataacttggtcaattatctgaaaagctgctgccatttttgccttagagaattagttggttagaagaatttaagtttatgacttaatgaaactttgtaactactttgaccataacagactttaaggtatattttcttcttagcatgttgcctccgcatattttcattttcgctttgtggaartaccctatgctcttccttaaaatttttaacattcatactgtgcctggaattggtgggttgttggtctcactgacttcaagaacgaagccgcggacccgcgcagtgagtgttacaga

SEQ ID NO: 286551 - DNA, 511 bp, Homo sapiens
gcttttccttcaacctaaatttttttcttgtgttttactttattggatttattacaaaacacatgcttattttaatatatcaaactatacagcagaaagaaaagctaataaatcttcctcccctcaaaattccattcccctgagacaaccaaatccttgaacggcctcaattcagacaaatattgtgacttctttcttttgctttttgttttgttttgtttttaaactagtattatgcaatactcactgyttggtaacttgcttttttgctttactatttgtagctctaactcacttttaaattatcactttccatataatgaagaaaccataaatatattcaaccagtcccataaaggtaaatttagtttgtttctggtctttttgctttacaaacactgttgtaataagcatccttgtaaatattaatatatccttacatattaatattttcatttctattgcaggagttccccaaagtggtttgctgtaacaaacaataagcatgttt

SEQ ID NO: 286552 - DNA, 528 bp, Homo sapiens
gaaaaaataagtatagcatggtcacaggatcagatgtttcacaaaaataaagagtaaaactgttttgggtcaagatggcaaaagatattctgtacaaccccctaagacgtttggactttatcctatttataatgggtaatcataaaaggtttttaaacagaggaatgacatcatatctttgttttgtacatataaaacaaagattggattcaatggacatttgtggagtagtattaaaatgatttktacttcattccatgagacagggagaaaggtcttattaatgacaccgatatctaacttgggcagacaatgattactaacagataaaagctgcttcaagaatccacataaatgcacattaaggtatttactcatccctgcagagtcctcatcaatttctaggcaaacctagagcttaaaattagtttagtggaggttctgcaaaatagcatgtactagttttaattgacaccttcatcatagttcatatctcaaagcatggagaatctttaaattggctgaaat

SEQ ID NO: 286553 - DNA, 595 bp, Homo sapiens
atatttcttaggcaaaaacaacagcagatattcagtggcaagcgtggattttcaacttaagagaaaatgaaagaaaaagagagaacccaatatggatgcttcaggtggtgtggaggtttaggaaattgctctgccaatgatytcctttaccatgttgcatatttgtaaatatcacctatagttatccagaaaaccaaagaggtggaatacccttacccaatgtcctgacctccctgcccagctctatttttttaaaatccttgtttgattttattggattggccagctaaaatttaaagcaataaatcatgaccacattttgtatccaaatctatacatttgtttagatttccttaaatatatatgttcatattgcatagggtttacatgctttgatattctctaggaactagtatttcctttgtatcaataaatgttcattatttttaacttatatgatgattcattgtatttgcttaaaaaaactccagcagtctattattagaaaataaattattcctagccatatgataacacttaaaaataactttaaggaagtctttgtgatttacatttttgtttcagtcttgggagg

SEQ ID NO: 286554 - DNA, 595 bp, Homo sapiens
atatttcttaggcaaaaacaacagcagatattcagtggcaagcgtggattttcaacttaagagaaaatgaaagaaaaagagagaacccaatatggatgcttcaggtggtgtggaggtttaggaaattgctctgccaatgatttcctttaccatgttgcatatttgtaaatatcacctatagttatccagaaaaccaaagaggtggaatacccttacccaatgycctgacctccctgcccagctctatttttttaaaatccttgtttgattttattggattggccagctaaaatttaaagcaataaatcatgaccacattttgtatccaaatctatacatttgtttagatttccttaaatatatatgttcatattgcatagggtttacatgctttgatattctctaggaactagtatttcctttgtatcaataaatgttcattatttttaacttatatgatgattcattgtatttgcttaaaaaaactccagcagtctattattagaaaataaattattcctagccatatgataacacttaaaaataactttaaggaagtctttgtgatttacatttttgtttcagtcttgggagg

SEQ ID NO: 286555 - DNA, 567 bp, Homo sapiens
ttaaaaacactcaaacaaatggagagatatatttatgaattggaagactcagctttctccttgaattcatctatagtgtcagtgcaatgcccataaacatttcaacctagaatagccaaagcaattttgtttgtttttgatacacgttcttgctctgtcacccaagctgcagtgcagtggtgttatcttggctcactgcagcctcagcctcctgggcccaagtgattctcccaccttagcctcccaagtagctggggccacaggtgtgcaccaccacacccagctaatttttgtattttttgtagagatggggtttcattgtgttagccaggctagtcttgagctcttggctcagggatcctcccaccttgtcctcccaaagtactgagataacaggcataagccacgacgcccagcccaaaagccattttaaaaagaacaaaagagtcacattaccygattactataaagctacagaattggagaaaggagagatacatgcatcagtggaacaacatagaaagtccagttaaagactaacatatattatcaattttcaacaaaaat

SEQ ID NO: 286556 - DNA, 492 bp, Homo sapiens
aatgcagaaggtttaaatcaactggctgtgaggagaatttccaaggtcttcttggatggtaaaaaatattcatttcagtaatccctaaatgaaaatttagctatttctttaattatgaacataggcataaaccacagtagtatgaattgtgactttgtcactgtagtaattatgaatactattatatttcattatctttgttgaagatgtcttgaagtattatttatgctctttactatttaaaaattatagttgttattagacctactatttgtacaatataatgcattaataaagaagcaaatatattatcacaaatttgttttttaaaatrtcttaaaactgtgatattgcaatacagtaaatatatttcaatgatgtcattgtctttagctaatttgtttacttagaaagtatgtaatcacccaagataatggaggtcaggagaaataatggtatttcaatttgtttgtcttccttaccagccctgtt

SEQ ID NO: 286557 - DNA, 587 bp, Homo sapiens
ctgctgcactccagcctgggcaacagagcaaggcttcacctcaaaaaaaaaaagcctcaggcctattttttgtaggtttagttaacctacctacaaacttactggctttccaaaccaactttctggctttccaaacatgtctgtgaaattggagagctaaattgataacatctgcaacagctaatatttatcaagcattcacccattctacatccatcacctcatttcatcctaacaacaatttaggtagcagcataatcattattccatcataaatgaggaaacaggcaatatttcaggtttgcgtgttctaraacttgcactcttcaccactgtgtgattactactagattgagtaagcctcagcaccattttgcttgaattgactttgatcttgcattgttattccaggccagggttcaaacatctcctatctgactgttaaaatttacgatttgagttgccactatattatcagctgagtaattggatcagacctgctcctggatccatagtggtagtatttgtctttgttctttacagagcctcattatattgctcgaatatcatcttgaaaaaaacataga

SEQ ID NO: 286558 - DNA, 591 bp, Homo sapiens
ctgtgcaagaaagttatatgggaaaatgttttctgatgccagcattttcatgcggaggaaaaaaattttaaattacctttattattactgttacagttgcatctcattggcatattcatttcaagttcaagatcatacttttttaatgtatctggcacaatttcatttttaaaaattctctttaaaccattgatgctattgatttggtgtccctgcttttctttattttgtagttatctaagcatttcctgcagatgtctttttttttttaaactagaattcatcttatttcctctattttactttgtgttctccccttttaaggaacttactatgtttataagtcaattaataatgtgcatgtgtaaatcaccgtcatggtaaayatatggaattctttcatgtttgctaaatgtttgtttctttacttttttagggtggctttggatcagattattcacgaagctctagaaaggtaatgaaaattatcactaaactcaacaaatatattattttgtgtggacaagtttcttcttacaattataaacatagagttgaatgaattatttacaggagatggtccttttaaac

SEQ ID NO: 286559 - DNA, 579 bp, Homo sapiens
catattcgctacacaattctgtggtacacttgaattatctttttttttgacagagtcttgctctgttgcccaggctggagtgcagtggtatgatcttagctcactgcaacatctgcctcccgggttcaaacaattctcctgcctcagtctcccaagtagctggaaatataggcacacaccaccatgcccaactaatttttgtatttttcatagagatggggtttcgccaggttggccaggctggtctcgaactcctgacctcaggtgatctgcctgcttcgacctcccaaagtgctgggattacaggcgtgagccatggtacccggtctgaattgtcttcctaaaatgatttttttttttgtttttgttcagtgaaaggactgagtgatgctggtttttttcatgaaggactcctragaatgataatgtagtctagtaagactttgacattggttcagtaggctcatcatgatactagctgggttccagcaggatgttgtaatgttgctggtcaatattaactgtgtcaccagtaataagctaaagtcagatttatctgggtcaggcacacaattttat

SEQ ID NO: 286560 - DNA, 539 bp, Homo sapiens
tgtgtgtgtgtgtgtgtgtgtgtgcsttgtataaatgtttaatgactttgtaatcatccattgaactttgcaagacatgtgaaagtctatttttgacatctattagttctccccagataaaaattagatttagagttccaaaagatatttcccaaaatctaacctctcccttcatacatatttcttatttggggacacctctgtctagttttcctgaaacttctttttgtttgttttcaaatatgtttctagtttatttttggcatgctttgtgtagatagctgaattcaaaataaacaatgagctaccttattggctttgttctcatctatattcgtagatgagaatggctaagctacttacctgacagcaaattatttgatccaggtaactaaataatcagtccttcatagaactatgtttttgaaatcattaatatctaatatctaatcaaatgttacatataaccttgtaacttaaaacttcagtatgcactcacatattttggggctctttattcaattagcagattatttatt

SEQ ID NO: 286561 - DNA, 579 bp, Homo sapiens
gccagaggattgtcacaattatgcatattagaactatgcatgccaatgtctattgtacttcatgtagggagcaaattttttcttatgtttattttgactgattcagcacttgatgtcaaagggcatggatcttattcaccttagttttctttagcagcacctagctagcatgggactttaaagcaggagcttgtaaattttttttttttttgtaaagtagtagatagtactttgtgagctattcagtccctgttacagctattcagctctgctggtgtagctctaaagcagcctagctaatatgtaaatraatgggtgcagctgtgttccaacagaacttcgtttacaaaaacaggtaacaggctggatttggccccttgccactggttggagatcccttccttagagcataagtttagcaaattatctatcagtcagaaggataggctgcactgtgtaacagataactcgatgatctcaggggctctgtacatcagtgcatattgtttgcttatgctttctgactagtgggaatcggcaggagatttctgctcattctagaccctcagggacccaggc

SEQ ID NO: 286562 - DNA, 579 bp, Homo sapiens
gccagaggattgtcacaattatgcatattagaactatgcatgccaatgtctattgtacttcatgtagggagcaaattttttcttatgtttattttgactgattcagcacttgatgtcaaagggcatggatcttattcaccttagttttctttagcagcacctagctagcatgggactttaaagcaggagcttgtaaattttttttttttttgtaaagtagtagatagtactttgtgagctattcagtccctgttacagctattcagctctgctggtgtagctctaaagcagcctagctaatatgtaaataaatgggtgcagctgtgttccaacagaayttcgtttacaaaaacaggtaacaggctggatttggccccttgccactggttggagatcccttccttagagcataagtttagcaaattatctatcagtcagaaggataggctgcactgtgtaacagataactcgatgatctcaggggctctgtacatcagtgcatattgtttgcttatgctttctgactagtgggaatcggcaggagatttctgctcattctagaccctcagggacccaggc

SEQ ID NO: 286563 - DNA, 535 bp, Homo sapiens
caaagctgctgtctctgtggcagaaacattctgtgcttcttgactgtgtttagggcagtgcaggtctcagatcacattacacactccccagctgccctggccacacactgtgcccacactccccactgcacgccatcctgagccccaggaatctggttattttctgagtgtctggggtatttcacacctgggtggaaaccccctcaccatgccttccatccatttaaacacagccaaattactattatgagctgtcatttaagcatctttagaagcatgccagatacattctgattcaggaaagcataaggttctaggagcaaccacagacaaccactaagatgaaaacagagcactttgagcagataactgacagargtacaaagtgagagtggggtaacaagtgggaaagggagaaagaaggggagagagggttcaggtccattcctaggggctgggagccaggaataaatcatatcagttccacacacagtaacattgttattcaggagacatagcattcaaatgaatatta

SEQ ID NO: 286564 - DNA, 589 bp, Homo sapiens
agcatctttagaagcatgccagatacattctgattcaggaaagcataaggttctaggagcaaccacagacaaccactaagatgaaaacagagcactttgagcagataactgacagaagtacaaagtgagagtggggtaacaartgggaaagggagaaagaaggggagagagggttcaggtccattcctaggggctgggagccaggaataaatcatatcagttccacacacagtaacattgttattcaggagacatagcattcaaatgaatattaactttttcaggagaaatgggattcaaatgaatgtaaaacacagccatacaggaaaaaacaagtcacagagggctaatttttcaatggtatgtgtgggggacttaacagtggttgaggacatgacgctaaaatattaaaccaaaagaacagatctgttgaggctgaaatcgtccccattttttacctagcatataaagggggtttgtgtccatattcaaccaagattccttctcctacacctgaaacaccagtcccagagaaagacatgagttagagggatgcttagatgctttacccagggctgagcaggccaag

SEQ ID NO: 286565 - DNA, 594 bp, Homo sapiens
ggggtttgtgtccatattcaaccaagattccttctcctacacctgaaacaccagtcccagagaaagacatgagttagagggatgcttagatgctttacccagggctgagcaggccaagcatagggattcaagtgacacgctcagagagccacgtggattttaccaaccacagggcagctatttgagctaatttctatttgaggtgtgcgcattaattataataatacacatctcagtaagtctgggatggccagaattctgaatggtgttgggcatctaatcatcatgttctacatttctgctcagacactgaactgctatttaaccacagtttccattttctgccactattcagtaacattcctcttgtcatgcaatataaaaggyagaacatctcaagacggcaaaataaacctttcaagttcttcagtgattcaacccttgctcatcttcaaaacacagggaaatctggggaactggcagtacctttactgcttctaccgctcattgacttcaatcgggtgaaccttgtttattagtcgtgtgtcttttgagggatgaggatgaggtaggtgctttatacaaattcttcat

SEQ ID NO: 286566 - DNA, 594 bp, Homo sapiens
ggggtttgtgtccatattcaaccaagattccttctcctacacctgaaacaccagtcccagagaaagacatgagttagagggatgcttagatgctttacccagggctgagcaggccaagcatagggattcaagtgacacgctcagagagccacgtggattttaccaaccacagggcagctatttgagctaatttctatttgaggtgtgcgcattaattataataatacacatctcagtaagtctgggatggccagaattctgaatggtgttgggcatctaatcatcatgttctacatttctgctcagacactgaactgctatttaaccacagtttccattttctgccactattcagtaacattcctcttgtcatgcaatataaaaggcagaacatctcaagacggcaaaataaacctttcaagttcttcagtgattcaacccttgctcatcttcaaaacacagggaaatctggggaactggcagtacctttactgcttctaccgctcattgacttcaatcgggtgaaccttgtttattagtcgtgtgtcttttgakggatgaggatgaggtaggtgctttatacaaattcttcat

SEQ ID NO: 286567 - DNA, 511 bp, Homo sapiens
gatcatccataagaagtaactcctcatccattcaagttttatcatgaggcatgtcatgtcttcaggtttctagttctcttgcaattcaatcatgtcttcaggtttctagctctcttgctatttccaccacatctgccgttattaatacttcctccattgaagtcttgagcccccaaagttgtctatgaggattggagtcaacctcttgcaaactcctgttaatgttgatattttgacctcctcccaagaatcacacatgtgcttaatgggatctagaatagtgaatcctttccaaaagatattcaatttactttgctcagacccatcagacaaacaackacttatggcagctatagccttagaaaatgcatttcttaaataataagacacaaaagttgaaattactccttgatgatgggctgcagaatcaatgttgtgttagcaggcctgaaaacaacattagtctgcttgtatatctccatcagagatcttgggtgatcaggtgcattgt

SEQ ID NO: 286568 - DNA, 542 bp, Homo sapiens
tctttacttttgtaccatcatttatctcgtaggactatatgttccattggaccatggcccagaatatatactttcattgtcaatgattactgaagacttggtcccttgagtgcttcatttagtgattattttttaaggggcaaattggagaaaaatgtttatatgtttaggattctactaggtaaggaattccactgcagtgagtttgcttattttttagagaatgtcagaaaaaggattttcactatttcagttcagctgccttttccatcttaagaataaaaactaacttactttatttaaactagtgtttatggtttgtgtttcttctaagggtagacttcgtaactgtatctcattctttctttttctttctaccagrccaccatagctttgccttatgtgtgagagctgtacttgtttcctctctgatgaatctcacattatccaaacatacattcattttttaagggcgagtcaaaggaatgtccatttctaattttcattccctgttcttaatgctgctggaattatattgtatt

SEQ ID NO: 286569 - DNA, 594 bp, Homo sapiens
aaacctgatctgacctacgtgaagctatttatagtctttattcatcctacttagtgtgagtattcatatgttttgctgaaaaagtaaaaattctttgcttatgggatgctgccccaagacactgctggggatgttcataatatttatacatasctttctaagatgaaaaagttctgaattccaaagcttggctggctgcaaggatttcagatcatgggttgtgaatctgtattgagttctgagctgggactgggagccagtaaggttagcttggggtgagaggaaaggggcttgtttttgtccttaataaattccagataaagtggtgctctgtaatgccaagcactatagcaaaggtctgtagtgcagttttcagtttggtaggaaaaatatttctagaagcactctaacagaaaactgcttgcttaatcataaatctgaacatttggaccaggtggttttcaagatgatatttataaagcttggttttttaaaaacccagtgaatttaatgaattgtgatttatcaataacaaaaggaaaaaaagagtcctgattactattcttgaaattcttaattttttgttgttcataa

SEQ ID NO: 286570 - DNA, 637 bp, Homo sapiens
taactaatgctaactatcactagttatcactagttaaaattacacaagaggctgctacagtggagagaggctagggctcagacacaattcatgatcagagtagccagggaaggtctggctgatatgactcttgagtggtgagtgtgctcagtcaccacagggacttgggtccactctggagagaagacactgcaggagaaaggaatggcttgggaaaggccttgtggtgctcaggctctgaggaagaaacatcatttgacctcatcatggactgtcccagttggcatgaactttaaagatttcttcacacactcctcaaatgtttattttattttttcttcccagaatccaaccaatgttttgtgaattttaaaygtcacgaaaaatattttagggtgttagctggggatacatgatacctgaacagtacagcatcctgtgaatttttgctgagtgaatgaatgatgaacttttattttactttccactttccttgttagccactgtgccttatgtacgtgaggaattttaaaacttcttgcaggaaaccacatctctcaagcctccatttaacaattactttcccccttggtacccagtctactcaataaaacggaaataaaaatatgtacatcag

SEQ ID NO: 286571 - DNA, 616 bp, Homo sapiens
tccttctccttgacaagctggaaaaaccacagaataggaaataactcatgggattagagatctaactttaatttttacctctcttcagacaagatttttttttttctttttgagacagagtttcgctcttgctgcccaggttggagtgcaatggtgcaatctmggctcactgcaacctctgcctcccaggttcaaactattctcctgcctcagcctcccgagtagctgggattacaggtgcctgccaccacacctagctaattttttgtatttttagtagagatggggttccaccatgttgaccaggctggtctcgaactcctgacctcaggtgatccacccgcctcagcctcccaaggtgctgggattacaggcatgaaccaccacgcccagccatcagacaagtttttaaataaggtctcacaagtgttcacggtaaaaataaagattttcaggacacaagtatctactaaactctaaccttcttttgagtgctgctctattggatctccttccttctgcactcttcaagttaccctcctctctcttcccctaatgtgactacaatgggggaaggaagaatattcagaggagtagtccaattagaagcatgagt

SEQ ID NO: 286572 - DNA, 480 bp, Homo sapiens
ttgcagcctacctgcgcaatcataggagatggcctaaaggaaggacttgagaaactgcatgatatgatcaytaaagaaaagatgaatatcaatacctattatatctgtgtggaggaggttttctctggtctgattttgacaaatggaaaagtgtctacagcctggtttgcctgtctgccctcctggatgctattaaagctttgtattgttcaatgatcagatgcctaactctgttgatttgtagaggatgagtaaatgcatgcttcttaaagtggtatcttctccctatcccacaaatcttttggtactaccatttggggaagccaagcaaggatagtaaattgaccagaacacagttgtagaaatttgacctgaagttagtgaaataaaactctaaagagtgaaaaaaaaaaatgtggacatggttcttaatgcccctccctcagttattagaaaatgctcattaaagttctggactaa

SEQ ID NO: 286573 - DNA, 480 bp, Homo sapiens
ttgcagcctacctgcgcaatcataggagatggcctaaaggaaggacttgagaaactgcatgatatgatcattaaagaaaagatgaatatcaatacctattatatctgtgtggaggaggttttctctggtctgattttgacaaatggaaaagtgtctacagcctggtttgcctgtctgccctcctggatgctattaaagctttgtattgttcaaygatcagatgcctaactctgttgatttgtagaggatgagtaaatgcatgcttcttaaagtggtatcttctccctatcccacaaatcttttggtactaccatttggggaagccaagcaaggatagtaaattgaccagaacacagttgtagaaatttgacctgaagttagtgaaataaaactctaaagagtgaaaaaaaaaaatgtggacatggttcttaatgcccctccctcagttattagaaaatgctcattaaagttctggactaa

SEQ ID NO: 286574 - DNA, 1223 bp, Homo sapiens
atacatattttgggggtacaatgtgatggttccatacatgtgtaaactgtgtaaagatcaaattaggaaaactaacatatcatcaccataaacatcacttctttatgataagaacatttaaaatacttctctgtggctgggcgccgtggctcatgcctgtaatgtcagcactttgggaggtcaaggcaggtggatcacgaggtcaggagttcgagaccaatctggccaacatagtgaaaccctgtctctactaaaaatacccaaaaaattagccaggcatggtagtatgcgcctgtaatcccagctactcaggaggctgaggcaggagaatcgcgtgaacccggaggcggaggttgcagtgagccaagatcgtgccactgcaacctgggtgacagaactggagcgccactgcactccagcctgrgtgacagaactggagcgccactgcactccagcctgggtgacagaacgagattccacctcaaaaaaaaacaaaaaacaaaaaacaaaaaacctctctgtaagctatatggaaatatataatacattgttcttagctctaatcatcctgctatgcaataaaccaccagaactwactatgggtttagaaaagaagaatgaattctataatcagaatatcatcattttgtagttccaaaacttttgtggatctgtgaatttttcaacagtggctaagatcacaaaaagagacaaccaggcaagtcattattttgccttcacatggaagaatataccacaatctaaaaagaagtcttacaaaaaagtatccaagcttgaatctgatagagcttctaaatccaactacagtttacaggaaacacagggaataaaagaacttattcaatgataccacagggatgcaatcaacaaaggacttagtttccttgacaaataaattgcctgaaatacaaaatccagaaaagcagaaacccacagattaaagactcaggagatatatcaactaatcaaaatgtatggaccttcttaggatcctaattcaagcaaacaattaaaaaatattatgatatttataagacatttggaagcttgaacttagtggatatttgataatttccaaatggattggaaaaatattgaagaaattattattgaaagtttaggtatgactgaagatttaggtattgtaaggttaggtttttggggtttttwaaatttttatctctcagagatacaagtgaaat

SEQ ID NO: 286575 - DNA, 577 bp, Homo sapiens
cctaaattctgaacgaagtttagtgtaattacacaaaaaaacaagtatctgagaaatagagcttttagagtaaaaggcctttatatgaaaactcagagaaaaaaaaataaccccaggaaaagcaatagataatgggggtgacgttagaaaaacctaaagaattttaataacgttgtcctcctgacctttcccaacaaagaaacactacaaagaggaagtacaaaggtcattctaggaaatgagtgtgaatgaaaggagaatccagatgcatcagactgttaatgttctmctcagatttcaaattcattttaattcagcagggggttagccagtaattttcctttaacaatactatgctatcatggtgggacaattacaacatgttttattaatagatctcctagcactccaagttaggtgcaaacaactgaaaaataatcgtgttttaaagttagaactagatcataggtggtatctatcattctctatatgaatcaatagaatcttcagagttggtaaaatgaaatatttttaaagcttttaatctttattaggaaaatgaaagccaactaaccca

SEQ ID NO: 286576 - DNA, 560 bp, Homo sapiens
ttcctcaacggaatctgatttgccagagcctaactgacttgggatttaccagatcctaacccacctgagggaaaagaaatacccaattccagtaccccctagcatttctgtctcacctaagggggaaaagaaaggctgagaagcacttgtgaaggcacagctcaggagtacaggcacattaaaagactgagtgagacccagtcaatctggcttctgtgtaataacaggaaattacacctgaaagaactgcaagcctcaagccttatttaagaaagagtctctaaggaaacctcaaagcaacaggagagacaaaaacraagatactataggatatttcagccaccacaccaaagctacatcaaacagtaaacacaacctgatttctagcaagataaacacaaaacctcacaataaaggcctattgatttcagtgccttgtacacaattcattgtgtctggctatcaaaaacaaaacaacaacaacaacaacaacaaaacttgcaaagaatgctaaaaggccaaaagcagtttgaagagacatagcaagcatcacagccaga

SEQ ID NO: 286577 - DNA, 550 bp, Homo sapiens
ttgaggctgcagtgagccatgattgcgccactacactccagcctcactgacagagtgagaccccatctcaaaaaaaaaaaaaagaaaagaaaaaagaaaatcataaggaagagaatatatatttatagttccatactgtatttatcaatatcataggtttacaacatctgtttacaagatgaatcatctgtctgaaatgatgggcagccacagctgtagacctcaatctaaggtacatatcaagcaactcaactttttcttttgataacctgacttttttctgcttcttgggagcacttccagcatcactagtggccctttgtatgggtcccacagtgttactcaaggtttatggtattgcaytaaccagagtgaaaaatacataagaactataagagagcactttttactgcaatacacaatttactggagagatgaactgctcacacagagatgattagcatcacagggcactttaaacagatactcaacacttgagctcaccacagtagcaacaggaaatgactacaaaattattacagtagttcag

SEQ ID NO: 286578 - DNA, 603 bp, Homo sapiens
tcaaaaagtgtgagacaactacaataagtgtaataaatacataatggcaatgccaggagaagaaagagagaaaagaacaaaakaaatatttgaagagataatgaccaaaatttttcaaaatttaatgacagacaccaaactacagatccaggaagttcagggaaagccagcagaatagataccaaaaaatctacatctagacatattatatctaaattgcagaaaatcaaagataaacagaaaaactttggaagcagccagaggaaataaacaccttacctaaaaaggaacacggataataaccacattagatttctcttcagaaactgcacacaagcaaaacagtggcatgaaatatttaaagtgttgaaagaataaaccctcaacctatagtttcacttccaagaaaattattctttaaaaaggaagagaaataaagacttttctggacaaaaattgagggaatatgtcaccagaagacctgccatgcaataacagtaagcacagtggcatatgcctgtagttccagctattcaggaggctgaggtgggaggattgcctaagcctaggaattcaaggccagcctaggcaacatagtgagac

SEQ ID NO: 286579 - DNA, 605 bp, Homo sapiens
ttataacctagatgaagtgaatcacttcctagaaagacattttgaaatctactaaagctcaaataaggagaaacaggtaatctgaatartccttatctattaaagacattgaatcaataattaataaccttcacaaatggaaagcatcattcccagatgggttcactggtgacttcgaccaaaaatttgagaagaaaatactagttttctacaatcttttccaggaaacagaagcagaagaaaaacttcttagctcattctattaggtcagcattaccctaataccaaaactagacaaagacattacaagaaagaaaaaccacaaaccactatctttcataaacacagatgtaagagtcctcaacacatcaaatccagtaatgtataaaaataatcgtacatcttgaccaagtaagatttattccatgtatgcaagactgattcaacatttgaaaataaactaatgggattcatcacatcaaaaggctaaagaagaaaaatatcaatagatgcagaaaaagcatttggccaaatcaaatgcttaatcataataaaaatctcagtacactaagaatagaggagaacttcctcaacttgataaagaa

SEQ ID NO: 286580 - DNA, 591 bp, Homo sapiens
aaaactgctctagaaaataaagtctayaattgttttaatttggtacaaattctattatatatatttacatatacaaatgtgtgtgtgtgtgtgtgtgtgtgtgtgtgtataaaattgctttgtaaagttcgtgaaagcaaacacggtgtttgatttaccattataaatcaagtaccccacaaaatgcctggcacaaagaggtgtgtcactgtcagataaattaaaggaacaatgcataaaggaacacaagctctgaaaatacacacatacagacacacataatatctggtggtgggataaacataaatccaagattttacataagaaatgaattcatagaatcagcataaagtatctaagacccttcctgggtagataagggtggggagaatatacaaagagaacaatttaaacaaaagcacagagacaggcaggagggtatatttgggtcacagcaagaggagtaacttctggagactttgtatttctttctaaaaccagtataaaagttatttcagatagttatttcagatattacagtagtaatattgactgttgataaaatgtattcttaaatggtaggttttgcat

SEQ ID NO: 286581 - DNA, 571 bp, Homo sapiens
ggactccggagcgtgccgcgtggggatacccttggggacagccgaggtcgcgccgcggtgtyggttaagtcggataaaaatactgtggccattggcagagcccccgctccgactgtttgctcctcaggaaaattactcagcgtttaactcttggggagccaagtgtgggcggctccccggcccgcggccgtgcccaggtgtcggggcgcaccggcatccccattctaggttttcccccggggctcggcggccgggcgaagcaggcaggcagctgggtggccgggcagggcgtgcctgcagcttctctgtgcgcgggtccagtttctgtcatcgctcacagcatgctgcctggagacagggcaggaggggcacttcgcaggcaggtggtcggccctctgcttgttagggaagtcagaaaccgtccttttaaagatctattcgttgggaatgttttaattgatgctattaatacgttaccaagtagcaaaattggactagaaatagctcccagtgtgagctgcgtttgaatgctagccacccagacacacactgaaatgaaatcacctgctaa

SEQ ID NO: 286582 - DNA, 1118 bp, Homo sapiens
ggactccggagcgtgccgcgtggggatacccttggggacagccgaggtcgcgccgcggtgtcggttaagtcggataaaaatactgtggccattggcagagcccccgctccgactgtttgctcctcaggaaaattactcagcgtttaactcttggggagccaagtgtgggcggctccccggcccgcggccgtgcccaggtgtyggggcgcaccggcatccccattctaggttttcccccggggctcggcggccgggcgaagcaggcaggcagctgggtggccgggcagggcgtgcctgcagcttctctgtgcgcgggtccagtttctgtcatcgctcacagcatgctgcctggagacagggcaggaggggcacttcgcaggcaggtggtcggccctctgcttgttagggaagtcagaaaccgtccttttaaagatctattcgttgggaatgttttaattgatgctattaatacgttaccaagtagcaaaattggactagaaatagctcccagtgtgagctgcgtttgaatgctagccacccagacacacactgaaatgaaatcacctgctaawaaataaatcttgaaaaaatacaagatatatatggggaaaactacaaaactgataaaaaaaaaaaagatttgaatagagaagtattccatgttcataaataggwagatccaatatcgttaggatgtcagttattcccaacttaatctgtagatcaaatgcaatcctaataaaaatctcagcaagttgttttgtggatattaacaaattgattctaaagtttatataaagaggcaaaatacccagaatagccaacacggtattaaaggagaatgaagtcagagtactgacaccatctgatttcaagacttactcacttataagtgagaacataacgctagaacaatcaggacaatgtggtattagcagaagattagatgaataggccaatcgaatagaattgaaagcctaaaaacagatgcccacaggtatagtcaactgatatttgcaaaggagcaaagacaatttaatacagaaacaaatgatgctggaatgattggacacctacatttaaaaaaatctagccaggcatggtggctcacacctgta

SEQ ID NO: 286583 - DNA, 434 bp, Homo sapiens
gtggtgtatcttaatttcaaactggaagttaatttgtagaagaaattaaaacctgttttgccttatctgaaacatcagaatggggtgaaaggggttgagaactgtgtttttgctttaaaactgatttttgttattattgttctagatggttgaaccactaagagagaaaatcagagatttagaaaaaaggtatgtgtactttttgtcttaaagtcaatagttaaaataagtttgtctcaattgagtaattaattctgtttgtttgctccaaactctgccaacctaaataaatgtctrtatacgcatttcccccactttgagtgtaatacccagatagaacatggggagaagaatcaatctagatgtgttaagatcttccttcttcaaactctgaacgtctgaatttctgcaaatttattacatagaagttgagg

SEQ ID NO: 286584 - DNA, 522 bp, Homo sapiens
gtgtggtcattttaacaatattaattcttccaacccatgaacatggaatgtcttttcatttttaggtcctcttcaatttttttcatcagtcttttattgttttcattgtaraggtctttcacctccttggttaaatttattcctaggcattttttttttttggtcgccttttaaaatacaattgctttcttgatttcattttcagaaagtttgttattggtgcatagaaatgctactaatttttgtatgctgattttacattctcaactttactgaatttgtttatcagttctaacactaccaaaaagtagtgtaggctccaaatcctaccatgactgcgtctctttttcctaggtacatcttcgaccttggcaaaataaacttctaaattgattgagacctgtctcagacacttttttggtgtatgcttgctttgtgaaatgaatttagaattccttctctttcaattttttggaggagtttgagaagaatcggagtgagttctttgaaaatttggtagaa

SEQ ID NO: 286585 - DNA, 522 bp, Homo sapiens
gtgtggtcattttaacaatattaattcttccaacccatgaacatggaatgtcttttcatttttaggtcctcttcaatttttttcatcagtcttttattgttttcattgtaaaggtctttcacctccttggttaaatttattcctaggcattttttttttttggtcgccttttaaaatacaattgctttcttgatttcattttcagaaagtttgttattggtgcatagaaatgctactaatttttgtatgctgattttacattctcaactttactgaatttgtttatcagttctaasactaccaaaaagtagtgtaggctccaaatcctaccatgactgcgtctctttttcctaggtacatcttcgaccttggcaaaataaacttctaaattgattgagacctgtctcagacacttttttggtgtatgcttgctttgtgaaatgaatttagaattccttctctttcaattttttggaggagtttgagaagaatcggagtgagttctttgaaaatttggtagaa

SEQ ID NO: 286586 - DNA, 619 bp, Homo sapiens
agaagtatattttaaaggatgcagayaaccagatgaagagatatataggatgagatctgcaagggtcccaaatgcaggagcttctgatcctgtggagctggagtgcgccaccctcccagcacgtgggcgagtttttcttcaccttcctgtcggcttccatgtgttcggctatcaggaagctcactgaaccctgtcctcttggatttttatggaagtttcaaggcagcagcattcttcccccagaggtatagggtgagaccccctggagactcacaatcagaaaggcaggggaacattagagtgaaaggagggcaggagaatgtcagaggcctgtccttgaggcctaatgcccccaaccttataacaaaagactgtatcaaggagtatgggaattatgatccagaaacagtggatgaaaaccaaacagggacaatttgacttcctcttttccaacttggatgcattgatttctttctcttgtctaattgctctggctaagacttacggtgctatctgagtaagagtggtaaaagtgggcatccttgtcttgttccagttcttagaggagaggttttcagctttttgctcttcggtatgacattggctgtgggggtttgtc

SEQ ID NO: 286587 - DNA, 619 bp, Homo sapiens
agaagtatattttaaaggatgcagataaccagatgaagagatatataggatgagatctgcaagggtcccaaatgcaggagcttctgatcctgtggagctggagtgcgccaccctcccagcacgtgggcgagtttttcttcaccttcctgtcggcttccatgtgttcggctatcaggaagctcactgaaccctgtcctcttggatttttatggaagtttcaaggcagcagcattcttcccccagaggtatagggtgmgaccccctggagactcacaatcagaaaggcaggggaacattagagtgaaaggagggcaggagaatgtcagaggcctgtccttgaggcctaatgcccccaaccttataacaaaagactgtatcaaggagtatgggaattatgatccagaaacagtggatgaaaaccaaacagggacaatttgacttcctcttttccaacttggatgcattgatttctttctcttgtctaattgctctggctaagacttacggtgctatctgagtaagagtggtaaaagtgggcatccttgtcttgttccagttcttagaggagaggttttcagctttttgctcttcggtatgacattggctgtgggggtttgtc

SEQ ID NO: 286588 - DNA, 619 bp, Homo sapiens
agaagtatattttaaaggatgcagataaccagatgaagagatatataggatgagatctgcaagggtcccaaatgcaggagcttctgatcctgtggagctggagtgcgccaccctcccagcacgtgggcgagtttttcttcaccttcctgtcggcttccatgtgttcggctatcaggaagctcactgaaccctgtcctcttggatttttatggaagtttcaaggcagcagcattcttcccccagaggtatagggtgagaccccctggagactcacaatcagaaaggcaggggaacattagagtgaaaggagggcaggagaatgtcagaggcctgtccttgaggcctaatgcccccaaccttataacaaaagactgtatcaaggagtatgggaattatgatccagaaacagtggatgaaaaccaaacagggacaatttgacttcctcttttccaacttggatgcattgatttctttctcttgtctaattgctctggctaagacttacggtgctayctgagtaagagtggtaaaagtgggcatccttgtcttgttccagttcttagaggagaggttttcagctttttgctcttcggtatgacattggctgtgggggtttgtc

SEQ ID NO: 286589 - DNA, 635 bp, Homo sapiens
ggctggtctccaactcttgagctcaagcaatccacctgccttggcctcccaaagtgcggggtttacaggcgtgagccaccatgcccagccaagttatcgtctttgttatgttattgtttctattgatgtgatatgtcacatttattgactggtatgtcttgaaatattcttgcatccttagaataaatccctgtaggccatggtgtataatctttttgatgttctgttggatttgatatgctagtattttattgagggttgcctgtacttttcttttttgctgtgtctttttctggttttggtgtcagggtaatgctggtgtgacaagaaaataaaatcttgagacctcaaactcactatgccaaagggaagagttaagcttggaaactgagtcaagcaaaaaactgcctttcttcttgttcttaaagcaacagctgaaagatagaagggcatgcatctcctcaggtggcctcyctcaccctgataatgtaaattaacagcttatctttatgagtataggataaggcaaggctagaaatcatccccctacctactctgagataaatgcatatttgacttctttctctatgtttactttatcttacgtaaaatgaagatttactgagcacaagaca

SEQ ID NO: 286590 - DNA, 1242 bp, Homo sapiens
ggctggtctccaactcttgagctcaagcaatccacctgccttggcctcccaaagtgcggggtttacaggcgtgagccaccatgcccagccaagttatcgtctttgttatgttattgtttctattgatgtgatatgtcacatttattgactggtatgtcttgaaatattcttgcatccttagaataaatccctgtaggccatggtgtataatctttttgatgttctgttggatttgatatgctagtattttattgagggttgcctgtacttttcttttttgctgtgtctttttctggttttggtgtcagggtaatgctggtgtgacaagaaaataaaatcttgagacctcaaactcactatgccaaagggaagagttaagcttggaaactgagtcaagcaaaaaactgcctttcttcttgttcttaaagcaacagctgaaagatagaagggcatgcatctcctcaggtggcctccctcaccctgataatgtaaattaacagcttatstttatgagtataggataaggcaaggctagaaatcatccccctacctactctgagataaatgcatatttgacttctttctctatgtttactttatcttacgtaaaatgaagatttactgagcacaagacawttttgaacaccttttttaagtctgtacaggatgctgccatgtgaggacactgcgagaaggcgccatctatgaacaggaattgggccctcaccagatactgaatctgctggggccttcatcttggacttcccagcctccagaactgtgggaaataaatttctgttgctcataagccaccctgtctgtggtattttgttactgcagcctggggtaggacagctcccaaagcagaaactctggggtgtggtctggccatctggccttagcaaggttccaggtgttgctgacgtgacccaaatctgagaccctctgctctgggcacccacctgtgttctcacttgctcagttcctctgaagacattccacattttagtaagacaaagaacagagtcaaatgccagaagawctcctctgtacaaacctcttccatcgcaggcgctactaaattctagacgccccttctccctcttcactgctcttccattgtggttggcagatgctgacaatgtgttcttccatgtgtcccccatctctgtgcccgccgcgtgggggccctggccactgcatcaccatgccacctccttccgggcccttctgtctatgcca

SEQ ID NO: 286591 - DNA, 606 bp, Homo sapiens
ttttgaacaccttttttaagtctgtacaggatgctgccatgtgaggacactgcgagaaggcgccatctatgaacaggaattgggccctcaccagatactgaatctgctggggccttcatcttggacttcccagcctccagaactgtgggaaataaatttctgttgctcataagccaccctgtctgtggtattttgttactgcagcctggggtaggacagctcccaaagcagaaactctggggtgtggtctggccatctggccttagcaaggttccaggtgttgctgacgtgacccaaatctgagaccctctgctctgggcacccacctgtgttctcacttgctcagttcctctgaagacattccacattttagtaagacaaagaacagagtcaaatgccagaagaactcctctgyacaaacctcttccatcgcaggcgctactaaattctagacgccccttctccctcttcactgctcttccattgtggttggcagatgctgacaatgtgttcttccatgtgtcccccatctctgtgcccgccgcgtgggggccctggccactgcatcaccatgccacctccttccgggcccttctgtctatgcca

SEQ ID NO: 286592 - DNA, 554 bp, Homo sapiens
gacaaacaatactgtcaaatactgtctagaaggaggtaatttycatgtttggtttaactttgaagtaggttttgaggtcaagaagtgtgagaccaccaactttgtttccttcttttaagattgcttcagtattccgtcccctgagattccatattaattttaggatgagttttcatatgtttgcaaaaatgctgtgggtatttgatatggatatattgaatcaatatattgtttagagtagtagtgttatcttaacaagactacatcttccaatcaatgaatatggaatgtcttttcaattatttagaaatttaaaaaatttaatttctttcggcaatattttgtacttttcagtgtagcttccttggctaaatttatttctaagtaatttatttctgatgctgttgtaggtagaatagttttcttaatttcattttcagatttttcattgctactgtataaagacacaattgttgtgagggttgattttgagtccttcacttggttgaatttattagctctaacactttgtgtgtgtgtatgtgtgtacttgt

SEQ ID NO: 286593 - DNA, 535 bp, Homo sapiens
ggaaggtttgtgttatttctttggaaagccattatttctctttttccagttaccttccttctattycttacaggtccacctgtatttcttaaagatattttttcttatctctcaaattttgacaggatatatacattatatatgtgtgtgtgtatatatatatatatatatatatatatatatatatatacacacttgctctctcattgtactcttcgcagcatttatattttaatatacattttagttttataatgttataatattcatttaatattatagcactattataatataatattatattgtgtattatattgtattaattataatatatttttactatatcattatattacaattataaaatatattaatatattttaatataattgttataatattaaattaatatcataacaaaactaaaatataattatattgtaattaaatgtacatcacattataattataatataattatcatattaatcatataacattataattaatattataatatttgtttaatacc

SEQ ID NO: 286594 - DNA, 621 bp, Homo sapiens
attattgatgtgtttttgtttagaattgaaatggatttgagattttagaggtcccacaggtctctgcaacccttatgcattatagcactgaggctgtcagaatgtgtgaaaattataaatctcatttagtaaaatattgagagttttagagagatttagtaaaatactgtgatagtttatattaaccatattaatattatctgtgtataatcataacttattcccactgctactttgaaatacacctttccagggtcagcagcaacttattcttgttcaaacccaataattttgtctcagaatagcaattgagagaagagcatctgtagccacacttctttggctcaattctgactctgccacacattaactagtgtaaccttggacaagtaacataatttcttagtgcctcagrtttctcacctctaaaatgaagtcaataattgaatctacctcattggattgtaagaatgtctgagttagggttacattagctactgtaacaaacaaaccacgaagtttcagtaacaaaataaagtcaacctttttttgtcattctgaactttccaatgctgattttcctggtcttcagagttggaggtgataggactgacctctcag

SEQ ID NO: 286595 - DNA, 542 bp, Homo sapiens
attgtaatcctagactagaaaaaaacaaagtcagatttttccctttgtggctggtagaaaccctgataacattgagaactcttacacatctttctacagtatctgtacaagctgcactagaatcacatctcagttcactgagttaatgacctagaagaaaataagtaggtttctcagaaattaatgcttaaatgtaattgaaggtcaggcagataaattacgttaaaccagtaaattaaaatccctgaagaggagatctttttctgtccaaacagaagtaattatggacatattccttgggcaatgatttcattcagagtggctcatacaatgttattcatgtggctcctctagtattgcccacctgccaacygcctcccgtactatttaaaaaatattaaaacgagccaaaccctttttctaacaatataattcatttaggcatttatttctgttatcgtatgggtgtgttttgagttcttcatatcttatcttcaaaagtgagtttttacttagcagagacacacagtagatcaatactt

SEQ ID NO: 286596 - DNA, 617 bp, Homo sapiens
gtatcatttaacaggaaagacaaaattttctgctcttgtgcagtttatactctgttgagtagaacttatattcatcatgttagggacaaagagaaaaactagcactaattatctgcttgagataactgctatgctccagtagtttaagatgaaatccgtggtccagtcatctggaatttagaagatccattaccatcacacttcacagaaaagcaatcagccactagttagtaatttttgttcttcacattggttagytgaacaaacacctctgtctttttcaatgctaatctatggtgaacacacctacagtaatgtcagcaaacaaattaaaatgtagtaggacaaataatcacttttaatgtttttcatgttctgttagtataaaatctctaactacttttattatacatgataatatatgatgtttaatatttcttctatatttatcatgttttatttgcacaagagctttaaaatgtacttttctttcagtgtgtgttccctggtacaaaggcacttcaaaacgcaattttatttttaatgtaaaagtaatgccacccattttgtaagcacatatagcataatacttccaatgaacaaaacaacaaaaaacg

SEQ ID NO: 286597 - DNA, 528 bp, Homo sapiens
tctattctaccttgatctgtgattgyaccactgcacctcagcctgggtgacagagcaagatcctgtctctaaataaataaataaacagaagagtaaagtctatttttgatgggagaaattttggtacttctttaatctttgtactcactattggtttattcaggttttcatgtaattcgtgattcagtataggtaagttgtatttttccaagaatgtatccattttttctaggttttccaatttgttagcatataggaattcatagtagtctctaacaatcttttgtatttttgtgttatttattgtaatgtcttctttttatctgtgattttgcttatatgtgtcttcttccttcttatactagataaatgtttgttcatctttttaaaaatattatttttgatttgttgatcttttgtaatattttaatctcactttcatttatttctgctctaatctttactatttcttttcttttactaattttgggattggtttgcatttacttctctacatttcttgaggtg

SEQ ID NO: 286598 - DNA, 1229 bp, Homo sapiens
ttaaaattaaactctgtttttaaagctacaactgaaacacgattataaaaataattcaaacaaaattttggctatcaaagtttcttgattatmcttgttcaatgcttgtacttatacatgtgtatgtatgtatattttggagcatatcatttctctctctttaaaaaggaagtggatgacacaccaccaatcattagtaatccttcccagaaacctcaacttattgtcactcctccatcatgcctacgtcaccaaatcttgtgtattccaccagacatgactgtcttatatttgcccatattacaccatctccacatacactacctttagtttaatggggtcaagtctctccctttaacatcctctaaataatcaccttgccttctctgttttatcagctgatgctttcactcttagttttgctttctagaacacaaatctgatcgtatactttctttcttggaatccctcaatgacaccttactgctgtcacaacaaagtccaaatttctgaacttaacaagccacttaaacactctgtcttggcttactgatccagtctcatttctctgtcaccatgtccccttccctcaccagatgtttgagttctctgtgatgcttgctawtgctaaatattccaacactggaaaacatcagggaacattacagggtagcattcaaataatacaaccttwggatctcctagtaatgtaaataagaatgcacagaatcacttacaaaattgccagattaaggatttattttacttccaaacttgacatgtcatggaacaccactcataagatttgtataaagtatgtaaattaacttctttatatagattatatttacaagaatattccaccattagcagtagatgtggccaaaaaccaaaaacaaacattataagtgacaacagctaaaactaagcatgatatttgattgtggcatttcttttttactgctataaacctgtttccccgaaatatagatcttaattcttccacttgcatgtcagtattttctattaagttatgaaaatttttcttaattttttaatttcctgattgttcctagaactaaaattaagaaaaacatttaagtttctcaagaaatttcctggaaataattcatatatgggaacattaagacacatggttattctttctgcaattcctatgtaccaagtttttcccagaacagggaactatttatttgctgctcctcctg

SEQ ID NO: 286599 - DNA, 604 bp, Homo sapiens
tgctaaatattccaacactggaaaacatcagggaacattacagggtagcattcaaataatacaacctttggatctcctagtaatgtaaataagaatgcacagaatcacttacaaaattgccagattaaggatttattttacttccaaacttgacatgtcatggaacaccactcataagatttgtataaagtatgtaaattaacttctttatatagattatatttacaagaatattccaccattagcagtagatgtggccaaaaaccaaaaacaaacattataagtgacaacagctaaaactaagcatgatatttgattgtggcatttcttttttactgctataaacctgtttccccgaaatatagatcttaattcttccacttgcatgtcagtattttctattaagttatgaaaatttttcttaattttttaatttcctgattgttcctagaaytaaaattaagaaaaacatttaagtttctcaagaaatttcctggaaataattcatatatgggaacattaagacacatggttattctttctgcaattcctatgtaccaagtttttcccagaacagggaactatttatttgctgctcctcctg

SEQ ID NO: 286600 - DNA, 632 bp, Homo sapiens
ggaaaagtaagtataaaatgacaaacacctttgtatctactgaccttttctgatactcatcagcccttacaaatgcctgagcaggaagaacaactttcctcttagtcctgtagatgaggagttcattgagaccccaaccaccagcttctcagattgtcttgggtcctttgcattcagcactcaatcacatttgcatacttttgacatcctcttagataatttccctgctgtgcctgagaagcaaatcatactattctagtctttcttgtatttacatgcagtgctacctttgcattttctctagctgtgaaygctgttttcttctccctggtgctctgattacttgatatattcatgacattggtactcggatcttttccccactctggtgtaaggtggagaggagagaaagcaccgaatagggtcttcgtagatgatttctgctttcaacttagttcataagcagctacttcattcacctcagtttcctcctttaaaataaaatgatgtgtttggattgaaagatctcagtttgagatcaccgtatgtctgagattttcttgcacaatccctcatatttgtattctaattgtgaatgtatctatgacaaactgtattctaattttgagata

SEQ ID NO: 286601 - DNA, 632 bp, Homo sapiens
ggaaaagtaagtataaaatgacaaacacctttgtatctactgaccttttctgatactcatcagcccttacaaatgcctgagcaggaagaacaactttcctcttagtcctgtagatgaggagttcattgagaccccaaccaccagcttctcagattgtcttgggtcctttgcattcagcactcaatcacatttgcatacttttgacatcctcttagataatttccctgctgtgcctgagaagcaaatcatactattctagtctttcttgtatttacatgcagtgctacctttgcattttctctagctgtgaatgctgttttcttctccctggtgctctgattacttgatatattcatgacattggtactcggatcttttccccactctggtgtaaggtggagaggagagaaagcaccgaatagggtcttcgtagatgattkctgctttcaacttagttcataagcagctacttcattcacctcagtttcctcctttaaaataaaatgatgtgtttggattgaaagatctcagtttgagatcaccgtatgtctgagattttcttgcacaatccctcatatttgtattctaattgtgaatgtatctatgacaaactgtattctaattttgagata

SEQ ID NO: 286602 - DNA, 563 bp, Homo sapiens
ccattatttttaagaaaatgctaatatttactgacaatttactgtgtattaggtactggctaaaagcttttattattaatgtatttcatttttttgaggcaggagttaggggatattttgtagatgaggaaactaaggcttagattaattaatgaaggcatgtatttataaagtgaaggaggcctgtctgacagaagaaccctagtaaatcctttgtcactgagtgatttaaataaaacgaagtcattacctcgttgmcaagtattaggctgtttttgcactgctataaagaaatacctgagactgggtaatttataagtaaaaagatttaattggctcatgattctgcaggctatacaggaagcataatggcatctgcttgtggggaggtttcaggaagcttccaatcatgacagaaggcaaagggcgagcagggcatatcacgtagtgagaacaggagcgagagagagtggtgaggaggtgccacacactttttaaaatgatcaggtcttctatgaactgaaggcaagagctcatttatcactaaggggatggcccaagac

SEQ ID NO: 286603 - DNA, 565 bp, Homo sapiens
atccatcttcaggaactttatgagctggtaactaaacacaggcagtaataaaaattaatttgtgtgaatttgtgattaaataaattatatgaaaaacaaaagcgaaatatacttaaacccatcactttctaattatttatgccattttgttttgtatttattctcttcaggttacttacacttattgtatttttatgacagaaatgtatgtaaaaatgaacacatctcttcctaattccacattcrctagcattacactggctggaatgaaagaatttataccatagaaatcagaaaatattacaaatgaaggtttaattttttgttttgttgattaggcttaagaaaatgatgaataaaattataataatgcaaattaaactttaaaactataatatatctatagcttttacattatcaataacacaaaaaaaattaggaaatatgccagtatttaaaaaccaccatcagattcagccaagaagtttctcatgccattgacaagtgagggaagttccagcatacatcttcatcgtttctctttcatcttaataaaaatattaac

SEQ ID NO: 286604 - DNA, 614 bp, Homo sapiens
ctaacaacgctaatgtgttcattcactagtaaattaaggactattcttttgtcttccttctactgaatttgttgtcaaggagttaaatggctatctctatttagatatctgaaatccatttataaagtatattactgactccactagagaaagctgcatagagtgactgagtttagtaaacaagggtttgaaaactaatcatgtttctgttgaaggccaacacaagggtaataaactttcaagcagaaggtctataacagattatcatggaaccaatgagccatcatttcgccagcctyggaggtgaaggcaatgttttcaccacttatttaagcatcggttggtcactgatagaaaccagaagccaattagaatgactcagagatgaagtacatcaaagctatactgctttcttgactgattcttcatttttatcatgtccttgagtgagttccacaaggtatgaatttcccttggcttcataagcaaactccaaattcaaacagaatttagaacaatagcactacatgatatatgaaaccaactaaaccactttggttaaagtataatatctccataacagcacttaactacattcactcggtaaactcacc

SEQ ID NO: 286605 - DNA, 551 bp, Homo sapiens
gcaacatatcaaacctaaggacttcatgttcccgctggattagacttataatcttgggccacttgcattgatagaagtggtgatcaggattgcattgtgccatcagaacttcattttggaaactaagaagctgagtggtttagaaaaattatacaacacaccaaagttcactcaacaactacaggtaagaagaacaatacaaatatgcttaaccgtatggtaccatagtccatggaaactattattgtaaaatgcatctaaacaggatgacccttaaaatctagtaagtacagcctttattttgttcttcttaaggaaaaaaacacaccaaagaaatctatattattgaycccttagaataaactgaaagcaaatatttattttatttatttattttgagatggaatcttgctctgttgcccaggctggagtacaatggcatgatcttggctcactgcagtctccacctcctgggttcaagcaattctctgcctcagccttccgagtagctggaattacagacacccaccaccatgcctggctaatttttt

SEQ ID NO: 286606 - DNA, 594 bp, Homo sapiens
aagaggaaacttgaggagtcttgatggaggaaaacaaatatctctagtttactatactgcaaaattactcatgcctctaatatcctcagtaaagcctgacctggctgactccagaggatgtgatttgataactcaatgctttgtgtcatgtcttttactaaattggtggtgtatttaaataaggtactgaatctcttttttcaaatcaatgtgtgaagcatggtgtaagtgagtatgcgttttacaaagggcatcagggaaactgttaagttgtttatcatcagagccctataatgttgactggtgcccagcaggggcagccaagactaggcacaaatggctgaacaatgggcagatgcaaggacccagagagtgggggattcaggccaacagcagtggctaaggttccctgcaatcatcrctgcccaagccagttgtacgctttaccagaagtatgaatgacaggatgtgagtgttgccacagaggaattaatacaaaaataaaacagaactacatcttaacctggcaatataataacaggggctaggatgtggtttccaaaactcactttttttgggatccagatttcccat

SEQ ID NO: 286607 - DNA, 360 bp, Homo sapiens
ggtaggcaaataggtagatggattgttaggtaagtaagtaggtaaataggtaggtgggtaggtagctaggtaggttagtaggtagaaaggtaaacagataggtacttaggtcatatttactaggtagtaaacaagtaggtagataggtaggtagggtagataagtggataggtaagtatattcataagtagtagatagttaagmagataagtatgtaggtatatgttggtatgtaggtagctaactagctaggtagataggtagcttaataggtataaaggtatatacataggtacttaggtcatatttagtaggtagataggtaggtaggtagataggtggataggtaggtaggtaggt

SEQ ID NO: 286608 - DNA, 592 bp, Homo sapiens
ccataacattcttacaaagaaacattggccttagcacaaactctttacagttggaggataaaataatggaatttgaaagcctatataaatcaatataatgtgagactcaaaaataagaaaaagctctgaaaaggaatgcttgctcctagggcatagaggatattgattaaagaaaagttttgagggcttactgaagtggcatcattacttaagtctactcctcaaaagagaaattggttacatataaaagacacaggtgtataattctggtgccttaaaaggagttccccaattatgtgagtctcttgttatatccaagaggtgtgaggaattccttaaagaactcagtagagagctgatttaaaaatgcaaataaccttgaatctgtttctgatttaagcaaattattgagtgcatgatcaataaatctatcccagggctcgtctcaagagtaatgcaaagatgagttcccctacagacttattgttgttgacattttggtgtcttacaaagcatcctcctctcgtttctccttcctaacagaaccccaattttatacattkattaagcacaagtgcttcatataaatgaa

SEQ ID NO: 286609 - DNA, 487 bp, Homo sapiens
gccgattccacctccgggtgaggaccacaagactagttgagtgatgagtcatgaatcatgggcctgggtaggtttggctgatgtcaggtcactagtttagccacagtgcaaaagtctgaaaaatatctcaaagacaaatcttaggttttcacaataatgatgctatctatagaagcaattggggaagttaaaaatcttttgacctccagctaaatgactcttgggcagtaagagattacagaaaggcaaactagggagcaatggctggttatcayttaaatatacctacatcttagctgaattcaggtaccccgtccccataattctaaccttgtggccttccattagtcttctgttcctaagcaaggaaggggttagttttggaagggattattgtaatcttctttaaagttaacaaagttagttcacttgtaaggttaaaagcaagacgtagtcagctatgttagatttctctcactgtcatata

SEQ ID NO: 286610 - DNA, 1599 bp, Homo sapiens
gccgattccacctccgggtgaggaccacaagactagttgagtgatgagtcatgaatcatgggcctgggtaggtttggctgatgtcaggtcactagtttagccacagtgcaaaagtctgaaaaatatctcaaagacaaatcttaggttttcacaataatgatgctatctatagaagcaattggggaagttaaaaatcttttgacctccagctaaatgactcttgggcagtaagagattacagaaaggcaaactagggagcaatggctggttatcatttaaatatacctacatcttagctgaattcaggtaccccgtccccataattctaaccttgtggcmttccattagtcttctgttcctaagcaaggaaggggttagttttggaagggattattgtaatcttctttaaagttaacaaagttagttcacttgtaaggttaaaagcaagacgtagtcagctatgttagatttctctcactgtcatatawggattacaggtgcaagccaacacgccccgcctaccttttcatatgtctgtgaacacacttggaatgcagatgccaaatcaacccttttgcatcaagaaaatgcagtttaacctcgactgttttgaaaactgggaagctactgttaatatctttgctaaccttatatcccagcttcttgctttgagaaattataaggatctatttttattaagtattaaatgttagaaatctaggaaccatgtgctttgaaataaagtttactatagtgatggtgattttctccccatctaatatttgatcctacaggttgacttcatgttactaatcactttcctcttaggtgttgctagtcacactctgacaccactgtccccctaaaaggggaaagtgattttaattatgatcaaacttccttacaaattggaaagacgtgtatcgtccccaaacagacaccaacctggtcatctgaatcatgtggatctaaccagcacatctgttcttaaaaggawgatggtatgatttgatattctttttttttttttttttctcattttgatctatggcctwcctgagcccctacccaccaaattatccctaaaaactccaatccctgaatgctcacatagaccaatttgagtaacaataaaactccagtctcccacacaaccagctctgaatgaattactctttctccattgcaattcctctgtcttgataaattggctctgtctagcaagagggcaaggtgagcctgttgggtggttacattggggcatttatttagctgcttcaaatgatggcttgtctggggtacaaggtttaataaggtttcactcatgtgtccagctgagagattgttagtggagagcaaagctgaggctgctggccagagtctatggttcttctccatgtgaatctctcctcatgatggcttgagcttccttacagcatggtggttgagttccaaagagtgwtcacagcagcaaaggtgaggtctgcagatgtctggaatcccatcttaggaaatgacatagtttcactttcaccacattttactgatcaaagcagagcctagggtcagcccagtttcaagaaagaactgcagtattta

SEQ ID NO: 286611 - DNA, 440 bp, Homo sapiens
ctattatcagcatcttttttaatgctccacctatttaaataatatccagtcatttaagaacaaatagacttagatataataatctttttaatttttaatttattaatattttaaaaattatttttggggggatctttaacttttttttgaagcagagtctcactgtgytgcccagcctggagtacaatggtgcaattatggctcactgcagccccaacctcctggactcaagtggtcctcccacctcagcctctcaagtagctgggacaacaggcttgtgccaccatgcctggataatttttttgactttttgtagagacagggtcttgttatgctgccctagctggtctcaaactcccgagctcaagcaattctcccgccttggcctcccaaagtactgggactacagatatgagcaatgctactcggccagacataat

SEQ ID NO: 286612 - DNA, 339 bp, Homo sapiens
taataaatgttataataaacattacatttattgtatgtgtataataagtattattacatttaatatatgtgtcttaaaataaattattatataataataaatmagagagttcattgcattaatgcttgctcttataataataatttatttattatatgtctataataataatttattatgaatataacatttattataacatttgtcataaaaacttagataataagttatataataaattcatataatatatttataatagtaaattattatataataaattagttcattgcatcaatggctgcttcttataataataatttacttagtaatatctgt

SEQ ID NO: 286613 - DNA, 591 bp, Homo sapiens
tttggatgttatcaagggcttggtctttaaggacactattcaaaagattcttagtctggaaataactgtagtctggatatggttatgggtccacaactcaggatcatggtggcccaagagaaacacccgctcaccctatttgatatctccatggtgtacaacaacatgtgctctttcccttttgggtccctagagatgccatgataaattaacctgcaacaaagatctctgcaaatgaaacattctggtccacagactgcctgatgcctcttcagcaaccacatctaataatgtttagtggttaaacaatctcccttgatcttgcccatttcctgtttcccgtgacttagtgatcccgtttccaatgtctcacaaacacaaccttcatttcctgcattaagaaaggcagataagggaacatatttgcaaggagcaggattttcccttcgtcataaatttcttgatgctttgataaagggagaaagtgctgagccccmcctggggaacaaagatggcagatatgtggatcccacatgctagatctacccaaactttcaccaaaagtcttccgattccttctttcctattgct

SEQ ID NO: 286614 - DNA, 296 bp, Homo sapiens
ggactcatggtctggaggcacaagccttgcagtaagctataagtcgcacccacttctctggctgagcagtggttcctgaagcttccctgtggggaagcttttatgtaccccaatagaccccttgccctagkgaacttccagtgggatggctcttctccttccattctcttaaggcagagtgagtttgcagtgtcagagctctggaagaccggtgacactcttttttaacttatttactccaccctcatagaaaacccactgtgtgctggcttgagctagcatcaggacacaaaact

SEQ ID NO: 286615 - DNA, 614 bp, Homo sapiens
ttctattcaatgaaactctcctctaaaaataaacctaaaagaaggacatttttgtatagaaaaaaatgagagaatttattgccagcagatttgttctataagaaatgctaaagggagttcttcagcctagagagaaattaacactaaatctataggaagtaacaaaaaaatgaataatgtgtatgtatatatctatatatttatatctgcgtatatatgtacagtcatgggttgcataaggatatttaagtcaaccacaaactacatatgtgacagtattgtaaaattataatggagctgaaaagtttctgtcacctagtgatgtcatagccatcataacatcataacacgattcattactcatgtgtttgtggtgatgctggtataaacaartccactgtgctgccagttgtataaaagtatagcacataaaattatgcacagtacataatgcttgataaaaataataaatgattatgttactggcttatgtatttactagactatttttacattgttattttagagtgtactcctcctacttattaaaaaaaggtaactgtaaaacagcctcaggcaggtcctttaggacatatttcagaagaaggcaatgt

SEQ ID NO: 286616 - DNA, 535 bp, Homo sapiens
gttctaaatatattgagataagttatagatgcaacctctaaaaaatgatgtaaattagtatagctagaaacccatgaaaataaataaaactaacaaatgtttggttaacacaaaaagaaggaaatacagaaaaagagaaatagagaaacaacaaataaataagacaaatacaaaatagcaaaatggcagacctaaatatatccatatcaataattatattaaatgtaaatggactaaatagtcaaaacaaaaagcaratattttattaaaatgagtaaaatgagtgatattaaaatgatattaaaatgagtaaaaaccaagtatacactgcctacaaatgacacattttaaatacaaagacacaaataaattaaaagaaaaaaatttgaagaagatataccatgtaaacaataaacatcagaaagctggagtatcaggcaaaatagacctcaagacaaggagtattactagagacaagagagtcacttcaaaatgacaacagggttaatgcttcaagaatatttaacaactacaa

SEQ ID NO: 286617 - DNA, 483 bp, Homo sapiens
tcacattacagtaatggagggagcactggcttgaattctgttgggaagatataacgttagtacagtgaaggaaaaggagagggagggcttcatcccactgcgttttctgctgctgcaacaacagatctgtgctggcgtctgggtgcagctcacaggtccagcagtaagtgacatggtatcagacttttctgtgcgcttgtctgtctcccccgactagaaaatgagtactttgagggcagggacactgtttcctttgttttaaaatgctgttttagtgcatgtaggaccttgggaaatttcttaaccatctcaagtttcctcaactgtaaaatggggataataatagtaccttcctcataatattggtgtgaagattagcacatgttgaataaataacacaatgaatgaagtgactttccttccatttttatyctctttcaagaagttcaagctggataatcttagtgtcgtcaagcagtgtgg

SEQ ID NO: 286618 - DNA, 621 bp, Homo sapiens
gcccgctctgggagcccgactcctcacatccgtcatctctttcttctcccccttcacctgctgtagtgtccccactgtctctctttacctcagctccttaccattcctttccctctacacccttttcctttggttcatagtcaggatgtgctagttgcattcaagccctttttgatactaagaattcagggggacaaatccaaaccctggagactactgtcttccccttagtgatgctaatgaatataattcctgatctgaaattacctgcactttatttggctccatctacttttctgccacttactccctgtataaccataggctacgtaccctacctctctctgggttttttttactcctcagttaaaaggaggattaaaatggcaatcacaacaccttgctacagataygttaggaagattaaatgggataacatgcagggtgcctagccttcctggcatatagtaaatgcctataaaatataacaagtgtcatgtattattattaaattgtatctacctggtagaaactaatggagtggactactttattaatttagatttctctctttttcctttcctatgatatttaagctggaaaacccagtatagtttaaaa

SEQ ID NO: 286619 - DNA, 595 bp, Homo sapiens
actgtcttggcctttctacaataaatttcccagcatgacacagaagcacagttacacacttgcacacacaccactgagcctcccaagtgttgaaatactacatccaggcatatattaaactaacaaatttaaaaagaaactaccatgtccagcaatactctaatcatccaaagtagtaatagtaaaggtaactgatgctaatrtctattaatgccccaaaacatttaaaaactcaagaagaaaaagaaatctaccctgataaatatgaatatatgtttttaatttatgcttttctttatttttaatttatgcttttcttgaaaaattattgtcttccaatgattaattcttttgagtcagggtgatgtatggttttgccctgaaactttctttctaaaagaaatccctagtctcagtttgctttctaaacaaatgacaggagaaaccataggaaaatgtaattcaaaatcaaaaaggctcataagtttcactttctgaaaaagttgccagcacctggatatataaaattatactatttctacaaacacaatccttgaattggaagctggcccagatttctacttccccagattcc

SEQ ID NO: 286620 - DNA, 595 bp, Homo sapiens
actgtcttggcctttctacaataaatttcccagcatgacacagaagcacagttacacacttgcacacacaccactgagcctcccaagtgttgaaatactacatccaggcatatattaaactaacaaatttaaaaagaaactaccatgtccagcaatactctaatcatccaaagtagtaatagtaaaggtaactgatgctaatgtctattaatgccccaaaacatttaaaaactcaagaagaaaaagaaatctaccctgataaatatgaatatatgtttttaatttatgcttttctttatttttaatttaygcttttcttgaaaaattattgtcttccaatgattaattcttttgagtcagggtgatgtatggttttgccctgaaactttctttctaaaagaaatccctagtctcagtttgctttctaaacaaatgacaggagaaaccataggaaaatgtaattcaaaatcaaaaaggctcataagtttcactttctgaaaaagttgccagcacctggatatataaaattatactatttctacaaacacaatccttgaattggaagctggcccagatttctacttccccagattcc

SEQ ID NO: 286621 - DNA, 362 bp, Homo sapiens
agcatgcaaattaacatagaattacatctgtgataaatggtataaagaagtggtgtctggtactttccaagtcaatgaatacaggaagaaaccaactggttttcctctcatacaccactctcaatacttcacttcagacacaagacatgtggaattttttccataccaaccagttctctgacatcaaataggtgtcctacaattcaattcaattctgacactagtgcagacttagcacagacctcataagtgaggagttcaatcccacatgacytccccccacttcagatgctagtcacaagtgccaggttgtgacctgtactcttaccaactggctataaattgaagattcccacaacccc

SEQ ID NO: 286622 - DNA, 635 bp, Homo sapiens
tgtcaattccaggaagacaagaagggctagagaacagggagctgaagagagtgcagtctgagaagaggctggaaaggtgggcaggaggcaggcctccagtggctttgtataagagcaagcagaaggtattgggagatcttaaactgaggctgaatatagcatggacagatttgtgcctcataaagttcactatttattggagtagggaacaagaaakgagactactgcagttaaagctgtactggttaaaaaaaaaagaaacttgtatcatggtagtggtggcagagatagagaaaattggttagattcaagaaacatttaggtgataatttgatagcacttgatgagtcagctatggagaatgagaaaagggaagccattaaagatgtcccctaggttcctaattgtggggttggatgggtgatgttggtgtcactcactggagtaggaaacaatggaagaggaagagggttggggaagggggtgataaatcatagattccattgggacgagtagagtttgagggctttttaagtattttaaaactctaaaacagggcctggaacacaatagactctagaaaaatattcactgatttaatgaatgaaactgtcgaaaaaaggaagttgaattat

SEQ ID NO: 286623 - DNA, 528 bp, Homo sapiens
gggagctaaaaatctcaagtcctagaacaaagctacatctcaggatcaagaacacacagattctattttcattcatgtgggtctaggcaactctctggggcagctgtcctaygtgtagtgacccagcatccagactgcttccattctgaggcttggccatctcaacacaagacctccttcacactcactatgacaggagaaaagagcctgagaaaacacccatggctcttccaggcttttcactgtctcagcctagaaatataactgaggtcacccctaacataacattggctagaacaacacacatggtctcatacaactgttgggaaatggcaggggggagggttgcagaaatgcctagaactgctgaaaggaaaggggaatcagacaatggtagcactcatgaaggacttgttgactttccaattccaatagaggctggctctgtttaatctcagctgagcccaggagtgtggacaaggctaggctttggcctgaggggtgcacatggggcaccctccttcagca

SEQ ID NO: 286624 - DNA, 528 bp, Homo sapiens
gggagctaaaaatctcaagtcctagaacaaagctacatctcaggatcaagaacacacagattctattttcattcatgtgggtctaggcaactctctggggcagctgtcctacgtgtagtgacccagcatccagactgcttccrttctgaggcttggccatctcaacacaagacctccttcacactcactatgacaggagaaaagagcctgagaaaacacccatggctcttccaggcttttcactgtctcagcctagaaatataactgaggtcacccctaacataacattggctagaacaacacacatggtctcatacaactgttgggaaatggcaggggggagggttgcagaaatgcctagaactgctgaaaggaaaggggaatcagacaatggtagcactcatgaaggacttgttgactttccaattccaatagaggctggctctgtttaatctcagctgagcccaggagtgtggacaaggctaggctttggcctgaggggtgcacatggggcaccctccttcagca

SEQ ID NO: 286625 - DNA, 607 bp, Homo sapiens
acatcagctctcactcagaacagagttcagtcttgcacaacatggggatatgttttagaggtcaaccagtttacccagccttttatttcagaccgcatcttgcccaggatgcctgagggatatggcttcacttcctattaaagtactatattcttatgctttcttacagtgcccaatgcctaagctctctttgttgcccaggaaataggcagtgttcttggttcttctatccctggctggtcacaaaatatgacctcagaccacaactgtagctggcctcctgattccctcaccccaagagggacattcaccctcattccagacctccttttcttccatgctccctttttctttgaaacaygtaggtcctcccttgccttttatttttaggagagtttttgcatccatacctcttgaaagttctcagtagacacaatttgtttggaaaaaaacatggaagataatgctctatttttaggagcctcttagtagtcaaatgcaactaaataaaataataataactagacctactgagcattttcttcgaaccaggcactgttctataaactctacatggattaactcatttattcctcacaccaactat

SEQ ID NO: 286626 - DNA, 555 bp, Homo sapiens
gcacttcccaatggccctctatcctggattctgtccaggaaaattggcatttggttgaaattattacaaagttcagctagaagtttccttctccctgtgggctttatccagttccactggcagccctccccaaggacatctgtgagataaagtcaaaaatgccttccctgagcttccttgggttccagaagtgactatagggctcttccttatgcttcttctacatctatattttgcttggctctctaaattcattttagctctaggtaaagttaagtccttctcccatgatctgrattttcaggttccccagtgagaatgtgtgttcagtggcagactttgcccttctcacactttgggtactcacagtttttcatctgtcttatggagtttgcagcagcacacttcttcttttaaaggctctgtgaattctttcagttttcctggtatgttcctgcagtagttcttggagaaaaatttcatgatatgagtctccacacactattctgttcacccaactgggagctgccttctatctgccattttccacccagt

SEQ ID NO: 286627 - DNA, 635 bp, Homo sapiens
ttgggtactcacagtttttcatctgtcttatggagtttgcagcagcacacttcttcttttaaaggctctgtgaattctttcagttttcctggtatgttcctgcagtagttcttggagaaaaatttcatgatatgagtctccacacactattctgttcacccaactgggagctgccttctatctgccattttccacccagttctccatcccttttagtagtagagaagaaacagacttaacatcataacaaatgttttatatgcaatgtctcatttaattaattttcttctttttggagtaaatcttttggaagttcttttggtgaggatctgtgttaataaaatttctaagttctaaatgtctgaaaatttagttatttatatatacaactgaattatagttgggctgrgtataaaaataatttcaacgtttttcatcagggttttgaagatatttctccactgtattcttggatttgatgttgttaaataaaaatctgatatcattcaaattattgcaccattgcagtggtatgccttttttacttgtgttctcttaaacttcctgtttttctttaatggcctaaagttccgttagctttctaagtttctaagtatagttttattttcatttac

SEQ ID NO: 286628 - DNA, 515 bp, Homo sapiens
tattcatttatattttctaaataagatatgacacacttatgagataggttgatggataatgagagctttttaacagctttattgaggtatgatcgacatacgaaaattatatatatttaaggtgaataacttgatgttttgttctacataaacattgtgaaatgatcaacacaattaagctagttaacatatccatgatctctacatagtagaggtattgtgtgtgtgcatatcatatatattaatacgtgtgtgtacgtgtrtatatgtgtgtgtgtgtatgtgtgtgtaattcagccttataaaacaaaaaaatgcctgtgcctgtgatcccagctacttgagaggctgaggtgggagaatcacttgagcccaggagtttgaatccagcctgggcaatatagcaagaccccatcagaaaaaaaggaaggaaataaggaaatcttgctactggagacaacatggatggagctggagggcattatactaagtgaaaaacagcagtacacagaaag

SEQ ID NO: 286629 - DNA, 578 bp, Homo sapiens
acccctgcttcaggcagccatctgtgaagatccagctctcaaggatctacacagttctcctctgcctcctactacacttaggttccatccaagttcacacgtggttattgtgaggacagtcaggatagaaatggtgagggctcttgagtcacacaacacctgaattcaaatcctggatgcaccagttactagctctgtggctttggaaaaatcctgtctaacctttttgatcctcagttttctcatcgtcaaaatgggtataataacatatctctctacctaggtctgttgcaaattaaataaaacaatgtgtgtaaaaagtttatgcataatacatgggacattatatcagtaaagaagagttcaattattgttggctgctatctgctacaatygcatgctctcaaatttcagtcttgcctcactggtccaactgaaatctctatagacaatgaccagggtggacaagtcccttgcccttctcaactttctccatcaagtcctgttgggccctcaccacctagtatgaggaggctttgctaggtttggatcacgactgaacgtttgttcatgcacaa

SEQ ID NO: 286630 - DNA, 604 bp, Homo sapiens
tatcatgacaacagaacacaaaaaggagcaggggtcactattcttatatcggataaaacagactttaaaccaacagaagtcaaaaggaacaaagaacggcattatataatgataaaggattcaattcaacaagaagactttgccaaaatacttacacaccctacactggaatagccaaattcataaaaggagtacttctagacctacaagaagtcatagacagccacaaaataatagtgggggacttcaacacccaactgacaacattctgccttacttcatcaaggcagaaaactcacaaagaaactttggacttaaaaatttgacattcgaccaattagatctagtagatatacacagaatactccacccatcaaccacagaatacacattcttttcatctacacacagaacatactccaagactgaccacaggcttggccataaagaatgtttcaataaaattttttttttttttttttttgagacagagtctcgctgtcgcccaggctggagtrcagtggcacgatctcggctcaaaatcataccaaccatactctcggatctcagtgcaattaaaatagagatcaataccaagatattt

SEQ ID NO: 286631 - DNA, 639 bp, Homo sapiens
atattaatagttcttccagaacacataaggggattttttttttttttacatagaaatagtgccccctccccttctttgcctctctgtacctctcgttctgtgtcttcatttcatgctgtggttgtgtcatttcatgctgtggttgtgttgattgggagagaagaatcttctcagctagctgcttagtactaagcagatgcactcagttgaaaatggttagcggttaggggttagccaaacacgggcagcagaagtgataaaggtaggtacggatgtttgggtggtgcggtaatgggaattcaaaaaaatgaaagacttcaaatcacccaaaagcacattggagcacacatacatttccatttgtataggttccagagagaatcaacacacactccaaatgggctgacaaaatagaaacatctaggaataagttagatatgattctatttcattaataattcatctttcagttctaataatttcatacaaattcagagagagataccaaactttcattgtctttggatccgatggattttaaatggttatatttttgtttagcaattatcctcgttttaatrgtgcctcttcaacttttcctttatatgaatccaaaagtattttaaattcattgaataa

SEQ ID NO: 286632 - DNA, 361 bp, Homo sapiens
  misc_feature (1)...(361): n = A,T,C or G
nnnnataaaatattatcaagtatatcgctatggcagaaccaaatgcaacacacttttgaggtatgtcatgagacacttctttatgaagattaaatttagaattagtgaattccctatattctctccagttcttttttgacttgctgtagtctgccttctctctgaaaaaaatagttttatgaaaattcagtcaatgaaattggkctgttgaactctaatttagcatcatagagaaattgtgtgtgtttcgtgagcaactatctcattcaagaggttgcccacacagtttgcagctagagaggaccttcagagaatcagggcaacccttcattttacatctgagtaagccaaagtctaaggc

SEQ ID NO: 286633 - DNA, 441 bp, Homo sapiens
aacttctctctgactggtgtggctgccttttccaaactactttaccattgaccactatagttgactcccacaacaacttttgaatattaaactagagttggaatttgaagaagcacggacacacagagattaagtgatttctttaaggtcacccaatggtagagcagagggttggagacctctccactgggttcatgccatttgactacattaccctctctcactttcttggttatctttcttccgtctgatcactactgatcattcagtaaaattctatctcatggcttacattttttctctctgtctcacctgacagcatcctakatttcatcgtccaagtgggtgaatccagtcattatgctggactcattatgctcgatcttcacatcaccagtgatcttcttgccaccctagttatccacatttatcattccatgg

SEQ ID NO: 286634 - DNA, 555 bp, Homo sapiens
aaatcagtagactttgagtagattacccaccataatgtgggtgggcttcatccaatcagttgaaggctttaacagcaaagactgaggtcccccaaagaagaaggaattaagcctccagaycataacatagaaattctgcctcagtttccagtcttttaactcaagactgcaacatcaactcttacctgaatttccagcctgtaagcctgtcctgcagattttggactcacaattatgtgagacaatttctttaagtctctgtccatctctgactgtctgtctgtggctctctctctttcttccttttcaacctcacagggtcctcttatattgaatcatatattttttccaatatatcaataatcttcctttattttcctcctttgccagcttagatatcatggtccttcatgcaataacactgtttcaaagagactgtcttgtacagtggaaaaaatgttcaaataccatcagcaccccatacctgtgggttctgtatctttgggttcaatcactgaccaaaattattcaaagaaaagtgaacacttccatctg

SEQ ID NO: 286635 - DNA, 294 bp, Homo sapiens
gtcccataactacacagttaacatgaatggaaagctccaatgccacaatgaaaggtacttgcagctcacataagtggccagaataagtgcctcattcctgtgccccagtctgcagcttctggttcatatttgtgcctcagcaaaaagattttactgaaacattttrtgcatctttgggtcactgttaaattactaaactcctgaatattaagcctgtgcctgcaaatgtcacaggtgtgatccacaaattatggttgagaagtccatttagttgtgttgaggtatttaagattg

SEQ ID NO: 286636 - DNA, 608 bp, Homo sapiens
  misc_feature (1)...(608): n = A,T,C or G
tgtattaatcaggattaggttcagttgcaaagtacaggtacccaactacggtcacttcaataaaacgaacttattcccttatgtgaattctggtggttggcatgtagggctgttgttgctgatgctctacaatccttagagcatggtttctaacctcagggttgcctcatggttatgaaatagttagtgtagctctggcaatcatatcaaaattccagaaaagaagcaggaagaaagaagaaggaagaggaggaaaagagaaaggagagtccatgsccatgctaccctgaacacacccgatcttttgatgatctcaggagctaagcggggttgggtctggttagtacttggttgggagaaaggagaagagggaaggagaaagataaggggtaaagaggaacttgtaaaagggcacatgtgcagggagtcatctctccctttaaggcacattcctagaagcacactactcaacaacttccagtgttcaggaaatccttctcccatcatcttcagcttgtacatgatttatcagaacatcacacagccactcttatccattaagaaaacttggcaannnnnnnnnnnnnnnnnnnnnnnnnnnnnnnnnn

SEQ ID NO: 286637 - DNA, 608 bp, Homo sapiens
  misc_feature (1)...(608): n = A,T,C or G
tgtattaatcaggattaggttcagttgcaaagtacaggtacccaactacggtcacttcaataaaacgaacttattcccttatgtgaattctggtggttggcatgtagggctgttgttgctgatgctctacaatccttagagcatggtttctaacctcagggttgcctcatggttatgaaatagttagtgtagctctggcaatcatatcaaaattccagaaaagaagcaggaagaaagaagaaggaagaggaggaaaagagaaaggagagtccatgcccatgctaccctgaacacacccgatcttttgatgatctcaggagctaagcggggttgggtctggttagtacttggttgggagaaaggagaagagggaaggagaaagataaggggtaaagaggaacttgtaaaagggcacatgtgcagggagtcatctctccctttaaggcacattcctagaagcacactactcaacaacttccagtgttcaggaaatccttctcccatcatcttcagcttrtacatgatttatcagaacatcacacagccactcttatccattaagaaaacttggcaannnnnnnnnnnnnnnnnnnnnnnnnnnnnnnnnn

SEQ ID NO: 286638 - DNA, 599 bp, Homo sapiens
ccactgcaaaggtgccccaccaatgcatcctaccaatatgagtgtgcccggggataagacatctctttccagtgctacaccctccagccttctcaactttcctacttccccactcccatgaaacccttttctcgctttccatccttctatgcctctccctgacctccactcactggactcactatcagttcatctgacttcttcaacttcatgagccccttctggaaaacttatccttgattcttgggttggctatttttaacatggccttcagccaccccagcttctcagacttcctccctcacaaactgctgttcacagctctcttcccttctcstgttccacgtgatgtttctaaatacaaagtccacttagacttgcataagagtaagatgcagtcgagaaacactagccactctttcctaatatgtgatgcttggcaaaacctttattcatttcttcattttccctacttcccaaagttaacactgtaagcctcttttgttttcctgggcccacatttcaggactctacaacagtatacagaaccctaaatcctactttgaggctattcaagttgcaccaagtcactttttgtt

SEQ ID NO: 286639 - DNA, 560 bp, Homo sapiens
tctataccacattttgtttatccattcatcagatgatgcacatttgggtcatttccactttttggctattatgaataatgctgctgtgaatactcaaggacaaatttttgtgcacacatatgttttcttttgggtatatatctaggagtggaattgctggatcatatggtagctctatgtttaactaccacaggaactgccaaactgttttccaaagcagctgtaccatgttacatatccactagcagtgtaggagggktccaatttctccaatacttggcatttggctacttaggtaagcagtcatattagttttaatagtttatcagttctgtttacttttatagttggcagtgatatcagttctaaatgatttgtaatatttctccctttttacattagacacaaatttcatattaattttatataataacattgatagaatacctcttaatcttgatcctgactttgctgggattgccactagtgcagtgattctgaaacttgggtgcatattggaatcatctggggaatattaaataatgctaatgcttgggttg

SEQ ID NO: 286640 - DNA, 560 bp, Homo sapiens
tctataccacattttgtttatccattcatcagatgatgcacatttgggtcatttccactttttggctattatgaataatgctgctgtgaatactcaaggacaaatttttgtgcacacatatgttttcttttgggtatatatctaggagtggaattgctggatcatatggtagctctatgtttaactaccacaggaactgccaaactgttttccaaagcagctgtaccatgttacatatccactagcagtgtaggaggggtccaatttctccaatacttggcatttggctacttaggtaagcagtcatattagttttaatagtttatcagttctgtttacttttatagttggcagtgatatcagttctaaatgatttstaatatttctccctttttacattagacacaaatttcatattaattttatataataacattgatagaatacctcttaatcttgatcctgactttgctgggattgccactagtgcagtgattctgaaacttgggtgcatattggaatcatctggggaatattaaataatgctaatgcttgggttg

SEQ ID NO: 286641 - DNA, 560 bp, Homo sapiens
tctataccacattttgtttatccattcatcagatgatgcacatttgggtcatttccactttttggctattatgaataatgctgctgtgaatactcaaggacaaatttttgtgcacacatatgttttcttttgggtatatatctaggagtggaattgctggatcatatggtagctctatgtttaactaccacaggaactgccaaactgttttccaaagcagctgtaccatgttacatatccactagcagtgtaggaggggtccaatttctccaatacttggcatttggctacttaggtaagcagtcatattagttttaatagtttatcagttctgtttacttttatagttggcagtgatatcagttctaaatgatttgtaatatttctccctttttacattagasacaaatttcatattaattttatataataacattgatagaatacctcttaatcttgatcctgactttgctgggattgccactagtgcagtgattctgaaacttgggtgcatattggaatcatctggggaatattaaataatgctaatgcttgggttg

SEQ ID NO: 286642 - DNA, 581 bp, Homo sapiens
atattggaatcatctggggaatattaaataatgctaatgcttgggttgcatccttagacagcctcttagtgtaacttgggaattaagagtttagaaaatttcctaggggattctaatgggaggcaatgtttgagaaccactgttctagtgcacacatatttctgtcacatcttttgttacattaaactataattatggatatcttttgtctgttttccccaagaaggtccttgggcacaggttttatgttctatttaactttagagtttatttttatttgatttgtttctctatcattgrtttttaaattatgactcatagtcttatttgacattttatcttcaaagtcatcacgtgcctgagaaatcataacaacttatttaaaaattctggttaaagaaaagggtcagataagagtctgtgtcttaaacagtaatgattgcaacattcctaaggaaagttttaggggacagggcagagagtagttttgacaaaagtatcacagatgtaaaagtctttgactttaagtgtctttggtctgttgagtctggtcagaaaatcgtaggcttctactatgtttc

SEQ ID NO: 286643 - DNA, 581 bp, Homo sapiens
atattggaatcatctggggaatattaaataatgctaatgcttgggttgcatccttagacagcctcttagtgtaacttgggaattaagagtttagaaaatttcctaggggattctaatgggaggcaatgtttgagaaccactgttctagtgcacacatatttctgtcacatcttttgttacattaaactataattatggatatcttttgtctgttttccccaagaaggtccttgggcacaggttttatgttctatttaactttagagtttatttttatttgatttgtttctctatcattggtttttaaattatgactcataktcttatttgacattttatcttcaaagtcatcacgtgcctgagaaatcataacaacttatttaaaaattctggttaaagaaaagggtcagataagagtctgtgtcttaaacagtaatgattgcaacattcctaaggaaagttttaggggacagggcagagagtagttttgacaaaagtatcacagatgtaaaagtctttgactttaagtgtctttggtctgttgagtctggtcagaaaatcgtaggcttctactatgtttc

SEQ ID NO: 286644 - DNA, 592 bp, Homo sapiens
tccagcctaggtgacaaagcaggtctccatctcaaaaaaaaaaaaaaatcaaatgaaaacaagagagttgtgtttgttgttttctgctattcttttattctttcttatgaactgggcaatatattttaaaagaatttcagaattacatagcttttttttttctactttccccaaatcaagtacaattaaatatatggtgaagaaactattttaaatttatgtttaagatggaagttttactaatcagaaatatgttcaattgcaagtatgcaaaatctcattacaatggctaaaacaaaagtaactttarttttctcatctaacaagaaatctggatgtgggtagctgttggcattggttgtgttgctaaataattgcgttggttacatattccaaccttcctatctttagagagttcacttttatcttcatgcatgttgcttcatggtagcaagatagttgttgaaaatccagagagctggtttgtcttcaaggcaggaagaaaaggggaggacaaagaatagcggcagctgcatctgacatccccttctctgtttttaaaaaccaggatacaaaaagcttttcagaaaat

SEQ ID NO: 286645 - DNA, 613 bp, Homo sapiens
cccataacataaaagcgcaaggtgaagcagcaagtgccaatatagaagctgcagcaagtaattcagaaaatcttgctaagataactgatgatagtggctatactaaacaatagattttcaatgtagatgaaacagccttatatttgaagaaaatgccatcaagaattttcatagctagrgagaagtcaacgcctggcttcaaagcttcaaaaaacaggctgactttcttgttaggggctcatgcagctggtaactttaagttgaagctaatgctcactgaccattacaaaaatcctggaacctttaatcatactaaatctactatgcctgttctctataaatggaacaacaaagcctggatgacagcatatctgtttacagcatggtttactgaatattttaagccactgttgagacctactgctcagaaaaaaatttcctttcaaaatattactgctcatccaaaatgtacctgctcacctaagagctccagtggagatgtacaaggagattcatgctgttttcctgcctgctaacacaacatccattctgcacctcatgatcaggagtaatttcaactttcaagtcttattatttaagaaatacatttagt

SEQ ID NO: 286646 - DNA, 605 bp, Homo sapiens
atgtgacccttcagacagagaattcaaaatagctgtttcgagtaaacttaaagaacttcaagataacacagagaatgaattcagaatcctaccagataaatttaacaaggaaattgaaataatttaaaagagtcaagcagaaattctgaagctgaaaaatgttaactggcactgaaaaatgcatcagagttctttaacagcagaactgatcaagcagaagaaagaattagtgacctggaagacagattttttgaaaacagtcaaatgagacaaaaaaaaaaaagaataaaagaygaagcacacttacaagatctagaaaatagtctcaaaagggcaaatctaagagttattggccttaaagaagaggtagatatggacataaaggtggaaagtttattcacagggataataacagagaacttcctatacctatagaaagatatcaatatccaaatacacgaaggtgatggaacacaagcagatttaacccaaagactatctcaagatttttaataatcaaattcccaactgtaaaggataaaggatcctaaaagcagcaagagaaagaaacaaacaatggagatccaatatgtctggcagcagac

SEQ ID NO: 286647 - DNA, 542 bp, Homo sapiens
tataaggccaaatagacataacaggtatttatagaacatttcatccaagagcagcagaatacacattyttctcctcagaatacggatcattctcaaggatagaccatatgttagtccacaacacgagtcttaaaatattcaaaaaattgaaataatatcgagtatctactttgactacaagggaataaacccagaaatcagtaacaaaaggaattttggaaactatatgcacacatggaaattacacaataagctcccaaatgcccagtgggtcaatgatgagattaagaagaaaattgaaaattttcttgaaacaaatgataatggaaatacaacatacaaaaacatatgggatacaggctgggtgcggtggctcatgaccgtaatcccagcactctgggagcctgaggtgggctgatcacttgaggtcagtaattcaagcctagcctggacaacatggcaaaaccccatctctactaaaaatacaaaacaaaacaaaacccatgggatacagtgaaagcagtactaagaaaaattatagc

SEQ ID NO: 286648 - DNA, 542 bp, Homo sapiens
tataaggccaaatagacataacaggtatttatagaacatttcatccaagagcagcagaatacacatttttctcctcagaatacggatcattctcaaggatagaccatatgttagtccacaacacgagtcttaaaatattcaaaaaattgaaataatatcragtatctactttgactacaagggaataaacccagaaatcagtaacaaaaggaattttggaaactatatgcacacatggaaattacacaataagctcccaaatgcccagtgggtcaatgatgagattaagaagaaaattgaaaattttcttgaaacaaatgataatggaaatacaacatacaaaaacatatgggatacaggctgggtgcggtggctcatgaccgtaatcccagcactctgggagcctgaggtgggctgatcacttgaggtcagtaattcaagcctagcctggacaacatggcaaaaccccatctctactaaaaatacaaaacaaaacaaaacccatgggatacagtgaaagcagtactaagaaaaattatagc

SEQ ID NO: 286649 - DNA, 542 bp, Homo sapiens
tataaggccaaatagacataacaggtatttatagaacatttcatccaagagcagcagaatacacatttttctcctcagaatacggatcattctcaaggatagaccatatgttagtccacaacacgagtcttaaaatattcaaaaaattgaaataatatcgagtatctactttgactacaagggaataaamccagaaatcagtaacaaaaggaattttggaaactatatgcacacatggaaattacacaataagctcccaaatgcccagtgggtcaatgatgagattaagaagaaaattgaaaattttcttgaaacaaatgataatggaaatacaacatacaaaaacatatgggatacaggctgggtgcggtggctcatgaccgtaatcccagcactctgggagcctgaggtgggctgatcacttgaggtcagtaattcaagcctagcctggacaacatggcaaaaccccatctctactaaaaatacaaaacaaaacaaaacccatgggatacagtgaaagcagtactaagaaaaattatagc

SEQ ID NO: 286650 - DNA, 542 bp, Homo sapiens
tataaggccaaatagacataacaggtatttatagaacatttcatccaagagcagcagaatacacatttttctcctcagaatacggatcattctcaaggatagaccatatgttagtccacaacacgagtcttaaaatattcaaaaaattgaaataatatcgagtatctactttgactacaagggaataaacccagaaatcagtaacaaaaggaattttggaaactatatgmacacatggaaattacacaataagctcccaaatgcccagtgggtcaatgatgagattaagaagaaaattgaaaattttcttgaaacaaatgataatggaaatacaacatacaaaaacatatgggatacaggctgggtgcggtggctcatgaccgtaatcccagcactctgggagcctgaggtgggctgatcacttgaggtcagtaattcaagcctagcctggacaacatggcaaaaccccatctctactaaaaatacaaaacaaaacaaaacccatgggatacagtgaaagcagtactaagaaaaattatagc

SEQ ID NO: 286651 - DNA, 549 bp, Homo sapiens
aaaacccatttgataaaattcaacatctctttatgataaaaaccctaaaataactggggatagaaggaacatacctcaacagaataaacaccacatatgacagacctacagctagtatctgaatgggaaaaaactgaaagtcttttctccaagatctggaacaagrtaaggatgcctactttcaccattgttattcaacatagtactggaagtcctagatagtgaaatcagacaaaagaaataaaggaaatccagactggaaaggaagaagtcaaattatccttgtttgcagatcatgcggtcttatatttgggaaaacataaagactccaccaaaacactatacattattaaaactgatgaaccaattgagtaaacctgcaagatacaaaagcaacatacaaaaatcagtagcatttccatatgccaacagtgaacaatctgaaaaataaatcaagaaagtaagtaatccccaaaagtctcagctggcaagacggctgaataggaacagctctatctgcagctcctggtaagaatgacgcagaaggca

SEQ ID NO: 286652 - DNA, 549 bp, Homo sapiens
aaaacccatttgataaaattcaacatctctttatgataaaaaccctaaaataactggggatagaaggaacatacctcaacagaataaacaccacatatgacagacctacagctagtatctgaatgggaaaaaactgaaagtcttttctccaagatctggaacaaggtaaggatgcctactttcaccattgttattcaacatagtactggaagtcctagmtagtgaaatcagacaaaagaaataaaggaaatccagactggaaaggaagaagtcaaattatccttgtttgcagatcatgcggtcttatatttgggaaaacataaagactccaccaaaacactatacattattaaaactgatgaaccaattgagtaaacctgcaagatacaaaagcaacatacaaaaatcagtagcatttccatatgccaacagtgaacaatctgaaaaataaatcaagaaagtaagtaatccccaaaagtctcagctggcaagacggctgaataggaacagctctatctgcagctcctggtaagaatgacgcagaaggca

SEQ ID NO: 286653 - DNA, 615 bp, Homo sapiens
atctcattgggactggttggacagtgggtgcagcccacagaggatgagccgaagcacrgtagggtgtcacctgacccaggaagagcaaggggtcaggggatattccccctccagacaagggaaactgtgagagactgtaccaggaggaatgatgcactccagcccagatactgcacttttcccatggtcttcgcaagcggcagaccaggagattccctctggtgcctacaccaccagggccctgggtttcaagcaaacacaaaactgggcagccatttgggcagacaccaagctaactgcagaagcttttttttcataccccagtggcacctggaacaccagtgagacagtacccttcactcccccggaaagggggctgaagccagggagccaagtggtctgactcagcaggtcctgccccacagagcctagcaagctaagatccactggcttgaaattctcgctgccagcacagcagtctgaggtcaacctgggtcactcaagcttggtggggggaggggagtccaccattgctgaggcttgagtaggcagttttaccctctcagtgtaaacgaagccacagggaagttcaaactgggcaggactaccacagct

SEQ ID NO: 286654 - DNA, 640 bp, Homo sapiens
tatacatttccccaagcaatactttagctacattcgacaaattttgataaattgtaatttcattttcattcaattcaaaatgaattatttcatagcaaaatataagctaccaatcctaactcaagacatagaaaatttaaaccaattataaaagaagagattatataaaattgatctgaaatctgccagatagtttcaaagctgagttttatttaatatgttttaaaaagataattccaatattattaaaactgttccaaaccatttagagaaagaaagtgtttgtaatttattttatgacataactataaccttagcaaaataactttattaaatgatggaaaaataaatgtgctagacaccattctcatttgtcaagacaaatataaaaatgatayataaaatattatccattagaatccagcagtacctcaaaagaagattattttatgatcaagtagggtttattctaggaatgcatagttggtcctgtgcctgatatttataaacgtaattgattaatgagcacattaaaggagaaaaatattatgataattttaataaatttcaaaaatcacaataaaattcagcagctattcttaataaaagctatagttgaagctaggaatataagaacact

SEQ ID NO: 286655 - DNA, 640 bp, Homo sapiens
tatacatttccccaagcaatactttagctacattcgacaaattttgataaattgtaatttcattttcattcaattcaaaatgaattatttcatagcaaaatataagctaccaatcctaactcaagacatagaaaatttaaaccaattataaaagaagagattatataaaattgatctgaaatctgccagatagtttcaaagctgagttttatttaatatgttttaaaaagataattccaatattattaaaactgttccaaaccatttagagaaagaaagtgtttgtaatttattttatgacataactataaccttagcaaaataactttattaaatgatggaaaaataaatgtgctagacaccattctcatttgtcaagacaaatataaaaatgatacataaaatattatccattagaatccagcagtacctcaaaagaagattattttatgatcaagtagggtttattctaggaatgcatagttggtcctgtgcctgatatttataaaygtaattgattaatgagcacattaaaggagaaaaatattatgataattttaataaatttcaaaaatcacaataaaattcagcagctattcttaataaaagctatagttgaagctaggaatataagaacact

SEQ ID NO: 286656 - DNA, 576 bp, Homo sapiens
tttcaggacttaatatatagctacaataatcaagactggaggaagagacacatcgatctgctaagtcagcttgctataagcactgttgaagaaggtcttcaggagaatctgagactaaaattcaaataaacttgttctacaaacagttacaaaatactatgttcagatcctccccaaaatctatggatttcctctgcagaaatacccttttcaggtgccttgagagctttcatttcctgtgctttcctcaaccctgtcccctttattcaaaggcagtggtcctcaaaaagtggtatccagagcagcatcagcatcgtggggaacattaatacrgaatcttggcctcactctagacttactgattcagaaactctgaagttacacccagcaatctgtgttttaatgagcccttggggtgattctaatgcacactcacatgtaagaaccacggggctagagcctgataagtctagaggcttcttccaccgcacataaaataaaactctaaagtacagtggtttcaaaccagaattgtttttaatattcattgtggaaacaagctctggcaccgtggaa

SEQ ID NO: 286657 - DNA, 443 bp, Homo sapiens
tgatgtagttctcataatttcccatgtagaactctgggctccattcatgctctctcctgtgtacctttgctcaaactgttcctcttcttctaggacgtcaggaagctgagagcaaggcatgtgtcatcyttctccgcatccctaacccacaacagacttttcaaaacatctcttaatggttattggcactactgttcaccagatttttcagagctggctctcagactatattatcacattcttcagacaagaatgccctcacctacaggtgtcatgaagctaaatttacaaccaacacaacaacctcacattcagttcccatggaaactccctatgcattagtctaacctcaggtttttgggggccaggctgtagaatagttttttttcttaagctgcagatatatctaaataattaagaaaaatgtgtggcaacgtgaggca

SEQ ID NO: 286658 - DNA, 490 bp, Homo sapiens
aagacccccaaaaaataagtcctaaaagtgcagcactctgagtgttcgctgtcacatgcttttggtttttccttctcccagtagctcacaaagtcttcctacatcagtcccagccatggatacacttacctgtgatttattgatgataaktgtaggaaagccatttgtaatcaaacgttaaacaaagacattctctcgctgagagggagtgataacgcaccatttagtaatttttgtgcagttggtaatttggagaatgaatgataatttctgagccttgaaaagccacattgacaatgcctggtgctattcacctagtgaataaagacaccttcctctctatgtcttgtgataaatttcttttattagggtaacttacgtgggactttatcttaatggtctctcatatggggcagttgtgctttggccgttaggctgtttttcatcacgccttaaacacagggctcggagaaaataaatagcaatagta

SEQ ID NO: 286659 - DNA, 580 bp, Homo sapiens
atccttaaccctgtctccaagcccctcacccagttcccacctccaacagtgtcacaaacccccaaaagggctgtcagtcattctctgcccctcccagtttctctgccaggtaggaagagtaggagagaggaatggagggaggctatcttagtgagccagtagcacarctaggaaaccataagacatctcaactgccttagtatactaacatagtaactgtctctttctcagccttgaattgagttacagatttcctttcattgctttagcctaggacacatagctccgggagatggggggagaaatattaataacacctaacatctaattcacatttactgtatgttaggcattgtaccaagaacttttcatttattatgtcatttaaccttcacaccatctttaccagggggatactactattatctgtttttattggtggagaaatgctgagaaggcctatgttacttgcccagaactagtaattcttggtgctggatttggaacccacaatatctgactggaaagcactcacttttttcctctctgctgttctgacaatggcaatctcctccaaaca

SEQ ID NO: 286660 - DNA, 521 bp, Homo sapiens
agtgataaatattatacatcttggtaaaaagacagttatgtgggtcaaaatgcattgaagttgtgcacttaagatttgtgtatttaactctgtaaagtatatcccaaccacacatactcctccacaccctctccccaccaaaacactggaaacagatactgaactctatttaggagatcttctcttcttacaagtakgcagtaccgattctgaaactaccttatctctattctaggcttaagcaaatgtattagttggttttcacactgctgataaagacatacctgagactgggaagaaaaagaggtttaattggatttacagttccacatggctggagagccctcagaatcatggcaggaggcaaaagcacttcttacatggtggtggcaagagaaaatgaagaagatacaaaagtggaaaccactgataaaaccattagatctcataagacttatttactactgcaagaacagtatggaggaaatcaccctcattattcaaattatctcccaccaggt

SEQ ID NO: 286661 - DNA, 573 bp, Homo sapiens
tgtttctgttttctttctctgaatgatcgcaccaggtattggttccacacacagataaccatgcaggtatgaacgctggggaaaaggacctgcatcttactagcccctagttttatakaagtgagtgctcctgtggtgttggcaaggcccccgatattgacaagttttggagccagtaaaatgaaagtgctttcccgcagtgttcgtacctgcgtggttatctgtgtgtggaagccagggtggggtttctatggggctttctcttagatactcatttttttgtcactaattttgaaaaatctgaaaaaatatagtgttttgggaaaaactactccattttactttagatttagtttaaaattttttgttaaatgagaaaatccaatgccagaagagtggcattgaaatgaagtgttttcatatattgctggtgcggatatggattggaagaatctttctgcagagcaatttaatatcatgtgccaaatgcctcaaaaatgtttttaccacttggtttagtaattttgctttcagaaagtcttcctaggtaaagataatacaacactggggaag

SEQ ID NO: 286662 - DNA, 573 bp, Homo sapiens
tgtttctgttttctttctctgaatgatcgcaccaggtattggttccacacacagataaccatgcaggtatgaacgctggggaaaaggacctgcatcttactagcccctagttttatataagtgagtgctcctgtggtgttggcaaggcccccgatattgacaagttttggagccagtaaaatgaaagtgctttcccgcagtgttcgtacctgcgtggttatctgtgtgtggaagccarggtggggtttctatggggctttctcttagatactcatttttttgtcactaattttgaaaaatctgaaaaaatatagtgttttgggaaaaactactccattttactttagatttagtttaaaattttttgttaaatgagaaaatccaatgccagaagagtggcattgaaatgaagtgttttcatatattgctggtgcggatatggattggaagaatctttctgcagagcaatttaatatcatgtgccaaatgcctcaaaaatgtttttaccacttggtttagtaattttgctttcagaaagtcttcctaggtaaagataatacaacactggggaag

SEQ ID NO: 286663 - DNA, 573 bp, Homo sapiens
tgtttctgttttctttctctgaatgatcgcaccaggtattggttccacacacagataaccatgcaggtatgaacgctggggaaaaggacctgcatcttactagcccctagttttatataagtgagtgctcctgtggtgttggcaaggcccccgatattgacaagttttggagccagtaaaatgaaagtgctttcccgcagtgttcgtacctgcgtggttatctgtgtgtggaagccagggtggggtttctatggggctttctcttagatactcatttttttgtcactaattttgaaaaatctgaaaaaatatagtgttttgggaaaaackactccattttactttagatttagtttaaaattttttgttaaatgagaaaatccaatgccagaagagtggcattgaaatgaagtgttttcatatattgctggtgcggatatggattggaagaatctttctgcagagcaatttaatatcatgtgccaaatgcctcaaaaatgtttttaccacttggtttagtaattttgctttcagaaagtcttcctaggtaaagataatacaacactggggaag

SEQ ID NO: 286664 - DNA, 577 bp, Homo sapiens
tgtgccatttttatactcatgtgcacaggttccctctttagaccacaggtcgagctcacacatctccttggaagccatcactgggtaagcctccctactcactctagccatttgtccctggctgaatagtaaatattccctccatgcactttggcaggtattatatttatatacctctataattgcacatatatacagagaaagagatcacttatmtatttactggtaaaaacatgtaacataaaatttactgtcttaaccatttttaactgtatagttcagtaatggttaagtatattcatgttgttgtgtaaccaatatccagaactcttttcatcttccaaaactaaaactttgtatccattaaacaacagctcctcatcccctatttctctatctccctggccatcggtattctattttctgtttctatgaatttgaacactctagatatttcacataattggaatcatacaatatttgctttttttgagactggcttatttcacttgccataatgtcctcaaggttcatccatgttgtagcatgtgtcagaatttccttcttttttaaggcc

SEQ ID NO: 286665 - DNA, 600 bp, Homo sapiens
gtgaccaccttcctgttatgttcaaaccttagcacttattgtcatcacttaggcacatgtttctccaaatatatctgyggccttgaaggcattaaatagctcccttgatattgccctgacttcttgctaagcctgagaaaaggaaggtggctttaaaaaattatatttactccaagaaaaagaaagcaatcggattactcaagaaactattccagtcaacaaagtatttggctaattgcaatgttgatagactacatcaaaacgaaataatatagaactcaccctctatagtgatgaagtaggactccatcccttcataaaagcaaggagaatactgacaaaactgtcaaaattagctttttcagaaaggctcgtaacaatcaaaggagagttaattcaagaacaacaacttcatttctctaagaacagcaaccttatgtccttttgacttgtgctactcccgtgcccttctccccagctctgcggtagctttgaaagctagcaacctcacaaacacagtagttgtgaaaaccagaagcccattagccactggagaatgggaaacaaggcacaaattggtttcaagctccccagaattcc

SEQ ID NO: 286666 - DNA, 600 bp, Homo sapiens
gtgaccaccttcctgttatgttcaaaccttagcacttattgtcatcacttaggcacatgtttctccaaatatatctgtggccttgaaggcattaaatagctcccttgatattgccctgacttcttgctaagcctgagaaaaggaaggtggctttaaaaaattatatttactccaagaaaaagaaagcaatcggattactcaagaaactattccagtcaacaaagtatttggctaattgcaatgttgatagactacatcaaaacgaaataatatagaactcaccctctakagtgatgaagtaggactccatcccttcataaaagcaaggagaatactgacaaaactgtcaaaattagctttttcagaaaggctcgtaacaatcaaaggagagttaattcaagaacaacaacttcatttctctaagaacagcaaccttatgtccttttgacttgtgctactcccgtgcccttctccccagctctgcggtagctttgaaagctagcaacctcacaaacacagtagttgtgaaaaccagaagcccattagccactggagaatgggaaacaaggcacaaattggtttcaagctccccagaattcc

SEQ ID NO: 286667 - DNA, 600 bp, Homo sapiens
gtgaccaccttcctgttatgttcaaaccttagcacttattgtcatcacttaggcacatgtttctccaaatatatctgtggccttgaaggcattaaatagctcccttgatattgccctgacttcttgctaagcctgagaaaaggaaggtggctttaaaaaattatatttactccaagaaaaagaaagcaatcggattactcaagaaactattccagtcaacaaagtatttggctaattgcaatgttgatagactacatcaaaacgaaataatatagaactcaccctctatagtgatgaagtaggactccatcccttcataaaagcaaggagaatactgacaaaactgtcaaaattagctttttcagaaaggctcgtaacaatcaaaggagagttaattcaagaacaacaacttcatttctctaagaacagcaaccttatgtccttttgacttgtsctactcccgtgcccttctccccagctctgcggtagctttgaaagctagcaacctcacaaacacagtagttgtgaaaaccagaagcccattagccactggagaatgggaaacaaggcacaaattggtttcaagctccccagaattcc

SEQ ID NO: 286668 - DNA, 619 bp, Homo sapiens
atagtcaaatagtgctaaatgacttatgaccaaaaatagcagttatttcccaccttcttccaccttccttctccatccttagaagaggcaacaactttaaagtttctagtttcttttcctaatacttactccacatatctataaatattcctatttttgctgcatttacacattgagtttaccttacagtacatgaaaattttggcagtctcagccatctccattatccactctttttcctccctttataagtaccacaatttttaattaagtgcctacttagtgtttttattattataactaggaaaatactcttccatgctgtacaagatagggtattattgtgttatgggatattataatgtagggtgtayaccttcattttctcatatgatttctggcttttcttagatttaagtattgtcttacatttttatttgcttaattttctttgatccttggctgtgttttccaacactctccaactctcgataaccacttctcgatacaactgcccacagggtaaaaactttcagttcatctctttgctctgagactctgcccctagctttccttcttttcagcaatgcatatctatcagaaaaagagtctatgaaac

SEQ ID NO: 286669 - DNA, 488 bp, Homo sapiens
tgtactcactctttattgagtctcccacacttaccactgttcctggsccggacttcaatccagcctcccacattattcctgataccacacctgaccctcatgactgcatctctctgatccacctgaggttcaccccatttccccacatttccttcttccctgtttctcaccctgatcacacttggtttattgatggcagttccacaaggcctaatcgccacacaccagcaaaggcaggctatgctatagtacaagccactagcccacctcttagaacctctcatttcctttccatcgtggaaatctatcctcaaggagatcactcctcagtgttccatctgctattctactactcctcagggattgttcaggccccctccctttcctacacatcaagctcggggatttgtccctgcccaggactggcaaattgactttactcacattccctgagtcagaaaactaaaatatctcttagtctgggtaga

SEQ ID NO: 286670 - DNA, 488 bp, Homo sapiens
tgtactcactctttattgagtctcccacacttaccactgttcctgggccggacttcaatccrgcctcccacattattcctgataccacacctgaccctcatgactgcatctctctgatccacctgaggttcaccccatttccccacatttccttcttccctgtttctcaccctgatcacacttggtttattgatggcagttccacaaggcctaatcgccacacaccagcaaaggcaggctatgctatagtacaagccactagcccacctcttagaacctctcatttcctttccatcgtggaaatctatcctcaaggagatcactcctcagtgttccatctgctattctactactcctcagggattgttcaggccccctccctttcctacacatcaagctcggggatttgtccctgcccaggactggcaaattgactttactcacattccctgagtcagaaaactaaaatatctcttagtctgggtaga

SEQ ID NO: 286671 - DNA, 557 bp, Homo sapiens
  misc_feature (1)...(557): n = A,T,C or G
nnnnnnnnnnnnngtgaagtttttctgattctgggaaatctaacaaattttgtatcaaatttggatctacaaaccttgtagtttccttcacagtgattgctacacattgtctcatcttctcattcccacaaccataaaagtatttctctaaatgattttagacactttttcttaaggatgacttggcagaaggtacaagggacaaaattttatagctctttggcaataycagttgctataagtatcatttttaaattgagaaggagtaattttctgttcttaaaggagaaagccactcctctctcataagagttttgggtccttattggtgttgaactggagagtatctccttaaattttacactctgtgaacctgttgtgtctaaccctaatccaacacctgtctaactatcattcctttataagtaactgatcttttctcactggctgcattaaagattctctcttcttcttaggtattctttagcttcactgtaatgtgtacaaacagatttgtttttatttattttgtgagagataatttttatctctcatca

SEQ ID NO: 286672 - DNA, 557 bp, Homo sapiens
  misc_feature (1)...(557): n = A,T,C or G
nnnnnnnnnnnnngtgaagtttttctgattctgggaaatctaacaaattttgtatcaaatttggatctacaaaccttgtagtttccttcacagtgattgctacacattgtctcatcttctcattcccacaaccataaaagtatttctctaaatgattttagacactttttcttaaggatgacttggcagaaggtacaagggacaaaattttatagctctttggcaataccagttgctataagtatcatttttaaattgagaaggagtaattttctgttcttaaaggagaaagccactcctctctcataagagttttgggtccttattggtgttgaactggagagtatctccttaaattttacactctgtgaacctgttgtgtctaaccctaatccaacacctgtctaactatcattcctttataagtaactgatcttttctcaytggctgcattaaagattctctcttcttcttaggtattctttagcttcactgtaatgtgtacaaacagatttgtttttatttattttgtgagagataatttttatctctcatca

SEQ ID NO: 286673 - DNA, 470 bp, Homo sapiens
catttgaggcttgggtttaaggtgtgctcttctacacagtgtctcagagcattaccaaccagagagtactttcaatcaaatgcttagtttgattttttttctttttttggctcacacgaatagtgtaaattttggtcccacacctatgagagggccaatttatggttatacattctcaaggaagatactttttatttagagtcaggaaaattttcctttttttttycccccctttgtagggcaacttccttatcctcccttctccaatttatcttttctctgagtgccatttcttgggaaacaacgatttagacagggatttctgatctgactttccaacatgtaatattaagttttgcctttgttcccaggatcagccccaaaaattgaagctctaatttgtctggaataggcagatatccatggtggccattggctcatttctcacctttcgggaataattgctttat

SEQ ID NO: 286674 - DNA, 542 bp, Homo sapiens
gaaggacatgtaccaagttaagtgacttagagccatgtgaacataagacccatagcctatggatttctctttttgacaaggtgagccactcataaggtagatgtgtcacctgacaattcttccacaatttgtgtattaataaaacttttatcttctctattaagaagaataatctccaagcaggtagtaagaaaaaatgagttctaagaaagataaggagaaaatatatgagcactttcagatccaaatgagttacatakaaaagactaaagagaacacagagaggcaaatgccaaactgtgattggtaatttttatggaatcatggagaacacggaagttctcaagagattatgatgtagacttaaatagtctcaatttttactaagatagattcttgggacactatatcagaggttttgaaatgggttttcacctgcctttcacacacacaaattctagatttttatttaggttcaacacagaaactaatatggaggatgtggtttattaaatgaaaaggtgtaaggcgagggactctct

SEQ ID NO: 286675 - DNA, 542 bp, Homo sapiens
gaaggacatgtaccaagttaagtgacttagagccatgtgaacataagacccatagcctatggatttctctttttgacaaggtgagccactcataaggtagatgtgtcacctgacaattcttccacaatttgtgtattaataaaacttttatcttctctattaagaagaataatctccaagcaggtagtaagaaaaaatgagttctaagaaagataaggagaaaatatatgagcactttcagatccaaatgagttacatataaaagactaaagagaacasagagaggcaaatgccaaactgtgattggtaatttttatggaatcatggagaacacggaagttctcaagagattatgatgtagacttaaatagtctcaatttttactaagatagattcttgggacactatatcagaggttttgaaatgggttttcacctgcctttcacacacacaaattctagatttttatttaggttcaacacagaaactaatatggaggatgtggtttattaaatgaaaaggtgtaaggcgagggactctct

SEQ ID NO: 286676 - DNA, 542 bp, Homo sapiens
gaaggacatgtaccaagttaagtgacttagagccatgtgaacataagacccatagcctatggatttctctttttgacaaggtgagccactcataaggtagatgtgtcacctgacaattcttccacaatttgtgtattaataaaacttttatcttctctattaagaagaataatctccaagcaggtagtaagaaaaaatgagttctaagaaagataaggagaaaatatatgagcactttcagatccaaatgagttacatataaaagactaaagagaacacagagaggcaaatgccaaactgtrattggtaatttttatggaatcatggagaacacggaagttctcaagagattatgatgtagacttaaatagtctcaatttttactaagatagattcttgggacactatatcagaggttttgaaatgggttttcacctgcctttcacacacacaaattctagatttttatttaggttcaacacagaaactaatatggaggatgtggtttattaaatgaaaaggtgtaaggcgagggactctct

SEQ ID NO: 286677 - DNA, 542 bp, Homo sapiens
gaaggacatgtaccaagttaagtgacttagagccatgtgaacataagacccatagcctatggatttctctttttgacaaggtgagccactcataaggtagatgtgtcacctgacaattcttccacaatttgtgtattaataaaacttttatcttctctattaagaagaataatctccaagcaggtagtaagaaaaaatgagttctaagaaagataaggagaaaatatatgagcactttcagatccaaatgagttacatataaaagactaaagagaacacagagaggcaaatgccaaactgtgattggtaatttttatggaatcatggagaacacggaagttctcaagagattatgatgtagacttaaatagtctcaatttttactaagatagattcttgggacactatatcagaggttttgaaatggkttttcacctgcctttcacacacacaaattctagatttttatttaggttcaacacagaaactaatatggaggatgtggtttattaaatgaaaaggtgtaaggcgagggactctct

SEQ ID NO: 286678 - DNA, 564 bp, Homo sapiens
tctaattactggattgtacagtaacagtatatttagttttgtaagaaactgctgaactgtcttctagagtggctgtaccatttcactttcccaccaacaaggaaagagagttcctgttgctccacattttcaccaacatttgatgttgtcagtgttctggattttggctattcaataggtatatagtgatatatcattttaatttgtaattaccttatgaagtatgatgttgcataccttttcatatgctttatctatatttgctaaagtgtgtcttatttgttaagaagtctgttcagattttttgcccattttttakttagattgttaattttcttgttcttaagtattgagttctctgtataagaacatttaattttattaaaaatcctttatcagtaagtattttagaaatattttcttccactatgtggcttctcattttcttgacaatgtgtttcatcatctaatatttttgtgtctaattgtttttgtacatatagtatgtgttttccaaatagaaaataaactccatgattatggagatgttttttgtgcctggca

SEQ ID NO: 286679 - DNA, 558 bp, Homo sapiens
gtagccatgtgatggggtactyttgttatgctgttatttgatactcaaaaacataagtacatatatgtcttaattattctgcaatttctatactttaattgctccttgtgcaagattatcttaaagccatgcttttgaaacaggagtatgtacattatgaatccatgagacctaaaattaaacatggcacatctaggggcattacctttccttatttattcatactacagataagttttgaagtagagtaaacagaatttcctaacacgtgctatgtggagtgtgaacaaaaaagagtggagtcaagaagaatgctaaagtttgaggaataataatatcatttcctgaaatcagaaagcttgctgggaggtaatgttaagacgttaagggattgttttctccactttatgtgtaagttcctattaagcatattagcaatgatgtcaagtaggatggtggatatacaagtctaaagtcaaggatgaaggctggagatatacatctgggagtcatcagcacagagctggttgttaaagccaggagatgggctgaacctat

SEQ ID NO: 286680 - DNA, 592 bp, Homo sapiens
caggcttcttaaaactggtagagcattcattctgcctatctgcatatctgtcaggaaatatttttaaaattacattataataggaaatcaagggctcccagaagacatagtaaagagcrgtggtgatttacccatttccaaagtagagaacacttacttttctgtgttggactcctagcaacagagaaggcataggagggatgagtattctatgaatttggtagtgggtcccaaatagatccacagaaatgggagatcttaaatatagtcccagtaataatgagtgaggggaaattgacagaaaccagctctttctaagataacacattcccagaatcaataaaaggtcagcaggagttaaacatctaagctgataaaggacagatcactaaggactctgggttttgaaaaaatctccagagaatgtagcatattgaaagatactcgatggatctgtttttcttggaagcaaataactcactgtactttgcatacaacatctgctacccctagtccccatcagccagacctcattcaacaaaacattttttatacagcatttatcaatttattgctcacataatgtttttag

SEQ ID NO: 286681 - DNA, 598 bp, Homo sapiens
taaaaaatggtaacatatttatactctttttctatctttctgctcaaaatttacatggtactttgggaatctgcctgcctatgtgactctataggcaacttttaacaatgctttcaaacatgcatacataggagatataatttctcttctataattaaggataagtgagctacactgacctgcttgctggttcttgcacattccaggcacattcctgcctttgtattttctatgccttctgcttacactattctccacccagacatctgcattcctgcacctccctcaggtctgtgctgtcagtctttccctgatcattctatttaaagtcatagccccctcccttcttctatcaattacctatctcatctcctgctttattttttatagctttattgcgctctaacacatattatacttatttattttgtttatctgtctctcccaactagaatataggcagcacaatgagggcagtaattttctgtatattttcttcactgctgtaatgaagttccctccagtgtctacartagtgccacacatgctcaataagtatttttggaatgaatgaatggatcaatcaatcaatcaataa

SEQ ID NO: 286682 - DNA, 1163 bp, Homo sapiens
gttagaccccttgctctagctctcccactcctgcaacttttgacaattgactcaacctctttctagtcccagtccccacctatgaagttgggataatctcctagggatttcagaaagaattaaatgatacaatgcaagtaaattgcctagaaccctggaattgctcaataattattaatggktataatattttattataattttaagaagctacgtatttcatagagaaggtgaggcttgaagaattaatagaattgggggcaagaggagagagtagacataggttaaatgagggaaaaacaagtctagaaacacaaagaaatggagacacatggtctactgaaggaagtgtgcccagaggtgatgggatgggaaagaaagcaaggagggagagatatgtggccaaaggtaagggggaacttgggctttacatacagctttgatcactgggttttgaagatcttgggaatggagggaagaagacagagagaagataggtagaataaagagaaggaagaagaaaagacaggaaaaaaagttgagaagcaaaaggaaagcccawagctagatctgagttctaattaataaagtcagtagacagaaggatagaggaaaaaccaaaagcccaaaatgggaagttctgatggaatggaaccgctggatgggacgatcgcacatgcacaaaaaaatacagcaattatagagctttaatcatagcagtgaaataatttctagaagaaagacatgaattaaaactagtaagaggaactgwgtaagaggatgatcactattgagactcaaattggtagtctagaagataaagtagggggaatgtgtcccccagcaaaaagacagagaagaaaaaataaagatctatggttcagaaccggaagctctaacatataaataataagagttccagaaggagaaccacagaacacatggggaagcactaattaaacacataatatgaaaaaatatccccgagctgaaggcggacataacacagactgaatccatatattcaagtttcaggcgcgattaataaataagaatacacatatgcgcgttctataaaaagtgctgtgctttaaagataatgagaacatcttacaaactttcaaacacagcaaatttttttaaactgagaaagaatcagagtg

SEQ ID NO: 286683 - DNA, 1805 bp, Homo sapiens
agctagatctgagttctaattaataaagtcagtagacagaaggatagaggaaaaaccaaaagcccaaaatgggaagttctgatggaatggaaccgctggatgggacgatcgcacatgcacaaaaaaatacagcaattatagagctttaatcatagcagtgaaataatttctagaagaaagacatgaattaaaactagtaagaggaactgtgtaagaggatgatcactattgagactcaaattggtagtctagaagataaagtagggggaatgtgtcccccagcaaaaagacagagaagaaaaaataaagatctakggttcagaaccggaagctctaacatataaataataagagttccagaaggagaaccacagaacacatggggaagcactaattaaacacataatatgaaaaaatatccccgagctgaaggcggacataacacagactgaatccatatattcaagtttcaggcgcgattaataaataagaatacacatatgcgcgttctataaaaagtgctgtgctttaaagataatgagaacatcttacaaactttcaaacacagcaaatttttttaaactgagaaagaatcagagtgwagctagatctgagttctaattaataaagtcagtagacagaaggatagaggaaaaaccaaaagcccaaaatgggaagttctgatggaatggaaccgctggatgggacgatcgcacatgcacaaaaaaatacagcaattatagagctttaatcatagcagtgaaataatttctagaagaaagacatgaattaaaactagtaagaggaactgtgtaagaggatgatcactattgagactcaaattggtagtctagaagataaagtagggggaatgtgtcccccagcaaaaagacagagaagaaaaaataaagatctatggttcagaaccggaagctctaacatawaaataataagagttccagaaggagaaccacagaacacatggggaagcactaattaaacacataatatgaaaaaatatccccgagctgaaggcggacataacacagactgaatccatatattcaagtttcaggcgcgattaataaataagaatacacatatgcgcgttctataaaaagtgctgtgctttaaagataatgagaacatcttacaaactttcaaacacagcaaatttttttaaactgagaaagaatcagagtgwagctagatctgagttctaattaataaagtcagtagacagaaggatagaggaaaaaccaaaagcccaaaatgggaagttctgatggaatggaaccgctggatgggacgatcgcacatgcacaaaaaaatacagcaattatagagctttaatcatagcagtgaaataatttctagaagaaagacatgaattaaaactagtaagaggaactgtgtaagaggatgatcactattgagactcaaattggtagtctagaagataaagtagggggaatgtgtcccccagcaaaaagacagagaagaaaaaataaagatctatggttcagaaccggaagctctaacatataaataataagagttccagaaggagaaccacagaacacatggggaagcactaattaaacacataatawgaaaaaatatccccgagctgaaggcggacataacacagactgaatccatatattcaagtttcaggcgcgattaataaataagaatacacatatgcgcgttctataaaaagtgctgtgctttaaagataatgagaacatcttacaaactttcaaacacagcaaatttttttaaactgagaaagaatcagagtg

SEQ ID NO: 286684 - DNA, 519 bp, Homo sapiens
cttaactaccagtgcccccttccaggactggattagctgttcgcctgcagctctcggccgataaccattcccaggtctgtgtgctctctgccgggatgtgagccggaaaatgccgcctactcagagctgagaactgcctggcacgcagggatagagggtcccggcgtgaggcacctgggacgggcaatgtggctcctgcctggcgccaggaaagcccaggttcccagagtaccgcaggactgaatgagctggggtggcaggggcacggggttggctctccctttgggacttttgggcgatgtggacgaattaatttgggtgttcacgtgcactaccccagcgctactcctgcgttgcagactttctttcagagccagaggtggagtctgcacagtcgtcggaaaaacaatatttttcyttcatggaatggctaagtaagttacctcacttccccaaatctcagttcttcatccatgaaatcaaaataaagtagtgtctagtcgaagggctgtgtggttt

SEQ ID NO: 286685 - DNA, 609 bp, Homo sapiens
ctagggtggcaagaagatcactggtgatgtgaagatcgagcataatgagtccagcataatgactggattcacccacttggacgatgaaatctatgatgctgtcaggtgagacagagagaaaaaatgtaagccatgagatagaattttactgaatgatcagtagtgatcagacggaagaaagataaccaagaaagtgagagagggtaatgtagtcaaatggcatgaacccagtggagaggtctccaaccctctgctctaccattgggtgaccttaaagaaatcacttaatctctgtgtgtccgtgcttcttcaaattccaactctagtttaatattcaaargttgttgtgggagtcaactatagtggtcaatggtaaagtagtttggaaaaggcagccagaccagtcagagagaagttagggtttcttgatatttatagttagtaagcactggagtgtgtctccaaacaaatttaaggaatttctggttgtgatttaaaggagatgtggtagccaacctccaccaggacccccaaatgatcctcattctcctggtactcccacccttgcatagggccttcctgcatttaacagggctgacttgtgtaaca

SEQ ID NO: 286686 - DNA, 609 bp, Homo sapiens
ctagggtggcaagaagatcactggtgatgtgaagatcgagcataatgagtccagcataatgactggattcacccacttggacgatgaaatctatgatgctgtcaggtgagacagagagaaaaaatgtaagccatgagatagaattttactgaatgatcagtagtgatcagacggaagaaagataaccaagaaagtgagagagggtaatgtagtcaaatggcatgaacccagtggagaggtctccaaccctctgctctaccattgggtgaccttaaagaaatcacttaatctctgtgtgtccgtgcttcttcaaattccaactctagtttaatattcaaaagttgttgtgggagtcaactatagtggtcaatggtaaagtagtttggaaaaggcagccagaccagtcagagagaagttagggtttcttgatatttatagttaktaagcactggagtgtgtctccaaacaaatttaaggaatttctggttgtgatttaaaggagatgtggtagccaacctccaccaggacccccaaatgatcctcattctcctggtactcccacccttgcatagggccttcctgcatttaacagggctgacttgtgtaaca

SEQ ID NO: 286687 - DNA, 549 bp, Homo sapiens
ttctataactatatctctccaataactaaatgatttgaaaattgggaagagtatataacagaataggttatctagtattttagatacttakaatattcacacagtgaatttcagctatgattaaatccatcaagttcccccattcgctcattttaaaaaggagattcagccatattaagtcaattaaattgcttttatgtttattttatcctctgacctagattcctgtactctcccattggctttaactttttgtgggacactcttgtactggaactgatttttagagtatctttagtgtggctagttggtattcccaagaaagtaacagactcacagtattccgttttacattttcctagttatggcgagattgttcttttcccaatccctctttatttttcctcttgacataaaacatttacacacatcacttatctcctctacacaatttattacaaactaaggggaaatggggcctctgtctcatttatttttaggattgtgtaagcatttgctcttgttaaatattgctattaactgactata

SEQ ID NO: 286688 - DNA, 549 bp, Homo sapiens
ttctataactatatctctccaataactaaatgatttgaaaattgggaagagtatataacagaataggttatctagtattttagatacttataatattcacacagtgaatttcagctatgattaaatccatcaagttcccccattcgctcattttaaaaaggagattcagccatattaagtcaattaaattgcttttatgtttattttatcctctgacctagattcctgtactctcccattggctttaactttttgtgggacactcttgtactggaactgatttttagagtatctttagtgtggctagttggtattcccaagaaagtaacagactcacagtattccgttttacattttcctagttatggcgagattgttcttttcccaatccctctttatttttcctcttgacataaaacatttacacacatcacttatctcctcyacacaatttattacaaactaaggggaaatggggcctctgtctcatttatttttaggattgtgtaagcatttgctcttgttaaatattgctattaactgactata

SEQ ID NO: 286689 - DNA, 575 bp, Homo sapiens
actacagacatggacaaggaagccagattttacaaccagaaagtcaagtgtgggggtacaggtggggtatgtgtgtggtgggggttatctatctaaaggatgaaatttggccaattgaaaacaggtattgtcagggaatccactgataaatttcttctcctttctccctttcatagattgggcaaggcacaacttctggtgctgccctgcatggctgtgcagatgtccctgaaaggtcacctgctctgtgtcttctagggtccctgtgagagagtagacggagaagtcatgcatcaccttgcactgtcccctttccttccctgactggcttctctttaygctttctccagcctgggattattatctctcacataaagacaaacctttatcttaatcctcacctcagcctttgttttccagaaaatgtgaactaaaacactgaccagttttaaaaaatggtaacatatttatactctttttctatctttgtgctcaaaattcacatggtactttgggaatctgcctgcctatgtgactatataggcaacttttaacaatgctttcacacatgcata

SEQ ID NO: 286690 - DNA, 575 bp, Homo sapiens
actacagacatggacaaggaagccagattttacaaccagaaagtcaagtgtgggggtacaggtggggtatgtgtgtggtgggggttatctatctaaaggatgaaatttggccaattgaaaacaggtattgtcagggaatccactgataaatttcttctcctttctccctttcatagattgggcaaggcacaacttctggtgctgccctgcatggctgtgcagatgtccctgaaaggtcacctgctctgtgtcttctagggtccctgtgagagagtagacggagaagtcatgcatcaccttgcactgtcccctttccttccctgactggcttctctttacgctttctccagcctgggattattatctctcacataaagacaaacctttatcttaatcctcacctcagcctttgttttccagaaaatgtgaactaaaacactgaccagttttaaaaaatggtaacatatttatactctttttctatctttstgctcaaaattcacatggtactttgggaatctgcctgcctatgtgactatataggcaacttttaacaatgctttcacacatgcata

SEQ ID NO: 286691 - DNA, 605 bp, Homo sapiens
gctcatacttacaatagcaaaattggaaaatatggaaagcagaaccaagaggtgtttttttcttttttaaatggtagccatgtgatggtatacttttgttatgctgttatttgatactcaaaaacataagtacatatatgtcttaattattctgcaatttmtatactttaagtgctccgtgtgcaagattatcttaaagccatgcttttgaaacaggagtatgtacattatgaatccatgagacctaaaattaaacatggcacatataggggcattacctttccttatttattcatactacagataagttttgaagtagagtaaacagaatttcctaacacgtgatatgtggagtgtgaacaaaaaagagtggagtcaagaagaatgctaaagtttgaggaataataatatcatttcctgaaatcagaaagcttgctgggaggtaatgttaagacgttaagggattgttttctccactttatgtgtaagttcctattaaggcatattagcaatgatgtcaagtaggatggtggatatacaagtctaaagtcaaggatgaaggctggagatatacatctgggagtcatcagcacagagctggttgt

SEQ ID NO: 286692 - DNA, 605 bp, Homo sapiens
gctcatacttacaatagcaaaattggaaaatatggaaagcagaaccaagaggtgtttttttcttttttaaatggtagccatgtgatggtatacttttgttatgctgttatttgatactcaaaaacataagtacatatatgtcttaattattctgcaatttatatactttaagtgctccgtgtgcaagattatcttaaagccatgcttttgaaacaggagtatgtacattatgaatccatgagacctaaaattaaacatggcacatataggggcattacctttccttatttattcatactacagataagttttgaagtagagtaaacagaatttcctaacacgtgmtatgtggagtgtgaacaaaaaagagtggagtcaagaagaatgctaaagtttgaggaataataatatcatttcctgaaatcagaaagcttgctgggaggtaatgttaagacgttaagggattgttttctccactttatgtgtaagttcctattaaggcatattagcaatgatgtcaagtaggatggtggatatacaagtctaaagtcaaggatgaaggctggagatatacatctgggagtcatcagcacagagctggttgt

SEQ ID NO: 286693 - DNA, 567 bp, Homo sapiens
gcaggaaaccactctgtttggtagagtgaatggcaacctgggccttgtctctaaactccttctgcttatgtaggatgtgcctgaatgttctgacaaagtcaggagctgcctgggctgtggctgggctttcaaaaaccttccaaaatcaggcctgaaaaccctcaggaatgtgagatacatcatgagccatcatgtggagctggaagagaggtgcatgtggcagcgcaggtggaatatccatccttatgttcccagtgttttgctgtagctggcacatagctggagttcagcaaatgccttttgggtgaatggctgaatgatggatatttggatggatgagacgagtggatggataaagctctgcactgcaaagagattctgtaaagctttgtctcacttcaggcctggkatgggtatccttatttgcaaaaatccaaactaggactttatttagcctttgagcatgtagaatttccattctagtaacaaagtattttcaactgaaataaaattagataataggagtatactaaagacccttttctaaatgtggcctacttgactatt

SEQ ID NO: 286694 - DNA, 412 bp, Homo sapiens
taattgcttgagtgaattcattattattttcaattcaatcagttgtgtaaagtttatgtacgagtgttaaaagtcagctagtttgaggtttaaaaactttcttcatgactgtaggaagatagagagaatgcagcttcagttataaccactgaacataaacattactttggataactctaagttatctaacaagcatttactatacactgcatctccgtgcagggctcaagcttgtttcctgaggtcccagaactgacaatctakctgggaagagaaggtgtgtgcctaagtaaactggcacataagattaggttaacaaacaaaatgcattatccttcttccatctcagccttaactctgagctgacttgggcccctggctgtaggctgaatgaagtctctgactttaaggg

SEQ ID NO: 286695 - DNA, 412 bp, Homo sapiens
taattgcttgagtgaattcattattattttcaattcaatcagttgtgtaaagtttatgtacgagtgttaaaagtcagctagtttgaggtttaaaaactttcttcatgactgtaggaagatagagagaatgcagcttcagttataaccactgaacataaacattactttggataactctaagttatctaacaagcatttactatacactgcatctccgtgcagggctcaagcttgtttcctgaggtcccagaactgacaatctatctgggaagagaaggtgtgtgcctaagtaaactggcacrtaagattaggttaacaaacaaaatgcattatccttcttccatctcagccttaactctgagctgacttgggcccctggctgtaggctgaatgaagtctctgactttaaggg

SEQ ID NO: 286696 - DNA, 494 bp, Homo sapiens
tgctcacatattttcataatcataaaatagatctatcaacatataaataaatttgaaaattttatcaaaaatttctatgataaaaaattatttcaccctaagtttttatacactattctaaatttattgtccatcaaagtcattaaatataagtgcttaattattatctataaaaccacattggttagttaaaacataatttgtaagtgtgcatttgatctcccaaaattactcagggcattgaggagctaaacatgaccttcagatggacagatggtttatacagtacggtactgacactggtcctcttgacaaaaaaaaaaaaaaaaaggcataaagacactgtatrcaagttaatgcttatggtattttatttatcaagggtttgatatttgttgcttaaagaatgtaaagttattttgtatataatataaaacctaaatatataattgccaacaagatacaaatgcctaacacataatgcctgaaacatt

SEQ ID NO: 286697 - DNA, 1025 bp, Homo sapiens
attagatgagtgacaggtctacagccaggactacttttcactctcctggggactaatcggggccatacaacttttttattgacagaatttgagagaaaataataaatgacacttctgtattaagaaacacaggaattgatcatgctttccttaccttctctttgctactaattgcagaggttccagatgtactaagacatggaaagagttaacgtctctgaaattaccacatttaggtcaactcgccgcccctaarccaacctcattagagtgaaatgagaacaatgaggttctaatttctatgggaataaaccactgaagtttaagaattttatttttatttttcatacctaactaatacagttctgtgtgcatgcgtgtgtgtaaaaatagtccttccataggtaattttcaagaagaaaatttaaatacctaaaatataataaagattccatagtgatttggcaaataagtgggtatcttccagaatcttctagatagaattcccatgtatggatggagtcaatctgcctgaatacaactaatgatgatcagtaccttagaaaatgaggtcaagctgacattttcacttcccgwgataaattttagagtatgtgccatttacaaatgagaagaacgtgtattctgtttttgttatgtggattgttctgtagttgtctcttagatccatttggtctagtaactagtttaggtcccaaatagctttgttagtattcttccctgatgatctgcccaatacatttgctggggwgttgaagtctctcactattactgagtggtaatgaaagtctctttgccaatctctaagattttgttttatcaatctatgtgctccaatgttgggtgcatatatatttaggatagttaagtcttcttgttgaactgaattttttatcattatatagtgtcctgctttgtcttttttgattgctgttggtttaaagttgattttgtctaaaataaaaatagcaagccctgctttttaaaaatttcctattgcttga

SEQ ID NO: 286698 - DNA, 1233 bp, Homo sapiens
taaaattggtaaaaacaaagaatgaagaatagatatacattcttcaaggactgcaaccctgcctttttggctgacaaatgtgtcctcagggtctaatgcagtaactaatgcataaataaatgtgcatttaatgggtgrgtctgcttctgttggatttgttttcttattatacacatgcaattattcagacttataattgttatatattctaaaccactagacaatgaacactttgatagtataaatgtttccttaatcaacagaacatgtttacttctttcttcgcatttttgctcacaatgtataaatattttaaatgaatatccccatcacactcccttctgcctggttaacacttagtcccttgccgtagaacaaattcttagtcctctgcaaataatttcaaaattaatctttttcctacagttctcatgttagttttgcaattgtgtcctatcattacttcttttgtatttaaaattctatatttatattttccttgtgattatgtgatttcttggtatacaaataaattattgttattcaaataccatgacttctgaaaattagtgttgtttgaaagtttctttggttctatcctttattttatttttcawtaaaattggtaaaaacaaagaatgaagaatagatatacattcttcaaggactgcaaccctgcctttttggctgacaaatgtgtcctcagggtctaatgcagtaactaatgcataaataaatgtgcatttaatgggtgggtctgcttctgttggatttgttttcttattatacacatgcaattattcagacttataattgttatatattctaaaccactagacaatgaacactttgatagtataaatgtttccttaatcaacagaacatgtttacttctttcttcgcatttttgctcacaatgtataaatattttaaatgaatatccccatcacactcccttctgcctggttaacacttagtcccttgccgtagaacaaattcttagtcctctgcaaataatttcaaaattaatctttttcctacagttctcatgttagttttgcaattgtgtcctatcattacttcttttgtatttaaaattctatatttatattttccttgtgattatgtgatttcttggtatacaaataaatwattgttattcaaataccatgacttctgaaaattagtgttgtttgaaagtttctttggttctatcctttattttatttttca

SEQ ID NO: 286699 - DNA, 616 bp, Homo sapiens
taaaattggtaaaaacaaagaatgaagaatagatatacattcttcaaggactgcaaccctgcctttttggctgacaaatgtgtcctcagggtctaatgcagtaactaatgcataaataaatgtgcatttaatgggtgggtctgcttctgttggatttgttttcttattatacacatgcaattattcagacttataattgttatatattctaaaccactagacaatgaacactttgatagtataaatgtttccttaatcaacagaacatgtttacttctttcttcgcatttttgctcacaatgtataaatattttaaatgaatatccccatcacactcccttctgcctggttaacacttagtcccttgccgtagaacaaattcttagtcctctgcaaataatttcaaaattaatctttttcctacagttctcatgttagttttgcaattgtgtcctatcattacttcttttgtatttaaaattctatatttatattttccttgtgattatgtgatttcttggtatacaaataaattattgttattcaaataccatgacttctgaaaattagtgttgtttgaaagtttytttggttctatcctttattttatttttca

SEQ ID NO: 286700 - DNA, 612 bp, Homo sapiens
agttagactttgtgaatgacagaaataggaaagagatgtttcttttccccatgatacctcctaaatccttcatctgttgatgtactcttttaggtgttggcaggggcaggagaaagacagcagagcaaactgaagggttcattccttttaaagcttattttactatrtgacattatgatataattgagtgaagctgggctttggagacagacaaatcagaattcaaatcctggctccattacttatgtgcccatggacaagttaattgacctccccaagtctataaattgggaataaatatcacctatctcacaggactgctgggggaattaaatgaggtaacataagtgagctatttagctcgataaggctggtcaagcattctcctgctggtcagtacaatgaataaacagacttaggtcatacagtttacatgcagacaggaaaaactctgtgacactctttttctgaaatgggtcttcaattgaccacaaaaggagaggttacacacacatacatcccacatactaaatgtaaaattagaagaaaacggactcattattaatgtgtaaaagatactaaaaaaagaagtgaagttaattaagagactat

SEQ ID NO: 286701 - DNA, 530 bp, Homo sapiens
atggactgtgcctaatgaatttctttccaaaaagtacagtaagaaagcagggggtggggagttggaggtaggggtagggtgaagagtaaatttttggtagagaaaactgacaaacactctgtcatccagatgaccaaggttaacattaccagtgacaaatcatgttgatggtatatgttrttaatacgatgtgataagaagggcgctttgtgtttgtggtcttcctccccaaaacccataaccccattctaattatgagaaaaaaacatcagacaaatcccaatcaagggacattttataaaatatcttgccagtgctcctccaaaggtcatcgaaaacaaggaaggtctaagaaattgtcccatccaagagaatcctaaggagacaatgatgactaaatgtaatgtagtaacctgaatggaatcctgggcagaagaaggacattaggtgaaaactaaggaaatctgaataaagtatagaccttagttattaataatggatcaatatgggcacattacttgtgacaagtg

SEQ ID NO: 286702 - DNA, 530 bp, Homo sapiens
atggactgtgcctaatgaatttctttccaaaaagtacagtaagaaagcagggggtggggagttggaggtaggggtagggtgaagagtaaatttttggtagagaaaactgacaaacactctgtcatccagatgaccaaggttaacattaccagtgacaaatcatgttgatggtatatgttattaatacgatgtgataagaagggcgctttgtgtttgtggtcttcctccccaaaacccataaccccattctaattatgagaaaaaaacatcagacaaatcccaatcaagggacattttataaaatatcttgccagtgckcctccaaaggtcatcgaaaacaaggaaggtctaagaaattgtcccatccaagagaatcctaaggagacaatgatgactaaatgtaatgtagtaacctgaatggaatcctgggcagaagaaggacattaggtgaaaactaaggaaatctgaataaagtatagaccttagttattaataatggatcaatatgggcacattacttgtgacaagtg

SEQ ID NO: 286703 - DNA, 530 bp, Homo sapiens
atggactgtgcctaatgaatttctttccaaaaagtacagtaagaaagcagggggtggggagttggaggtaggggtagggtgaagagtaaatttttggtagagaaaactgacaaacactctgtcatccagatgaccaaggttaacattaccagtgacaaatcatgttgatggtatatgttattaatacgatgtgataagaagggcgctttgtgtttgtggtcttcctccccaaaacccataaccccattctaattatgagaaaaaaacatcagacaaatcccaatcaagggacattttataaaatatcttgccagtgctcctccaaaggtcatmgaaaacaaggaaggtctaagaaattgtcccatccaagagaatcctaaggagacaatgatgactaaatgtaatgtagtaacctgaatggaatcctgggcagaagaaggacattaggtgaaaactaaggaaatctgaataaagtatagaccttagttattaataatggatcaatatgggcacattacttgtgacaagtg

SEQ ID NO: 286704 - DNA, 513 bp, Homo sapiens
ctgggcctgatggctcctgcctgcagtcccagtactttgggaggccaagatgggaggatagcttgaacccaggagtytgaggttatagtgagctataatcatgccactgcactctagcctgggcaacagagcaagaccccacctctagaaaaaaagcaaaagcaaaaagagttcccatggcccaacttcccagaatctgtctctgatgatgatttcaaggaaatgttctatgggttctgctctctgaggcactgggtcaagatgtcctgcctgaatataaatgcctggtcctacttaaatgtttatgacacccagttcccccaagtacccgagcacttaggtggtgcctaagtctacttgtggatggcactaatttccattcattaggacattggttaaaagttgccctctcgaggaagaggcaggaagaacaacgttattgcccttgggggattttgtgtgttggcaaggagacctaagggcgctggggtatgttgagcatcttctatgtcc

SEQ ID NO: 286705 - DNA, 513 bp, Homo sapiens
ctgggcctgatggctcctgcctgcagtcccagtactttgggaggccaagatgggaggatagcttgaacccaggagtctgaggttatagtgagytataatcatgccactgcactctagcctgggcaacagagcaagaccccacctctagaaaaaaagcaaaagcaaaaagagttcccatggcccaacttcccagaatctgtctctgatgatgatttcaaggaaatgttctatgggttctgctctctgaggcactgggtcaagatgtcctgcctgaatataaatgcctggtcctacttaaatgtttatgacacccagttcccccaagtacccgagcacttaggtggtgcctaagtctacttgtggatggcactaatttccattcattaggacattggttaaaagttgccctctcgaggaagaggcaggaagaacaacgttattgcccttgggggattttgtgtgttggcaaggagacctaagggcgctggggtatgttgagcatcttctatgtcc

SEQ ID NO: 286706 - DNA, 628 bp, Homo sapiens
gctgggccaatcatagtacctcacctrcccctggatgcagtgatgggcccaggaggtgggcacatgaccaaatctgggccaatcatagtaccacacctgcctctgatgcagtgattggctcaggggatgggcacacgaccaaatctgggccaattctagtaccacacctgcccctcatgtagtaattggctcagagggtgggcacatgaccagatctgggccaatcctagtaccacacctgcccctggtgcagtcattgggcccaggggtgggcacgtggcctaaccctacaaggacttttcctatggtaggggtggaggaatgtggtctctcatctctggtctggaaactggaaaggggagcgggagatcctaaagcccaggcatgctgtctcctgcctcatggaggagtggtttgagacagtgaagcccactcagaaagaaaggccgagatgagaggtagagagcagccaaagacgccccacttaccccatggcaggtacccaactccccaccccacagtttggcttcaggaggtatcattctcttattttagctaaatattgtccagttaaggttctctcccacatctccaatcaagagtggcctaactaaaacaaggggcgtgg

SEQ ID NO: 286707 - DNA, 1269 bp, Homo sapiens
gctgggccaatcatagtacctcacctacccctggatgcagtgatgggcccaggaggtgggcacatgaccaaatctgggccaatcatagtaccacacctgcctctgatgcagtgattggctcaggggatgggcacacgaccaaatctgggccaattctagtaccacacctgcccctcatgtagtaattggctcagagggtgggcacatgaccagatctgggccaatcctagtaccacacctgcccctggtgcagtcattgggcccaggggtgggcacgtggcctaaccctacaaggacttttcctatggtaggggtggaggaatgkggtctctcatctctggtctggaaactggaaaggggagcgggagatcctaaagcccaggcatgctgtctcctgcctcatggaggagtggtttgagacagtgaagcccactcagaaagaaaggccgagatgagaggtagagagcagccaaagacgccccacttaccccatggcaggtacccaactccccaccccacagtttggcttcaggaggtatcattctcttattttagctaaatattgtccagttaaggttctctcccacatctccaatcaagagtggcctaactaaaacaaggggcgtggwtcttctccctctcttccagctatcttaaaaaagcttttattttagttacccggtaaaataatttgtttttctattttgtcaagttattctgtggaagcccatgtaggcaaacatttttttaaatgatgcagtctgttaaaatggaccgtacctttatcactctctgtgaaataaatgggtctattttaaaaagcaggtttatatgaatcagaaaccaattatgggcagaatgttgaaattgtaaaacgccttagaaatgagaatattgtttgatagcttgtgttagtggttggacaaagtaatagttaagccttttttgttttagtacctgtatttaactggggataataacagctacttttaaggtgaaaattagagataagttatggaaagtatacaatgtcttacacccccagagaaatgatatcttaattggtgtctgtgtgtgtttatgtgtgtgtgtgtgtgtgtgtgtgtgtgtgwgagagagagagagagagagagagagagagagagagagagagaatattttttttcctaaaggcataggagaaaatcacctttaaaagaagaggaaatccaggtctgcagtcccttatctggcaggtatggatgcaaatatatttcagaactcagattt

SEQ ID NO: 286708 - DNA, 606 bp, Homo sapiens
ttctggatattagccctttgtcagatgagtagattgcaaaaattttctcccattctgtaggttgcctgttcactctgatggtggtttcttttgctgtgcagaagctctttagtttaattagatcycatttgtcaattttggcttttgttgccattgcttttgttgttttagtcatgaagtccttgcccatgcctatgtcctgaatggtattgcctaggttttcttctagggtttttatggttttaggtctaacattttctttttacctcttttttttgtggtgaagtgggagatcagattcttgaaactgtggaagcaggggaaatcaagcaccatacaatacatggagagccagtagttatcaatttaatatatatttcctaagtacccactgataaaatactcaactctgtagagaacaaggccttaattctgaaagagctaattttgttttgaaaagcttaaaataagtctgatgattttttttttcttttctacctctcttctctttttaggaagctttctgtgtattgcttctgcctgtggatcagtacagtgtaagatcatgtgataaggggaatattcctatatgaaactcaagacata

SEQ ID NO: 286709 - DNA, 606 bp, Homo sapiens
ttctggatattagccctttgtcagatgagtagattgcaaaaattttctcccattctgtaggttgcctgttcactctgatggtggtttcttttgctgtgcagaagctctttagtttaattagatccsatttgtcaattttggcttttgttgccattgcttttgttgttttagtcatgaagtccttgcccatgcctatgtcctgaatggtattgcctaggttttcttctagggtttttatggttttaggtctaacattttctttttacctcttttttttgtggtgaagtgggagatcagattcttgaaactgtggaagcaggggaaatcaagcaccatacaatacatggagagccagtagttatcaatttaatatatatttcctaagtacccactgataaaatactcaactctgtagagaacaaggccttaattctgaaagagctaattttgttttgaaaagcttaaaataagtctgatgattttttttttcttttctacctctcttctctttttaggaagctttctgtgtattgcttctgcctgtggatcagtacagtgtaagatcatgtgataaggggaatattcctatatgaaactcaagacata

SEQ ID NO: 286710 - DNA, 550 bp, Homo sapiens
gatgccaaaagcaattgcaacagaaacacaaattgacaattggaacctaaataaactaaagagcttctgcacagcaaaagaaactatcaacagagtaaacagacaatctattaaatgggagaaaatattagcaaattatgcacccaacaaaggtctaatatccagaatctataaggaacttaaagtaacatgcataaaaaaaacaaccctatcaaaaagcaggcaarggatgcagacatttttcaaaataaggtatagacccagccaacacgcatatgacaaaattttcagtatcactaattattagagaagtgcgaatcaaattcaaaatgagattccatctcacaccagtcagaattgctattgttattattattttttttatttttttttaggttctgggatacatgtgcagaatgtgcaggtttgttacataggtaaatgtgtgtcacagtggtttgctgcacctatcaatccatcacctacgtattaagctccacatgcattagctgtttgtcctgctgctcacctccctctgccccctgacagg

SEQ ID NO: 286711 - DNA, 575 bp, Homo sapiens
cacgttctagtcaaagacccaatattattattattattattgtcacaatagctggaagcagttccttcccttcctctggcatcactgatccctgcatggcttctcattctctaaagcaggggtcaacaaggtttttttctgtaaagggtcaaagagtaaatatttcaggctttgtgggccatttgatccatcacaactactcgcctttgctgtgagggcatgaaagcaaccatagacaatgagtaaacaaatgggcayggctgtgtttcagtaaaactgtacaaaaacagacagcaggccatagtttgccagctcctgctccagagacagcagtggaaagggtgatctttagttgataatagcagggaataagttgtcagagcttcccagtgtgtgtagaatatgtagtgatgaaaaccagtatgcagtgactataacctgatgccagaacactgcattctttttcagtttggagggcgttgttcagtgaatatttctttttacttacactgatatgaatattgattaccagtgatggctgggccatattaagataacttcaacccctatggttt

SEQ ID NO: 286712 - DNA, 575 bp, Homo sapiens
cacgttctagtcaaagacccaatattattattattattattgtcacaatagctggaagcagttccttcccttcctctggcatcactgatccctgcatggcttctcattctctaaagcaggggtcaacaaggtttttttctgtaaagggtcaaagagtaaatatttcaggctttgtgggccatttgatccatcacaactactcgcctttgctgtgagggcatgaaagcaaccatagacaatgagtaaacaaatgggcacggctgtgtttcagtaaaactgtacaaaaacagacagcaggccatagtttgccagctcctgctccagagacagcagtrgaaagggtgatctttagttgataatagcagggaataagttgtcagagcttcccagtgtgtgtagaatatgtagtgatgaaaaccagtatgcagtgactataacctgatgccagaacactgcattctttttcagtttggagggcgttgttcagtgaatatttctttttacttacactgatatgaatattgattaccagtgatggctgggccatattaagataacttcaacccctatggttt

SEQ ID NO: 286713 - DNA, 531 bp, Homo sapiens
tataaaatccatccaggtcaacagccactgcaactgaatgattgaattcatgtcttatacagataattctcaattactcagtatagtagtcacctttccttaattatctctcctccttttccactgctcctaactgccaaatctttgatcacttcctgatcactgatacttatagatgctgctaggaagttggagaaaataaggctaatatgactaaagctccattagcctaggaatatatacagcaattttatattaatatatgtgaggctgacatcttcctgatgtgactggcttcctgtaaagcaggctactcactcttttgagaatgtttctgtttagaattactcatgtcatggcttcctccatttatcccyaatgatgaaaatcggcagttttaccacttagtactcctaggagctttggtgaaaggccagatacagggatgacagaggatgaaattaatgactgaacagaagtttggggattatctgctgatgttaataattcacactgaatgctctaaccttg

SEQ ID NO: 286714 - DNA, 629 bp, Homo sapiens
gagtgtgtgccatttgtgtttgaaaagtatgttatygagtttggtgtcctacatacatccgtttggtttgctcatttcattgcttaaatcttttataacttgatttttgtatgctagtttttctaccaattaacaaaataggcatgttaaaatatcactctggttgcatatttgtctaaatttcctatcaaattttcttttacatattttgagtttatattttaagtgcatataaatttagattatctttctagtaattgaattgacccttttatttcttaaaaaaattattgccttaaagtttacttaaatatatctacaccagtttcctcatggttactgtttgctgggtatgtatttctccatctttttcttccaaaatttctaaattcatgttctaaaaatgtctcttgtaaatagcatatggtttaaaacaaggctgacaatatttgtcaacatttgagcattagtccatttacatttagtgtaataatggatttatcacaaatatcttgctttctatttgttccacctgttctgctttttcttctttcttagactcttttgcaattcttaaatcttccactgaattgattattcgaattctctcttattatgtggaaagctat

SEQ ID NO: 286715 - DNA, 703 bp, Homo sapiens
ttcatatggttaaccaattcttttctcagaaaaactatgctcagtttacaacctgtgaagatatttacacaaaaggaaagcatttattttgtgtattcattgttgcatattttaaaaataggattttaatctattacaatatgttttgctatctgtgttgtgtcttttttcagatatttattcactatattataaaaatcaatttttggacctgctgtgtctaaactctgtgaacaaaatattaatcccagaaactcaaaaagaacttaaaatccgacatggggaagaacaaggcccacaggcacgtascgaaaagcccacttgtggacaaaataagcagcttgcaaagtagctggtggtgccagcaaactgcttgagaaagaaatggtttatctggaatcacaagcagtgtcaccagccatgagctgcctttgttctcactcattgccacagaattgtgaggcacatgcttgttaatggctgtggcgccagctaagtctctttaccttccagaacaaatgcatttagtggcatttatgtaatatagtgtactttccactagaatggataagacaaaagttattgtactcttaaacaattagcatttaggagagtaattctgaaagaaaatgcataaaaacgtttgtgaaggattgtttgtaacttaatatattttacctataaaatagaagacataaaaggt

SEQ ID NO: 286716 - DNA, 613 bp, Homo sapiens
ttgctgtacattacactcacctgagaagttttacagacactgatacytcagtcaaacccttagagattctaatttcattggtctaagatatagtctgggcatcaggatttttataaagttacacatgattctattgtgcggctgctgaactagtctgaacttaatcatctgatttgtgtttgcgaatgggtttggaagaatttcaacatattttcttttccccattatgaagagtccaggactttatattattaacccaatataatataaaagaatatggtacttgggttattataaccatgtttatccaaggttatgttcaagttactgtttctttggagtataccaaacttatctaaatgattttgagagtgctgtattactgctcaaggccttaataaattgtttgtagaatatttgaagtgtaacacaaactataatttaagtcaagatgtcctcatggaaatcaaaatgtacatgtagcatgttgaataactgtatttttagatcacttcaagtaaagtcctgagaccatgttgaagagcagagtctgttgctagttgtttaaaattaaattcaattagaagacctggatttcgcattggaggctgga

SEQ ID NO: 286717 - DNA, 563 bp, Homo sapiens
cttttcagttacaccagtcaccttctctgatgttacttttcccaatttcctccggtgtacttttgtgtagaatctcattctagctacaacactaccccagttttatttttattattacctaggcattaaaagktagtagtcatttggatatacctggaaaataaggtagacaacttagataactgcttgcttgtttaattaaaaggtcaggtaatacatacagacaaatatatagagaaaacaaatgtgctacttcacactagcaccatctgctttccacacagccaatctgagatcactggaaagaattaggctgacattatttatatagaattgagtagaatagaaactggtccttaaatgatggttaggctttgtataactgatccaaaggctcatcccaatggatagagatggaaatacttcagtgtttttgtttctgatagcagagctggaaaaaaaatagaaatgaccataaagattcagttaaccagcacatgcaaggtgtaggaaatttggtcaataatatctcatgaggaatcgaatatctaaaccagattaac

SEQ ID NO: 286718 - DNA, 563 bp, Homo sapiens
cttttcagttacaccagtcaccttctctgatgttacttttcccaatttcctccggtgtacttttgtgtagaatctcattctagctacaacactaccccagttttatttttattattacctaggcattaaaaggtagtagtcatttggatatacctggaaaataaggtagacaacttagataactgcttgcttgtttaattaaaaggtcaggtaatacatacagacaaatatatagagaaaacaaatgtgctacttcacactagcaccatctgctttccacacagccaatctgagatcactggaaagaattaggctgacattatttatatagaattgagtagaatagaaactggtccttaaatgatggttaggctttgtataactgatccaaaggctcatcccaatggatagagatggaaatacttcagtgtttttgtttctgatagcagagctggaaaaaaaatagaaatgaccataaagattcagttaaccagcacatgcaaggtstaggaaatttggtcaataatatctcatgaggaatcgaatatctaaaccagattaac

SEQ ID NO: 286719 - DNA, 552 bp, Homo sapiens
tgtcacttctgaaagttacttaattcccacctaaatgagaatttctaatgttactcataccactgccacaggaaaaaagaagttattgccagaagaagaaagaagaggagaagaaagaggtatggggaaagagaaaggaaggaaacggggagaggaagaactgaggccatgtgactcgtatatcagatttgatataataggatggtcagtgtagggatcaccatgtgacatagaatgataagaccaaagaaaataatgatggggtgagaccatacaaagaaagaagatagatgaatgatctaattaaatggatgaatgaggatttttcttggtccattatgaggaagrattatagtgaataccacaaccacatggtattgataaattgcaattcgttttacctacatatataacctatatatatatatatataatattatatttagttcagaattaatctgtttatatcatagtattcgattaatgttcatattcaattaattcctttgtgatctttgtcaagtcttgaggcaatagaacctcagcattgct

SEQ ID NO: 286720 - DNA, 564 bp, Homo sapiens
ttactcataccactgccacaggaaaaaagaagttattgccagaagaagaaagaagaggagaagaaagaggtatggggaaagagaaaggaaggaaacggggagaggaagaactgaggccatgtgactcgtatatcagatttgatataataggatggtcagtgtagggatcaccatgtgacatagaatgataagaccaaagaaaataatgatggggtgagaccatacaaagaaagaagatagatgaatgatctaattaaatggatgaatgaggatttttcttggtccattatgaggaagaattatagtgaataccacaaccacatggtattgataaattgcaattcgttttacctacatatataacctatatatatatatatataatattatatttagttcagaattaatctgtttatatcatagtattcgattaatgttcatattcaattaattcctttgtgatctttgtcaagtcttgaggcaatagaacctcagcattgctgaggagaaatccctsaaagagttggatccaaactgacatttgaagttgaaactatggattcc

SEQ ID NO: 286721 - DNA, 583 bp, Homo sapiens
cattcagttgtggccactaagtttatactgaaagttccccagaaatcaaaagtggagtctgggtgaatgagcttccagctgtcctccttcctccccctggtgatctaggtggtcactttccctctgccatacagctgccctgtttttggagctacaagccagactggggtaaaattgaaagtcaaaaaacttcattctccaaccctttgatttgaccctctggcctttcacaatggtttggcataacttacattaagtttgaattaaattaaaaattgatttatcacttatttgtggttggcttcgggtgaaatattatttgggaattatgatgaggtataagctttaaaaatgctatagattagtgaattttaaatattgtaaactgcatagtttgtttaagaaacataaaggaatcccaatatagaagacaaatgagacaatagtttcaccacttaaagaggattaaagccaaaaagsctgtagtttctactttccaaagcaggctcagaggcagatgtgtgcaatcctggatttctgaggatgaccattaaaaagctctgctcagtgtagagaagctact

SEQ ID NO: 286722 - DNA, 531 bp, Homo sapiens
tttgattgcatttccctgatgattagtaatgttggaaaaattacatttttgcttctgcttattttcttacatttctttctttcctatcttctaccattccaccttcttcttgatgaagaaatagtacttacaaggtcatatgggaggtgaacatagtaggatgtgaggaagtgaaggttcagtagccccagagttctgtggtatggaaagataggcaaacatgtctgcaaagctgcctattcttcctgctccagaagcagccctgctcagtatccacacctagcaaggtacccaacaaagattcagtgacattcaagtctatcaaggagatttcctaatttatgtatgtgggatttgcaaacttcaccataatgtattctgaaagttttgcattctttcgacaagatatattgaatctcaggccctggtctctgattgatcccaacactggggtcatatgttagmgtgctacacagttatctgacaagcctttattatatattgtaaaaggctagcatcctggtgagaatc

SEQ ID NO: 286723 - DNA, 539 bp, Homo sapiens
tagtaattattattactatcacaatgtttccctgtgaaaccttagaaaatcactagacacatgctatacattcaatccatttcagttttcatcattgcggtgattactgttacaatcacaatgtttccctgtgaatgtttcaccctttgcgcttcccacaataatttaccattrtttatttatgtgactttctccttatttgactggagctccatgaaagtaggagctgagcttgaaggtatttcttagcattccgtgcttatctaaccttgaatattagagataaataaagcaagtgttattttgcacatggaaattttcctctgcagatgtttttctcttttcaaagaaaaatagcaggcatggcagcactaatagtcagggttcaaataataaataagttttatattaaagctgtatgtgaatcaaaaaccactacatataggtaaacatgactcttgcagaatctgaagattggtttactcaacaccactccaaccctgttgtagtatgtttcctgtagtcaaatgctgcaatta

SEQ ID NO: 286724 - DNA, 602 bp, Homo sapiens
tttcactcagcatagaaaaatacattggtgagagaagcaacagaggccttaaaaagtatttcaatgactctcctctttagggtgtgataaagatgagaaatgtaaccatttaaatggcttcctgattttaatgataaggktgggtactcagagtaacaatgacaaagtaatatttgttaatgcccagaagcaagatgggcatgctatgctaccattgaaaacagcaggcataactgataatcagaataatatgatctacatgaaattttggcaatggctaattgatcatggggttcctagagcttaaatgggtagacatttcatgaaaatttgacttgatttgcatgcctaaaagagaataactcagggcttgataaatagaagcttgacttgaatcaatggtatagactcctgtaggccctcaaccaacttataaaactgacctagcaccagttgaatgaagggaaagttgaacatgcttaaggagggaccctgtctcagtctgttttgtgttgctatgacaaaatattggaaactgggtaatttttaaggaacacaaatttattgtcacacagttctggaggctggagagtccaatatca

SEQ ID NO: 286725 - DNA, 548 bp, Homo sapiens
ttcaatgactctcctctttagggtgtgataaagatgagaaatgtaaccatttaaatggcttcctgattttaatgataagggtgggtactcagagtaacaatgacaaagtaatatttgttaatgcccagaagcaagatgggcatgctatgctaccattgaaaacagcaggcataactgataatcagaataatatgatctacatgaaattttggcaatggctaattgatcatggggttcctagagcttaaatgggtagacatttcatgaaaatttgacttgatttgcatgcctaaaagagaataactcagggcttgataaatagaagcttgacttgaatcaatggtatagactcctgtaggccctcaaccaacttataaamctgacctagcaccagttgaatgaagggaaagttgaacatgcttaaggagggaccctgtctcagtctgttttgtgttgctatgacaaaatattggaaactgggtaatttttaaggaacacaaatttattgtcacacagttctggaggctggagagtccaatatcaaggta

SEQ ID NO: 286726 - DNA, 564 bp, Homo sapiens
ggaggctggagagtccaatatcaaggtacctgcatctggtgagggccttcttgctgcatcattgcagggcagaagtgagaacatgagagacaacaaggggaggtagagcttgttcttttataatgacaccaatctcatccatgagggtggagtcaccatggcctaattacctcttaaaattccactttttaacagtgttacaatggcaatcgtattagtmcactctctcattgctataaagaaatacttgagactgggtaatttataaagaaaaatggtttaattgactcatggttcttcagactatttaggaagtatggcagtggcatctgcttagcttctggggaggtctcagaaaacttacagtcatggtggaaggcaaagagggagctaacacttcatatggccagagcaggagaaagagagagggggagatgctacacacttttacacaactacatcttatgagaactcaggacaatacaaagtgggaaatctgccccatgatccaatcacctcccatctggccccacctctaatattgaggaatacaatttgacatga

SEQ ID NO: 286727 - DNA, 448 bp, Homo sapiens
taacacttcatatggccagagcaggagaaagagagagggggagatgctacacacttttacacaactacatcttatgagaactcaggacaatacaaagtgggaaatctgccccatgatccaatcacctcccatctggccccacctctaatattgaggaatacaatttgacatgagacttggtgggracacagatccaaaccatatcattctgcttctggcccatcaaatctcatgtttttctcacattagaaaatagaatcatgacttcccaataatccccaaaagtattaactcatttccagcattaactcaaaagtccaaagttcaaagtctcatctgagacaaggctactccattccacttatgagtctgtaaaatcaaaaacaagttagttactcccaagatacaatggatgtatagacattgggtaaatactcccattccaaaa

SEQ ID NO: 286728 - DNA, 448 bp, Homo sapiens
taacacttcatatggccagagcaggagaaagagagagggggagatgctacacacttttacacaactacatcttatgagaactcaggacaatacaaagtgggaaatctgccccatgatccaatcacctcccatctggccccacctctaatattgaggaatacaatttgacatgagacttggtgggaacacagatccaaaccatatcattctgcttctggcccatcaaatctcatgtttttctcacattagaaaatagaatcatgacttcccaataatccccaaaagtattaactcatttccagcattaactcaaaagtccraagttcaaagtctcatctgagacaaggctactccattccacttatgagtctgtaaaatcaaaaacaagttagttactcccaagatacaatggatgtatagacattgggtaaatactcccattccaaaa

SEQ ID NO: 286729 - DNA, 588 bp, Homo sapiens
atagacattgggtaaatactcccattccaaaagggagaaattggccgaaagaaagaggctacaagccccacacaagcctgaaacccagtagggcagtcattaaatcttaaagctccaaaataatctcctttgactgcatgcctcacatccaggacatagtgttttaaggattaggctgctaaagccatgggcagctctgcccttgtggctttgcaggattaagccccagtggctactctcaagggctagtgttgagtgcctatggcttttccaggtgcaaggtgcaagctgtcagtagacctaccattctggggtctggaggatggtagtccacttctcataactcttttaggcaatgctgcagtagggactctgtgtggggcctccaaaccctcatttcccttctgcactgccttagtasaggttctccatggggctctgcccctgcattaggcttctccctggacatccaggtttttccatacatcctctgaaatctaaggtggaggcgcccaagcctcgactcttgcactccttgcaccctcgggcttaacatcacatggaagctgccaaggcttacgggttgca

SEQ ID NO: 286730 - DNA, 588 bp, Homo sapiens
atagacattgggtaaatactcccattccaaaagggagaaattggccgaaagaaagaggctacaagccccacacaagcctgaaacccagtagggcagtcattaaatcttaaagctccaaaataatctcctttgactgcatgcctcacatccaggacatagtgttttaaggattaggctgctaaagccatgggcagctctgcccttgtggctttgcaggattaagccccagtggctactctcaagggctagtgttgagtgcctatggcttttccaggtgcaaggtgcaagctgtcagtagacctaccattctggggtctggaggatggtagtccacttctcataactcttttaggcaatgctgcagtagggactctgtgtggggcctccaaaccctcatttcccttctgcactgccttagtagaggttctccatggggctctgcccctgcattaggcttctccctggacatccaggtttttccatacatcctctgaaatctaaggtggaggcrcccaagcctcgactcttgcactccttgcaccctcgggcttaacatcacatggaagctgccaaggcttacgggttgca

SEQ ID NO: 286731 - DNA, 517 bp, Homo sapiens
caaaccatattagtaattaaattttactacgagttttagagaggggaaacaaatcaccacagaccctgtaatgactttccaagcagtcattataaatttttctcctagcttttcccaaagagattggtggcaaatttaaggttaactttgccttaattggctcctggtctttggagaagttattggacattgactctatgaccatactgttctctggtaaatcacaacagtactgtggtccagaggtcayagttgagacttatgagtgaatatcaggtggttaagagaatttatgcttgatattatgtcctagtgggcccagaggattcacaaactcatcttgtggctactgtggtatagatggaaaagatatatactcagcaataagcagcagttccatgttagccttgaacttgtggagtggtagatattaaaagacaagtgaaagtccttggaactgaaagaaatattcctagaataactgcagaggttggttcataatcatagactctaaaga

SEQ ID NO: 286732 - DNA, 587 bp, Homo sapiens
taatttgtatcccaagacaatactctttcaaatatgtgaagacaatggtcattttcccctttgagtcttcttttctccaggccttccagccttcctaggacttactgcctcagtccttctaaagcattttcataagccctagttttgctttctttttactaatcttgtgggtgggctccctttttttgtgtggacaacttgaccaactagccactaccagcatggaaaaaaaagatgatattttctcttgctctgatctttatatttctattaacaatgtccagttttattctcacttttttcctcagtaatgtcacactttgtttctctttagtttagctgaaacmgtcaatgtatttttaccttgtatcttcctttagcattcttgagttgtttcacattcctgctacatgactaatatgatcaccatccattgtcttgctttgtcctatgggatgtgctctttattaccactactggtaaaatttccctactgtgacctctcttccactttcagagttatgtaaggatacttgcttacaagcctagatgtggtccaattggctatctacgctaatataatcctg

SEQ ID NO: 286733 - DNA, 587 bp, Homo sapiens
taatttgtatcccaagacaatactctttcaaatatgtgaagacaatggtcattttcccctttgagtcttcttttctccaggccttccagccttcctaggacttactgcctcagtccttctaaagcattttcataagccctagttttgctttctttttactaatcttgtgggtgggctccctttttttgtgtggacaacttgaccaactagccactaccagcatggaaaaaaaagatgatattttctcttgctctgatctttatatttctattaacaatgtccagttttattctcacttttttcctcagtaatgtcacactttgtttctctttagtttagctgaaacagtcaatgtatttttaccttgtatcttcctttagcattcttgagttgtttcacattcctgctacatgactaatatgatcaccatccattgtcttgctttgtcctatgggatgtgctctttattacmactactggtaaaatttccctactgtgacctctcttccactttcagagttatgtaaggatacttgcttacaagcctagatgtggtccaattggctatctacgctaatataatcctg

SEQ ID NO: 286734 - DNA, 549 bp, Homo sapiens
tgtttcaggtcccaggtgttcttcaggctgccaaatattagctttcttcaaggcccagtcaaattccaccttattttggaagcatctgcttattaatttacccagcagaaattattctccctctgagctcgccagagcatgcatattgtctgtgatgtcacttacttggtagattttgaaagaggcagtttgttctgctcctgtgtgcttccagtcttgaagcttacctgactacctgtgtggccttggggaagttagctagcctrtctgaatccacatgctctcatctctccaagaaggatgataacattgccccactgttgtaatcgttgggtgttgccatgattcactgttactatgttagtgccattgcttcataagctatgaggaattccaggaaagtcagtaatgattattatgatatcatataatttctgaagtggaggcatctttttttttcccaaccacactgacaagtacttgagatcaaggattaaacattatgaatctctgctttcctaacactgtaatgctatgaacatagtagaa

SEQ ID NO: 286735 - DNA, 530 bp, Homo sapiens
tccctctaccaattgaatctggagtctttataggcacaggatagggagcaggacaggccataggcagttttagaaaaggcaccattcaattggaaaaaagacattattcagaaagaacaaattgggagagagcaggcaaacagggatagaagtttttacattgggttgtgggtttcaggcttttcagctcgtaggtggggttttgccaggacctgccgctgtctgcctagcatttctctgcctcctgcccctatcagtatagaaatagtgaacaaaccagcatgataagtagcccttgaacctggctttcttgtcttaagtcttcctactgtgttccaatgaaatmctccattgtgtctataaaaagcagctgagtttttgtttacatgtctaaaaaccaagaacgaataaatactgcagtgtagtgaaaactacaggtcactttgtgttatttattttatctgagttttaccaagcttcctgataatttcacagaagactaaaaaatcctgtgaaagctgagaccttta

SEQ ID NO: 286736 - DNA, 578 bp, Homo sapiens
agacaagatagttaggaaatgttttaaatagattttatctgcttgaatattaatatcatggtcatccttaatatttggggatgctcataaagatgtttcccatttttataaggttttagaactgtcaactcacttccacgtgtattgggtgtctataccattattttaytaattcaaccatttggtgttatgtatgagtgaggcactgtgataggtgctgatgttacagggaagagcagttcaacctctctaaactcagtcattctccttggtgctataatataccatctgcatgactatgccttttgaaacactcagtttgggacatttacacttattttaacagcagtgctctttcttatattgctgggtaacccccttaggaaatgttttcagaaccagactcatagctccaaaagaaaatgtctcattactttgtaggtaaatctcattttcgacctaaaatagttttgcctagtttgatgatcaaacttgattctgaaagatatttggttacatgacatagatttctataattgagaatatttaacacaatatgctagaggcagtaaataaca

SEQ ID NO: 286737 - DNA, 578 bp, Homo sapiens
agacaagatagttaggaaatgttttaaatagattttatctgcttgaatattaatatcatggtcatccttaatatttggggatgctcataaagatgtttcccatttttataaggttttagaactgtcaactcacttccacgtgtattgggtgtctataccattattttattaattcaaccatttggtgttatgtatgagtgaggcactgtgataggtgctgatgttacagggaagagcagttcaacctctctaaactcagtcattctccttggtgctataatataccatctgcatgactatgccttttgaaacactcagtttgggacatttacacttattttaacagcagtgctctttcttatattgctgggtaacccccttaggaaatgttttcagaaccagactcatagctccaaaagaaaatgtctcattactttgtaggtaaatctcattttcgacctaaaatagttttgcctagtttgatgatcaaacttgattctgaaagatatttkgttacatgacatagatttctataattgagaatatttaacacaatatgctagaggcagtaaataaca

SEQ ID NO: 286738 - DNA, 586 bp, Homo sapiens
gctagtaaaaacaataaataaataaatattgtttagaagcctagcaggtggtatgctaggactgggaatactattctgaacaaaagaggcaagatttatttctttgacaatcttacagactttcaggagcccttcatatctcagcaattgatttgcacatggtyatttctgttctctctgccaggatctgaccctgagagatagattcagccacagcttatggaaacacaagtcttcaagcagtcagtgtgggccctgaacttttttctgaacactccaatcctttcagagaggagaaaaccaatgacttcctggagaaacacaattatttcacaggtaagtagaatggtaagtcattaggaactcataatctaaaaactgattgcctgggtttgaactcagttttttcttttccacgtgagagatattgagcaaattatttcacctttctaagtctttgttttctcatctataagttgagatgaattatatttactgtctcatggggaaaagattaaatgaaataatctatgcaaagaataccaagtagcacagttcctaggagaaggtaggtgctgataagtga

SEQ ID NO: 286739 - DNA, 654 bp, Homo sapiens
aggccttgctaggtttccctgctcagtctgttaagataagatcagactctttttgtccaatcatatttaaaaacagctgcccatactttgttgaacctaagcataaaatggataatttcccctgtatctttgggtcttcattctgaagacttctgtgtcacataaaactagaatcaaataaatttacatcttttttctcctattaatctgcctcttgtcagtgattttcagtgaaccttcagaggatgaaaggaaagtcttcctttggctccaacactgtgaagttaattccaataggcctggaattggcctgcgctgttttgctaaattacctgcaagatgctgaccaaggtactgattgtagtgtgtttttgttaacatgagtctaaggagtttagggtggtttgtaccagcttgtcrgcactgttcattgttaacattgagattaatgatttagagttggttccagtatgaccactgaagagctctgtcactgggactggttacatagcaagaatatgcctatgtgaccagctgggcacaagaagcaccagcaaaattccatctggggatcccagagcctaaatattcaatgtgtatgttaatggtccgaaagaaagtgtatccaatatgatgctacagaggtaagacaat

SEQ ID NO: 286740 - DNA, 570 bp, Homo sapiens
cctgcctctatcaatattaggcagataagacagagttttcttttcatagggctaattggttgtatgttaagtcctgagtgttagaagacaatttcttgctttcatggactgtatcaattttcttttattcttgtatctttgactgatattcctcctttttcagattcaggtagtagcccattaaagattattactcagtattgttcaatattctgattaagttaaatattttattcttggaggttattatctttaaatgccatatgatatccctgtaatgagttctgaaggtctaaaattaggaaaccaaaagaattaaccagactgggtgcagtggctcatgcctgtaatcccagcactttgggaagccgaggtgggtggatcacctgaggttgggagttcaagaccagcctgagcaacrtggagaaaccccatctctactaaaaatacaaaattagccgggcgtagtggtgcatgcctagaatcccagctactctggaggctgaggcaggagaatcgcttgaacctgggaggcagaggttgaagtgagccaagattgcactgttgcac

SEQ ID NO: 286741 - DNA, 570 bp, Homo sapiens
cctgcctctatcaatattaggcagataagacagagttttcttttcatagggctaattggttgtatgttaagtcctgagtgttagaagacaatttcttgctttcatggactgtatcaattttcttttattcttgtatctttgactgatattcctcctttttcagattcaggtagtagcccattaaagattattactcagtattgttcaatattctgattaagttaaatattttattcttggaggttattatctttaaatgccatatgatatccctgtaatgagttctgaaggtctaaaattaggaaaccaaaagaattaaccagactgggtgcagtggctcatgcctgtaatcccagcactttgggaagccgaggtgggtggatcacctgaggttgggagttcaagaccagcctgagcaacatggagaaaccccrtctctactaaaaatacaaaattagccgggcgtagtggtgcatgcctagaatcccagctactctggaggctgaggcaggagaatcgcttgaacctgggaggcagaggttgaagtgagccaagattgcactgttgcac

SEQ ID NO: 286742 - DNA, 622 bp, Homo sapiens
gcaagtccatcaaaatcattcctccgtgtattcagtcagacagagttatgttcagctgagcttaaatcataagcagtgactgagcacctatgatgtccctagcattgggctgggataagataatggaaggaacatgaaacatggtttttctctcaaaatattcacaattagttggagagaccaaaaacaaccaggtaaacagataaataaggatcgaaagtaaataatattaattgttaataaaagaaaaggtattacaaagcagaacttaattaatgaacaaataaattatacagataggaattgccatagactttgaaagaaaattgagatatttcgggctataataaacagtgaagattttgaggtaaagtttagtattagatcttagtgtcttaagtatatagsttaaagtataggcaggatttgaacatttaaacagaattaggaaggagatatgcaaggtggctgtttgagaacgatctgaacaaacacattaggttgagaaatagcactgtgcatttgcagtaggggacatatgagtggaagcattacgagttggagccagatgacggaggctatgggagataagcctgagggttttggtttacaagcagtcttt

SEQ ID NO: 286743 - DNA, 622 bp, Homo sapiens
gcaagtccatcaaaatcattcctccgtgtattcagtcagacagagttatgttcagctgagcttaaatcataagcagtgactgagcacctatgatgtccctagcattgggctgggataagataatggaaggaacatgaaacatggtttttctctcaaaatattcacaattagttggagagaccaaaaacaaccaggtaaacagataaataaggatcgaaagtaaataatattaattgttaataaaagaaaaggtattacaaagcagaacttaattaatgaacaaataaattatacagataggaattgccatagactttgaaagaaaattgagatatttcgggctataataaacagtgaagattttgaggtaaagtttagtattagatcttagtgtcttaagtatatagcttaaagtataggcaggatttgaacatttaaacagaattaggaaggagatatgcaaggtggctgtttgagaacgatctgaacaaacacattaggttgagaaatagcactgygcatttgcagtaggggacatatgagtggaagcattacgagttggagccagatgacggaggctatgggagataagcctgagggttttggtttacaagcagtcttt

SEQ ID NO: 286744 - DNA, 558 bp, Homo sapiens
ctaggcagactgagatgaattgagtaaaggtatacctgcagaaattcatatatttcrgtatacattgaggaagagatataaataaggaaagtaaagatgatgatgagaagacaatatttctctacggataaactgagtaggtaaacctggtggatgtagttgaatgtggtaggaaagaaggatcattattttgaacatggaatggtaagtataaaattgtattaaaggataatttactgtgatgtcacatacgatgaagtgtaagaagaaaaggtagaagataaggcagccgaatgacatttggttgaactaagaaagcatggaatgatatggatctgaaattgggtgatgacattttgaatggaaccaaatgtaggaaggaatgaatgaaagaccagatgtggtatctaccatgatagttaaagaaaaaagagttaaagattattttggaatttagagccccagtgattagagaagtggagggttttgtaacagaaatgatactgttccacaggtaaccaggacttgaaatctcatacgtaaggaatgaaggaagga

SEQ ID NO: 286745 - DNA, 481 bp, Homo sapiens
ttactacgaagtccctattcatttaccagttttaggcttccaaaaattagctgtcattttcagagtttaaattctttagcttataaaatggacttgtgtggggctcaatgactaatattgtgtagtttacctcccacatacttggtgctctccctttcacctatgcatgctgtcttttctgcctcaggtgcacttctgcaaaggttcagacaatcattgaggtagtggagaaaggtcacgtaaagtccttgagggttttgtcagaactttggctttcgctttgaataacttgaggaatcatcagatgtttttgagcagaagartaagatgatcttcatttaaaactgtaactctagctacagtgtaaagaaaagatggtgagggacaaggttggaaataaagactagttgggaaactactgaattagcccagctgagggacagtggtggctggagttggtgtactatggagattctggatg

SEQ ID NO: 286746 - DNA, 483 bp, Homo sapiens
actagttgggaaactactgaattagcccagctgagggacagtggtggctggagttggtgtactrtggagattctggatgtatttcggagttggggccaaagatattgacagattgggtataagaatgacttggagattaacatgattaaaaataattttggactgagaaaattgaaaagaatggaattgtgatttactgacaagggtataactgatgaaaaccaggccttaagagggggatgtcaagagttaggatttagacgtgttaagtttgaactgcctattagacatccaaataaggctgtcccttgtgttgtgggatatgtctgtaatttggagggtaaggtaaataaagaggacaggcaaaggtgggcaggatgctattttatataggattataagggaagacttctttgtcactgtaacatttaagaacagacttgaagaaaagaaataaattaataactaaaactatcaatctag

SEQ ID NO: 286747 - DNA, 603 bp, Homo sapiens
ataaattaccaattgtaatagaatgcaattagttatgtaatagagttatatgaagaagacaatggtagtgtagaggaagaatcagctccctctgcctgggggaaatagaaaggcttttttgagaaggccaggttgtccttgtaaattttcttggaggatactaccaaggcacaggcacgtggatgtggcagaatcaggcatattccatgagtaggaaatggttytgtgtggaggtagaaattgtaggggcaaagtgaggacctcccttttgccctctgaaggtttgccaaaaaatcaactgacaaaaggcagattaatcgaagaaaaggcatacaaatttattaacgtgcacatggtggagaaacacagagtgattatcccaaactctcactggggttcagagcttatacaccatcttgaggttacagaaagactgggggcttggatcatggtaaaacaggttttgatggcaagacaggttatagggagggaagaagaaggggtctggctagcaaaggcagtcttgttatgtagatgcaacttcacagaaagcagccctcagagagaagacatggtaaatgtttctttcaaacctttaaaggt

SEQ ID NO: 286748 - DNA, 603 bp, Homo sapiens
ataaattaccaattgtaatagaatgcaattagttatgtaatagagttatatgaagaagacaatggtagtgtagaggaagaatcagctccctctgcctgggggaaatagaaaggcttttttgagaaggccaggttgtccttgtaaattttcttggaggatactaccaaggcacaggcacgtggatgtggcagaatcaggcatattccatgagtaggaaatggttttgtgtggaggtagaaattgtaggggcaaagtgaggacctcccttttgccctctgaaggtttgccaaaaaatcaactgacaaaaggcagattaatcgaagaaaaggcatacaaatttatyaacgtgcacatggtggagaaacacagagtgattatcccaaactctcactggggttcagagcttatacaccatcttgaggttacagaaagactgggggcttggatcatggtaaaacaggttttgatggcaagacaggttatagggagggaagaagaaggggtctggctagcaaaggcagtcttgttatgtagatgcaacttcacagaaagcagccctcagagagaagacatggtaaatgtttctttcaaacctttaaaggt

SEQ ID NO: 286749 - DNA, 543 bp, Homo sapiens
ggtacagagaacatgttgagtttaaagttatgcacatcagggcagtgtacatgactggttgcactaacttcagaaggagggtgagagctgggattcccaggcatgtaaacacacacacacacacacacacacacacacacacacacacacgcacacttctacatattctcttgtttttcttatgctgtttcctctgcctagaatcttactatggctaatttctagtcatctctcaagacagggctcggagcttactcaccttgtgaagtattccctgtttctcatcctgttgcctggtttgactttaccctctttctctgggcttctactgtaccccatgcatgtttctactgtgacatgtrttatgctatattttcatacatcgtttttctcgagcatgttcatagatgtacctttatagaaagcattcttttgtgtttaagttttgagactgtatttgacttattaaatttaaaaatgtagaaatctagttctggggacatcatttttatttttatttatttatttttagttttataattt

SEQ ID NO: 286750 - DNA, 1178 bp, Homo sapiens
gtccagttgtttgttggtagatgtttaacaactggctctccagaaaagaaaaataaataaataaaaagagaaaaaaatccccactgataaccgtgtttgacaatttcgttggtataaatactctaaccaatgttgaattcaacctaccagtgccttaacaactggccaaattttgccaattggcagttgttagtgctgacttcaacctttmattatctcttttagttttgcttctcaaaatcctctcaatcaaaattggaaagatcatttgaataagcagaaaccaccaccaccatcaccaccaccacactacattaagtcaagcaaaatcacaatgtacccataagtatgtgcaattatcgtgtcacctacaattttttaaaaataaaacatttaaaaaagaagtcaaactgaatactgaaccctgtaacacatcactagggaatacagtatgtccttatttaaacttgcctataggtttttggatatactgtatgttatagaaacttaactcttatttatatcaattagcctatggtaaaattatttctttaatgcagtacattgtttcacttgaagtcaaacttttcaaaaacctattwcttttaagctgtagaatcatctctggaaactgcttgctattgccacaagtggttataaatttaaatttttaaaatttgtattttaatagtttttgggaaacaggtggttttttggttacatggataagttctttagtggtgatttctaagattttggtacccccatcatctgagcagtttacactgtacctaatgtgtagtctttaggctgtcacctctctcccacccctgagttcccaaagttcattatatcgtttttatgcctttgtgttctcatagcttagcttccacttataagtgagaatatatgatatttggttttccattcctgaattacwgcactcagaataatggtctccaactccatccaggttgctgcaaatgccatcatttcattctttttatggctgattagtgttccatggtgttatacatatataccacattttctttatccacaagtggttataaattaacctaataaggccacattagacattctaactcacaccctatagcttaacaatgtatagtcaatcagtagtttatgttatattaatgtgaattattggtaaa

SEQ ID NO: 286751 - DNA, 631 bp, Homo sapiens
ttacactgtacctaatgtgtagtctttaggctgtcacctctctcccacccctgagttcccaaagttcattatatcgtttttatgcctttgtgttctcatagcttagcttccacttataagtgagaatatatgatatttggttttccattcctgaattacakcactcagaataatggtctccaactccatccaggttgctgcaaatgccatcatttcattctttttatggctgattagtgttccatggtgttatacatatataccacattttctttatccacaagtggttataaattaacctaataaggccacattagacattctaactcacaccctatagcttaacaatgtatagtcaatcagtagtttatgttatattaatgtgaattattggtaaacaacttaggaactgcctcttctttccctttaaaagtccacttgtaattgttactaattgcagtgtatattcagggaaacttgaatctatatatccacattgcaatcctcaagctaggcccaaataaactctctacttacattagttttgcctcgacttcttccttttagatctgcaccagcttgccttaactgtgatttccactgatactgggcctttgcagggttatactgt

SEQ ID NO: 286752 - DNA, 582 bp, Homo sapiens
aattcaaaggagtttaactgagcaatgaacgattcacaaatagggcagcgccagaatcccagcagattcacagagactccagcacagccatgtggtgggagaagatttatcgacaaaaaaaaaggggaggggaataacttacagaaatagaaagcgaggtaaagaatggctagattggttacaagctgacatttgtcttatttgaacacagtttgaacgctcagcagtatatgaatggttgaagtatggcagccgggattggccaagactcacttacaggcacataytgttaagttaggttttcagttttttctacctattaagctaggttgcagttcatccccaaagactcaaatatagaagtgaggattccttctcaggtcatatttagttcactttaacaaagaatacttcttattttctcaagtcccaaatcaaggtgtcacgaggtccatgatcgcttaaagacttcaagaaaatatcctttcttgcctctttctagcttctggtggctcctggaaatccttggcttttcctgacttgcaggtgcctcacccaaatctctgcctcttttctcatgtg

SEQ ID NO: 286753 - DNA, 496 bp, Homo sapiens
ggaattcatcttgaatttcaccgaggtctgggcaccaggacagagtgactgaaacagcaaacttatcattaaatggatggacatatttgaggagaaacaagtggaaatgatgagtaaaacaatgtcttcagtagctacgaggaatttatttcatttcatctgtgatgaagccattttagggattgcattgcaagtgtgtgcatgcatgtacacacacatatgtattaacacatcagaactgtatattaagttaaaggaaatgaggaatggcatgaatattaattcccttttctagayactgccattgaaaatcataggacctgaaacatagagcatttttgctcatctctgaagtctgttgctcatctccagtgtttcaatctctgtccccacaagtaggaggctgtagttgctctcatatctactcctccccagggtcagaaaaatgggtagtgttgtgtgcgattataccctcactactgtgctgcatttcact

SEQ ID NO: 286754 - DNA, 489 bp, Homo sapiens
ggtttatattccagatgaaccagtttctagctgaaacaagttatttaacccctatggttcagtttattcatgtgaaagttggggttataatggaacccacatcttgggtttaatgtaaaaattaaagaagaccatgtttgcaagcacaggcatgggaaaattcatttattattcagttaatttattcaacaactagtgattgtrcatttatgctgaatgaaaccctgctctagcttctgggaaaagaaaaatacttctgcactcatggagcttatattgagaggggcgagaaggaaatagtaagcaaatattcacataaatggcataattccagacagtgttcttgaatacaagatgcagggatggggagagatggatggacgtaggtgggaggggttactttagttggtggtcaaagctctgaaaaggtacagttgagaagaggccttgtattaatctgttctcacgctgctaataaagacatacctg

SEQ ID NO: 286755 - DNA, 1093 bp, Homo sapiens
tgcagaaatgacagggatgatggatggttccctcagtgtcttgactgctttagtctgagtgttggcagttgttagtgatgggtgttatcatctgatcattgatagatttcattgtttgtagctttctagcaaggcttttactggaagtcctctgtgagtgtgagtgtgtgtgcatgtgtttcccagagcatactttataacagattttaacaagattggggcaaaagcgtgaggtgagcaacytccaataagggctccatgatatgtacaggaaggtacatttgaatgatgaggctatccctctaaatataacaaaaaaaaatgacagaagaacatgcatatttaccattttgataaaactagaatttgaaatcaaaattttagtccttttccttattttacggaactcttagtttcctgctcccccatctcacctctgttatctgaggacgtggaacagttatttaatgcaatctgaaccataactgtgtttataatgttttaaaataatcctccttaaacgatatgtaagtggagcatwtttacagtagtagtctcttgtttctaaaattttgtattccctttcttctttctttctttttttgattatgtttaccaggagtaggtttactttttctcattaatcaactcatatttttattatttaattgcattttttcatttawcttttacacatacacatagctgtccaaaatcttttaaaaaaggtataattagtttcttgctatgtctttacttagatacagccccacttcctagagtcaaacacattttaacacagaggtccccaacccctgggccatggacatcacacacagaacatctatctctctcctacctccttcaaatattatttctttcactctctttatttccactattgtttcactgcatattatagccttaattgtgtttactcaaaatttatatattgaagccctaattcatggtaccgtaaaatgtgactgtatttaaacaggcagtcaagttaaaattaggttattggtggggagaggggatctaactgaatatgtctgttgtcctcagaagaagaggaagtttggagatagac

SEQ ID NO: 286756 - DNA, 613 bp, Homo sapiens
acattcaactctactcttctagttcttttgaaatatacaataaattattaactttactatagtcaccctattgaactatcaaacactagatcttatccttctatctaactgtatttttgtgcccattaaccaacctcccctccctactacttttcctagcctctggtacccaccattctatccactatgtccatgagatcaatatttttagctcccacatattgtgagacacgtaacgtttgtcttcctgagcctggcttatttcatttaacataatgacctccattttcacctatgttgctgcaaatgacaggagttcattctttttatggaggaagaacattgcgttgtgtatatataccacattttctttttcattcatccattgatgaatacttaggttgataccatatcttggttattgtgaatactgctgcaataaatatggcagtcatgtatctttttgatatactgatttcctttcttttgtatatatacccagagatgggattgctggatcatatggcaattctatgttcaaattttgargaacctccatactgtattttagatggaaataatttttatttccatcaacagtgtgcaaacattc

SEQ ID NO: 286757 - DNA, 584 bp, Homo sapiens
ttttcaatgaaattctattttgtractgcagtaaaagagagatcactgagctgcattcccatccaaaacgcgcacacagctatcttgatactcatggttttaactagtcacaactcccttttaaatgacaataaaagtgtgcagaatacaaaataaataaagtcccaaataaagcatccaaaaagtttaagtcattatgctttctgctgacagcttaatgtcagtatctgactagaatgtaaaggggaaacagtaaaattacttttcaaaagaaaagtaatagcacctaaagaaatagcacctaatgcatttggatattcatgatttacccaggattcggaattaaaggtgaagtaaataattgttttgctctgcagttagaatctgtaatgtatctggtaggtttttcttcaattacaagtattaaggatgtgttagtatatgtttaatatgtgttaattaaggatatatgctaataagaaataaccaaggatgaagaagtaaaaagatggcattaataccaaccccagcatttactatacacaggaggatacaatgatatgtgagaccctttctggcacaaa

SEQ ID NO: 286758 - DNA, 584 bp, Homo sapiens
ttttcaatgaaattctattttgtaactgcagtaaaagagagatcactgagctgcattcccatccaaaacgcgcacayagctatcttgatactcatggttttaactagtcacaactcccttttaaatgacaataaaagtgtgcagaatacaaaataaataaagtcccaaataaagcatccaaaaagtttaagtcattatgctttctgctgacagcttaatgtcagtatctgactagaatgtaaaggggaaacagtaaaattacttttcaaaagaaaagtaatagcacctaaagaaatagcacctaatgcatttggatattcatgatttacccaggattcggaattaaaggtgaagtaaataattgttttgctctgcagttagaatctgtaatgtatctggtaggtttttcttcaattacaagtattaaggatgtgttagtatatgtttaatatgtgttaattaaggatatatgctaataagaaataaccaaggatgaagaagtaaaaagatggcattaataccaaccccagcatttactatacacaggaggatacaatgatatgtgagaccctttctggcacaaa

SEQ ID NO: 286759 - DNA, 584 bp, Homo sapiens
ttttcaatgaaattctattttgtaactgcagtaaaagagagatcactgagctgcattcccatccaaaacgcgcacacagctatcttgatactcatggttttaactagtcacaactcccttttaaatgacaataaaagtgtgcagaatacaaaataaataaagtcccaaataaagcatccaaaaagtttaagtcattatgctttctgctgacagcttaatgtcagtatctgactagaatgtaaaggggaaacagtaaaattacttttcaaaagaaaagtaatagcacctaaagaaatagcacctaatgcatttggatattcatgatttacccaggattcggaattaaaggtgaagtaaataattgttttgctctgcagttagaatctgtaatgtatctggtaggtttttcttcaattacaartattaaggatgtgttagtatatgtttaatatgtgttaattaaggatatatgctaataagaaataaccaaggatgaagaagtaaaaagatggcattaataccaaccccagcatttactatacacaggaggatacaatgatatgtgagaccctttctggcacaaa

SEQ ID NO: 286760 - DNA, 1059 bp, Homo sapiens
tggagacactttgcaatgatcagaggttaattcagcagaatgtgtaaactcttctgaatttatatgcattcatgaatgtagcctcagaattgtaaatcagagctgacaaaaaccgacaaggccacaataacgtgttttgtttgtttgtttaaaatgtcagtatctgctaacaaatcaggaaggatacacagtatctgagcaaaaatatttatcaaattgattaaatagacctctgcagaatgcagtacccaatgattgcataatatgaattattttcaagctcacacggaacatgagagaaactgattatatatttggttacaaaccagaaaattcaaaggattcaaataagattgagtaacaagatgggaagacttgctaaatagaatgccaagaccaattagaagacaccgtaattaagacacygtagaatcagacaaatacaaatagatcaggaacagaaccatcaataaacacatatatggatatttgatttatgacaaaaggwtttaatattattttaattttatggcttaacttawctttttctcttgggtcaacattttggtcatcactttcatagggtagcagcaacaatcttgactttcagtaataataactaacatcttaatttcttctgtttcccaccattgtaaagtgacttacaaacattaacatagtttaagccacacccaaatccatcaaggcaggcaatatcattattcctgcttacaaaatgggtcggtcaggcagaaaagcgaagtagcttaaagtttggcataatactaaattattgttaagtttgctaagttggtttcctatttaagccttctcttcttctccaaactgttctataaaccacaataaaaataatcatactaatgcttttgtaatttcatggcacctttgagagcatccagttgtctagcaggtaaattctaactgcctaaatcccacacacaaggccatccacaccatctccattctgccttttcagactaacttccacttctttttactcaaactaagctctagggactcacaactacttgtcaactc

SEQ ID NO: 286761 - DNA, 551 bp, Homo sapiens
tttaatattattttaattttatggcttaacttaactttttctcttgggtcaacattttggtcatcactttcatagggtagcagcaacaatcttgactttcagtaataataactaacatcttaatttcttctgtttcccaccattgtaaagtgacttacaaacattaacatagtttaagccacacccaaatccatcaaggcaggcaatatcattattcctgcttacaaaatgggtcggtcaggcagaaaagcgaagtagcttaaagtttggcataatactaaattattgttaagtttgctaagttggtttcctatttaakccttctcttcttctccaaactgttctataaaccacaataaaaataatcatactaatgcttttgtaatttcatggcacctttgagagcatccagttgtctagcaggtaaattctaactgcctaaatcccacacacaaggccatccacaccatctccattctgccttttcagactaacttccacttctttttactcaaactaagctctagggactcacaactacttgtcaactc

SEQ ID NO: 286762 - DNA, 534 bp, Homo sapiens
cactcttttcttcctcccccactcaaattagtgcaagaattagcattaaacttaatggcgaatttctgccaatgaggaaaacaacaaagattctttaacagaactatgatttgtgtggtagtagaaatgttaaccaatgcaattacaaaagagaaagaaatgaaagagagaaatattacaaagtaagagctaaaataactttaggtgaaatgcctatatatttaaaagcccaatagaatcaacttgaatctataacaaagcataagggtaattaatttcastaagataagtgttaataaaattaattatcaaaagtctataattttgaatatacataccgtaatcattgaaaaactatgatggaagaaaaaacttcatttacaatggctacataaatgtgaagaagtcgagaaatacacttaagagaatgttgaaacccaccaaaggatcattagaaggcatttatggaggaaatagattatgacttaatacaaggatccaccaagattgtggacaaatggtaaattctcccat

SEQ ID NO: 286763 - DNA, 534 bp, Homo sapiens
cactcttttcttcctcccccactcaaattagtgcaagaattagcattaaacttaatggcgaatttctgccaatgaggaaaacaacaaagattctttaacagaactatgatttgtgtggtagtagaaatgttaaccaatgcaattacaaaagagaaagaaatgaaagagagaaatattacaaagtaagagctaaaataactttaggtgaaatgcctatatatttaaaagcccaatagaatcaacttgaatctataacaaagcataagggtaattaatttcagtaagataagtgttaataaaattaattatcaaaagtctataattttgaatatacataccgtaatcattgaaaaactatgatggaagaaaaaacttcatttacaatggcyacataaatgtgaagaagtcgagaaatacacttaagagaatgttgaaacccaccaaaggatcattagaaggcatttatggaggaaatagattatgacttaatacaaggatccaccaagattgtggacaaatggtaaattctcccat

SEQ ID NO: 286764 - DNA, 534 bp, Homo sapiens
cactcttttcttcctcccccactcaaattagtgcaagaattagcattaaacttaatggcgaatttctgccaatgaggaaaacaacaaagattctttaacagaactatgatttgtgtggtagtagaaatgttaaccaatgcaattacaaaagagaaagaaatgaaagagagaaatattacaaagtaagagctaaaataactttaggtgaaatgcctatatatttaaaagcccaatagaatcaacttgaatctataacaaagcataagggtaattaatttcagtaagataagtgttaataaaattaattatcaaaagtctataattttgaatatacataccgtaatcattgaaaaactatgatggaagaaaaaacttcatttacaatggctacataaatgtgaagamgtcgagaaatacacttaagagaatgttgaaacccaccaaaggatcattagaaggcatttatggaggaaatagattatgacttaatacaaggatccaccaagattgtggacaaatggtaaattctcccat

SEQ ID NO: 286765 - DNA, 596 bp, Homo sapiens
ttaaaacagtatggcaatggcagatgagtaatcagaataggaaagcaaagaaaatctagaaagaggatatgatgataaaggtggcatctctaatcaatgcaggaagtataacaaacattgatatggttaggttctgtgttcccacccaaatctcatcttgaactgtaatccccataatccccacatgttgatggcaggccctggtgggaggtgattggatcctgggggcagtttcccccaygctgttctcaggagacatgatggttttataagcatttgacagcatttgacagttcctccaacacatgcattctttctccctcctgccgccttgtgaaagatgctgcctccttccccttcacctactgccatgattgtaaatttcctgaggtctccccagccatgcagaattgtgtcaattatacctctttcccagtcccgggtatttatttatagtactgagagaacaaactaatacatatttcatttgaaaaatatatatatcaaaattgcatacatgtgactttgaaccatcattcccacattctaaaatgtacatcttagatacatctgcatccataacaatgttacgtgca

SEQ ID NO: 286766 - DNA, 596 bp, Homo sapiens
ttaaaacagtatggcaatggcagatgagtaatcagaataggaaagcaaagaaaatctagaaagaggatatgatgataaaggtggcatctctaatcaatgcaggaagtataacaaacattgatatggttaggttctgtgttcccacccaaatctcatcttgaactgtaatccccataatccccacatgttgatggcaggccctggtgggaggtgattggatcctgggggcagtttcccccacgctgttctcargagacatgatggttttataagcatttgacagcatttgacagttcctccaacacatgcattctttctccctcctgccgccttgtgaaagatgctgcctccttccccttcacctactgccatgattgtaaatttcctgaggtctccccagccatgcagaattgtgtcaattatacctctttcccagtcccgggtatttatttatagtactgagagaacaaactaatacatatttcatttgaaaaatatatatatcaaaattgcatacatgtgactttgaaccatcattcccacattctaaaatgtacatcttagatacatctgcatccataacaatgttacgtgca

SEQ ID NO: 286767 - DNA, 598 bp, Homo sapiens
aaaatcaaagtggaatattccttgtgaataattttatgtcttacttgaatagggtttaaaacttctgtattggccggatgaggtggctcacgcttataatcccagcaccttgggaggctgaggtgggaggactgyttgaggccaggagtttcagaccgacccggtcaacatagcaagacctcgtgtctattttataaaataataataataataataataataataataataatgataaatcttctgtcgtgtatgttaatgtgaacattcttgtgtctgtatgataattttgattaatttaattcaagaaaatattcaattgagcccttgttctttcagtcactaaccagctacatgatattggccagtttaccaaacaacttagactttctaattctctcttgtaaaatgaagcaggtgaactaaatcgctgttaaaagtccctttaaaacaaaaaatcttgtgatatattgtggatatatcaatacatgtgactacacagggtgtatctctatctttcattgtttaaacttaataattgaaaatatgtaacaatttttattaaagtgatgatgtttagaccaagaataaaaattca

SEQ ID NO: 286768 - DNA, 551 bp, Homo sapiens
caatacatgtgactacacagggtgtatctctatctttcattgtttaaacttaataattgaaaatatgtaacaatttttattaaagtgatgatgtttagaccaagaataaaaattcaaacatacagaagtttagaaaagatagaaagatattcacaaacattttgtcaaccagaaataactatgattattaaaataaccaaaattatatattatttgtttatatacatggctaaatggatattcagaattaatttcataaagataagatatacttaataaaaactatacttgataagtacaaagcattcccttttactttgcagttttaacaatatatgtttagcagtttatgttttatcagtcatatttttacagagcaaattctacagtatttaccttgcattctactcatactagagtaaattatctgaatatyactggatttaatatgtaccaagtcatttttaccacagattctgcatttctgaggtaattatacgtgtatcagtggaacctgattttactgccaccttaagtgtttcaagaagggc

SEQ ID NO: 286769 - DNA, 631 bp, Homo sapiens
ctgagttaaccagacaatatcacagccagaaagcagaagtgagcctaacgttcaaaagtctttakaaaatcaaagtggaatattccttgtgaataattttatgtcttatataatttatccaagatgatcatagcagatgctaaagaagaatgaggaagttttgcctatggtatgaagacttataataaaagtattggaattaagaatatgttgttttgatgcaacgatagataaaggaacgagtggaaactattagggagctcatctgctggcatactcctttgtggagtgcttatacatgacagagctgggattttaaatggagtgagggaccactgagaatactggctattcatatggaaaaaaacaaagaacaagttttactccaaactcacaccatacaaagaatcagttcccatgcataaatattgtatatatgaataagaaaattaaaaaaaaattagaagcaaatatagaataataagtgtattacattgggcttgagaaggaattcttagatgggaaacaattatatatctaaaacacatacatgtatatacagaagacacccatgtagcaaatgcatagataattgcgaagttgtcagcttctaaaatattcaattatcact

SEQ ID NO: 286770 - DNA, 631 bp, Homo sapiens
ctgagttaaccagacaatatcacagccagaaagcagaagtgagcctaacgttcaaaagtctttataaaatcaaagtggaatattccttgtgaataattttatgtcttatataatttatccaagatgatcatagcagatgctaaagaagaatgaggaagttttgcctatggtatgaagacttataataaaagtattggaattaagaatatgttgttttgatgcaacgatagataaaggaacgagtggaaactattagggagctcatctgctggcatrctcctttgtggagtgcttatacatgacagagctgggattttaaatggagtgagggaccactgagaatactggctattcatatggaaaaaaacaaagaacaagttttactccaaactcacaccatacaaagaatcagttcccatgcataaatattgtatatatgaataagaaaattaaaaaaaaattagaagcaaatatagaataataagtgtattacattgggcttgagaaggaattcttagatgggaaacaattatatatctaaaacacatacatgtatatacagaagacacccatgtagcaaatgcatagataattgcgaagttgtcagcttctaaaatattcaattatcact

SEQ ID NO: 286771 - DNA, 594 bp, Homo sapiens
tcttagtgagggccttctttctggcttgcagaaagatgtcttctctctgtgtcctcacgtggtggagagaataaactttggtgttttttcctatatttataagaacactaatcctaccatggaggccccaccctcgtgacctcatctaaataaaatcacctcccaaagaccccatctcctaatatcatcacattggggattagggcttcaacaaatggcggtggggaatacactcagtccataacagggctcttcggcatttttaaattttcatgaaaatgtaggagatatcctttaaaaaggaatatctaaatgtttcaaggtaatggcaatatttcactgggaatgaaaatattatggcctcagtaaaaagagggcaaaaagatacaagtgggtaatgtccagtgcttaaaatctgaaatggtggagtgatctcatgagaacaaaaggaatgaacgtacaatgaggaggaagggaaataatttcgtgaactrcaggttctgtatgtctggacttcataagaggtggctttggctcttaatggctgttcacgtccttcatttaaggaattctcaaaccagaaaaaaaaaacag

SEQ ID NO: 286772 - DNA, 626 bp, Homo sapiens
ttgtcactgaagattgcacggaatagggcaacattaatagttaactttaaaggatggctgtgttggattttaataagctaagtaggaaaagaggtcttttcaatttaataatgataacttgagcaaagatttaaaggaagaaaatatagtaggcattcagtgcagggagtatatttattatgttatggagtgcccattaggctatcttgcaattactcttttacatagcagaagctgagactcaagaaacatttgtatacctttccaagtggatggcacagtgcactaaataaacattaaatgcacaaataaataaagattgcggaggttgcagacaggaaaaccctttttggagagctcagtttggattccactgaacaatgagtcaaaaatatgagatgaagacataaaatagtgctgactatrggaatttgaaagaagtagccagaacaaaacctcacaaagcaatgaaaagaattcttggttaggtggataggagggtgagggaaaaaagacatgtaagaggggtttcaatttttaaataaagactggaataaaaattatgatgctttcaataattcctggtatatcactcctattccggttatgcagtaaattacctaatt

SEQ ID NO: 286773 - DNA, 554 bp, Homo sapiens
cctgtcagggcaaggaaaattcacttctgttttcaccttgtttagcaaaaggtgagactcagtaaaaacataagcacagycagttgctctaaagtgatgctgtttaaatagtttcgaaccaagatagatgttgagtaatattacatatgacatgactgtgctgaagattaattaatgaggcccagatagagctacgtcatggatgatggatacagtctatggagatacattttattaaaccttacatttaaacagaaagcctaaataagtacatgctgaaatgcaggactatttagagttccctggcaccatacaaattggcaagattagagctttccttaggagaagtattcttaccagcaatgagtcaggctatacttcagggaatctcctggataaatgccaaacacagaaatcaaagttctccctgcactaattcacccttattctaaagtgaaatacgcattaaaacctactggggagttaaatacttgcttatttcaaagttgttttcctccttttactaactttaagtacgttagaatattttaagt

SEQ ID NO: 286774 - DNA, 563 bp, Homo sapiens
aactcacatttagcttaacatagatacggatggttccatgtaaaaatatttacggatatatgtatatacatgtgttagtgaacacagatatatttccttggtctctcagcacttattgttcttctcaagttcacatggaacattctacagaatacaaccatatgctggaccataaaacaaatctcagtatgtttaaaakaactgaaatcacactaagtatgttctaagagcacaatgggaagaaattagaaatcactaagaaaagaaatgtggcatatttctgtatgacccagaaattttactctcagggatatatctaagagaaatgaaaacatatgtacacacaaaaatttgtacatgaatgtttatagtggcatcattcattctagtcaaaaagtagaaacaattcacatgtccataatctgatgaatgaataattaaaatgtagcatattcatacaaaggaatattattcagcaatataatgaaatgcaatactgatacatgccacaatactgattaactgaaagcataattgatagcattatgctaagtgaaaggagt

SEQ ID NO: 286775 - DNA, 563 bp, Homo sapiens
aactcacatttagcttaacatagatacggatggttccatgtaaaaatatttacggatatatgtatatacatgtgttagtgaacacagatatatttccttggtctctcagcacttattgttcttctcaagttcacatggaacattctacagaatacaaccatatgctggaccataaaacaaatctcagtatgtttaaaataactgaaatcacactaagtatgttctaagagcacaatgggaagaaattagaaatcactaagaaaagaaatgtggcatatttctgtatgacccagaaattttactctcagggatatatctaagagaaatgaaaacatatgtacacacaaaaayttgtacatgaatgtttatagtggcatcattcattctagtcaaaaagtagaaacaattcacatgtccataatctgatgaatgaataattaaaatgtagcatattcatacaaaggaatattattcagcaatataatgaaatgcaatactgatacatgccacaatactgattaactgaaagcataattgatagcattatgctaagtgaaaggagt

SEQ ID NO: 286776 - DNA, 653 bp, Homo sapiens
tcagaaaatatttttatattcatttatatactaatacaagacaaaaattaatgtttttttactgaaaatcttcatttaatatccatttattaaaagaaaaagcatttctcatctctccagtgaatttgcaagcatagcaattaaagtcgacttgtccaataattggaaggaatacatgactggaaagagaaaaaactctccctatttcttttctataaacaaacaaatcaaaaatttgtttaatgattatasgctactggacaattactttgttttaaaaattaggttgaaatccttcataatccacatattaataaaaatcattatttattgtggcttcaaaattaatggtttttcattacatttctatttcaaatgaacatttttagttgtttataaaataaagaactaatgttcggaatggtctgaataggtctgacctagatttattttgtatatttgtgattattgtaattgtctaaactaaactctaattagaacctatttagccaactaaaagtcactacatgctattgtccacactcctctagtctgttaagccactgtacgtactactgtatttagggagtataagtacaatgaaagtgacactctaatttcacacagaggcttagtgtagcaacaaaacttta

SEQ ID NO: 286777 - DNA, 653 bp, Homo sapiens
tcagaaaatatttttatattcatttatatactaatacaagacaaaaattaatgtttttttactgaaaatcttcatttaatatccatttattaaaagaaaaagcatttctcatctctccagtgaatttgcaagcatagcaattaaagtcgacttgtccaataattggaaggaatacatgactggaaagagaaaaaactctccctatttcttttctataaacaaacaaatcaaaaatttgtttaatgattatacgctactggacaattactttgttttaaaaattaggttgaaatccttcataatccacatattaataaaaatcattatttattgtggcttcaaaattaatggtttttcattacatttctatttcaaatgaacatttttagttgtttataaaataaagaactaatgttcggaatggtctgaataggtctgacctasatttattttgtatatttgtgattattgtaattgtctaaactaaactctaattagaacctatttagccaactaaaagtcactacatgctattgtccacactcctctagtctgttaagccactgtacgtactactgtatttagggagtataagtacaatgaaagtgacactctaatttcacacagaggcttagtgtagcaacaaaacttta

SEQ ID NO: 286778 - DNA, 653 bp, Homo sapiens
tcagaaaatatttttatattcatttatatactaatacaagacaaaaattaatgtttttttactgaaaatcttcatttaatatccatttattaaaagaaaaagcatttctcatctctccagtgaatttgcaagcatagcaattaaagtcgacttgtccaataattggaaggaatacatgactggaaagagaaaaaactctccctatttcttttctataaacaaacaaatcaaaaatttgtttaatgattatacgctactggacaattactttgttttaaaaattaggttgaaatccttcataatccacatattaataaaaatcattatttattgtggcttcaaaattaatggtttttcattacatttctatttcaaatgaacatttttagttgtttataaaataaagaactaatgttcggaatggtctgaataggtctgacctagatttattttgtatatttgtgattattgtaattgtctaaactaaactctaattagaacytatttagccaactaaaagtcactacatgctattgtccacactcctctagtctgttaagccactgtacgtactactgtatttagggagtataagtacaatgaaagtgacactctaatttcacacagaggcttagtgtagcaacaaaacttta

SEQ ID NO: 286779 - DNA, 631 bp, Homo sapiens
actttgtctataatcttacttagctatcaactctcttcagaaaaaaatggattctatttggttctagttgaagtcttacaagttccaaataaagctttattgtgtttggggacctccgaagttgaagtactgatcccttcagccatttgccatttgtttcctactaatgcaatgggtaactcgtgtgtgtgtgtgtatgtgtgtgggtgtgtgtgtgtgtggtttgttttgaaccaacaatatactgttagtaaatggcacgcaaacataaagacactgtgcaaaattatccctcaggtccattckaagggattcagttgattttattgtcttcccctaagtgtgtacaacacatatatgaaagaaaaacactggaacttttagttatttagtaaagatggaaattttcactattttgctgaaggttcatatttaaatataaatcaagacattaatctacacagtttgggagattttattttttatattataatttttttaaattttaactgccacataataattgtatatatttatggggtacaatatgacgtttcatgcacatttagtataatgatcaaatcaagataattagcatatccatcaactgaaacatttatcatttctttgt

SEQ ID NO: 286780 - DNA, 589 bp, Homo sapiens
tttcactattttgctgaaggttcatatttaaatataaatcaagacattaatctacacagtttgggagattttattttttatattataatttttttaaattttaactgccacataataattgtatatatttatggggtacaatatgacgtttcatgcacatttagtataatgatcaaatcaagataattagcatatccatcaactgaaacatttatcatttctttgtagtgagcataatattcaatacattattacctatagtcactctacggtgcaatagtgtatcagaacttatttctcctaattgtacctttgtactcattagaaatgattctrtgtgcaaataatggacagatattctacccatagattctctactctgttttctactagaagaattaaggaaaaatttaatcctcaaatcgatattccccactcatagaaattaaacattggtgtttttactcattgtcttttttaaatggacttaaaatactgtgttgacttaaaactgaactatcctttcataaaaattgcaaagatggaaataaactttgattcacatgtttttttttttaaatgactgtaa

SEQ ID NO: 286781 - DNA, 1185 bp, Homo sapiens
tttcactattttgctgaaggttcatatttaaatataaatcaagacattaatctacacagtttgggagattttattttttatattataatttttttaaattttaactgccacataataattgtatatatttatggggtacaatatgacgtttcatgcacatttagtataatgatcaaatcaagataattagcatatccatcaactgaaacatttatcatttctttgtagtgagcataatattcaatacattattacctatagtcactctacggtgcaatagtgtatcagaacttatttctcctaattgtacctttgtactcattagaaatgattctgtgtgcaaataatggacagatattctacccatagattctctactctgttttctactagaagaattaaggaaaaatttaatcctcaaatcgatattccccactcatagaaattaaacatyggtgtttttactcattgtcttttttaaatggacttaaaatactgtgttgacttaaaactgaactatcctttcataaaaattgcaaagatggaaataaactttgattcacatgtttttttttttaaatgactgtaawggtgtaggcacagtctaggttctctgagggtcccaaacagccttgatgttccactcacatcgagcccacatgtcttagtcttctcagaaccatggtaaaatgccatggactgggcagcttaaacaacagaaatttctttctcacagtaatgggaggtagactgtccaagatcaaggtgctggccaggtaggtttccttctctagccttgtcccttggcttgtacatgaccacaatctcatagtgtgtttctatgacctcttcttgtgctcaaggggagagaaagggggtgggctgtcttgtgtctcttcttagaagggcactaatcccataatgaaggccccaacctcwtgacctcatctaaccctaattgcttcttaaagacccagtctccagataccattacattgggaactgaggtttcaacatatgaaactggtcgagtgggacacaaacgttcagtcttaacactgggtctccctccctctgtttgggctgctacccaccatcaatgcttcctgctccccactggtgccaccagctcattaggccatagtgctgctgcctcaacgttcttgtcatgtgttttagtccgtt

SEQ ID NO: 286782 - DNA, 599 bp, Homo sapiens
tcccactcctgtcagcgggactggtagccctgcctgcagccttcaggcccttcccagcctgaaagtaggcttggacatcccgttctgcccaggtacctgtctgcctctgctgccattcatggcatccaggctgttcacgccaagaggagcctgcaggccagcactgaactacctgcaacaccccctcaacttccctcctatgctcatcagcacccaaagtccagagggggctgtgtgggcaggggctggtgtgtcagcactgccccaagtgtgcgcacacccagccagactgggacagcacctgggctcagccccaacttttctgagatttgagcrggtgccgggaatggagagagggaaggcagcgaaagcagacacttctgaaacttgcggggggagatgcctgactctgcagggcattgtggcttgtatggctgtagctgcacccaggaatgtgggtctcctgcctgctctgtgggctaggaggcccagatctaccgccgtgacttgggcatctgcagctgccccaggagggcaggtttcctgcctgctcccaggccccccactttgagatgtcaccgtcaacgagggaggcctgg

SEQ ID NO: 286783 - DNA, 569 bp, Homo sapiens
tggtttaaggtgatttttataactattttcagagtcaaagcattttgtacttcatggttaattcttccaggcatggaacagggcaagggcactctcttgtacaaagatgcaactccagtgggaaacatagtgcctggcacatagtagctgttgaataaacgtgtgttgcctgcctgaaaacaaattttcccgtgtatcagggtgagttgttacattgattttacaaataaaagagaaaatatttaaattattaggcaagaatgcctaagtagctgtttgaaaaatcttcccttgttttaaaggctctgtaactatagagattctcaactgmgtcactttgagataatagattgatgtgtttattattttgtaataattttgaatattacatttcgcaatggtatatgctgtgtgtaaatgccattatgctgaacacaattttcagagacagaaatgtaataaaaataggataaacaatgaaataaatttctctccataatttatgcttaagggtatatatatacatatatatgtgtgtatgtatatatatatatgagataatgaatatt

SEQ ID NO: 286784 - DNA, 593 bp, Homo sapiens
atttttattagttgtagttatattcttctaggttttcttgatgaaaggcttagagtcattcctaatttctatctttccctcacattttaattcttatgcatgagaaagtacagtgcagatcctgaatgctaacatttttcatgacaaccatttgcccaagccactattggacttctgcatcattgtggtatatgtagaatatgtaaatggataatattagtaccaatctgacttcctggcttccctttacatcaccccatcgacttcaacctcagttttctccatataacagccagaacgatgcttgatacaggtacatgagattgtgtaagcccttcttcatggccctccaatggtttcccataattgctgtcagtctactattttccaccaacatacatactgtgggcttcaaggcactgacgttatcttctagtattctccgcctctgcttttatacttayttggacacatcaaataaatatccacatttcagattttgtacttgctccctcctcaaccttcccattcttctgcatggacaaaggacttgacttgtttcctttattcttgccattctctttcatatgtca

SEQ ID NO: 286785 - DNA, 591 bp, Homo sapiens
taggaaacagaaacaggaaacccagaacaatgatctgtaacagtggaataatatttcttccttaatgtcttcagaagagccaggagagctattatttcagaagagttgcttttgtttaatacatagaatagtttgttttactaaaattaaacaaagtaattagattgactttctaaaagtggtaaattgtggttgcaataccattggtaagacactaagtgaaaggatacataattggctaacttcttgaaaagcatgataatatcatttatcatagaagtttgataattattattgttggaagaatgacgaatttgaatgtctgaaaaatttagcggaatatattcaacagataaggctcaggactctgaaaccargaaaaccatgaaacaggagagggtaattcaagaaaatactgtggagagagacactgtgggccaagaacagaatgagggtggctgctaatatattaaaagtcgagaaagaagaaataattcaaaaaacaaagacaaaatggtcaaggaaatgcagagactctcagaagaggttacagtcaagagtcccaagcgaatagagcttcaagtaataagt

SEQ ID NO: 286786 - DNA, 573 bp, Homo sapiens
gtcccaagcgaatagagcttcaagtaataagtgctcagcagtgctgaatgcagagaagctgttctagtatctttaatttgttagaaactagtaaagtatcaaccacgtgaaattctgaggtggttactttaagctacaatctaaggagtggatcagttgtcttatcataacctcaaatcccatgttatttagtgtgccatcaggaaccccacacttcaaaagagcattcacatgtgcttgacctcgagatgccatatatgtatatcagtcaaacagcacgctcctttataaagtactatgaataatattacaaataagttttcattactgaaactagtggtcttcaagagatgttagactgactgaactatttaaagatactcttaataggataaggatatagaaagttctgtagtgtgcgctcttatagatggagcygttacatttatctctaaattgccctgtgactggctgtgaatttaaaggattctgcttggtgttagccttaactaaatcttgacctaagagtattgtcacatattttttcttaaatgaacctttcatgcaaactac

SEQ ID NO: 286787 - DNA, 613 bp, Homo sapiens
gttttttgtttcgttttgtttttgtttttgtaacacggaggtttgctcttgttgcccaggctggagtgcaatggcatgaccttggcttgctgtaacttggcttgctgtaagttctgcctcacgggttcaagtgattcttctgcctcagcctcccaagtagctgggattacaggcatgcgccaccacgcccagcaaattcttgtatttttagtagagacagctttcaccatgttggccaggctggtctcaaactcctgacctcaggtgatctacccaccctggcctcccaaagtgctgagattacaggcgtgagccaccrcgcctggcatgtgaattaactttttgatgtgctgctggagaactaccaaatgctgctcaaataaatctgagatgacacaaacaaattgaaaaacattccatgctcatggactgaaagaatcaatatcattaaaatggccatactatccaaataaatttacagattcaatgctattcctatcaaactaccaatgacattcctcacagaattagaaataaactattctaaaatgcataatgaatgaaaagagagcccaaataggcaaagcaatcctaagcaaaaaagaaccagact

SEQ ID NO: 286788 - DNA, 419 bp, Homo sapiens
taataaatgacagctgaacaaagatttcatcctgggcactgactgccgtgaatatttagtgtagaaataatgtcaagggagtgacaacaaaatacattttttaagatttcagaaaatcaatgattttatggtcacattcttggctttatctttacaccacattgtcatggcactgctcttgatttgatctaatgaagagagtcacaggaaacccacgacattcttgaaagatttatatatgctgaagctttgccagacaaagatagtctgcaatgaggagaggcacrtggatccccaatattctactgacaggaagcaggcagagagaacaggtcaggtgcagaaacatgctgcataaataaataaataaataaataaataaatattactcatagggaagaaccacgagcctagaaggg

SEQ ID NO: 286789 - DNA, 604 bp, Homo sapiens
ccaaacatcctatgcaactctgccaaactgttttcgtgccaatgccttactaaggagtcttttggttccaggtgcccataggatcgggtccattctccttagcatggcggtcaaggtctcgcagcatccattcccaagtcccctaaggaaccctccccagaggtggggggctgctccactgctgccaggcttagaaaatccttcttcctctctcctcttctgcattctaaagcacacctttgctcatccatctcaccctccatccactcaagccctcagttacccacctatgggtacctgatttctcttcatcacacagtgcaactctattatcyctcatttttatatactgaagtacggagccataaaatattgacaattctaaacggaatttaaccctactttatttatgtcaggtactaaaataacagcctaaccctcatttgatggtttaacaactccctgtactctgcatgatccaagactggatatttgaaacaggtatagttatgctactcattttaatataatgtctccaacgacaacattttaaaaacatatggtacagacatcacaaatatttccaaaatgatctattccaaaa

SEQ ID NO: 286790 - DNA, 533 bp, Homo sapiens
gggaatatgtcccaagacccacagtggatgcctgaaacctcagagagtatagagccctctatatactatgtttttttctatacatacatacctatgacaaagtttaatttaaaaatttggcacagtaagagattaacaataactaataataaaattcagttgaccctagaacaacatgggtttgaactgtatgggtttgtttatatgcagattttcatccgcctctgccacccctgagacagtaagaccaacccctcctcttcctcctcctcctcctcagctactcaatgtgaagatgacgaggatgaagacctttatgatgatcmacttccacttagtgaatagtaaatgtattttctcttccttatgattttcttaataacgtgttcttttctctaacttacatattttgtaacttacaatataatattcttactagactacagtaatgtatatagcatacaaaatatgtcttaatcgactgtttatgttatcagtaaggcttctggtcaacagtaggctattagtagtta

SEQ ID NO: 286791 - DNA, 303 bp, Homo sapiens
ggcacaattgtgtttcacaaaggcaggaatgatcaaaagagccccgtgtcacagaatggtcacataaaataagtacaggcagtcacagatttgcaaggtagtcagacaccataaaratcgttgcttaagcctgaatagtagaaagtgatcttaataaccaatgggaaaattattattattatttcatggcctttaaaatttttgtcaaaacattgagaacacttcaactattgctatacgtgtataaagacatgaagaaaaaattgtaaagttagtatttatttaggacactataatttaaaa

SEQ ID NO: 286792 - DNA, 514 bp, Homo sapiens
attgacaaatgttgttactttagtgatcagtaacaaatcacttgtgccgtgccttatgtctgatcaagtgtttgaaggtactgtagttgagaactgtactacatactagttatggggaaaggcaacagataggaacagctagagaatgttgagttcaatatatctcccaatattggaagtcaaagtaaatctagtgaatatggcaactgatatcaaaatcatcatctataaacttagagtggatcaaggtttatggggcttgaagcctttacaatttgggggttcctcttcaaggaaaggagtttcaaaatacaaatgcaaaactgccaagaactgtgaaggatctgagattttgctstactcacaagctaaatagcctctcaaagtttcatagatgctggtggaagacatgagacccctgggtcagagatagagacatagggaagcaagcagctctcaatctgtttttaccaggatgcagtctattactttagctcgttaccttattacggta

SEQ ID NO: 286793 - DNA, 552 bp, Homo sapiens
gcacccacgtaacaatctggccacttttccatagggctgctgcagtatgcttggggcccactctagtccttagtcaccttgggttttccagaacctggaggtgtcaccagtgatggctgtgaaacagcaaagatgacagcctgtcccttcctctgggagctttgttgcagggaggtatggacctgttgccagcccaaaggcatcataggaagtgactggagaccctggttttgaggtcccgcccaatgaggaggaatgggatcaggygcctgcataaagcagcagtctgggcacgttgtggtagaacagctgtgctatgctgggggatccctcctgccctgggtgggctcagactttccaaagcctgaaggctagaacagctaagtcacccaaacaacaaagatgatggcccacccctccctctggaagcaccatcccagggggaattcagatctctgtcagctggagagcttagttggggctggctggaggccccattcgggagtcctgctagtgaggaggaacaggatcaggcacctgcttaaagcagca

SEQ ID NO: 286794 - DNA, 1242 bp, Homo sapiens
gaattatttatagttctttcccattatccataatgtcctgtacaaatataacataactgattaaagtaacttaaaaacaatactctggcagtgtatcctcaggggaatatattctaaagacaaaaataaaattaagaggcaaagacattttaaacttagtattggatgtgttttttaaaaatggtgttggcaccttaatactaaaactcttgggtgtgaactgtgggttagcacacaggaatcaatatatccctgttttgggaagcagggytttcactgtggaagaagtggaatgagagaagctgtggaagaagcctgtgttactggatttgatactgtggcttcaaacaccaacaatactatgtgttcctgctgtgaagtagtgagaggttcagaaattcaccaaacagtgttcttgccagaaatgttgcacctaaatatagtcacaaggaaagggacgaatatagaatgtgggatgttttgcagggacccttcaaaggactcattaccaggtagagtgaggggataggattgttctatattaaggaagaataacaaggcatagcacccaaatgctaaagtgtgagccttgattttattctgagttgaaaggaaaatgaactataaaaaacaccagtggwcctgttgttccacatcctcactagcatttgatgwtgtcagagctgtggaatttggccgttctaataggtaggtagtgatatctcattgttgttttaatctgcatttccctgatggcatcttgtggagcatcttttcatatgcttaactgacatctgtgtatcttcttcggtcaagtatctgttaaggtctttggcccattgtttaatcgagtagtttgttttcttattgttgagttttaagtgtcctttgtatatttttggtaacagttctttatcatatgtgtcttttgcaaatattttcttccagtctgtagcttatcttctcattttcttgaaattatcttctgcagaacagaagtttttaattttaatgaagtccggcttattaattatttctgtcatgaactgtgtctctggtgttgtacctaaaaagtcatcaccatacccaaggtcatctaggtttttctcctgtattatgttctaagcactttataatttgtgttccacaggtagtctgtgacccattttgagttaatttttgttaagggtttaaggtctgaatctggatggatttgtttgcatggggatatccaatggttcc

SEQ ID NO: 286795 - DNA, 601 bp, Homo sapiens
cctgttgttccacatcctcactagcatttgatgatgtcagagctgtggaatttggccgttctaataggtakgtagtgatatctcattgttgttttaatctgcatttccctgatggcatcttgtggagcatcttttcatatgcttaactgacatctgtgtatcttcttcggtcaagtatctgttaaggtctttggcccattgtttaatcgagtagtttgttttcttattgttgagttttaagtgtcctttgtatatttttggtaacagttctttatcatatgtgtcttttgcaaatattttcttccagtctgtagcttatcttctcattttcttgaaattatcttctgcagaacagaagtttttaattttaatgaagtccggcttattaattatttctgtcatgaactgtgtctctggtgttgtacctaaaaagtcatcaccatacccaaggtcatctaggtttttctcctgtattatgttctaagcactttataatttgtgttccacaggtagtctgtgacccattttgagttaatttttgttaagggtttaaggtctgaatctggatggatttgtttgcatggggatatccaatggttcc

SEQ ID NO: 286796 - DNA, 601 bp, Homo sapiens
cctgttgttccacatcctcactagcatttgatgatgtcagagctgtggaatttggccgttctaataggtaggtagtgatatctcattgttgttttaatctgcatttccctgatggcatcttgtggagcatcttttcatatgcttaactgacatctgtgtatcttcttcggtcaagtatctgttaaggtctttggcccattgtttaatcgagtagtttgttttcttattgttgagttttaagtgtcctttgtatatttttggtaacagttctttatcatatgtgtcttttgcaaatattttcttccagtctgtagcttatcttctyattttcttgaaattatcttctgcagaacagaagtttttaattttaatgaagtccggcttattaattatttctgtcatgaactgtgtctctggtgttgtacctaaaaagtcatcaccatacccaaggtcatctaggtttttctcctgtattatgttctaagcactttataatttgtgttccacaggtagtctgtgacccattttgagttaatttttgttaagggtttaaggtctgaatctggatggatttgtttgcatggggatatccaatggttcc

SEQ ID NO: 286797 - DNA, 588 bp, Homo sapiens
agagtgggggagatgagtattctactttttgaaagagtatgtaggagacgagtattcttttttgcataattggtagaatttgccagtgaagccacctgggcctagaatttcctttgtgagaagttttcaaattattaactcaatgtctgtacttttaatagatctatttatatcttctatttcttcctgagtcaattttagcacttggcatctttataggaatttgtccattttatccagattatctaatttgttggcatagagtttgtttgtttcgttttgttttgtttttgagatggagtttcactcttgttgcccaggctggagtgcaatggcacaatattggctcactgcaacctccatctcctgagttcaagcgattttcctgcctcagcctcctgagtagctggaattacaggcacccaccaccacgccmggctaatttttgtatttttagtagagacagggtttctccatgttggtcaggctggtctcgaactcccaacctcaggtgatctgcccacctcagcctcccaaagtgctggaattacaggtgtgtgccaccgtgccaggcccggcatacagtct

SEQ ID NO: 286798 - DNA, 588 bp, Homo sapiens
agagtgggggagatgagtattctactttttgaaagagtatgtaggagacgagtattcttttttgcataattggtagaatttgccagtgaagccacctgggcctagaatttcctttgtgagaagttttcaaattattaactcaatgtctgtacttttaatagatctatttatatcttctatttcttcctgagtcaattttagcacttggcatctttataggaatttgtccattttatccagattatctaatttgttggcatagagtttgtttgtttcgttttgttttgtttttgagatggagtttcactcttgttgcccaggctggagtgcaatggcacaatattggctcactgcaacctccatctcctgagttcaagcgattttcctgcctcagcctcctgagtagctggaattacaggcacccaccaccacgccargctaatttttgtatttttagtagagacagggtttctccatgttggtcaggctggtctcgaactcccaacctcaggtgatctgcccacctcagcctcccaaagtgctggaattacaggtgtgtgccaccgtgccaggcccggcatacagtct

SEQ ID NO: 286799 - DNA, 569 bp, Homo sapiens
gttgtgaacttgacagaaatgaaccatacatggagcgctctttcaggtcggcttcttttgctcagcacgatgtttgtgggagtcacccgtgttgttgcaggaagctgtagtatgctcagcctccttccttggcagctgggcttccctagacagtcattggaagagagtagcagatgccaacaccattgctaggagccattccaagaatcaaaggctcaagttaaactcaatccaatgaatatgtgactttgtgttttaccggacaactgtttgcagcatcttcccatagagtgttccttyagattgtggtctaaatgattgattggcataataagaatgattcctttgggaggccaaagtgggcagatcacttggatcagaaactagcttggccaacatggtgaaaccccgtctttactaaaaaaacaaaaaaattaactagacatggtgtcatgtgcctgtaatcccagctactctggaggctgaggcagaaggatcgcttggacccgggtggcagaggttgcagtgagctgagatcgtgccactgcactccagcctgggtgacagag

SEQ ID NO: 286800 - DNA, 458 bp, Homo sapiens
taacttattggtgctctgttatttgggaaaatgatcagaaacaaagcacaagtgttaaactgggcacagtayggtgatattagtgcctccatcattccccaggagaaaggttgttcgagaaatagaaagtattgctatttttttaaactaggctgatcctatgaattcatattcagtgctttattatactgaaaactgcacatgacttctttggatctttggctcaataatcactttgatgttttatttattgatgcaaaaagtactttcctttcaagtttgttatctctcatttcaatggaatttttcaaagtattaagaaactagctccacagtactgtctatccagttttaaattggcacaagattctagtgttactagtgcccctgggtgtttcctgccatttagtttcaagctaataaggaaatgcagaggttggctagaatttgctatgaat

SEQ ID NO: 286801 - DNA, 1001 bp, Homo sapiens
taacttattggtgctctgttatttgggaaaatgatcagaaacaaagcacaagtgttaaactgggcacagtacggtgatattagtgcctccatcattccccaggagaaaggttgttcgagaaatagaaagtattgctatttttttaaactaggctgatcctatgaattcatattcagtgcttyattatactgaaaactgcacatgacttctttggatctttggctcaataatcactttgatgttttatttattgatgcaaaaagtactttcctttcaagtttgttatctctcatttcaatggaatttttcaaagtattaagaaactagctccacagtactgtctatccagttttaaattggcacaagattctagtgttactagtgcccctgggtgtttcctgccatttagtttcaagctaataaggaaatgcagaggttggctagaatttgctatgaatwaccagccccatgttttactaaggtgcctctcctgtttgtcgggcatagtacagcagcagtgtgggaagagagctatcttgttacagttctgtttctcagactgtctwcccaatcttaccctgccaaactgcttacttctgacataacggggtattccctcttctgcattagaacccataggagactataggctcttttaagggacttcaaaaaatgctatgagttaaggatactatgaagctaatgaactattttctttcatataggtaatgctggactctagatataaaatagcttcatttcctaaatgagttggagaataaaacttcaacacataacagatatctcagtttttcaatctaaataaactgatctcagggcagatgtattaccctagtcctagcctatgagaacttggactgtgttattgaggagacagaaagatgttctgcatgtgagctctcttagtagatagtggtcctcactagtttgctatcatcttgattttctgaaggtcaaagtctctcaattgtcttgcatat

SEQ ID NO: 286802 - DNA, 542 bp, Homo sapiens
accagccccatgttttactaaggtgcctctcctgtttgtcgggcatagtacagcagcagtgtgggaagagagctatcttgttacagttctgtttctcagactgtctacccaatcttaccctgccaaactgcttacttctgacataacggggtattccctcttctgcattagaacccataggagactataggctcttttaagggacttcaaaaaatgctatgagttaaggatactatgaagctaatgaactattttctttcatataggtaatgctggactctagatataaaatagcttcatttcctaaatgagttggagaataaaacttcaacacataacagatatctcagtttttcaatctaaataaactgatctcagggcagatgtattaccctagtcctagcctatgagaacttggactgtgttattgaggagacagaaagatgttctgcaygtgagctctcttagtagatagtggtcctcactagtttgctatcatcttgattttctgaaggtcaaagtctctcaattgtcttgcatat

SEQ ID NO: 286803 - DNA, 611 bp, Homo sapiens
cggccagttcctgggggccaaggccagccccggccgcttcacagctggtgattttgggcaagctatttatttctctccatttcaacttcctcatttttacaatggtgatcattatacttacttgcataactgctgcaagaaatgaacagcagattaaggtggttcccactcagtgcacccacttggtgtgaacattaaataaaggcctttctgacaccctatgtgccactatctttcaaatgcaccttaaggtgaagaaaatacaaactgagttaaaagaaagcatcactgagtacggtagctttgcctttacgtttccttggtcaactactatggggtaaaggttccagagttttcaccttaacaagagttctgatattcaaaacacaggrtggaaagttagtatgacatagtgtgcccagcccagggctcctgcataactgctggaacagtcaccattgaaatcaggcctgtggtcctggtgtggggaccagtgacaccccctctgacactggctgggaacttggattcaaatcacgaaaacttcacagccaggaaggtggtgttctcttgtgatgcctgttatcagacacaagctgtgcaggagccgg

SEQ ID NO: 286804 - DNA, 579 bp, Homo sapiens
ggttctgcctactctgctctctgattcctgcttagctccaggtaacaagttaaatagctacagcttgcatttacaggatattcgagtctcggaggctcaagtacagcatctccttagactttacaacctcccaggagaccatgggtacattttacagacgaggcaactaaggcacctggagagaaaaagtcagatgactttacaaacccaaagtggagccaggatggtaatttggtcttaggacttgctgagtgctgcctcctggccagagctgcctcaggctgcagagaacagacgtttccccagcaaggactccagcccaggaaaaggtcttctccggctgatgactgatggggattctccaggctttctctgttccctgccactrtttatttctggaaaggtggttcatcaacatctgctgacagtatccgtttgttttcgccatcttcccagaatggaagaaattacttgatgtgatcttgtgaacagatcaactaaggaagcaggctgcatgaaacacaagccttcaaaagcagtgttccttgagctaaaagttttgttcaagaaggaggaaaa

SEQ ID NO: 286805 - DNA, 559 bp, Homo sapiens
ttacacatatttcctttttctttttgattctatgccccctccctcagcctcccaagcagcaggaataccctgaagggccctgggaacccttgcccactgagtcccacctggaaagcagttccctagctggagagtcctcctcatcagttatgctctccagcacccacactggagaaacacaaacaacaggagaagtcatttgagagaggctacccactcctastcccgctgaagccccactgcctcacacaggattccctggtctttcctctgggttcacagatattcctgcagcctctctggccatagctttctactggaaagtcatttgctctcaccaggcccgtaatgctccttcccaaaggaacccagaatcaggtttccgtacactagatccagcaagtttgttcctcaggaagtgagccatttcaaggtaaatactcccctctgaggttgatggcatctgcaattatagaacacattaggaggattagatgatgccacgcatgtcacacatatctgttattctcttggcaactttagaaaattgtaagtatag

SEQ ID NO: 286806 - DNA, 559 bp, Homo sapiens
ttacacatatttcctttttctttttgattctatgccccctccctcagcctcccaagcagcaggaataccctgaagggccctgggaacccttgcccactgagtcccacctggaaagcagttccctagctggagagtcctcctcatcagttatgctctccagcacccacactggagaaacacaaacaacaggagaagtcatttgagagaggctacccactcctagtcccgctgaagccccactgcctcacacaggattccctggtctttcctctgggttcacagatattcctgcagcctctctggccatagctttctactggaaagtcatttgctctcaccaggcccrtaatgctccttcccaaaggaacccagaatcaggtttccgtacactagatccagcaagtttgttcctcaggaagtgagccatttcaaggtaaatactcccctctgaggttgatggcatctgcaattatagaacacattaggaggattagatgatgccacgcatgtcacacatatctgttattctcttggcaactttagaaaattgtaagtatag

SEQ ID NO: 286807 - DNA, 559 bp, Homo sapiens
ttacacatatttcctttttctttttgattctatgccccctccctcagcctcccaagcagcaggaataccctgaagggccctgggaacccttgcccactgagtcccacctggaaagcagttccctagctggagagtcctcctcatcagttatgctctccagcacccacactggagaaacacaaacaacaggagaagtcatttgagagaggctacccactcctagtcccgctgaagccccactgcctcacacaggattccctggtctttcctctgggttcacagatattcctgcagcctctctggccatagctttctactggaaagtcatttgctctcaccaggcccgtaatgctccttcccaaaggaacccagaatcaggtttccgtacactagatccagcaagtttgttcctcaggaagtgagccatttcarggtaaatactcccctctgaggttgatggcatctgcaattatagaacacattaggaggattagatgatgccacgcatgtcacacatatctgttattctcttggcaactttagaaaattgtaagtatag

SEQ ID NO: 286808 - DNA, 558 bp, Homo sapiens
ttgctgctgccctcccttcrgccttgttgcctttggaagggcattctctgcatggcttctttttgccctgggttggcattctgccacccatcccacatcattctcagaacagaaccacaagtgagctgacaacttccatccagtgagttacgtaaaagccacaccagtagccacacagacacatggaaccatgatgaggatgcagcatttgcaggcaattccaggaagagtttctaccttaacaacgacttgctttaatttcctctgttcctgagcttcagtgctgatcctacagatgaagagagaaaggtccttctctcatggtgcaggctgaggacaaaacagcagtacacctgaatgtgtctgtctccaagccatccccaagcttccgtttcagtcattctttgagctgtggcctttaccacggtagaacttgaattttatggtgttaacctttaaagccaagatggaacctataatttagataagcgctgaccagcagataacttccagtttacactacagcatatgtctttgatattcaaaacaggcttccaa

SEQ ID NO: 286809 - DNA, 558 bp, Homo sapiens
ttgctgctgccctcccttcggccttgttgcctttggaagggcattctctgcatggcttctttttgccctgggttggcattctgccacccatcccacatcattctcagaacagaaccacaagtgagctgacaacttccatccagtgagttacgtaaaagccacaccagtagccacacagacacatggaaccatgatgaggatgcagcatttgcaggcaattccaggaagagtttctaccttaacaacgacttgctttaatttcctctgttcctgagcttcagtgctgatcctacagatgaagagagaaaggtccttctctcatggtgcaggctgaggacaaaacagcagtacacctgaatgtgtctgtctccaagccatccccaagcttccgtttcagtcattctttgagctgtggcctttaccayggtagaacttgaattttatggtgttaacctttaaagccaagatggaacctataatttagataagcgctgaccagcagataacttccagtttacactacagcatatgtctttgatattcaaaacaggcttccaa

SEQ ID NO: 286810 - DNA, 609 bp, Homo sapiens
tttctttttttgttgtagaaaaagaaaagccaatcgtgaagttcataagcaattgcacaggaccccaaatacccaaaacaatatttaagaacaaagttggaggacacatatttcccaatttcaaaacttactacaaagctacagtaatcaaaacaatgtgctactggcattaggatataccataaaggtgtaggttagatcagaaacatatggatcatggaatgtaattaagattgcagaaataaacccatacatttattatcacttgatttcaacaagcatgccaagatcattcaatgggaaaagaatagtttcttcaataaacagtgctgaggtaactagatatccacatataaaaggatgttggaccttgatctcacattgtatacmaaaaataacgtcaaagtatcaaagatctaaatgtaagggctaaaactgtaacacttttagaagaaaagataggggtatatcttcataatcttggatttggcagtggtgtcttgcctataataacaaaagtacatgcaacaaaagaaaaaacagaaaaattgggcttcaaaattaaaaagttttgtgcattaaactgcacaatcaagaaagcggggcatg

SEQ ID NO: 286811 - DNA, 626 bp, Homo sapiens
attccaccataagtagaagcagcctgaggccctcaccagatgcccaatcttccagccagcagactggtgagccaaataaaccttttttctttataaattacccagtctcatgtattgctgtatagcaaaaacagaacagataagataaatagcaggttagctaatcctagatggtatgacttaagtcaattactctaaattcaaacacatattttggtagtttttcactaatttttacatggccgccattaagtaaattgatcaatgaggctaagcccatccactatttaagaacagcaaatatgttgcaacaaacaggacttttacacttaaagaaaccttggaaacaatctagttctactccacacacaatgctgtgatcctctcaatgctgtaactgatrgagaattttccatgtcagcttggtcacttccagagacattactcagatctccaaagcttctcattccattttggaagacttgtaatttctttcctgatagcacttggacaccactgctttaagtcactgctccattcttgcacctttggtcaagctccagtttgacaaattaacatttctatgaaaatgctgaataaaagaaatgtagatgaatcaatgaaaa

SEQ ID NO: 286812 - DNA, 570 bp, Homo sapiens
ggacccttgagctgagacattgttggctgtgcaaagactgtgggaagagctttgtatttaaagaaccagakgccaggctagatgcagagtgagcaagaggctggctagattggaggacctgctggctgagaaccctgtggctgggatgcagtaaaccagggcagacagcctcacatgaggctgctggggagggtaggccagctctaaggcatcttgcagaccagatcttctaacctaagagaactgaaaagtcattgaagagctttcagcaggggccatgcttaaaatatgattcagctttttgaaagagcattctggctgctgtttggcaaatggacgggagaaaaagtgatttgggggtgaccagttaaaagacctttgcagccgttctggttagagagcacagaggcttaggtaagaggagctgcaggagcaactgagaagtgagtgggcctgagatccactgtacgtggcaggcagaatcaacagactgttgatgcttagattaaaaaattaaacaaaagggatcttcttttctaaacctcatctaacatgaatcactgcttacac

SEQ ID NO: 286813 - DNA, 574 bp, Homo sapiens
cctgctggctgagaaccctgtggctgggatgcagtaaaccagggcagacagcctcacatgaggctgctggggagggtaggccagctctaaggcatcttgcagaccagatcttctaacctaagagaactgaaaagtcattgaagagctttcagcaggggccatgcttaaaatatgattcagctttttgaaagagcattctggctgctgtttggcaaatggacgggagaaaaagtgatttgggggtgaccagttaaaagacctttgcagccgttctggttagagagcacagaggcttaggtaagaggagctgcaggagcaactgagaagtgagtgggcctgagatccactgtacgtggcaggcagaaycaacagactgttgatgcttagattaaaaaattaaacaaaagggatcttcttttctaaacctcatctaacatgaatcactgcttacactaaacttctctttccttgtgggagaaatctggggtgtttgctctctcctttttctaagattacagataccccaggtactgttgagtgctttatgtccataggatgttactcgacatcagtt

SEQ ID NO: 286814 - DNA, 614 bp, Homo sapiens
gatgagagcagagtgggaaggccagaattgatgagctgaaagtcatggcgtaactgagactaggagctaacaaaaggctaaggccaggtcatttggccagggctttaagtacctccccgtacccccattgcagcctcagctagtatatgtgaatggctgacagagccgtttgtgaaatccctcaattccatcccgctgctgttatgctctgtagattctgtctcagtgcttctggctcaggaacctagcattcatctaaggccacactggcaaccatcataaacaaaaggaacccttatttctgttgtgccagctttgcttttagttaattgccccctttacttttctactagagagaaaattaattctgaatggacaagaagatgctagrtgactagattctgtctcaggatgacagacattttgcacctgcctgctgtagacaaggtccataaaataaaagtgttcaggaagtcgaccgtttttgaactagcgtaagggaacttcttttataggccagcacagcactcatcctccttatccagaaagaaatgcctgcacagggcagcaggtgtttgccctcctggcctgctcgtgaagcgagtggaaggctg

SEQ ID NO: 286815 - DNA, 591 bp, Homo sapiens
gcatggccagcaaatcctgtgctggaaaatcagggcagctggagtgaggggaggggacaccccactgtccccaggagcccacacacccagccaagtttggcttttaattcgcctttcttgtgatgtcttttgctgaatttgctgtcatgattgtcccgattaaaagagagagcattgtgtgttccctctatatccagaagtgtgcatgcaagattggagttacttctatttaaaatatgtgatggactcagaggggacagtaaggatggaagtttgcgtatggaaaaatagtttgtrttactttgtttttatttgatggttgctttacttgtggtgcagtgcacagtatattacctgtacagattgttgccttctgacaaacactgtgttaccaccgcccagatatgaacaccctggcagcccctctttggctaattcctaggcagtaacttccaagagacactcactattctggtcatgatcaacatattttaaatttatttttaaacactgtataaatggaaacctacagtatgtactcttttgtgcctgaatgaaaattacacgtgaatatcatgtgaatttcaccta

SEQ ID NO: 286816 - DNA, 591 bp, Homo sapiens
gcatggccagcaaatcctgtgctggaaaatcagggcagctggagtgaggggaggggacaccccactgtccccaggagcccacacacccagccaagtttggcttttaattcgcctttcttgtgatgtcttttgctgaatttgctgtcatgattgtcccgattaaaagagagagcattgtgtgttccctctatatccagaagtgtgcatgcaagattggagttacttctatttaaaatatgtgatggactcagaggggacagtaaggatggaagtttgcgtatggaaaaatagtttgtgttactttgtttttatttgatggttgctttacttgtggtgcagtgcacagtatattacctgtacagattgttgccttctgacaaacactgtgttaccaccgcccagatatgaacaccctggcagcccctctttggctaattcctaggcagtaacttccaagagacactcactattctggtcatgatcaacatattttaaatttatttttaaacaytgtataaatggaaacctacagtatgtactcttttgtgcctgaatgaaaattacacgtgaatatcatgtgaatttcaccta

SEQ ID NO: 286817 - DNA, 591 bp, Homo sapiens
gcatggccagcaaatcctgtgctggaaaatcagggcagctggagtgaggggaggggacaccccactgtccccaggagcccacacacccagccaagtttggcttttaattcgcctttcttgtgatgtcttttgctgaatttgctgtcatgattgtcccgattaaaagagagagcattgtgtgttccctctatatccagaagtgtgcatgcaagattggagttacttctatttaaaatatgtgatggactcagaggggacagtaaggatggaagtttgcgtatggaaaaatagtttgtgttactttgtttttatttgatggttgctttacttgtggtgcagtgcacagtatattacctgtacagattgttgccttctgacaaacactgtgttaccaccgcccagatatgaacaccctggcagcccctctttggctaattcctaggcagtaacttccaagagacactcactattctggtcatgatcaacatattttaaatttatttttaaacactgtataaatggaaacctacagtatgyactcttttgtgcctgaatgaaaattacacgtgaatatcatgtgaatttcaccta

SEQ ID NO: 286818 - DNA, 621 bp, Homo sapiens
agcattgggccacacacctgagctcatgttttgactttttcattcaggagctccaaagctggggccactcccattggcccttcagattctccacctgagcagtgagggtaatgaaaggtggctctggcacgggtgaatkagtcatgtatggagagagtagaacaggggtggattttactttttagaagtggagactggcaattgtgctgtgtaaatggaaaatctctcctgagaaaacacacagcctcccctatacgaaaacacacacaatcatatcacacgatgcagactcataagacaccaggcaagcgcacagcccaccgcccccataggaatgcagctgcttcatcagatggagacatttggtcataatttttgcctggagaacttaaaaaaaaaagtccactacccttattcctatcagaatcccagaatcagggtggctcttcacattgaagccagcaaggatgtcacacctttcttgacatccagacttttctttctcagcaagtaattccagagtacttactggagtcacacctcagaggggccacctgcacgacctgcaatacagaaacaaagctatatgaggggcacattgagctgtggattgtttgcacc

SEQ ID NO: 286819 - DNA, 602 bp, Homo sapiens
aaagcacttcggggagtgcctagcacataggaaggactctagacgtgttcctaaaaaaaaataaataaaaactgcgtgggacrgtttttgtttttgttgtctttctgatgcagctaggagctatgtatacatgtgcttatacacagtcacacacaaactcatgtgaagaacatgcgcacaggagtgaatatgagaagatttgaaaatatatttgaacctcactttaatgtaaggccaagatttaaaccaaagacaaatgaagttgactcttttcttcatgaacaatttctttaaagggtgaaactccctcatttacagaacttttggctcacacatagctgtgttcacaccactttcagccagctgtccagaccgcgggaagcgggacgcgtgggcagccttgcttctgagcttccacctccactgcttgcctgagaacatcagggaatctgcctacttccctttgttcagccagtagcagatgtctgagctcactttattagaaggagtttgctgggtcacaaggggttagaacttgggaggggagttaatacaagcacctgaaacaagcacagtccagacaaaagtgacaggcagatggg

SEQ ID NO: 286820 - DNA, 602 bp, Homo sapiens
aaagcacttcggggagtgcctagcacataggaaggactctagacgtgttcctaaaaaaaaataaataaaaactgcgtgggacagtttttgtttttgttgtctttctgatgcagctaggagctatgtatacatgtgcttatacacagtcacacacaaactcatgtgaagaacatgcgcacaggagtgaatatgagaagatttgaaaatatatttgaacctcactttaatgtaaggccaagatttaaaccaaagacaaatgaagttgactcttttcttcatgaacaatttctttaaagggtgaaactccctcatttacagaacttttggctcacacatagctgtgttcacaccactttcagccagctgtccagaccgcgggaagcgggacgcgtgggcagccttgcttctgagcttccacctccactgcttgcctgagaacatcagggaatctgcctacttccctttgttcagccagtagcagatgtctgagctcactttattagaaggrgtttgctgggtcacaaggggttagaacttgggaggggagttaatacaagcacctgaaacaagcacagtccagacaaaagtgacaggcagatggg

SEQ ID NO: 286821 - DNA, 545 bp, Homo sapiens
gctctcccctgttacatggtcttcacttgtataggcccttcttctgggatctactcacaagtcaacttcactattaggtgaaggctagaaactgtcttattttctctgtccccagtgtctgtgccttggccyggcctacattagatgctttctatttgctgaataagaagataatgtattctgcctcaaaatttgtcgaagttgttcagcttttatcatcaaaatacatattaaacaacaaattgtaaatggcaaagtgcaaataattgcatgcctaaactattcctacttttatttcttccagtgtcttttcttggaatggcaaacttgggaattgattccaacctagtgagttgttgggatgtctatactcttcacatcataggtaccattcggcttctctgtacttcgtaacttaacaccaatctcatttgtaacaagtgatgtgatttgatataattatggtgagctttgtctattttgtgtgtataaatgaggctgttcaacttagttggatgctgttgcatatctaacaagttttacat

SEQ ID NO: 286822 - DNA, 593 bp, Homo sapiens
atatttgtgtcattttgagagttccttttgatattaatttctatttttatttcactgtggtgtgagaagatgcttaatattgatatttttgattttaagacttgctttatgactgagcgtgtggtcaattttagatgagaagattgcagataagaacgtatattctgtggttgttggatggagtattctgtagatgtctattaggtacaattggttaaatgttgaattaaagtctggaatttttttagtttttctgggtgtgaatgatctgtctgaagatgtcaatgcggtgttgatgtcccacactattatcgtatggctgcyaacttcttttgttaggtatagaattctgtgctttataagtctgggtgctccaatgttgggtgcatatatatttagagtagttaaattttcttgaattgaactctttatcattatataatgcccttttttattgtttctggtttaaagtctattttatcctatacaagaatagcaacccctgtttttttttgtttgtttagcatttgcatgatcagtctttctttccatgtctttactgtgagcctatggctatcattacctgtgagatg

SEQ ID NO: 286823 - DNA, 544 bp, Homo sapiens
gataattaatgcttctttttttgaatttgctattgtttggagcttcttgatttcctaatcttttttcccttgggggtatgactgcagtgtatactgtgtataatagattggctttgtttctgggtgcttttagggagccaaggctctgtttgggttccttgattgcaaatatgttcctgtggtggtcttctcaggtgttgcttgttgtagcaatgtcattttgtttggtggtgtaattcaatcttctgtccagaaggtggtgctgaaaagtaagagccaacaggtaggagcaggggcaagggagaagtsaaaagtatccttccctagcaagtgttcaaccttcagtggggggtggagccactgtagttgcctaataagtggtctgtttcagcccacgttccctgggttcttatggaaagaggtgctgccaagtccacagtagtgtggaggggagagattacccattctccgtgtccatccctgggctttggtggtactgtctcaagggctggtgctgcactcatgtttcctttggcccgagggg

SEQ ID NO: 286824 - DNA, 617 bp, Homo sapiens
ctttcaaaaaaactgcttttggtttcattgattctttgtatggatttttggatctcaatcattcagtactgctctgagtttagttcttttcttctgctagctttggggttagctcattcttgtttttattattcttatagtgtgctgttagataggtaatttgagatctttccaactttttgacataggcatttagcactattaactttcctcttaacattgcttttgctgtatcccagagattttcrttgtgtctctgtccatctttatttatttcagagaatttttgaatttctgtcttacttttgttgtttacccaaaagtcatataggagcaacttgtttaattttcatgtaattgtgtgatttgaaaagatcatcttggtatttatttctatttttattccaatatggtctgagaaaatggttgttatgatttccattttttattttattttttaaattattatactttaatttctagggcacatgtgcacaatgtgcaggtttgttacatatgtatacatgtgccatgttggtgtgctgcacccactaactcgtcatttacattaggtatttctcctaatgctatacctcaccactcccccaaccccatga

SEQ ID NO: 286825 - DNA, 463 bp, Homo sapiens
cctagtgtgccacttgctaagaccattggaaaggcatgttattagggcaggagtgtcctggttttccaggtatggtctgtcatggctttccttggctaggaaagggaattccccaaccccttttgcttcttgggtgagatgatgccccaccctgcttcatcttacactcagtgggctgctcccrctgtccagccagtcccaatgagacgaacccagtatcccagttggaaatgcagaaatcatctgtcttctgcatcactcctgctgggagctgtagacgggagctgtagactggagctgttcctattcagccatctgggaacaatcccaatttccctttttttaaacttactgagccttgttttgtggccaagcatgtggttgatttaagaatatgttctatttgcagatgagaaaaatatataatctgtagttgatgggaggagtattctgtagatgtcct

SEQ ID NO: 286826 - DNA, 498 bp, Homo sapiens
tgtaaagggttataaaatgtttttgcttttttaaaatttctgagtcatcattttggcaaagtaaataatttaaggaaatccggaattctatctaataacatcaagtgttttaaacctccaacttttttatttttttattataatactttaagttctaggttacatgtacacaacatgcaggtttgctacataggtatctatcccatgttgatttgctgcacccatcaactcatcatttacattaggtagttctcctaacgctatccctcccccagccccctacccataacaaggccctgatgtgtgatgttccmctccctgtgtccatgtgttctcattgttcaactcccagttatgagtgagaacatgtggtgtttggttttctgtccatgtgatattttgctgagaatgatggttgtcctgcttcatccatgtccctgcctaggacatgaatgcatctttttttatggctgcatagtatcccatgttgacctgcaa

SEQ ID NO: 286827 - DNA, 379 bp, Homo sapiens
gacacatcagctcctgtgtccataagcccataaaatttttcctttaatctgtactacacaggtggatctattagaggctataggttgtgatagatttctcctgtagttgtgctctcaaaccctttatttcctcatctctcctytcatgaagggtgtaatttgcagagaataagcaatagttgtgctatatattctcccagttcaaaaacccaaagatctaatttcttcttcataatcagaatcaatcactccagggactgcagtgatgcctttcaagttaagatggcttttgcctaaaattagtcccatatatcgtgccggtaaaggtccccaaatgccagtgggaactttgatagttttgtctccaccaactaatgta

SEQ ID NO: 286828 - DNA, 581 bp, Homo sapiens
taaggatgccactgagattgttctcaaaaatgaaggggcaacaggagtctatggtggaggtccattccatgccattgatttaggacattgcattcaagtgtagggccaaagcacagaccaataacatgattccatggcctagatagtctttaaatatcattcctcaaagactatggtggccacaatagatggttattcaagatttgtatcccaaccactgatgagcacgcaccttcccaactcctctcacatcacagttctgttcttattgccttggtctattcaccattcccccaacatgccctaagtccatcagcatgccttgtcttcattagacagttgatgggactcatgtgggttgagaacagggaagaagatcattcaggtaaaatatttcaytgatgttgttctaatatgcaaaaaatacaaaaagtaacactctttcctcagctgctaccagaaatgaaaataatctcaacatttgacagaaagtaaaattagattgtttcaaagtcttctaaaaatctgagttctccttagaagagacatttttaacagtttggagacactggatagaagcc

SEQ ID NO: 286829 - DNA, 379 bp, Homo sapiens
gacacatcagctcctgtgtccataagcccataaaatttttcctttaatctgtactacacaggtggatctattagaggctataggttgtgatagatttctcctgtagttgtgctctcaaaccctttatttcctcatctctcctctcatgaagggtgtaatttgcagagaataagcaatagttgtgctatatattctcccagttcaaaaacccaaagatctaatttcttcttcataatcagaatcaatcactccagggactgcagtgatgcctttcaagttaagatggcttttgcctaaaattagtcccatatatcstgccggtaaaggtccccaaatgccagtgggaactttgatagttttgtctccaccaactaatgta

SEQ ID NO: 286830 - DNA, 643 bp, Homo sapiens
tagatgttcaagagattcagaggtaggaagaaagtgctgtgagggaaattaaggaaggagccaaaagagtctgggagaagatcagatcacagtgtaggtctggccttgttagggaaagagaagaaagatgtttgttaggaagtaccttagaccgaggtgcaatactaagtgttctgggaaggctggcgacaaataccagagcccaaattgcccatcagaggagtcataaatgtcttaaatggggctgccttagcaccctggttgcgttcaggcagaatgaggcagtggaagtatagcattctaatagcccctacagttagcccttgttgtgcagacttactactttgcagagttcagaacagtgactccttgtcctataggatacccttcctgagaagaatttcaagaggatactactgagatgaaataaagctcctgccactgaagctgatctgkggtcacaacagatactcatcttctgcctcctttaccatcaaccctgcattctttgcctttagctgaggtttagtgcttacctggtgatgtgacccaaaccttcatcttaaagtgtctgaaccctagtgatcatgtgcttctcaagacagggctgctgaatgttggggttacagtagggcgagaaaag

SEQ ID NO: 286831 - DNA, 483 bp, Homo sapiens
  misc_feature (1)...(483): n = A,T,C or G
gctancagaagtgttgtccaaatacagccttcagctatctgctttcaattcacccaggaacatgcctttcttcatctaatgactgattgtattggaagtgtaaaggcccacccatgtttacccagtgtggagcaactctaatgggttaattctccagaactctctagtgttgggtgaggttcttagctctctattgcagttgacttctcctatgaccartcctgctacctcgctctcccataaatattcatcccaaataaatactttgcatgccaaattcttaacatctgcttttgaagaagccagcctgaggcagctggtgtcagaagtggtccaagaaagcaggtaatactatggtacttgatttaggctggattcttggctgtccacctgactctgaagaccttattggtggcaggtggaacacaaaccctccacagatagcagtccagttgttaaatggtctccccagtgataaattag

SEQ ID NO: 286832 - DNA, 454 bp, Homo sapiens
ggctcatctagcactaacagagttggtttctagagtggagaggagaccccagatccatgaggccaaatatcctgctcagggctggccagaaagaaatctcagtttatggagcttctgagctaaatgaccaatagatttttttttttttttttggatgatgctttccctgccagcctgtgaagttactgaacttagggccttacacagggtaatccaytgggagtcctaacttgagtactaagttacacttcctttagaggccaaattattggcctattccctgcagatttttttttgtcaaatagagtaggggatggaacagagatgtctagctatctacaaaggtaccatgtcgcatgcactctggaatgactatcagatttttctgcttcaacctttctcacctgactattgtaagctgtttctttctggtactgatcctgatgagcttatc

SEQ ID NO: 286833 - DNA, 554 bp, Homo sapiens
aacttaccctcaggacttgatgatcaaataaacaattacaaagtatatttgattcccagttcatccaamataagaatgctgcccaactgaaattcatctgggatcactctgatgtctcaaattgtgtgatataaaacaataacttggaatgtgattttgatcaacattttgttatcacttgattaagtcccaaataggtcactagagttaaaggtgtcaagtggtaattaaaagcaacctatactgtctaatgaattccacaaccaggttaatttgccctcaaaataaatgggcatagaattggaatttcccagaagccaactcaatagtggagctggccatcttgtttccactatctaggagaaataacccttgctgttcttcacattggactctctagcaggaaaagcaggggagttaataagtttcctgcatgtttaatgctgtctgtcttggcctgtttatcatgtgataccagaagtggtctgacaaaagtgttataatatagggatttgggactggctcacaccctgcccagtgggcaaaggtgaccc

SEQ ID NO: 286834 - DNA, 478 bp, Homo sapiens
cttgtgtggtagcttgcaaggaggctcatccctcctgcagtggaagggcaaacagtttataaacctaagctgttggccacagagctccagaaacattgaaatgctcagccaagttattttgttatgtgaagttcaaggccctactagggagacctgagaccttgtaacttagatccagacatctggatagatgcctctaaagatgttgagtctgmaagatcctttggatttgcagaggtggcccaccttccctaggaagagctagcactttgtgcttgaagatgctgcagagatttctccttcactagacaataacttccccactccctgataggtacaaccccgccttccttggcttctagacaataactagagttaaatcttagcataacccagctggggatgtgctgggcctgataagggaggggaaccacacatctgttacaagaatgagctagcatgtgccatcaggagtcag

SEQ ID NO: 286835 - DNA, 595 bp, Homo sapiens
tatggtactgcttttggttcactgtttttgtaggtagaggtagtactaatgacttccacttagcctttgctaccaaaaagtcttcattctacaggtcagggaacacacaaggggattctattagttgctgggtatgtctgttataaatatacattccagactgggggaataaccacaggatgagtttggggacccacttgacccacactgtgaattgacccttagctaaaattctatgacctgaccttcataagcctctcccttctgtactgcagtgatattttgggtttacaggagttactgtcagttcatagtgtctagttatccctgagaagcctgattatcttcctttccctagtgcatcgtcacactgataagcccttttggggaaggctggaaaaaatattaacagtatgaacttttagtcatacagcaatatcattcctcaaagagaccaagtctccccttcaaacgattcttggtctgaactagttgatgtttgggaattgattgaggggctgtgactttygctgattcaagttagaccatttactagaactcttacttatgctgttcaagaatttacttttctatt

SEQ ID NO: 286836 - DNA, 473 bp, Homo sapiens
ggatacaaaccgagccagtctgatttcagagcctgagctctcacctccaaggttataatacttttctrttgtgctgaaagttatgtgggagcaaacagatgtcagatgttcagcaggttaaaacatgtgttaacaggatacagtaagtttctgttttctagttgagtggcatgaaagaaaatgttctcaattgtatcacagtgacatttgtcctatctcttactacaaactactttatttaatcactgtgaaactctaccgttaactctctgtttaatacctgttgactacctagattgtcagatactttgtccaattatgccatctcactgttttagtgacatttcactttttgatatcttgagagagagtttccttcttgtcactgctctgcatttagatgtcagtgagtactgacatctacagtggatgtgtcctgtccacttttactaaaataaggtatctatgcatca

SEQ ID NO: 286837 - DNA, 579 bp, Homo sapiens
ctgtatttgcatttgtacctctattataacacttaacgtattctgtggtgtattatagtgaattataaacagattctatcgtcctgacgagaytccaagctccttaaaggttttcatttttgcataccctgagttatcttgcgtagaaactgatatattgcacaatattggttgaactgaattggcgaaagatgaattgaggttgtttcagtaagattcaactgccatatgataatgaattggcatcagtcttctttatgaaaagttatccattggcatctgcacactcagttccaagtaagttaccaagtgtcagatcagatacgagagagggacaaacaacaacaacaacaaaactcatgtaattgtttgcctttgggaagataatacattagtccattgagtgtgtgtgtgtgtgtgtgtgtgtgtgtgtgtgtgtgtgtgtgtctatacctcacctggatagggatcaatgtttctgccttttggtaactgctcttctcagcttgtgactccttactttccccatttcatactctgccttctacctttattttccatcgcttaacttttccaaat

SEQ ID NO: 286838 - DNA, 350 bp, Homo sapiens
aataagctttccagaataaataataacaaataatatcagcaatggactccctccctcttcagcccagctctcttggcyagggactcaaggcagaatcagatcctagagcttcatatgaagccatatgctttattttcttcaagtacatttcttagagatgcaataccaacttgatatttgttaattacaaaaacaaaatatgcttcgattgtataatctttgcaaaagaaatattctcatttaccctagttgagtagcttagggatcatcatagatcatcatgtcatcatagatcctagaaaattagaccaataatttccacagatatcattaagtttaaccatttaatt

SEQ ID NO: 286839 - DNA, 350 bp, Homo sapiens
aataagctttccagaataaataataacaaataatatcagcaatggactccctccctcttcagcccagctctcttggctagggactcaaggcagaatcagatcctagarcttcatatgaagccatatgctttattttcttcaagtacatttcttagagatgcaataccaacttgatatttgttaattacaaaaacaaaatatgcttcgattgtataatctttgcaaaagaaatattctcatttaccctagttgagtagcttagggatcatcatagatcatcatgtcatcatagatcctagaaaattagaccaataatttccacagatatcattaagtttaaccatttaatt

SEQ ID NO: 286840 - DNA, 619 bp, Homo sapiens
gaaattaatcaagagtaatttttacatgcaaactggtcagtaagaccttagagccacaaaacagtccctgaaaaaggcagtttctttcagaagsctgctagcatagtgcatatattacaaacaagacactcatagatcattaagactatgtcaaatggctataaaatcttattttaaaaaattaggtcaaatggtcattaaaatgtgcacatatatatgagagaagaataagcctattccttaaacgtcgaactatgtctaggctttagccagggtgtatttctttaaagactcactatctcttcccccaacctcctctgcatccatctattcattaatgtaactctttgctttcctgtgtgtccttttaattgggagcactggattgtgtggggatactagctacattgccttatatcaaaccccgttgggctatcatgacatcagaaaaacgcaacataataagatctcaaattcataaaagaggtccctctagaagccttcgggtggtgacaagtcagtatccaagcttgccggaaggccagtggtgtgccgtgatgccctttcacctggggcttgctgagccccatagatccgggtggggggacgcacaggctgc

SEQ ID NO: 286841 - DNA, 648 bp, Homo sapiens
cttacctcatgttgggtaatctgggtgacttattttgccaattttctcatagcatgtcacattttctaaagtgctatgctttagaaaagtatttcctattttcctgtagccaaaaattttaacattcagaaaacagtgtcaagtttctggtgtatattctgattctgagatgagcttttatttcatactgcagctgctataaatcccaaaggaatacagataacgcagtacatttcactcttttaaccatttctcttaggtttttcaaagatagttatggtttcatagatgtccctgtttcggggctctttgaaaagtgctcaagaatgtagaattgagtatcagaaaaaaatcttttgggatcttcattctgccacttgcttagctagaagatytgaagctagaaacaccacttctccagcctcagtatccttatctgagaaatcgtgattaaatgagataattcatgtaaagcgccgagcacaacggctggctcactaaatgtttcttagtaacaacaacattcatgtcaattggccataaatcacgtcaccaaggatctcctgcagctatgacttgcctaactttcttataaaccacaattagcatgcaggtagtgccagggtttgtggtggtgtctgactgagt

SEQ ID NO: 286842 - DNA, 648 bp, Homo sapiens
cttacctcatgttgggtaatctgggtgacttattttgccaattttctcatagcatgtcacattttctaaagtgctatgctttagaaaagtatttcctattttcctgtagccaaaaattttaacattcagaaaacagtgtcaagtttctggtgtatattctgattctgagatgagcttttatttcatactgcagctgctataaatcccaaaggaatacagataacgcagtacatttcactcttttaaccatttctcttaggtttttcaaagatagttatggtttcatagatgtccctgtttcggggctctttgaaaagtgctcaagaatgtagaattgagtatcagaaaaaaatcttttgggatcttcattctgccacttgcttagctagaagatctgaagctagaaacaccacttctccagcctcagtatccttatctgagaaatcgtgattaaatgagataattcatgtaaagcgccgagcacaayggctggctcactaaatgtttcttagtaacaacaacattcatgtcaattggccataaatcacgtcaccaaggatctcctgcagctatgacttgcctaactttcttataaaccacaattagcatgcaggtagtgccagggtttgtggtggtgtctgactgagt

SEQ ID NO: 286843 - DNA, 578 bp, Homo sapiens
ctttgtttgtgaatggcacacaccctggggtggggattcctttgcggttgccatgacggcctgtcacacaaagttacatgtcctgctctctcctccctgccgccccagctgtcttaaaatggcctggattttaacttctgcattcagaatggaggaactttgcttcttagggtttctaacgcaaatgacctaattttaaagtccatttccctccgccggccgagcaaatctacatgaagggtaccctgagaatattttatttttgtattcagtgccttttcaaattttctgttttatgtaaagctgtgtttggggcattaacaatgcataacgataaccacttaacaaacactgcgaagggaatctgaagtakgtggcctctagggtgggggaagaaagaatagaaagataattctctgagaccgaagaaatatttccctaactatgatttcacagtaaaagtttcctaataaaaaaatgttgtaaaggagggtcttttaaaaagtggtctgtggtctgacccctcttcaaatttacttttatgactaatgttgggtgaccaagcaattattatacta

SEQ ID NO: 286844 - DNA, 477 bp, Homo sapiens
catctaaatgtttctgtgaaaaattctttatagatatgattcacatttcaatcagtagacttagaatgaagaagattgccatccataatgtgggaagagtcagccaaacatttgaaggccttaagagaaaagaatgaggtcctccaaaaaagcaggaatactgcttccacctgcctttggtttcagaagtgcactgtaccatgaatacctgccagaatttccagcctgttggtctaccctgtggatttcggacttgccagccaccatcaaataamtctattccttaaaatatacatatgcacacacacacatatatatatatatatatatatatatatatatacacacacacacacacatatatacatatatacatatatatacacacatatatacatatatacatatatgtacatatatatatacccacacattttgtcttaattctctaagaaccctgaataatacaggctttat

SEQ ID NO: 286845 - DNA, 563 bp, Homo sapiens
caaattaatattaaataatgagttctagacctatcccaacttaattccctttctccacatgccttatttatacttaactctttgttgagcatcaggtaaacagtggtgcataaaagtgagcaaagcattttctccatcattaaagatggctcgatctcacggaagagagaaccaagttttaaaagaatgacagtatgtttctataatagtaatgagaaaaatgcatatagtgttttgagagcaaatgtgagagacagcagaacgtgcagcaaactgttgctgtgcctccagtctcgcttctctcttcctggagggtacacccctctctgcttgcagagatactcctgcatccccgggaggttcacgtccacctcyccctttcctgcctaaagaggtgagcatgtgacccaagaaaggccaatcacaagacccccatcctcctggttgcagtgactggtccaggatgagcacatgacctaaggtgggccaattacaaggccccatcttcctggccactgttattggtgcagaatgagcacatgacctaaggtgggccaatcaca

SEQ ID NO: 286846 - DNA, 1113 bp, Homo sapiens
tctgagcttgaagatgggttctttggaaataatccagtcagagaaaaaaaaagaaataagaataagaatgaagatactgggacttatgaaataccatcaagcaaacaaatattcgygttccaggagttagaaatggagaaaggctcaaaaaacttatttaacataataatagctgaaaacttcccaagtcttgggagagacatgaacatcccgattcaggaagcctaaaagttcacaataaaattcaacccaagtaaatcctctccaaggcacatcataatcaaactgtcaaaagtcaaagaattctaaaagctgcaatagaaaaccatcaagtcacacataagagaatcaccattagatgattagcatatatctcagaagattatttccaaagactatgacttcactcataagtgggagttgaacagtaagaacacagggacacagggagggaaacatcacacaccggggcctgttgggggatgaggggctagggaaaggatagcattaggagaaatacctaatgtagatgacggattgatgggtgcagcaaacgwtctgagcttgaagatgggttctttggaaataatccagtcagagaaaaaaaaagaaataagaataagaatgaagatactgggacttatgaaataccatcaagcaaacaaatattcgtgttccaggagttagaaatggagaaaggctcaaaaaacttatttaacawaataatagctgaaaacttcccaagtcttgggagagacatgaacatcccgattcaggaagcctaaaagttcacaataaaattcaacccaagtaaatcctctccaaggcacatcataatcaaactgtcaaaagtcaaagaattctaaaagctgcaatagaaaaccatcaagtcacacataagagaatcaccattagatgattagcatatatctcagaagattatttccaaagactatgacttcactcataagtgggagttgaacagtaagaacacagggacacagggagggaaacatcacacaccggggcctgttgggggatgaggggctagggaaaggatagcattaggagaaatacctaatgtagatgacggattgatgggtgcagcaaacg

SEQ ID NO: 286847 - DNA, 567 bp, Homo sapiens
gtgtgtgtgagccaatcaaaatttttctgcttgacaataaaaaataatcctgcttctccaaatcagcccctagagaaggtaagagagtggagtactcagctccctttggactgacctggagaaaccccagcctagctcaccctcctgctcatggtgtgagttccaccagcgttgggaagtgaactgttagggaatgggtctttggatccttggtttcttaggcaagataagtcctgtgagaagaatgcagttttcccaaaagggaatagaggatctcatagtggaacactmagtccagagtatgaacactgcagacaaataagtgagcctaagaaatggtgactgacggaaagtgttgtctgacccacattcaccctccaccgaccccaggaagagaaagcagaatgttcctgggctggactatacagttgttttgggcaaaaaccaggtacaactggaagtaaagtaagagatgacccatggaggaatccagagtggctagaggaacatgggacaagaagacgtgaaagctgagcagatgatttaagatcatacataaaacaaaca

SEQ ID NO: 286848 - DNA, 567 bp, Homo sapiens
gtgtgtgtgagccaatcaaaatttttctgcttgacaataaaaaataatcctgcttctccaaatcagcccctagagaaggtaagagagtggagtactcagctccctttggactgacctggagaaaccccagcctagctcaccctcctgctcatggtgtgagttccaccagcgttgggaagtgaactgttagggaatgggtctttggatccttggtttcttaggcaagataagtcctgtgagaagaatgcagttttcccaaaagggaatagaggatctcatagtggaacactcagtccagagtatgaacactgcagacaaataagtgagcctaagaaatggtgactgacggaaagtgtkgtctgacccacattcaccctccaccgaccccaggaagagaaagcagaatgttcctgggctggactatacagttgttttgggcaaaaaccaggtacaactggaagtaaagtaagagatgacccatggaggaatccagagtggctagaggaacatgggacaagaagacgtgaaagctgagcagatgatttaagatcatacataaaacaaaca

SEQ ID NO: 286849 - DNA, 582 bp, Homo sapiens
tattttagctgcccaagaaatacttttgactacatttataagtatgattaagtactgagatttagtattccaagataatccacagtagcccttcctccaaaaaagcaaagaatatgtttcctgaagactaatcrcaaatctcatatatgttaaaacttatcatgttaaatcaatttactattccatcaaaaactgtaagaactagattgccaatggaaacaggaactcaatatccctcaagaggaaatttaattcaattagtatttgttgagaaatacataagattttttttaatcgtggttcatacaagtgaaagggaaaattacatatcgacatatattagtttttattatagtcaacatcatctattacatggtctgtttttattatagtcaaggtcgtttattatagtcaatggtcactcactcagaggaaccactgagtataataatcattgagttatccatggtcattcataatccccaaacactcttgtccttaaaatcttgcttgtgtggcctcagcctcagcatcagactttgctttaataccggtctcctattttattctaagcccactgca

SEQ ID NO: 286850 - DNA, 582 bp, Homo sapiens
tattttagctgcccaagaaatacttttgactacatttataagtatgattaagtactgagatttagtattccaagataatccacagtagcccttcctccaaaaaagcaaagaatatgtttcctgaagactaatcacaaatctcatatatgttaaaacttatcatgttaaatcaatttactattccatcaaaaactgtaagaactagattgccaatggaaacaggaactcaatatccctcaagaggaaatttaattcaattagtatttgttgagaaatacataagattttttttaatcgtggttcatacaagtgaaagggaaaattacatatckacatatattagtttttattatagtcaacatcatctattacatggtctgtttttattatagtcaaggtcgtttattatagtcaatggtcactcactcagaggaaccactgagtataataatcattgagttatccatggtcattcataatccccaaacactcttgtccttaaaatcttgcttgtgtggcctcagcctcagcatcagactttgctttaataccggtctcctattttattctaagcccactgca

SEQ ID NO: 286851 - DNA, 505 bp, Homo sapiens
gagggtctgtaggtggtgggcagggtcaggggctgtagagaccgtggtcataaattcagatggagtgtcccctctccccacatgtcatggctgggattttggagcagggatcacttctgtgctgataactttttgcctttccccttaggaggcagygtgtgctccccagagcattacaaacctgagttcaaatttgggctccaccccttcttacaccggagaacctggacaagattcctaacctctctaagcctttagattatgcatttgaaaatggggagagtaattaactaccttgcaagggtagcctcagaaatgaaggcttatttctgtggtagatttgcatataaacaggcactcaaaattagtagctactatttttattggaagagaggctgaaatgctatcaggaggggagagaaaaggctgcaccagccaaactgggtcgtgtgtgtttgatgggatttcaacagcgtggatgaattgtaagtccccctccccacca

SEQ ID NO: 286852 - DNA, 571 bp, Homo sapiens
taaatgcacaatattagggaaatagagaaagaggtaatccatgttgtcacggggcagcctttaaagcgtttcccccaactttttattatacagattttcaggcatgcagaatagttgaaagattgttataatgactaccacttcaattcaaccagtatagatatgtagatrgatagagagatagatatagatactgccccagaagcaaaagtttttctctgatcttctcttgccctcctgtctcagtctcattctcccacaaggcaagccataggaactaggaactagaattccccttctccaaggcagccgtataaaccagaacccccttttcccaaagtcagccatgaaacctaaaatcattactctaattttctcttcatctttctgtgtaaaaactgaccataaagaaatgatctgttctacgttgttccagagagggtcctgccccacatccagaaggaaggtgtgaaaagaaaatatcttgggccccttcaagctgggaaccgctcagggcctcccattctattcagagtcatccctctgctcacagagataacaaagatagatg

SEQ ID NO: 286853 - DNA, 571 bp, Homo sapiens
taaatgcacaatattagggaaatagagaaagaggtaatccatgttgtcacggggcagcctttaaagcgtttcccccaactttttattatacagattttcaggcatgcagaatagttgaaagattgttataatgactaccacttcaattcaaccagtatagatatgtagatagatagagagatagatatagatactgccccagaagcaaaagtttttctctgatcttctcttgccctcctgtctcagtctcattstcccacaaggcaagccataggaactaggaactagaattccccttctccaaggcagccgtataaaccagaacccccttttcccaaagtcagccatgaaacctaaaatcattactctaattttctcttcatctttctgtgtaaaaactgaccataaagaaatgatctgttctacgttgttccagagagggtcctgccccacatccagaaggaaggtgtgaaaagaaaatatcttgggccccttcaagctgggaaccgctcagggcctcccattctattcagagtcatccctctgctcacagagataacaaagatagatg

SEQ ID NO: 286854 - DNA, 610 bp, Homo sapiens
gagaaaaagaacatatattcaagggaactacagcaagattaaagtttatttcacatcagaaacaatgataccaaaggtagtgagattacatatttaaagtaaaatcaaagaaaataaataataactattagtgtgtagatacataaaataaagagaaaaacaaagaaaatccaggtaaataagttagttttttgtagagattaataaaattgttaaactgtaagatatattgaccacggggaaaaaagatgacacagataattaaaatctggatttaaagagggcatataatcactgccctgcaaaaattaataagactgtaaggaaatgcaagaaacaaagtaggcaacttagatgcaatacataaatttctagaaatacccaaattattgaagtaagctagctatgtttcaaggaaaagtagaaaatgtgaataaatctataataagaaaaaaattgaattagtaattaaaattttctcacatagaaacactcaggcacagrcagcttcactggagaattctatgaaatatttaaaggataaataatgtcaatattccatgaactctttgaggaaacagtgaaagaagtaacacttgccaacttattc

SEQ ID NO: 286855 - DNA, 524 bp, Homo sapiens
ctatgtttcaaggaaaagtagaaaatgtgaataaatctataataagaaaaaaattgaattagtaattaaaattttctcacatagaaacactcaggcacaggcagcttcactggagaattctatgaaatatttaaaggataaataatgtcaatattccatgaactctttgaggaaacagtgaaagaagtaayacttgccaacttattctatgaggccagtattttcctgatcccaaagccagactgaagacatcataagaaaagaaaaccatagaccaatactccctctagtttctagatatgaaaaccttcaatacaatattagcaaatcaaatccagcaatatataaaaaagatcagtggccaggcatggtggctcatgcctacaatctcggcactatgggaagctgaggtaggcagattgcttgagctcaggagtttaacacaagcctgggcaacatggtgaaactccgtctctaaaaaaaaaaacacaaacattattagcagggcatggtggtgcacacct

SEQ ID NO: 286856 - DNA, 524 bp, Homo sapiens
ctatgtttcaaggaaaagtagaaaatgtgaataaatctataataagaaaaaaattgaattagtaattaaaattttctcacatagaaacactcaggcacaggcagcttcactggagaattctatgaaatatttaaaggataaataatgtcaatattccatgaactctttgaggaaacagtgaaagaagtaacacttgccaacttattctatgaggccagtattttcctgatcccaaagccagactgaagacatcataagaaaagaaaaccatagaccaatactccctctagtttctagatatgaaaaccttcaatacaatattagcaaatcaaatccagcaatatataaaaaagatcagtggccargcatggtggctcatgcctacaatctcggcactatgggaagctgaggtaggcagattgcttgagctcaggagtttaacacaagcctgggcaacatggtgaaactccgtctctaaaaaaaaaaacacaaacattattagcagggcatggtggtgcacacct

SEQ ID NO: 286857 - DNA, 594 bp, Homo sapiens
ttaataagcacttcgcatattgcaagcattgactgtgggccaatactgagatgtaaatactatcaccctcgttacacagataaggacacgcaggctgagattcaagaacttacccaaagtcacaaagccagtaagtgtccaaactgacattcacacccatgatgccaaagcctgtgtctttttctttataatgtgctacttctatttgttcagcacaggaggacttgaggctgttcagaaggcaaggatggtgcttccygtcccgatgctactgccctatgtctgtacttacatttgctgtcagctgggtggtcaaagctgaaactttctcctgggaggcatccagttcccgccgcagcttgcgaatctaaagatgacaagggagagggttacatgctttgggggtccatttccaaggtgagcagggtcaaataattgacaatacttaaagaggaaatccaaccagaaagctgttccttacctctgactggcatttttcttctggctgtaaagaaaacataaaggaaattagaccagttaaggaacaaagaatagtgtagtccagcccatcgggaacaccatattcagatggtt

SEQ ID NO: 286858 - DNA, 594 bp, Homo sapiens
ttaataagcacttcgcatattgcaagcattgactgtgggccaatactgagatgtaaatactatcaccctcgttacacagataaggacacgcaggctgagattcaagaacttacccaaagtcacaaagccagtaagtgtccaaactgacattcacacccatgatgccaaagcctgtgtctttttctttataatgtgctacttctatttgttcagcacaggaggacttgaggctgttcagaaggcaaggatggtgcttcctgtcccgatgctactgccctatgtctgtacttacrtttgctgtcagctgggtggtcaaagctgaaactttctcctgggaggcatccagttcccgccgcagcttgcgaatctaaagatgacaagggagagggttacatgctttgggggtccatttccaaggtgagcagggtcaaataattgacaatacttaaagaggaaatccaaccagaaagctgttccttacctctgactggcatttttcttctggctgtaaagaaaacataaaggaaattagaccagttaaggaacaaagaatagtgtagtccagcccatcgggaacaccatattcagatggtt

SEQ ID NO: 286859 - DNA, 594 bp, Homo sapiens
ttaataagcacttcgcatattgcaagcattgactgtgggccaatactgagatgtaaatactatcaccctcgttacacagataaggacacgcaggctgagattcaagaacttacccaaagtcacaaagccagtaagtgtccaaactgacattcacacccatgatgccaaagcctgtgtctttttctttataatgtgctacttctatttgttcagcacaggaggacttgaggctgttcagaaggcaaggatggtgcttcctgtcccgatgctactgccctatgtctgtacttacatttgctgtcagctgggtggtcaaagctgaaactttctcctgggaggcatccagttcccgccgcagcttgcgaatctaaagatgacaagggagagggttacatgctttgggggtccatttccaaggtgagcagggtcaaataattgacaatasttaaagaggaaatccaaccagaaagctgttccttacctctgactggcatttttcttctggctgtaaagaaaacataaaggaaattagaccagttaaggaacaaagaatagtgtagtccagcccatcgggaacaccatattcagatggtt

SEQ ID NO: 286860 - DNA, 559 bp, Homo sapiens
attatcttagtaaatagaaattatattcatccaagcatacatttgctgcccattttatcttatttttttagcttgcagcacattcactttatgggcaagtacccttggcactctcagtttattctcttgaataaacaggctttcagtgacttcatagttcttttggaaagagatctcagaactaagttccttcattctatttttaaataagtcatgagcaatgccaattatatgactaaagatgayccaaaagtaactggaattgttcataatttattttttttggagataagagtcttaaaaaatcttaactaaaacttctctcgattatgctatcgttaataaagattattattgtttcttagagttgagaagggtttctaattacacagaaataatgaaaatataaagattgaaaaagatgataatggaagaaaccttaacggctggattagcgaaatacacacagtaacttttcattcaaattacatacatttttaaaaaggaacaacttctaatgtcctttttttggagctttctctacaattatgctaacaag

SEQ ID NO: 286861 - DNA, 393 bp, Homo sapiens
gtgtcctgggctcttggagttcttatgacactcccagcaaggaaggagggctcagcttggcaggctgctcaaataccaggttgcatagttacattctcacaccatgagactctccttgagagaggcctcccaattcaagctgaaactgggacgcctctgagtgccaaggccctggatgcagcctggaaagtctgtacagtgactctgaatccttcactgaaacagcaatctcagtactyaaaacattcagaatttgaagggtaatgaaaaacttataacaagaagaaaagaaaaatctctcctttctgcttggtttcctggctcaaaggtggagggcgattttcattttgttcaagtttcaggctgactctttaccacacagcatttgttttt

SEQ ID NO: 286862 - DNA, 787 bp, Homo sapiens
gtgtcctgggctcttggagttcttatgacactcccagcaaggaaggagggctcagcttggcaggctgctcaaataccaggttgcatagttacattctcacaccatgagactctccttgagagaggcctcccaattcaagctgaaactgggacgcctctgagtgccaaggccctggatgcagcctggaaagtctgtacagtgactctgaatccttcactgaaacagcaatctcagtacttaaaacattcagaatttgaagggtaatgaaaaacttataacaagaagaaaaraaaaatctctcctttctgcttggtttcctggctcaaaggtggagggcgattttcattttgttcaagtttcaggctgactctttaccacacagcatttgtttttwgtgtcctgggctcttggagttcttatgacactcccagcaaggaaggagggctcagcttggcaggctgctcaaataccaggttgcatagttacattctcacaccatgagactctccttgagagaggcctcccaattcaagctgaaactgggacgcctctgagtgccaaggccctggatgcagcctggaaagtctgtacagtgactctgaatccttcactgaaacagcaatctcagtacttaaaacattcagaatttgaagggtaatgaaaaacttataacaagaagaaaagaaaaatctctcctttctgcttggtttcctggcwcaaaggtggagggcgattttcattttgttcaagtttcaggctgactctttaccacacagcatttgttttt

SEQ ID NO: 286863 - DNA, 478 bp, Homo sapiens
cctcccatcacccccagatgggaccatctagcggccagaaaacaagctcagggctcccactgattctacattatggggagttgtataattattgtattatatattacaatgtaataatagaaatgaaatgcacaatacatataatgtacttgaatcatcctgaaaccatccttcaccccccgtccatggaaaaattgtcttccacaaaaccagtccctrgtgccaaaaaggttggagaccactgttgtaggagacgttttcactcagaggcaataaactgcaacaagtaaaacatttctaaaatgcttctttcccttacttaagtataaatgaataaaaataatggcacttaacgcaccatagtgttctgggtataatgctaatgcttttatttccttttcttctaacctttacctcagccctgcgtgaaaggatcaatatctgcatgtgacagaatgggaaactgaggctaagtaac

SEQ ID NO: 286864 - DNA, 478 bp, Homo sapiens
cctcccatcacccccagatgggaccatctagcggccagaaaacaagctcagggctcccactgattctacattatggggagttgtataattattgtattatatattacaatgtaataatagaaatgaaatgcacaatacatataatgtacttgaatcatcctgaaaccatccttcaccccccgtccatggaaaaattgtcttccacaaaaccagtccctggtgccaaaaaggttggagaccactgttgtaggagacgttttcactcagaggcaataaactgcaacaagtaaaacatttctaaaatgcttctttcccttacttaagtataaatgaataaaaataatggcacttaacgcaccatagtgttctgggtataatgctaatgcttttatttccttttcttctaacctttacctcagccctgmgtgaaaggatcaatatctgcatgtgacagaatgggaaactgaggctaagtaac

SEQ ID NO: 286865 - DNA, 593 bp, Homo sapiens
ggtctaaataaaccaatttaaagaagaaaaaaagaatacagagaaggaataaaatctgttttcaggtgcttttggcattgtcacccacaggaagcaccaggcagctggttattcacagttactgctaaacaaacctgatgattgatgtggaccagtgttcagtaggggactaaaaggagctgctttcatcagtaacattcctctttccctagaatttcagaatgcatggatagtgaagctgagaccgtcatgcagctccgaaatgagttaagagacaaggagatgaagctgacrgatatccgcttagaagctctcagttctgcccaccagctggaccagctccgggaggccatgaacaggatgcaggtgagagcccaggagcatgggctgagctcaaggctgtctatgaaggagctcccagaggctgctctccactaagccctgagggctgcatcagaatctggtggcggccctcgctttcccagcctttatctcttttcagtccctcccacacattgctcaaagacccagtcttttggaagaataagagtacccatgctcttcctttacgtaatacttttggtgactcccct

SEQ ID NO: 286866 - DNA, 593 bp, Homo sapiens
ggtctaaataaaccaatttaaagaagaaaaaaagaatacagagaaggaataaaatctgttttcaggtgcttttggcattgtcacccacaggaagcaccaggcagctggttattcacagttactgctaaacaaacctgatgattgatgtggaccagtgttcagtaggggactaaaaggagctgctttcatcagtaacattcctctttccctagaatttcagaatgcatggatagtgaagctgagaccgtcatgcagctccgaaatgagttaagagacaaggagatgaagctgacggatatccgcttagaagctctcagttctgcccaccagctggaccagctccgggaggccatgaacaggatgcaggtgagagcccaggagcatgggctgagctcaaggctgtctatgaaggagctcccagaggctgctctccactaagccctgagggctgcatcagaatctggtggcggccctcgctttcccagcctytatctcttttcagtccctcccacacattgctcaaagacccagtcttttggaagaataagagtacccatgctcttcctttacgtaatacttttggtgactcccct

SEQ ID NO: 286867 - DNA, 626 bp, Homo sapiens
cagtgcagctgcaaaaataaacatttgaactctctctgtgcccctacagcacccttaataaaatatagatcctcaaagcccatcatgttcttttaaatctcctttaattttctgtttaaaagaccatggctaggtgtatttggtcatgtctgtaatattccagcactttgggaggccrgggtgagaggattgcttgaggccaggaattcaaaacccacctgggcaacaaagcaagaccctgcctctacaaaaaattttaaaagttagccaggcataggccaggtgcagtggctcatgcctgtattcccagccctttcggaggccaaggcaggtggatcacctgaggtcaggagttcaagaccagcctggacaacatggcgaaaccctctctctactaaaaatacaaaaattagctgtgtgtggtggtgcacacctgtagtcacagctacttgggaggctgaggcaggagactcacttgaacccgggaggcagagattgcagtttgccaagatcacaccactgcactccagcctgggtgacacagcaagacttcatctcaaaaataaataaataaatataaatataaatataaatataaatataaattagaggcatgatggcacatg

SEQ ID NO: 286868 - DNA, 626 bp, Homo sapiens
cagtgcagctgcaaaaataaacatttgaactctctctgtgcccctacagcacccttaataaaatatagatcctcaaagcccatcatgttcttttaaatctcctttaattttctgtttaaaagaccatggctaggtgtatttggtcatgtctgtaatattccagcactttgggaggccagggtgagaggattgcttgaggccaggaattcaaaacccacctgggcaacaaagcaagaccctgcctctacaaaaaattttaaaagttagccaggcataggccaggtgcagtggctcatgcctgtattcccagccctttcggaggccaaggcaggtggatcacctgaggtcaggagttcaagaccagcctggacaacatggcgaaaccctctctctactaaaaatacaaaaattagctgtgtgtggtggtgcacacctgtagtcrcagctacttgggaggctgaggcaggagactcacttgaacccgggaggcagagattgcagtttgccaagatcacaccactgcactccagcctgggtgacacagcaagacttcatctcaaaaataaataaataaatataaatataaatataaatataaatataaattagaggcatgatggcacatg

SEQ ID NO: 286869 - DNA, 604 bp, Homo sapiens
atgggacactgtgccgcgggaccgcgggcgcaagtaacggtctttccttgggaagcctggcagtgtcggcgggagccggcctcggtgtctctcagccgacgcatagccggagaccctacgcgcgccccctccccgcccacgctgctcacctccggtcaccggcaaatgagcagccagcagctgcggacgcctccgggagcgcaacgctttcgcggcgcgtccggagtcccgtgggcccagccctgagccgcgccggcgctggggtcttctctgcgtgcaggacccggcsgccacggagcttcagcctgacagcccggtggcctcgcctccgctgtctcctcggaagaagcgggggaactgggaacccgccgggcgccagaggtctgcgaagctgggcttggatgaagtggatctgcggagttgatagttgtatttacacgcgtccggagctgcgccccgaggtgggggcgggggctcccttcttttcccctccccttaggtcgagtttcacgcgcacgtgactcgcccgctggtcccggacactctccctctggcacagccccagcacctacatttccaccctggacccccatcttctccccca

SEQ ID NO: 286870 - DNA, 500 bp, Homo sapiens
tttgctctgttgcccaggctggaatgcagtagtgcagtagtctcggctcactgcaacctctacctcccgggttgatgcaattcccctgcctcagcctccccagtasctgggattacaggtgcccgccaccacgcccagctaatttttgtatttttagtagagacgggatttcaacatgttggccaggctggtctcgaactcctaacttcaagtaatccacccaccttggtctcccaaagtgctgggattatacgcgtgagctaccacgcctagccaggttatttcatttctacaaataagatacaaatacattctcagagtaataaatccaaccaatactgatatatacaaagtaatgacatgggaagtccccttcattcccccaggcctgcaccctttgcagggaattaacatctgggacggtttaatgagtttctttccagttcttattctatgcatttatatttatgcagcataaaattccaagactttgaggccct

SEQ ID NO: 286871 - DNA, 614 bp, Homo sapiens
tgggtagataggcatgagtggggcaggctctccccctacccactaggaatgtcggttggtggtttagcaattatcacattgtctctctgaaggaaatcatgtatacagaggtccatttccaagataaagtgccttgaattggcttaggtcagcaaactacataagagacaggatgtactaggcccctgcttgccctgcttgaatagccaatgcttgcttgtcagcctcccctgcttccctgccttcccccgctcctagttgccctcacccraaacaaggaagtttagtctaagatgaaagttgactaccttacaaaatagcttgttttgtttgttcttatcagcctgcccagctacttaggtcatcagtcaaatacttgaagaacccctgagctgactaggattgcaatgcattgtgggctgcaacaaaacacaacaagacaaccctaaaaaaaaaaaaatcacctgaagctcctactcagcaatcaatggcaatgtccgggaagactgtgaccccacagtactcagcctatgaggaacctgaggagggacctgtgtactagggaataaattgcttgttgaaactgtgctgggtgtgcctgcctatcagacacc

SEQ ID NO: 286872 - DNA, 1230 bp, Homo sapiens
tgggtagataggcatgagtggggcaggctctccccctacccactaggaatgtcggttggtggtttagcaattatcacattgtctctctgaaggaaatcatgtatacagaggtccatttccaagataaagtgccttgaattggcttaggtcagcaaactacataagagacaggatgtactaggcccctgcttgccctgcttgaatagccaatgcttgcttgtcagcctcccctgcttccctgccttcccccgctcctagttgccctcacccgaaacaaggaagtttagtctaagatgaaagttgactaccttacaaaatagcttgttttgtttgttcttatcagcctgcccagctacttaggtcatcagtcaaatacttgaagaacccctgagctgactaggattgcaatgcattgtgggctgcaacaaaacacaacaagacaaccctaaaaaaaaaaaaatcacctgaagctcctactcagcaatcaatggcaatgtccgggaagactgtgaccccacagtacycagcctatgaggaacctgaggagggacctgtgtactagggaataaattgcttgttgaaactgtgctgggtgtgcctgcctatcagacaccwaccccaataaacaataattggaaggtaaatcagagtctgaaaaatggtaacatattcatacatcctcaaataaaacagaattgacttttttctattccctactatataaagattttgatgaaaatttatctaagctacttaattctaaaggactcaacaaattttggtttgctggccctgttctatttactattgtggaggtccaggtaagctctgtgtcatcgggtcatgtctgggcaaaawgacccaaggaaagttgaggtgatgggtccaacatcttagtcaaggatggagtagaggcgggatttgaacctagaccttctaacttctagctctttcccaaagcaaactttttcaatatcattttaatacacttcttagtaaacaacatagattaataatttggggggatttatgtatttagatttacttaaaatcattggttcagtgttagtcttatccacctgtttaaatcattagttaattcattattaaactcttaattggaattgatccagtgctacaaatgagaaaaatatgaagaaaaggatttgcaaataagcagcagtccagatgtctgcagcatatgacatgtggcttgactgtgagtcatca

SEQ ID NO: 286873 - DNA, 570 bp, Homo sapiens
tggtctgtagcaactggctgataaactcaaaaatcttgtgtttatcatctgccagattttttgttgtgaggtttcaatttctttccctttacaagctgttcaaatgttctagctatagagaccagatggtttttctattcccttgatgtttcctttatgyggatgattgttcagagatgttctaaggctgtatcaggataggatagtttctatagttactctagttagcatcactgtgtgtatgcctttgccagcacgggcgaatattcaatccatcaaagtccggaaaccacttcaaataaatggccctgtgtgttttgaaatcgggtgaggaaagcccaggtttcaagtaaccattaataaataattacccttttgttaatgtatcctgccaattccctgataagaaagagctgatggatgatgtagctggttcatagcttcctgtttattagaatgtgttcgtcttgtactttctgcagatggaagctttcgggaccacatgagaagtgtactatgtccacaccacatttagtacttggtgggtaatcaaaattatataggggcaag

SEQ ID NO: 286874 - DNA, 589 bp, Homo sapiens
ctgttttaatcccccccttaattgcaatcctgtttgtttgcataaaagggcttttagatggtaatgataagactatcatatatactcctgtacgactacaccacttataaattgagggagatttggtatacaacgtgttacccatgatcttatccatggtggcagatgtrggggaggctggaggaacttctccagcattgtgtcaatgtggtaaaggaatgctagaattcaacctgcggaagtgatgtgagaagtcactgaagtctgatgcctcattggatgttcaacatcgtgacatgtttagatgccttataccattccatttgtccaataagccctgtttcatacgtgaaaacaggctcagagaaggtatgtaattcattcaagttcaaccagcgaaggaagcagagcagatattgcaactcatgcttttctaactccagggtccaaattattagccactatgctcaaacaaggaagcacattctcaggtcgccagcccattttcattttatggagcctaagcccacggctctccttccacgtgcctccctccaacttagtaaagtcttcagcttctctgataggt

SEQ ID NO: 286875 - DNA, 562 bp, Homo sapiens
gtttaactcccagtgctgttgtgaggaaaaagaaccccttaagaagacagagttccatgtttctgtgacaggtggtgagtgggagaatcctggtgrcatgcgacaggacgagaggaggacatgcgggaactttgggtgaagtgcagagtacatcgaaggaatgagggaaagattggaaaggaaatctgtccttaattaggtcatatggaacctttgttttcaagtaggacagtcatattcagagctgtttgaaaaagaaaaaaatctggaaataatgtgtaagtgcgctgagaggctggtgatacagaaaacagaaagagtatcagaaagcctttgtctatagggaaacaacatgtccctgagtatctaaggtggaaatggtagcgggaattaccaggaaggaaagatgtggagaacagggctaaattttccttggatttcatggaagcccacccttgtgataatgaccatggtggctcatatttgtaccacggtagagactgtcttctgaatagccttgctggctagggtgagtctatcctgagtagaggtttgagtcatc

SEQ ID NO: 286876 - DNA, 601 bp, Homo sapiens
taatgaataaatacacaaatgttaatatcacattaatgataattaagctctgctgtagtgatgcgtgtggtgatgaattctgctagtaatgtaatgaattcattctcaaagcacaatgttcctgacagcaattcacagctgagatctggatggttcagtgcagtatccctggagtcgagattggtgtttggcacaaagaaggtgctcagtgattgtttgttgaatgaatgaagaaataagaaaaaaagagaagggacaaagtctaacattgtaacctayaattttagaagaaaagagagcaggaacacaaaccagcttcagtatcaatatgcatttttactacttggacaatcaaacaactgctaacttcaagagcaggataagtgctgagaaccttagagaagcccacctggggagaccactgtgtacacactaatttcaatgctagaagaagaaccttggtaaccggtggagcgcctatcctagatgcaaaggattgcatctcaacagtttgctcgtaattcttccaaggtttgtcaaaactgcaaatagctttacacagaatgatattttggtaataatcactggaaaaatgagtatg

SEQ ID NO: 286877 - DNA, 601 bp, Homo sapiens
taatgaataaatacacaaatgttaatatcacattaatgataattaagctctgctgtagtgatgcgtgtggtgatgaattctgctagtaatgtaatgaattcattctcaaagcacaatgttcctgacagcaattcacagctgagatctggatggttcagtgcagtatccctggagtcgagattggtgtttggcacaaagaaggtgctcagtgattgtttgttgaatgaatgaagaaataagaaaaaaagagaagggacaaagtctaacattgtaacctacaattttagaagaaaagagagcaggaacacaaaccagcttcagtatcaatatgcatttttactacttggacaatcaaacaactgctaacttcaagagcaggataagtgctgagaaccttagagaagcccacctggggagaccactgtgtacacactaatttcaatgctagaagaagaaccttggtaaccggtggagcgcctatcctagatgcaaaggattgcatctcaacagtttgctcgtaattcttccaaggtttgtcaaaactgcaaatagctttacacrgaatgatattttggtaataatcactggaaaaatgagtatg

SEQ ID NO: 286878 - DNA, 563 bp, Homo sapiens
ttttcccatctccttctaggacaagaattgttgaagccggggtcaggatgggggatgctgaagtgctcatacactctaaaccagaggcttcctagagcctaaggggtagctgagaagacagccaggtaactaggactgccagtgctgacagtgggggaggaggtcccaggcaatgcactctgaaggctttcagcccatctgcatttttggagaggtccctaaatttttttttactgggtccaaacccaccaacttacccctgaatcctggttctcgcatttccattcttagtctcagtccttgcacccagcacctctgtcttcagtcctataaacagtgtcttctgctctcagttggggcaggtggatggattaactcactcactcctgggctgacaaakgctctttgaaaatctcccttcctctcagaagcattgcagctgaaacactgattcttaaatgcccaaagccttcaagtttcaaaggagaaaagtgtaatattgaaagatatttgctaaatttagatttgaaagaagggggctgggcttgggctacattgtttga

SEQ ID NO: 286879 - DNA, 277 bp, Homo sapiens
agccccaggctccagaagcagatgaacagatgaggagactaggagacaagcagacaaatggcagagcagagaaagagagaagagaaggaatgtctgaatgctgagaggagttcggctggccaaactccaagggaagatcaccttyccactccatcccccttccaactccccatccatctcactgacagccacctctaccactcaataaaaccccacattcatcctctgagtccatatgtgacctgattctcccagaagactggacaagagctcagga

SEQ ID NO: 286880 - DNA, 464 bp, Homo sapiens
gtataaaaagcaacaatctgacagatgttcacagagaattgtatacagaagaaatatcaggtgcaatgtaagtgatagcagccgctagaatttgactttattgccaaggaagagaggagagagcttaacttctgtgttgcctccgcttgatcattgtatttttcaaattaactttcccccaaagataattttttcctgccaaggcaggtcttatgaggagttggaataggttggtttcagcactcgatgtgtttttctgggatgcggggatagccttagtgccaataaaacaaactctctttattctaaagtgagtgattaaaatcatctcatcatttttaaggtctttggtgcttgttatattaaaatatccctaaaacagtgactttttaatgttttctccaacttktcaaacttaatataactgaggaagcttagtgatcaaatcattgttgtatgaaaga

SEQ ID NO: 286881 - DNA, 560 bp, Homo sapiens
tgggaagcacagctgtagcaagccataggtacaggtacatcaagccaaaggtaaagggaaatttttactggcaaggagaagctatgtaagctgcttggagacagagttcattggttctggaggctcaaagctagaattagcatcagttcattggtggagatgccactgctaggcatcggcctagcatcttatcagaattgctacagtcctaaagaatgtatagtgataaacctggtcatagaaataygtgcatgcatgtaaaatgtaaaatgcatgtaaaatgtagatcatgaaaagcatgagatgtataaaagatgaaggaatttctcgtggagttattttagaaagtccttgaaatagtccttatctcagatgtgcaagcatgagctgtgctcctttgtgtgttctggctccagtttgctcgggtctgacaaaagtgacttattttgctatctgcaactttagtcactccatttccacccactcctgtatggaaccaatctcattagtttctgggtttcctttcctaagtttctttttgtatagttgtgcagacaaat

SEQ ID NO: 286882 - DNA, 597 bp, Homo sapiens
atattaacttcatttatatgttactgaagaaatctttccagttaggaggaggttctaatagtcacatgttctaatactttgtttattgtaaaaccgctaaatttggagatatgtaaagccttgttttctccrtgtggttcagctactttccatttggaattactcaaatttacatttatctattaaaattgccttttattaaacattttcatgcacagtagattcaagttgtgtctgaaaatatctcttttgcttttttgattttgctgactttaaaaggattaatctgggcagacattatgaaaaggaaaggttgtgtttaatatatttttttaactttgtaggacaaaacatagctggttaaccttgaagtgactgttgtaccatggttgtgcacatgcttcagaatcctatggaagagaatgttcctacttgcagtacatcaaaggaatggatggtggaccctgctattcatgttttgaaacataaatgttcactttaaagcaattgccataacagataaaaacttgaactttcattggatttttgttaattttcctcattttgaattatgtgcactaccatagctatatcagc

SEQ ID NO: 286883 - DNA, 597 bp, Homo sapiens
atattaacttcatttatatgttactgaagaaatctttccagttaggaggaggttctaatagtcacatgttctaatactttgtttattgtaaaaccgctaaatttggagatatgtaaagccttgttttctccgtgtggttcagctactttccatttggaattactcaaatttacatttatctattaaaattgccttttattaaacattttcatgcacagtagattcaagttgtgtctgaaaatatctcttttgcttttttgattttgctgactttaaaaggattaatctgggcagacattatgaaaaggaaaggttgtgtttaatayatttttttaactttgtaggacaaaacatagctggttaaccttgaagtgactgttgtaccatggttgtgcacatgcttcagaatcctatggaagagaatgttcctacttgcagtacatcaaaggaatggatggtggaccctgctattcatgttttgaaacataaatgttcactttaaagcaattgccataacagataaaaacttgaactttcattggatttttgttaattttcctcattttgaattatgtgcactaccatagctatatcagc

SEQ ID NO: 286884 - DNA, 458 bp, Homo sapiens
actgataggtggaacagtattaccttagagggagggagtgactgttagatcttatccttggccttggttattcagtattcttattcatgacttggatgagaatatgaagctgggcaaaataatagatctggttccaaattgaactggataaggtagaataagaaaccaaatgaaataactaggctcaatctgcatacccaccttaagtatttgaggtactggaagtgctcgttgcatggagtcttgtttgaayaaggatacctttgacttttggtaagaatataaaggggatattgaagttgagaaaccctaggaaaccaagattaaaagtcattaacaaacaggggagacaaagaataccccaggctctggtagtggctctggaggaggcaggtgtgttccaggaagtaaggcaactcactgtgctgcagaaatagctccccttggaacctgaaaga

SEQ ID NO: 286885 - DNA, 450 bp, Homo sapiens
ccaaagggattagcaaactctcagtctttgttctgggtgtagcccaagtctctctttctttccctgactcctttcaggcagagctgatgactccatcttttgggaagacccaagaccttatatatctatatctatctctttctattatagaatttgtcacactgaatacagttatctgtctacttgtctttgttggagtaaatcatgagctcctcagtggcasggagagctttctgatttatcgccacgtatttagggcttagcacagggcttggcacttagtaggcacttgaaagaactcggtgaatgaatagatgaatgaatgagtgtattaacatagatagccgtgtggaggaaagaagtgaagaagcgggaaggcttgtttagctggatggaaggttttgtcggtgaactgagggaatgtgtgtgacggtgcaagggtagacttac

SEQ ID NO: 286886 - DNA, 567 bp, Homo sapiens
agttctcccatgatcctccggtcagtaggggcctggccagggcacagacacccatgcaaaggtggcttctcacctcttggccctggcatggaccccactgctgccccagaatggtggtggctttcactggacacaccacttggtcacctcacaccaaggccaactcagacctccaagaattgtttgccttctcttcttaaggctctgtattagtttcctagggctgccatcacaaattgtcacaaagtgggtgcttmaatcaacagaaatgtcttatcccatggttctggtggctggaagtccaacattaaggtgttttcagggccacactccctccggaggctctagaggagaatccgcgcctggctgctcccaggttctggtgcctctggcattccttggattgcatccagtctccacctgcatcttcccatggcctcttttccatctctcatagggacatttgccattggatttagcgttcatctaggtaatctagggtgatctcatctgaagatccttaattacatctgcaaagacctttttctaagatagggcatgttcaca

SEQ ID NO: 286887 - DNA, 550 bp, Homo sapiens
acacaccacttggtcacctcacaccaaggccaactcagacctccaagaattgtttgccttctcttcttaaggctctgtattagtttcctagggctgccatcacaaattgtcacaaagtgggtgcttaaatcaacagaaatgtcttatcccatggttctggtggctggaagtccaacattaaggtgttttcagggccacactccctccggaggctctagaggagaatccgcgcctggctgctcccaggttctggtgcctctggcattccttggattgcatccagtctccacctgcatcttcccatggcctcttttccatctctcatagggacatttgccattggatttagcgttcatstaggtaatctagggtgatctcatctgaagatccttaattacatctgcaaagacctttttctaagatagggcatgttcacagtctccaagggatgggacatggacatatctttgtgagagccacccctctgcctaccacagcctccaaatgtggattgtgaaggaatgagagagagagggaaaggggcagtgag

SEQ ID NO: 286888 - DNA, 585 bp, Homo sapiens
ggtgtctaatgtctagtggggtccagaaaagtgtttttttgtgtgtatgtttaagaatttaaaaaaaamctaattatctgaacactaaggggagaaaacttaacttctctatgttcagcaattggcacagtgtttggaacatactaagcacccaaagatttgctagaaaaaaaacattatgaagggaccaataacaagaggagctgaagatggcgagggggtactgataggaaaagaatcatgagtaaataataaacctcatatgagaaagatatacacgatatgtatctatttaagatgtaaaatgataaacgacaaaagtaagagcattaggcatggggaggcttttttgtattgtatactcctgcccatctgaaatttttagtaagaatagaattatctcaactttcagactaaaaggtatagtgtgaaagcttcagggagatttgtaacaacagtaaataaaatgaattgcgaggacaactgtctgggaagccatgacagaagtccaaaagagaagtaatggcaggcacattgcgggattggtggcagtgaaaatggaatgtgaatgacaaagatttttaa

SEQ ID NO: 286889 - DNA, 627 bp, Homo sapiens
gtcataacggaagttaatatgatcattgctaacatttgctgtgtttcaggcactgtaagcatgtatatgggtccttaaagggactcatagaggtaggtactagtattgtttttccttttatcattgagaaactgaggtttgaagagattagtgaacttgctctagattatacagtttgtaagtggctgaaccaggatttgaactaatacaatctgactacagaggccacactccttagcactagaaaagaatggcatgccaagggcagagttatttctaggaagatgggatataagcgtcattgtcaagttgtgcaaaggggtcaacttggttgagatctaaaaaggaacactgaattcgtcaattcagaggctcgtaggaagtaggaaatccttatcttttcgtttgaaccttgagtggaacctagatattctggattaatgtataartgaagttcatctttatatggtgacactcatactctagttgactacctaatagttcctctgccttctttcagttccgccaacatactgtgttctttaacattgtagaaccctttggctatgctagtctccttccctgaagtgttggtcctctagccctttttttgattggcaccagtta

SEQ ID NO: 286890 - DNA, 531 bp, Homo sapiens
tgccattccaagtgtcttatttttgttcaaatttatgtttttctttatttgtttattttgaaataggagcacctargctaaaatgtcaagaactcttaaattatatcatggatacagtgaaagattcatctaatggtgctatttacggagctgattgtagcaacatactactcaaagacattctttctgtgagaaaatactggtgtgaaatatctcagcaacagtggttaggtatgttttgaaggttgttgtttgtgaatttttcctcatgaaatgaaacttcaccaaagaaagcactctgtctgtatctgtctatatcccccaagtgacctgacagtttaacagtactttagtaaaattatatggttatcgaactgacccttaatttttatttattatgtagcttttgaataaagtcatgaataatatatcaggtgcctgatatcagagctggaattacagttgaaaaataccatctccatcgtcaaggagttgacagtggcagaagaaaacccaagtaaaccagagttc

SEQ ID NO: 286891 - DNA, 531 bp, Homo sapiens
tgccattccaagtgtcttatttttgttcaaatttatgtttttctttatttgtttattttgaaataggagcacctaggctaaaatgtcaagaactcttaaattatatcatggatacagtgaaagattcatctaatggtgctatttacggagctgattgtagcaacatactactcaaagacattctttctgtgagaaaatactggtgtgaaatatctcagcaacagtggttaggtatgttttgaargttgttgtttgtgaatttttcctcatgaaatgaaacttcaccaaagaaagcactctgtctgtatctgtctatatcccccaagtgacctgacagtttaacagtactttagtaaaattatatggttatcgaactgacccttaatttttatttattatgtagcttttgaataaagtcatgaataatatatcaggtgcctgatatcagagctggaattacagttgaaaaataccatctccatcgtcaaggagttgacagtggcagaagaaaacccaagtaaaccagagttc

SEQ ID NO: 286892 - DNA, 601 bp, Homo sapiens
gcaaccactgcagttgcgcaaagccctatactcaggagaccccgcacttggggtttaatgttctacagctgtttgctgtcttgaaagtcttaataattttatatttgaatttgtgttttgtaagctaagtctgataggacaaaggagcgtgtgtgtgagattagaccctgggcacatgtactatcctgcttcccatcacctcacctccctgagacaggttctaggcgccctgccctttcctttatgtccactaccaccttttgtccagggaggtagcctggttgcttcagggtcaacattctaccattactctctgcccatagagcaytgggcagataagttagaaagagcctcttaccctcctctaatccagatacaaaattcattccagtgtcttaattcttttaggatgcaatacttcacccactcataatgggttgagtggaaagcctttgggaagaggagactgaccagttcttcctttattcccgggtccctgtatttgcattttccaccagctctgcagattatgtagccagctttgactatgacagtcctttctgtgtacccataaggggattggttccaggagcccccacaa

SEQ ID NO: 286893 - DNA, 539 bp, Homo sapiens
atatgtaacaaacctgcacgttgtgcacatgtaccctaaaacttaaagtataataaaaacaaaacaaaacaaaacatgaatttattagattcaaatagaatcctgccacacatctaaatgtacccagtgcctggggataagagaaacagtcccaggtccctaaggtcactttatgaacaaaattaaaggagtgttttatggttgagtctaaggatagaatagatcatgatgcaggaattgttacctccatcttcataatagtaactatctgcataagcacgggttgcagggaactctggaaagtgtttctttctctttttctcttcctgtaactccttttcttgcaaaaggcgagctatgtcctgcaaagacaagaggagaatggaaatacacattaccaaagaacaaacaaactccatatggtggggcttgacattccactgccaagtttgtatgtgctctgtccatggctctctagactttctggcattaatttcatgtcttcaaatgccagatgaytgcttaacaggagtagcaca

SEQ ID NO: 286894 - DNA, 540 bp, Homo sapiens
aaaatttaaaatattgattctaaggcccgactgccaagatattctgatttatacaatttgagatggagtcttgatattgcaaaatttaaaaagcctcccaggttgattccacagcacagagttgagaaacactgaaataaacataaaaacataagtaattgtaaccacaagatattaggtaggtggtttttttatgaccctataaataattttatcccaggagattaaacattctttggttcacatactgtcggactccaatttrctaagcaattatttattaatttagccatcagagtttaaaacagagaatcactttaataaatgaagaaataatgtgaaaacagacatgtcaggttctcttatcaatgactttgaccagtgtatacaagataacagcatatcacttggttaagaacttttgaatctatttttgaccttgcagtggcctaagaacagttaaatgaacatttatttaacttaaacttttgctttgggagattaagtacagttcaactggaatagtgtttgttgcttatg

SEQ ID NO: 286895 - DNA, 646 bp, Homo sapiens
tatctagatgagatcaggtgcattcagggtggtatggctgtagaccctccgttgtatctgggaagtaactaacttgcttttgattttacaggctcgtaggtggaacagacttgtcttgtcttggatgagacttcagactgtggacttttgagttaatgctgaaatgagttaagactttggtggactgctgggaaggcatgattggttgagaaatgtgaggacatgagatttgggaggggcmggggtggaattgtattgtttggctgtgtccccacccaaatcttagcttgaattttagctcccataattcccacgtgtcatgggagggatctggtgggaggtaattgaatcattgggtgggggggggggtgggtctttcctgtgctattcatgtgatagtggataagtctgtcgagatctgatgcttttataaaggggagttcccctgcacacactcacttgcctgctgtcatgtaagatgtgactttgcggctgggcactgtggctcacacctgtaatctcagcactttgggaggccgaggcaggtggatcatttgaggtcagtagttcgagactagcctggccaatatggtgaatccctgtctctactaaaaatacaaaaatcaactgggtgcagtggtacaca

SEQ ID NO: 286896 - DNA, 674 bp, Homo sapiens
gtccaaaatgttaataataattgtctccaggtgtgggattatgggtgctttcttctttatatttttatatatttaaaatcctttctgcacttaacattacttttataattagtaaaagataatatgattgggctgggtacggtggcttacgctataatcctagcactttgggaggctgaggcgggtggattgcttgagtccagaagttcaagaccaacttgggcaatgtggcgaaacccggtctctacaaaaaatatgaaaattagctggttgtggtggtctgcacctgcagtcycagctacttggaggctgaggtaggaggatcgcttgagtctgggaggtcaaggctgcggtgagcgatgattgtgccactgaactccagtctgggcaacagagtgagaccctgtccaaaaaataattaatatgataaatatttcttgaacgtaaaatacattagtatggctttcagaactgaaaaaacaatgtagggatgtgattaaacatgatagaataagtacattaatttatctctttaaaaagaagggaggaataaacttaaaacaatttcagtcagtaccaatgaatttattaaagtaaacattttactcagtatagactatatgccaggaattcagtatgccagggtgcttggggaaacaagttggttactgaaa

SEQ ID NO: 286897 - DNA, 674 bp, Homo sapiens
gtccaaaatgttaataataattgtctccaggtgtgggattatgggtgctttcttctttatatttttatatatttaaaatcctttctgcacttaacattacttttataattagtaaaagataatatgattgggctgggtacggtggcttacgctataatcctagcactttgggaggctgaggcgggtggattgcttgagtccagaagttcaagaccaacttgggcaatgtggcgaaacccggtctctacaaaaaatatgaaaattagctggttgtggtggtctgcacctgcagtcccagctacttggaggctgaggtaggaggatcgcttgagtctgggaggtcaaggctgcrgtgagcgatgattgtgccactgaactccagtctgggcaacagagtgagaccctgtccaaaaaataattaatatgataaatatttcttgaacgtaaaatacattagtatggctttcagaactgaaaaaacaatgtagggatgtgattaaacatgatagaataagtacattaatttatctctttaaaaagaagggaggaataaacttaaaacaatttcagtcagtaccaatgaatttattaaagtaaacattttactcagtatagactatatgccaggaattcagtatgccagggtgcttggggaaacaagttggttactgaaa

SEQ ID NO: 286898 - DNA, 674 bp, Homo sapiens
gtccaaaatgttaataataattgtctccaggtgtgggattatgggtgctttcttctttatatttttatatatttaaaatcctttctgcacttaacattacttttataattagtaaaagataatatgattgggctgggtacggtggcttacgctataatcctagcactttgggaggctgaggcgggtggattgcttgagtccagaagttcaagaccaacttgggcaatgtggcgaaacccggtctctacaaaaaatatgaaaattagctggttgtggtggtctgcacctgcagtcccagctacttggaggctgaggtaggaggatcgcttgagtctgggaggtcaaggctgcggtgagcratgattgtgccactgaactccagtctgggcaacagagtgagaccctgtccaaaaaataattaatatgataaatatttcttgaacgtaaaatacattagtatggctttcagaactgaaaaaacaatgtagggatgtgattaaacatgatagaataagtacattaatttatctctttaaaaagaagggaggaataaacttaaaacaatttcagtcagtaccaatgaatttattaaagtaaacattttactcagtatagactatatgccaggaattcagtatgccagggtgcttggggaaacaagttggttactgaaa

SEQ ID NO: 286899 - DNA, 674 bp, Homo sapiens
gtccaaaatgttaataataattgtctccaggtgtgggattatgggtgctttcttctttatatttttatatatttaaaatcctttctgcacttaacattacttttataattagtaaaagataatatgattgggctgggtacggtggcttacgctataatcctagcactttgggaggctgaggcgggtggattgcttgagtccagaagttcaagaccaacttgggcaatgtggcgaaacccggtctctacaaaaaatatgaaaattagctggttgtggtggtctgcacctgcagtcccagctacttggaggctgaggtaggaggatcgcttgagtctgggaggtcaaggctgcggtgagcgatgattgtgccactgaactccagtctgggcaacagagtgagaccctgtccaaaaaataattaatatgataaatatttcttgaacgtaaaatacattagtatggctttcagaactgaaaaaacaatgtagggaygtgattaaacatgatagaataagtacattaatttatctctttaaaaagaagggaggaataaacttaaaacaatttcagtcagtaccaatgaatttattaaagtaaacattttactcagtatagactatatgccaggaattcagtatgccagggtgcttggggaaacaagttggttactgaaa

SEQ ID NO: 286900 - DNA, 575 bp, Homo sapiens
tgctattggtatttgaagcttgccacagatattaatccagtgtgatatggattagatcaactttacattatccaatgccttgcccatgctttcatgccctaatagcaatacagctaacatccctaaaaatgactgccagaataatagcaagagctcatggccccattagcaatagttggcactagtttccagtttccaatatgatctgttgcaaaattagccaaaaatgatgtccaaagatttgccgaagttgaatttctttttgaaatgcagaggacaacttcattaagattctactagtacactgtagcattgtacactgtaccagcactaaacagaaccaaatctccatcccagtcacttcaactagatagtatctaaaatctcacccttagtataatgtacttaaatgagatggaaatactccacattctgccctgcctaagttctagaaatttttattaggttaagggttctatatttataacttaatgacacatccatacatattaggaccttcaactcttgaaaaaggaatttgartatgtatgtattttaatacaaatttagcaaat

SEQ ID NO: 286901 - DNA, 527 bp, Homo sapiens
gaagattttttgtggggaaagaggtaggattagtcaatgctataaaatcctgttgatgattstactttgcagtcattgacagtatgggataattgttaaaaacatgaactttggcatcacagagatagagtttgaatttcagttgtgctatttattagatgtgatcttggataagaacttaacctttctgggcctgagtttgctaatgcgtgatgtttcctgtcaagtgcttagctcagtgcctgacgtggtgaataattaataaatggtgatcagtaaaatttacctgtatttttactaggaagtgtttggatgtaccagttagtacaatcattcttctataataaataattatctttcatctgaatagtttcgtctagcataattcttgtgtcagacttcattataggataaatatgggataaatactgggtcaaaggaaaatttcaatttagagaaaagattttgatgagagagatgctattacgttttccaggtcaggagtagaaattatgggggctggtgtg

SEQ ID NO: 286902 - DNA, 527 bp, Homo sapiens
gaagattttttgtggggaaagaggtaggattagtcaatgctataaaatcctgttgatgattctactttgcagtcattgacagtatgggataattgttaaaaacatgaactttggcatcacagagatagagtttgaatttcagttgtgctatttattagatgtgatcttggataagaacttaacctttctgggcctgagtttgctaatgcgtgatgtttcctgtcaagtgcttagctcagtgcctgacgtggtgaataattaataaatggtgatcagtaaaatttacctgtatttttactaggaagtgtttggatgtaccagttagtacaatcattcttctataataaataattatctttcatctgaatagtttcgtctagcataattcttgtgtcagacttcrttataggataaatatgggataaatactgggtcaaaggaaaatttcaatttagagaaaagattttgatgagagagatgctattacgttttccaggtcaggagtagaaattatgggggctggtgtg

SEQ ID NO: 286903 - DNA, 553 bp, Homo sapiens
tatcgatgttgaatattttttcatgtatcttttggccagatttatttttcactcagtgcttacctaggctttttatctgggatcagcgtgataagggggcagaagamcaaagaaggcctttttgttttttttggagatttggagattcctaatgtgtgaattatggtattaataactgacaaactaaattatactgtgattcattatagtaatatctcagggcaattgaggtattaaattgaaaaatcagggcggtgatttttcctttatgagagaaagtgccccttttagcaaaaagtaatgcagacttcccaaaagtaatcattgtggttttgtattggtagagtctgtgatttagagattctttgccataatattctgtttctccacagaatcagggatatatccaggaacaaaaagaaattaagaaaagcgtttccaagcagttaaaatcactgtcttaaagagtactaatgtgcagacagggtttacttttgattttatatagttcttacgtctatctcttgcatctcctcccaaaaagaaaaagaca

SEQ ID NO: 286904 - DNA, 553 bp, Homo sapiens
tatcgatgttgaatattttttcatgtatcttttggccagatttatttttcactcagtgcttacctaggctttttatctgggatcagcgtgataagggggcagaagaccaaagaaggcctttttgttttttttggagatttggagattcctaatgtgtgaattatggtattaataactgacaaactaaattatactgtgattcattatagtaatatctcagggcaattgagrtattaaattgaaaaatcagggcggtgatttttcctttatgagagaaagtgccccttttagcaaaaagtaatgcagacttcccaaaagtaatcattgtggttttgtattggtagagtctgtgatttagagattctttgccataatattctgtttctccacagaatcagggatatatccaggaacaaaaagaaattaagaaaagcgtttccaagcagttaaaatcactgtcttaaagagtactaatgtgcagacagggtttacttttgattttatatagttcttacgtctatctcttgcatctcctcccaaaaagaaaaagaca

SEQ ID NO: 286905 - DNA, 553 bp, Homo sapiens
tatcgatgttgaatattttttcatgtatcttttggccagatttatttttcactcagtgcttacctaggctttttatctgggatcagcgtgataagggggcagaagaccaaagaaggcctttttgttttttttggagatttggagattcctaatgtgtgaattatggtattaataactgacaaactaaattatactgtgattcattatagtaatatctcagggcaattgaggtattaaattgaaaaatcagggcggtgatttttcctttatgagaraaagtgccccttttagcaaaaagtaatgcagacttcccaaaagtaatcattgtggttttgtattggtagagtctgtgatttagagattctttgccataatattctgtttctccacagaatcagggatatatccaggaacaaaaagaaattaagaaaagcgtttccaagcagttaaaatcactgtcttaaagagtactaatgtgcagacagggtttacttttgattttatatagttcttacgtctatctcttgcatctcctcccaaaaagaaaaagaca

SEQ ID NO: 286906 - DNA, 553 bp, Homo sapiens
tatcgatgttgaatattttttcatgtatcttttggccagatttatttttcactcagtgcttacctaggctttttatctgggatcagcgtgataagggggcagaagaccaaagaaggcctttttgttttttttggagatttggagattcctaatgtgtgaattatggtattaataactgacaaactaaattatactgtgattcattatagtaatatctcagggcaattgaggtattaaattgaaaaatcagggcggtgatttttcctttatgagagaaagtgccccttttagcaaaaagtaatgcagacttcccaaaagtaatcattgtrgttttgtattggtagagtctgtgatttagagattctttgccataatattctgtttctccacagaatcagggatatatccaggaacaaaaagaaattaagaaaagcgtttccaagcagttaaaatcactgtcttaaagagtactaatgtgcagacagggtttacttttgattttatatagttcttacgtctatctcttgcatctcctcccaaaaagaaaaagaca

SEQ ID NO: 286907 - DNA, 609 bp, Homo sapiens
tgtgtactggagatgatgtagaaaacacagatatacataatgatgaaaaatatttcacaacctaggaataatgcttaatgtttgactatctatcgaaagctatctatcgaatctatatcctctaatcttctataaaaacaaatacacatactagtcagctgcaaacacatgctgctatcccaaagtaaagaaaagataactcaggcagatctgagagccatggaaaatcatttctaggctttgcaatctaatgaagaactttcaacatytgcccagttggatgtcaggatttctaagaatcagtggcttttttgagctttccatttcccctttctgaaatgtttataagcagttatcctttgtgtgtctcaccactgtatgttgggtgtgtaggaggcagataatgtctcatctcttcagtctgcagtgaagagagaggatacttaatgagctctaattaagaaactacccaagaagcctcctccatccctggatctaatttccaggtgactatgtaaagggagaagacttctgaggaccttgagatcacccataatgatccctgccttcaggtattccacaccaatgtataatcctctccccttgaat

SEQ ID NO: 286908 - DNA, 609 bp, Homo sapiens
tgtgtactggagatgatgtagaaaacacagatatacataatgatgaaaaatatttcacaacctaggaataatgcttaatgtttgactatctatcgaaagctatctatcgaatctatatcctctaatcttctataaaaacaaatacacatactagtcagctgcaaacacatgctgctatcccaaagtaaagaaaagataactcaggcagatctgagagccatggaaaatcatttctaggctttgcaatctaatgaagaactttcaacatctgcccagttggatgtcaggatttctaagaatcagtggcttttttgagctttccatttcccctttctgaaatgtttataagcagttatcctttgtgtgtctcaccactgtatgttgggtgtgtaggaggcagataatgtctcatctcttcagtctgcagtgaagagagaggatacttaatgagctctaattaagaaactacccaagaagcctyctccatccctggatctaatttccaggtgactatgtaaagggagaagacttctgaggaccttgagatcacccataatgatccctgccttcaggtattccacaccaatgtataatcctctccccttgaat

SEQ ID NO: 286909 - DNA, 609 bp, Homo sapiens
tgtgtactggagatgatgtagaaaacacagatatacataatgatgaaaaatatttcacaacctaggaataatgcttaatgtttgactatctatcgaaagctatctatcgaatctatatcctctaatcttctataaaaacaaatacacatactagtcagctgcaaacacatgctgctatcccaaagtaaagaaaagataactcaggcagatctgagagccatggaaaatcatttctaggctttgcaatctaatgaagaactttcaacatctgcccagttggatgtcaggatttctaagaatcagtggcttttttgagctttccatttcccctttctgaaatgtttataagcagttatcctttgtgtgtctcaccactgtatgttgggtgtgtaggaggcagataatgtctcatctcttcagtctgcagtgaagagagaggatacttaatgagctctaattaagaaactacccaagaagcctcctccatccctggatctaatttccaggtgaytatgtaaagggagaagacttctgaggaccttgagatcacccataatgatccctgccttcaggtattccacaccaatgtataatcctctccccttgaat

SEQ ID NO: 286910 - DNA, 619 bp, Homo sapiens
tgtttcagtaatcagattgaaaaaacacagcacatacagggttcagtaaaaaaacatagtatatatatatagggttctgtggtttcaggtgtccacaggggtcttggaactaatcccctgaggataaagggactactgtacacattttcctctggtggcttatgccctacaataagaacatttaacaaagtaagaccatttaacaaaacaatttaaaaataataaatcaatgatttaggcaaggatgaaaatattcataaataccaagtaatgtaaacatttatatatattttaaagaaaattttggaatttgcatttccttaattatatagccagaaagttacaagggaaaaagaatttggtttagaaatagcatgaacctgggatagattcccactcattaatcttacttcagaatgatattcacatgttgttgctgcctaggaaaacaatctaaaggcacaagtgattctaaaatacactcccctggtttcctgagatgttgcattccactcttgaacatgaagataatggctagtttggagaacyatctcaaatgattttgccaagtgtaaacacatgaatatttttaagaaaatgtcttcattaatggctgttg

SEQ ID NO: 286911 - DNA, 619 bp, Homo sapiens
tgtttcagtaatcagattgaaaaaacacagcacatacagggttcagtaaaaaaacatagtatatatatatagggttctgtggtttcaggtgtccacaggggtcttggaactaatcccctgaggataaagggactactgtacacattttcctctggtggcttatgccctacaataagaacatttaacaaagtaagaccatttaacaaaacaatttaaaaataataaatcaatgatttaggcaaggatgaaaatattcataaataccaagtaatgtaaacatttatatatattttaaagaaaattttggaatttgcatttccttaattatatagccagaaagttacaagggaaaaagaatttggtttagaaatagcatgaacctgggatagattcccactcattaatcttacttcagaatgatattcacatgttgttgctgcctaggaaaacaatctaaaggcacaagtgattctaaaatacactcccctggtttcctgagatgttgcattccactcttgaacatgaagataatggctagtttggagaaccrtctcaaatgattttgccaagtgtaaacacatgaatatttttaagaaaatgtcttcattaatggctgttg

SEQ ID NO: 286912 - DNA, 486 bp, Homo sapiens
cttctcccccttgtgcccagaacttcagatgctatgagccatatatttccttgaatgagagaaggcaagagggtggaatctccttcttttgacctctcattccaacatttctatactgcaattaatacatttgtagtagtacaatatattggtttgaaacagactgatgtcagtttttaaaacaattaaggtgtagaaaattcccctacattccaatctgatacagccactacgcctctggtaccccttcacttagccttatgtatttgtacctaattaatgtatgaatgcaagagtgtgcatgtgtgtgtttgcgtgtagacagacagatcaatctttatagccttgctmtacaaaggagtccaaatggagctctatgaaccaattaaaaaaacctcaaagaccaagtatagccatctcatgggggcaggcatttttgtctgttttgttccctagtcaatctgcatctctcagaacagtgctagc

SEQ ID NO: 286913 - DNA, 178 bp, Homo sapiens
tttgtattgacttttatgcttagagttgtagtgttttatcctgccttacaaccaaaatacctcttcactaagccttcctttatttagagggaatcatttagagggakagaaattcaaatcagaagccacagagatgtagaatccagaaatcgaaaagtaaacgcctgcattggccatg

SEQ ID NO: 286914 - DNA, 589 bp, Homo sapiens
aagcaccacctgctggctagaggccaacaaacacgaaaccagtgcactaaacaaaaacacaaccaaggaccgtcagagagtccacttgacacccctgctacctctgccagagcaggtgctggtatccatggctgcaagacctgaagatggatcacatcacaggactctttgcagacactcctcggtaccagctcagtgcctggtagctctgctgggtggctagacccagaagagcaaaaccaattactacagtttggctctcaggaagccccattcgtaggggaaggggagaatgccacttcaagggagcacgctgtgggatgaaaaaatctgaacagcagcccttgaatctcagatcttccctttgacacagtctacccaaatgacaaggaaccagaaaaacaattatggtaatatgacaaaatagggttctttcacamccctaaatgatcttactagctcaccagcagtggatccaaaccaaaataaaatatctgaattgtcagaaaaggaattcagaaggtcgattattaagctaatcaagaaggcaccagagaaaggtaaagtctaacttaaagaaataaaagag

SEQ ID NO: 286915 - DNA, 521 bp, Homo sapiens
aaaggtggaattttccttgctaggcagagtgctgctgaagctctctaagcggaggattaccgggcgggagctgtgctatgggasaggcgcttcatcagtccatgcaggggggcggtcaagggaagtaggaacaccacaatttcagctgtccaggtgagagaagaggcctaaactgagaaacagcaaaaggcagggtccatgggaagatgatgatgtgagaaaatgtttgagtcagagccttcaagacttggtgaacaaaaagatctagaagatgtaagaggagctataaagctgtcagggagcattttagcctatgagtctgggaaataaggatgtcataagacatggacaagtcaaactcatgaagaggttagtgaggaaataagttgagttcagtagtttgacatagccatcagaattcttgcagatgtttagcacgccattgattaaaaagcctcagggatattatttgattaagtaggaagtaacaagtatgatcttaggctatgtcagtagagcca

SEQ ID NO: 286916 - DNA, 619 bp, Homo sapiens
ttttgcaatgaggaagttacttgtgattgttaaaagcacttggtgattaatgatttatacatcatctatttccaaaaagtttggggcagcttaaataaaagcactttcacacaaggcagtaaaaacaaaataaagatgagaaaccaycaagagaaataaatgggggaaatagtgaatgtaccacaaaacctgggtaagatcatttttgtaataggagcactacgttttagctatgtggttcctggcagccaaaataaaaggataacaggaaagattacctataattcattggttaacgaaggaaaacagatcttcagaagaatttttgtttcctggcactaaattctatgaggagtatatcccatacattcttagataagagacagtgacatgttagacaatgtgatgaacagtggttctgctgaagatgcaggtttgctttaagttgctgtttctttaaggccttgaaggtcaagtgtgcaatattaagatgaggttggtaaaagccaataaggcagtaatatttcttgtgggcatagaccagatgggcatctgaatactcctgggtgtgaaaaatcagcataagagagcattagggaagaggacatccaagagagga

SEQ ID NO: 286917 - DNA, 608 bp, Homo sapiens
tggtccggaactcctgaactcaagggatcctcctgcctcaacctcccaaagtggtagaattacaagtgtgaaccactgcccctggcctttattttttaattataaatttctaggaaaaatttatgctagggaaaataaatgtttgttacaagtactttttctactttttttaagttttcttagctgactttcgccgtatacattctaaaattggggattggaaaaaatttttcttccataatttctttactctttcaaccaaatcacctacaagtaccatacaaattttcttttaaaatttttatcatttcattttgtatcagtgattagtctaactaggacttattttctgtgtaatgtaagctgagagtgtatctctgattttgttgaagaattgctggttacattaacatcatatacttaataagccattcttttgcaactgaattgcaataccaaccttgtcatattttaatttctcacatatattkatatctactgttggtccctatattctgttccatttatatacttgttcttttctgtgtgaatatcatatattcattagaatataatccaaaataaagtaagttcccccacccaatggc

SEQ ID NO: 286918 - DNA, 590 bp, Homo sapiens
atccaaaataaagtaagttcccccacccaatggcatacaggtaaataattaactgattgtcttcaaaaccctgacttataacatttgcctatttctgtggtataattattccatcrtgtctgatttaagggtaccaatactcaataaattgtctgcattgagaagagagacacacaatttgcacttctacattttttttttaaacgtggtggtttgttttcttttttttcacgttttctttttttatttcaataggtttttggggaacaggcattgtttgattacacaaataagttctttagtagtgattgctgagattttggtgtacccatcacctgagcagtgtacactgtactcaatgtggagtcttttatccctcaccccatctcactctttctcctgagttcccaaagtccattgtatcattcttatgcctttgcatcctcctaacttagctcccactttgagtgagaacataaaatgtttggatttaaaaatcataattacctgttctttgaaagtttggagtaacttatctataaaattgtccttgccatgtgttgttttcatcttattcatatgagtatggg

SEQ ID NO: 286919 - DNA, 590 bp, Homo sapiens
atccaaaataaagtaagttcccccacccaatggcatacaggtaaataattaactgattgtcttcaaaaccctgacttataacatttgcctatttctgtggtataattattccatcgtgtctgatttaagggtaccaatactcaataaattgtctgcattgagaagagagacacacaatttgcacttctacattttttttttaaacgtggtggtttgttttcttttttttcacgttttctttttttatttcaataggtttttggggaacaggcattgtttgattacacaaataagttctttagtagtgattgctgagattttggtgtacccatcayctgagcagtgtacactgtactcaatgtggagtcttttatccctcaccccatctcactctttctcctgagttcccaaagtccattgtatcattcttatgcctttgcatcctcctaacttagctcccactttgagtgagaacataaaatgtttggatttaaaaatcataattacctgttctttgaaagtttggagtaacttatctataaaattgtccttgccatgtgttgttttcatcttattcatatgagtatggg

SEQ ID NO: 286920 - DNA, 590 bp, Homo sapiens
atccaaaataaagtaagttcccccacccaatggcatacaggtaaataattaactgattgtcttcaaaaccctgacttataacatttgcctatttctgtggtataattattccatcgtgtctgatttaagggtaccaatactcaataaattgtctgcattgagaagagagacacacaatttgcacttctacattttttttttaaacgtggtggtttgttttcttttttttcacgttttctttttttatttcaataggtttttggggaacaggcattgtttgattacacaaataagttctttagtagtgattgctgagattttggtgtacccatcacctgagcagtgtacactgtactcaatgtggagtcttttatccctcaccccatctcactctttctcctgagttcccaaagtccattgtatcattcttatgcctttgcatcctcctaacttagctcccactttgagtgagaacataaaatgtttggatttaaaaatcataattacctrttctttgaaagtttggagtaacttatctataaaattgtccttgccatgtgttgttttcatcttattcatatgagtatggg

SEQ ID NO: 286921 - DNA, 472 bp, Homo sapiens
caatatttttaagcagaggacattttcacatctgcatttggaaaaatatttttgaaagacaatacagagagtttgaagagcataaaaccaattaaaagtctatttcaatggactcgggaaagsaacagcctaagactggacatcttatctgtttgatctgtgcctcagtccaccaccaccccttattcttccaccactgttggtaaaaattgaagtcaaagccaagtaaataatcattgcagctaaggtatctgatatgttttggctgtgtccccacccaaatctcatcttgaattgtagctcccataattcccacatgtcatgagagggacctagcgggaggtaattgaatcataagggtgggtctttcccgtgctgttctcatgataatgaataagtctcatgagatctgatggttttataaaggggagttcctctgcacacgctctcttgcctgctgccatgtaagatg

SEQ ID NO: 286922 - DNA, 626 bp, Homo sapiens
cctgtggaactggaccgtagcacaaggaggtggggaagggaatgacggagcagactgtacccggtctgcattccaagtcccttcagccaaaagcctgtcctgtaataagaaaaaaagttgtagaacagataaattaaaattttaaactgtactggagttagtttaataatggaaagtgaccagataattatggaatctgcccaagatatcataaaggaatgggaaaaggaatttcacacagaaaagtttgaaactgtatttggaaaaaagaagactgtcaacttcatattckacccaaccaagactgctaaaaacaatgttacatagatgtttatggggtcacagggcagggtcacatgatctctgttaagcagcagaatgtaatgctaaaactcaagggggattgtagctcctgtatcaagggctatagtttagccactctttcactgtagataacgtatctaaacttcagtttacttatgcataaaatgtagaataatttcttaaagtatgtttttaagtttgcaacttaaaaaaataataataatagtacctatttgtaggattattgtgaggattacatcgaattatggatacaaagtactcaacaggaggcttgacacatg

SEQ ID NO: 286923 - DNA, 626 bp, Homo sapiens
cctgtggaactggaccgtagcacaaggaggtggggaagggaatgacggagcagactgtacccggtctgcattccaagtcccttcagccaaaagcctgtcctgtaataagaaaaaaagttgtagaacagataaattaaaattttaaactgtactggagttagtttaataatggaaagtgaccagataattatggaatctgcccaagatatcataaaggaatgggaaaaggaatttcacacagaaaagtttgaaactgtatttggaaaaaagaagactgtcaacttcatattcgacccaaccaagactgctaaaaacaatgttacatagatgtttatggggtcacagggcagggtcacatgatctctgytaagcagcagaatgtaatgctaaaactcaagggggattgtagctcctgtatcaagggctatagtttagccactctttcactgtagataacgtatctaaacttcagtttacttatgcataaaatgtagaataatttcttaaagtatgtttttaagtttgcaacttaaaaaaataataataatagtacctatttgtaggattattgtgaggattacatcgaattatggatacaaagtactcaacaggaggcttgacacatg

SEQ ID NO: 286924 - DNA, 497 bp, Homo sapiens
ttaagcagcagaatgtaatgctaaaactcaagggggattgtagctcctgtatcaagggctatagtttagccactctttcactgtagataacgtatctaaacttcagtttacttatgcataaaatgtagaataatttcttaaagtatgtttttaagtttgcaacttaaaaaaataataataatagtacctatttgtaggattattgtgaggattacatcgaattatggatacaaagtactcamcaggaggcttgacacatgtgagctcttactgaatgtgaagtttaatgactggctgggagtaagggctaaagtgtgagtaacaacagagagaaagagatgctggtgatgggggaattgtggtattggtgatggagtggaaggggaacatttcaggcagtgagaacaacataagcaaagaaagcaagagaaacaagcattgtgatgtcagcggggtgggggacgggtggtatacaaacattttggtgttgccagagc

SEQ ID NO: 286925 - DNA, 675 bp, Homo sapiens
tgatgaattctttttttttttaatttatgcaactgacatcaccatcaggaattcttctattattttttattgttattattatttaacaaatatttattgggcacttcgtcatacatgccactgtgcaagaggctggacctgcyaatgttagcaagcaaagtccctgcccacagagacaaaagtctcatgagggagagggtcaaataaacaggcaattactaaaccatgttatgactgagatcagagcaggtcactatgagaagcctggattcctatccaggccactgtgatcagagaatgttttcctcctaccaagaattccctttctctgttccttttgcccccatttagactgttagaaaaaggaagaggaggaagagaagaagaaaatgaagacatgttaaaatttattgtggtcttagtacgtgtcagaagctatggtaaaacattttacatgaacacgttatttaattttccccaaaacagtaagacatctagttgttattcccattttaaagatgaaggaatcagaggtaaattaacttgccaaagaaactcagctaggaagtgggagagccaaaactccagcctcaatcagattaactccaatcccaagctgtaaaacactgcaccacactatttgcaaggaaaaaaaaagtcttagtttttttaaaa

SEQ ID NO: 286926 - DNA, 569 bp, Homo sapiens
ttaaaatggagatgatattaagtacacaaaacatacctttattaagtatcagccatgtgtaataatttcttatcaaggagcttatataaagaaagaatttgtgcaagagtttttgagtaaattttgttctattgttagtaaacctcaaaccttgtagaacggagaattactctgggagcaacctggctctccaccaarggttgtgctggggatttgagatctttccttgacattctctaaatgaccaaaagacaagaatggattttctattcccaggaaacatgttttgttgatgcactaataacccagccactggaaattcaggtcagagatttgggggaaaaacagaagcaactactgtcagcctttggggaacccaatgttagactcaggcttttaaaacagcttctgaaatctaaaagaaaactgcctttaatgagtgccagcaaccaggatcccagaagagattggagaaatgatattgtgtttttatcttgcattgttggctttggaaagtggccagaggcctcaaaggctcagatagctagtctcacagtcagctgtcaact

SEQ ID NO: 286927 - DNA, 602 bp, Homo sapiens
gactgacaaattctttcctctaaggacccatatgagataacactagaagttggcttttaaaaacagatgagttttttggctaataatactagttattatgtggccagaagcctacaaccaactctatcaatgtggaattgcatcagagatgcattgtatagacccagaaacatgcctagcgaaaacaaaacaatagcagcagatgcatgcatgagaaaacaacaatttaagtagtaaaggctgttatgtctaccattccattctatgatggaatgctccatggtaaactgagatggaaagatatggaagacatgaatgcagttggtcttaatttccatggtttctcttagtgtgaacatttctcctcactgagcaatatgccagtgtttaaagatttgaattttagccaggcaagtggtgtgcrtctatagttccagctacttcagaggctgaggcaggatgatagatagagcccaggaatttgaggctgtagtgtgctataattgcatctttgaatagccactgcaccccagcctgggcaacatagcaagatccccacctcttaaagaaaaaataaaatttttatatatagcgtgtttgat

SEQ ID NO: 286928 - DNA, 588 bp, Homo sapiens
cttctttcccgttctcttttgtctgccttgacaaaaattcctgccaaagaagtcagttctgcccaatcctaaatccattcatgtttctccatcctttcagccagctccctggcctaagctgcaccctcctctctccagaccccctaggttggcccccttgctgcctcccggccttctgctgtgcccrcaacagccttgcaaaactgagcatatgattctgtcatgccccctattcaaaatcattccacggcttctgaataaagaccaaattctagagtaaacgaccaggtttcctcgaccccaatccgttgaaaacaattgaaaagttgtaaaataacaatgaattgcttgaaaatgaattaaaaagacatacaaaatactagcttcagcagacataaagttgctctgtcaagttgcactaaaagcttattctccattctgtgcctagctccctacaggtctataattcacagttggagtgcggcccccacacagagaccactctgagtagcactgggcctctaggatcagcaaggtcggcatccctgcttgccctcccaagccttttattgcagaaattaaccccct

SEQ ID NO: 286929 - DNA, 589 bp, Homo sapiens
tatcaaagggttaaaggcctctaaaggggctggctcttagtcctctcggtctgtggtgcaacagggctcctgggctctgctcatcctagctgtcagattaatggcagggacttctgcagtgatctcagccacacatgctgcctcttctatgtgacccagaacagagctcagagtgaggtcgtattgatttcatgagaagctgggcctgcatcttttctttcactctaggtttgttggctcctgcctgtaagatggctgaaggctatcatttttgtgtggaggattaattagaatagatttctttgacttgggatgccaataaaacctgtggtctccagctattgatttatgatgctaagcaggaagtgttggtccctgaacaggccccaagaaagtagtggtattggrcattttgatgctcgggtggttaattgtggcaaactggaaaagaataagaacacataggagctttggggggtaccgtggtggaagggagattggtacaagggccaccctgattcagtgaatgaaaagagaatctcatttcctgtgaatgatgtggctgagaaattgaaagggacatttgtga

SEQ ID NO: 286930 - DNA, 647 bp, Homo sapiens
tctgcattacttaccagctttgtgatgataggtaacctaaattctctgtgcttcaatttcctcctcagttaacatgaacgtaataatagtcgtctgttaggtatgatgtgaggaggactcacacagtgcctggcacacttgttgcyggataaatgtttgcaatgatgagaatgatgctgccctgcactgccaatgatgggctctctgaatactagtgtgcctttgatacccataaacccagcaaaactatgctgctcgcatctttccttccagctcctgcctcaatttctattcaaggtgggcatctcattgcatcacagaacatcacagcagttaagcaaggaggtttctctcatctaatactttatctgttctttcaactactgatcagaaggaatcttacctcctggttatagggaatgctctacctctatagacagccaaatccatgtatagatagctttgaagattaaagtgcaaatctacttactgatctcttccttttttgtttgtgtgtatgtgcatgtatgtgtaaaacacacccaaaaaaattacttccagatactctcactaatgcaagaagtgagtccttaataaaacattgactgttgagaaagggaacagtggtagaaaaaatagtaagatat

SEQ ID NO: 286931 - DNA, 647 bp, Homo sapiens
tctgcattacttaccagctttgtgatgataggtaacctaaattctctgtgcttcaatttcctcctcagttaacatgaacgtaataatagtcgtctgttaggtatgatgtgaggaggactcacacagtgcctggcacacttgttgctggataaatgtttgcaatgatgagaatgatgctgccctgcactgccaatgatgggctctctgaatactagtgtgcctttgatacccataaacccagcaaaactatgctgctcgcatctttccttccagctcctgcctcaatttctattcaaggtgggcatctcattgcatcacagaacatcacagcagttaagcaaggaggtttctctcatctaatactttatctgttctttcaactactgatcagaaggaatcttacctcctggttatagggaatgctctacctctatagacagccaartccatgtatagatagctttgaagattaaagtgcaaatctacttactgatctcttccttttttgtttgtgtgtatgtgcatgtatgtgtaaaacacacccaaaaaaattacttccagatactctcactaatgcaagaagtgagtccttaataaaacattgactgttgagaaagggaacagtggtagaaaaaatagtaagatat

SEQ ID NO: 286932 - DNA, 647 bp, Homo sapiens
tctgcattacttaccagctttgtgatgataggtaacctaaattctctgtgcttcaatttcctcctcagttaacatgaacgtaataatagtcgtctgttaggtatgatgtgaggaggactcacacagtgcctggcacacttgttgctggataaatgtttgcaatgatgagaatgatgctgccctgcactgccaatgatgggctctctgaatactagtgtgcctttgatacccataaacccagcaaaactatgctgctcgcatctttccttccagctcctgcctcaatttctattcaaggtgggcatctcattgcatcacagaacatcacagcagttaagcaaggaggtttctctcatctaatactttatctgttctttcaactactgatcagaaggaatcttacctcctggttatagggaatgctctacctctatagacagccaaatccaygtatagatagctttgaagattaaagtgcaaatctacttactgatctcttccttttttgtttgtgtgtatgtgcatgtatgtgtaaaacacacccaaaaaaattacttccagatactctcactaatgcaagaagtgagtccttaataaaacattgactgttgagaaagggaacagtggtagaaaaaatagtaagatat

SEQ ID NO: 286933 - DNA, 604 bp, Homo sapiens
tttctaaaaagttgttcttctaatttatttattggcttcatccttaggaatgctttctccacatggtagtaaaaataggcatcagaactccaggcttgtattatcctcataggtagtgatcccagaggaaagggtgctatgttctctttttcatttccacgttaacccctctaatggatttggattggccctgctcrggtcaaattcccacagtggaagtgtccaaagagatgtacatcatctctttggacactctctttagtttgctgcctaagcagagaaagcagggtcacttgagtgatagaatcaccagattcacttggcttggggaaaggatagtttccataaagaagaaatgttcaaacaggaaagactaaaagtagcagacattccccacaaaaggcctgggcagggcagaattctgacctcctaacactagcaccatgactcctttatgttggtaaataacagacagtgctttgaaaaacattgccagagatcactttgcgggttgagaaactgaaactgagttcatagagaatgggaattcaccacaatgacagacaagaatgctatgaaaattgttaaaagacttacaagagtc

SEQ ID NO: 286934 - DNA, 452 bp, Homo sapiens
ttgaatggatagatatataattctcttttacttgtaatgttctttctcagtttttatgtaaagtttatataagtcacctaaaaattcattgaaaatattttcctctttttttcttttacaatttgtacagygagggattattatctcttccttgaaagtttattagaactcttttgtagaattatctgaacctaaggcttttttttttttttcgagagagcaaaggacttttattgttatctcaattctttaaatgtctaattagattatttaattttttatatttctttcttgtatcaattttgatatatatttatattttttaaattttatatttcatttagattttctgattttatgtatggtttataattttggaattaaaaattctgtttgacctgttctcaatttgtggcttaaaaaatttgtatactatctttaaaatgtcttaa

SEQ ID NO: 286935 - DNA, 452 bp, Homo sapiens
ttgaatggatagatatataattctcttttacttgtaatgttctttctcagtttttatgtaaagtttatataagtcacctaaaaattcattgaaaatattttcctctttttttcttttacaatttgtacagcgagggattattatctcttccttgaaagtttattagaactcttttgtagaattatctgaacctaaggcttttttttttttttcgagagagcaaaggacttttattgttatctcaattctttaaatgtctaattagattatttaattttttatatttctttcttgtatcaattttgatatatatttatattttttaaattttatatttcatttagattttctgattttatgtatggtttataattttggaattaaaaattctgtttgacctgttctcaatttgtggcttaaaaaatttrtatactatctttaaaatgtcttaa

SEQ ID NO: 286936 - DNA, 432 bp, Homo sapiens
tagtctcgtgttgtactagacaagagaggcaagaaccctcagaaagcagctagcaaagctggttataattagtgtaatcctataatctcctccaatcccctagcaatcaccagcacctctctgaaacctcagttcaccaggatatagtctaaagaccagctacctaacagtccatttttgaaatgggaaaactgaggcccagagaagtgaagtgactcaaagccttgaagtgagtatattacagaatcaagactagaatgcaggattcatagttccagtttagtgcacttttatttatttttttygacagggtctcgctctgtcacccaggccaaagcatagtggttgatcacagctcactgcagcctcaaccttccaggctccagcgatcctcccacctcagcttcctgagtagctgggactacaagcatg

SEQ ID NO: 286937 - DNA, 509 bp, Homo sapiens
catgttcatctgagaagacaagcaagatcctctctcttacaacactgagatagtaagagaagaggctctyactcctcttagaggagactcaagcttgaactgggctacaagctctcctctgaacctttcactgtgaatgaggggagggagagttctgctggccgggcctgagtcatgtggcagtattggcgaggatgagagcactatcatggcccttccacatgatcaaacccagaatcactgaatgtcagagtgggaagaaacttcagccatcaccccgcccagtggttttcaaagtggttttatgaaagcctggggctgtgcatggatgtcaggaggcagacatcccaaagtctgatgagagaagcaagcggttatgctgaatggactaaatccatgcctgtttccaccagagcagtctttatttaatccttttaaatactgaggttgttaaaaatgctaactcctgggttctttcctagacatactgaaacctatggtcagatttg

SEQ ID NO: 286938 - DNA, 584 bp, Homo sapiens
ttcttgaacacctactctgtgtcaggcagggtattgagtcttgggggcacacatagctcaggcctgggtccttactgcagttgctcttagtatagcaggtggagatggacataaacactgaggcacaggcaggtgggagccaatatcagttcccatgagacmcaaaagaaggggtgattgtacctcatttctgagataatttgttaatatctcagccagggctctgggatcttctgtttctctctgtgtgaggaattagctgtttcaaggagctttctcaaaaggaacccttggctcagagggcattatgaatcttgattttgattttttcttattttttatgagtaagtttcttaggaacaggcacagatactgtttgtttgttttttttttttttttgagacacagtctctctctgttgccaggctggagtgcagtggcgtgatcttggctcactgcaacctctgcctcccaggttcaagcgattctcctgcttcaacctcccgagtagctgggactacaggcacgtgccaccacacccagctaatttttgtatttttagtagagacggggcttcaccatgt

SEQ ID NO: 286939 - DNA, 557 bp, Homo sapiens
taaagattttctgactggcaatttgttgaaagagttattatcaatagaaaagaatgggttacaataaggggtggtagagaccaaagttttatcatgcagataaagccttcaggtagcaggcttcagagagaatagattgtaaatatttcttatcagacataaagagtctgttctattagtaatttattagtaattctttttttttttttttgagacagagtcttgctctgtcaccaaggctggagyacagtagtagtgctatcctggctcactgcaacctctgcctcccaggttcaagcaattctcctgcctcagtctcccgagtagctgggattataggtgcctgccaccacacttggctaatttttgtatttttagtagagacatggttttaccacattgcccaggctggtctccaactcctgacctcaagtgatgcactctccttggcctcctaaagtgctggaattacaggtgccagccaccgtgccccgcctctttattaatttcaataggggaggagggtataatgatgcaatcaggcctccccttactat

SEQ ID NO: 286940 - DNA, 574 bp, Homo sapiens
taaagcccatttttaagaaaagagcatctcaattataattgtatatattataatcttctcaaaacatgttatacattcagattcccaggcctacttccagacatactgaattagcccaagagtgggattcagggatctgcatttgtaacacgttctatatataaagatctgtatatgatagagaaataaagactgaaagtatatacagcatgtttatttctgagtagaaaggcaataatttttctgtgttcataatttgcatgttttatattttccataatgaaataaaagtgttacatttctcaatttaaaaattacattatttaatgtaaattaacaacacacagtggtttatggcaaatcarataaataaacctcagggatctgagtagtttgtagagaaaaataattaagacagagaatacaaactggtagcccacaaggtataaaacatctttaatccagatgatgtttaactgttttaaaagtaatcacccacatttaaaaacagggagctttcccttaataaatactaactgccatcttcttttgaaaaaaatgagatctgaccaca

SEQ ID NO: 286941 - DNA, 558 bp, Homo sapiens
agcaagaacagtttttattgagttctagctctatgtcaagctctgttctcagtacttactgtagataaatgttaatcctcataaaagtcctgtgaggtgagtactagcaccctcttacycagacagtaaggttaggttacttgtcccccgtcacaagctcagaagcaacagggacaagattcaaacccaggcagtctgtcccagccagatcttcattcctaatcacccccactgcactgtctcatattttcaggattctttacaaacagcctcctcatttttcatctcatgttcaggttcacaacaacccttagatataaaaagggggaaatcttaaaagaagaaaataaatctgtaagttaggaaacctgcttaagcaatgcaccctctaagtggtcattccaggaccccaggtcaaacagtacccaggcccagcttataagtcttagcaccaagaccagaacatgtgccagaggtggcacagccggtatcaaacaactgtagtcatgggccaccaccagggatcagggaggagggcagagagtggccatgaattga

SEQ ID NO: 286942 - DNA, 585 bp, Homo sapiens
tgctggccctgaaaggaggaagaccaagtcagtagtgcttctcatatcccgcattatgttgttcccacccatcattctcagaaaatcagatttcagagtctcaacagcaagtcatcagccgaacgagattccatgtaagtcatcacaaacacaggcctaaaaaggcactttttcctaccctatatactgagtgcattgaataccgtgaaattactcacctttgagccaagcaggttattggttagtagtacctaragaaaaacaaagctgtgggtgaaagattcctcagacatggttaccccccactccctgcgttctccagtttctcaggtgttcatgtattttcactgtcggtcatagtgagctagtttgattcatcatagaaactgcctacttggtggcataagctgtaaggaacaaaaaatatcaactaacctctcagctctgaaggcttttcaatggtatatagcaacaagctgctcctgaatcaaaaaatcattcaattagctaattatcccaaacagccaaaactatttagttacggttgttaagggtcaaactaagaaaaaggtaaccaaatgtctc

SEQ ID NO: 286943 - DNA, 599 bp, Homo sapiens
gctaggccccacttcccaacaccaccaagttgggggatcaaatttcaatacgagttttggagggaacaaactcaaaccataccacctagatatacacagggactgcaagtgatcagactccacaaggtgaatgtcattaaagctgtgggtgtttccacccatctagtcaactctcagatggtaggcaacattctcagtcctagaatactattattacagattctggctcatgcataagggattacacaaaaactacaaccatgaaagaaagtcaccaaggggttacatttggcttaagcaattaaatgaatagcagaatagccaagttgtcatataaaaattgcccaaatagccattataagaatttatggaagggtcccttttttattgaatatgcttgtttyaaaagtgggttctgggaaccttaccctatcatctagtttaaaggagcacccctgcatgcagccatgtgtggtgagctaggcagaggaaacagtgtagtctatcatggcaccatctgtgataggttgggcagaggaaacaacgtggtctatctgttcacttctgaaaagcaacagattctgaaaggcggcaattag

SEQ ID NO: 286944 - DNA, 1176 bp, Homo sapiens
gctaggccccacttcccaacaccaccaagttgggggatcaaatttcaatacgagttttggagggaacaaactcaaaccataccacctagatatacacagggactgcaagtgatcagactccacaaggtgaatgtcattaaagctgtgggtgtttccacccatctagtcaactctcagatggtaggcaacattctcagtcctagaatactattattacagattctggctcatgcataagggattacacaaaaactacaaccatgaaagaaagtcaccaaggggttacatttggcttaagcaattaaatgaatagcagaatagccaagttgtcatataaaaattgcccaaatagccattataagaatttatggaagggtcccttttttattgaatatgcttgttttaaaagtgggttctgggaaccttaccctatcatctagtttaaaggagcacccctgcatgcagccatgtgtgrtgagctaggcagaggaaacagtgtagtctatcatggcaccatctgtgataggttgggcagaggaaacaacgtggtctatctgttcacttctgaaaagcaacagattctgaaaggcggcaattagwataggctaatggtgaagacagatatttgaaagggaactgtgataatttccctctatctataatcatcttttttwaaaaaactaagactttttttttccttgcaaatagtgtggtgcagtgttttacagcttgggattggagttaatctgattgaggctggagttttggctctcccacttcctagctgagtttctttggcaagttaatttacctctgattccttcatctttaaaatgggaataacaactagatgtcttactgttttggggaaaattaaataacgtgttcatgtaaaatgttttaccatagcttctgacacgtactaagaccacaataaattttaacatgtcttcattttcttcttctcttcctcctcttcctttttctaacagtctaaatgggggcaaaaggaacagagaaagggaattcttggtaggaggaaaacattctctgatcacagtggcctggataggaatccaggcttctcatagtgacctgctctgatctcagtcataacatggtttagtaattgcctgtttatttgaccctctccctcatgagacttttgtctctgtg

SEQ ID NO: 286945 - DNA, 576 bp, Homo sapiens
ataggctaatggtgaagacagatatttgaaagggaactgtgataatttccctctatctataatcatcttttttaaaaaaactaagactttttttttccttgcaaatagtgtggtgcagtgttttacagcttgggattggagttaatctgattgaggctggagttttggctctcccacttcctagctgagtttctttggcaagttaatttacctctgattccttcatctttaaaatgggaataacaactagatgtcttactgttttggggaaaattaaataacgtgttcatgtaaaatgttttaccatagcttctgacacgtactaagaccacaataaattttaacatgtcttcattttcttcttctcttcctcctcttcctttttctaacagtctaaatgggggcaaaaggaacagagaaagggaattcttggtaggaggraaacattctctgatcacagtggcctggataggaatccaggcttctcatagtgacctgctctgatctcagtcataacatggtttagtaattgcctgtttatttgaccctctccctcatgagacttttgtctctgtg

SEQ ID NO: 286946 - DNA, 568 bp, Homo sapiens
gatatacttcccttgtctgtgtttatggagggaatgcatttagtctttcgtcattaagtataatgttaaaccgtaggyttttcataaatatgctccatttatcaggttaaggaagccctcttttttctaatttgctgagaattcttatctctatttctaatttgctgaatttttatcaaatgctttttctgcatttattgagatgttcatatttttttcctttttagtctgttaacatggtaaaatacgttcattaattttttaacgttaaaccaatcttgcattcccaaggtaaccccaatcataatgtattatactttttatatattattggatttgacttgctaaaattttgttaggacttttaaaatatatgttcactcaataaatggttgttattactagttatgttaaatgagaaacagaatacaagaacaaaaacacatagtaagaatatctacacaaaatacatacacttgtagacaactaccagaaggaactatgtaaaaattaaaagagcatagtgaaatcatgaggcacattccaaaattctgatgctattactata

SEQ ID NO: 286947 - DNA, 540 bp, Homo sapiens
cacctaattgggctatatgatgtgaagttaaagtacctttagcaataggcaccatctaatttcgttgtatagatattgtgtcttttgcattgatattgcctctcttagttgtatgtatattgatgcatgaggctaggattacaagactagtcaaaataggaagaaagaagagaaaggtggtgaagatatgaagttccataattgcatcctctacccacatcctgttcttagaatattttccactggaggctgcacctgtataccctcaaattcaatctgagcacacaattatttatacaagcaaggcaacttttccaattttgcctatcacctgcttggagaaacaagtacttcaatcaccaatttgaatattcattgagataattgttaggaggttgataaaaaatgtggcatctccctgtattkttgccttctcctgggccaacaatgccgtctgtactctgctggtctgcatttgaccacaaactggagttgcagcaaatcttagcctcttgggaagcctatttttttaaattttat

SEQ ID NO: 286948 - DNA, 421 bp, Homo sapiens
gtataaatgaaaatacaaatgtgtaaaagtaaaaagatggaaaaaaatatactatgctaaacatagtcaaaaggaaaaagaaactgctatatgaatatcagatgaagtagatttcagagcaaaccatatttccagggataaatagggtgatttcataataataaaggaattaatttgtcaaraagacataataatcaccccctcaccatgacagaacttgaaagtacataatgcaaaaactaatagaactgaaggaaaaatagataattcaccatattgtcagagtttccaatgcccctctcttattaattgatacaacagacagaaaattaacaaggttatggcagacatcaagaacacaattaaccaacttgacctgaataatgtttgcagaacacggcacccaaaaagaacataagat

SEQ ID NO: 286949 - DNA, 421 bp, Homo sapiens
gtataaatgaaaatacaaatgtgtaaaagtaaaaagatggaaaaaaatatactatgctaaacatagtcaaaaggaaaaagaaactgctatatgaatatcagatgaagtagatttcagagcaaaccatatttccagggataaatagggtgatttcataataataaaggaattaatttgtcaagaagacataataatcaccccctcaccatgacaraacttgaaagtacataatgcaaaaactaatagaactgaaggaaaaatagataattcaccatattgtcagagtttccaatgcccctctcttattaattgatacaacagacagaaaattaacaaggttatggcagacatcaagaacacaattaaccaacttgacctgaataatgtttgcagaacacggcacccaaaaagaacataagat

SEQ ID NO: 286950 - DNA, 587 bp, Homo sapiens
gggggtagaagttgcagtgagccaagatcctgctactgcactacagcctggacaacagagggaaactttgtctctaaataaataaataaataacatagctgaaaaaattactgtgtgtttattctcactttgtccttgttttgttgtatggtgtttaaagaaaaggagattatttatccccatagtaaatttccaaaactgttctttgcatttaccattttgttaaatgatagagagaaatgtcaattgtcttactttgataagtttggcataggccctgtcacatttttgatgcttttggtcatggttctgtgattagaatgctggcaattaggtacatgcaaggagtatcctaaccgctttaatacaatggtttgaagtgcttcargcagtaactactggacaccaaatcacagtgttttcatttgtgacatgttagagagaaataggacttcctgcagtaccaacatcctattaactgatccctgtgcttttagcttacagggctttgactcctgggtctgaaaaaaggcacctactcttgctaaatcttgaacattgatgccaatcaatgcctcgtcttcaga

SEQ ID NO: 286951 - DNA, 557 bp, Homo sapiens
ttccaaagccctcttgctagtgacarcttatgatgagaatatcaggtaaggatatcgaacacctgaaagagttatggagattactacagacctgtatacctggatggtgttgaggggtggactctgacttcagaccagctgatactctaaactataacctacaactctaacttattttttttgaggggtgggggggaaatctctgttattgattacaatagttgtggatcacttacaagttagatatagcgattgggtagtggaatgggtgttggatgcaacaggatcttggaaaatatttctgggggttagaggataggctgagaatattatagatgtttggaaacatttgtgccaacctgaagatggtgtttctttgtctctcccaattagcacagctgtgttctgttggtcatctggtagagtgatcaatctagagttagaatacctagggatgacataaaggaatatgacagtccggaaatctaccagatgaagagccagtctgagctcagaggggattttgagccaaggcatggcattttatttttagatgg

SEQ ID NO: 286952 - DNA, 495 bp, Homo sapiens
gtgaagtgaggaatatctaaatggacacttctatatttgtttgcagagaatgatgaaggtgataatgaaaatgataaagatgaagagattcataaaggatgagaatcacctgcccccaggtaacactgaataatcaggcaggtagtgggtggataaaccatggaaaaggtcttagaaagaatacaagtgagttgaaggtagtcacagattccagatggagggtaaagaaagctgcagagtgtgctcatttcatgcgctcacccaacaaggaaatagccctagtccattgtcttcatggtccttgtaagcatgaccctygataaacccaccagccctagggatttcctgcattcacagagaactgttctctcctgtaatgaaaaccaggaggagatgcaaagctgctttctacatgattgtcttcaggttcttgttaagaaagataaatagcaaagaggtgggccaggcatggtggctcacacctgtaatcccagc

SEQ ID NO: 286953 - DNA, 601 bp, Homo sapiens
gcaatttataaccatggacatacatcatacctgggaaatttttccaagctatgcatgctttgacaccatccttgctgatgcttatttagttagtctggggtggggcagtcataacatctttgagaaaaatattccccagtaattccaatgtgtactccaaattagaatttactcatctagattttaggcaactggcatatrtttctgaagtaaaatagttttatcttctttcattatagataaaaataaaatatagaaatagtatgactttatttcggccgaaaattaagacctggttgcagactagtcaatattgtaggatattcaatcccccaaattctcacttttctccttttatgtcccctctttcagttttggctaggaatatatgaaaaaaaaaggggaataggtttcatatgagtcagtagaatgatatagcttccaaagaaataattaaatctagcatcattaaaaaactataatgttctagaacattacaactgttgttctctaaactggccagaccacacctaatgatacattttaaaagtgaagctggagtgcgtttaataaggagagagagaaaaattttttaagggat

SEQ ID NO: 286954 - DNA, 591 bp, Homo sapiens
aattcaagataagatttgggtggggacacagccaaaccatatcaaagacagacaagtaaacagatgcttaatgatttgttcattcagcagatatttaactatatcctaaacaagtgctccagtagcaatgcagaagagctgccatgagagcagtgggcaataagtacccaattctccctacaactacataggaatttactaaaaggacaaggaaatattgaccatagaggggaaataatcactactgtttatgcaaagttagatgaaagtgacagaacaaatagagttctgggaactgcaagtagttcagaatgctggtaaagtgttataggaatgaaggaaaatgaaactagaaatattcacaggcaatatcaagagtttgcatttaaggtacaagttggagaaccactgaaggattttaactggaagaggagtcaaatcagatctccagtttagaagatatgttagagaggagtgaaatgggaaataggtcagtacgagcctgtggtaaaagtctmagtaagacagcatgagagctttaaaccaaggtaatgacactctaaaggaattggaggagccagacttaaatga

SEQ ID NO: 286955 - DNA, 628 bp, Homo sapiens
caacaataaattacaagaaactgaatagcaaataataataataataataattgaaaaagaggaaaaagagctagtaggggaggcaaaatgagaaaaaaaaatgaagagaatagaaaatgatcyagagaggtatcatatatgtgaccaaaaatcaagaggtagaagaaaatgtattcatcatgatagttatcggcggtcccaggatgatattagccatcccaattattatattttctttgatgatattaaatgaatatcagagcccattatagccttactttttttttttttttttttttgagatggagtctttctctgtcacccagaatggagtgcagtggtgcgatctcggctcactgcaacctctgcctcccaggttcaagtgattctcctgcctcagcctcccgagtagctgggactacaggcgtgcactaactcacccagctaatttttatatttttagtagagacagggtatagccttatgtttgtaatagaacagcctttaacaggacatggatcacagaaaagaaatgaacatacattgagtgcttagtatatacaaggcattgttttagacaccaaagctgtcttcttatttaatctctgcaatagctgtatgaaacagg

SEQ ID NO: 286956 - DNA, 628 bp, Homo sapiens
caacaataaattacaagaaactgaatagcaaataataataataataataattgaaaaagaggaaaaagagctagtaggggaggcaaaatgagaaaaaaaaatgaagagaatagaaaatgatccagagaggtatcatatatgtgaccaaaaatcaagaggtagaagaaaatgtattcatcatgatagttatcggcggtcccaggatgatattagccatcccaattattatattttctttgatgatattaaatgaatatcagagcccattatagccttactttttttttttttttttttttgagatggagtctttctctgtcacccagaatggagtgcagtggtgcgatctcggctcactgcaacctctgcctcccaggttcaagtgattctcctgcctcagcctcccgagtagctgggactacaggcgtgcactaactcacccagctaatttttmtatttttagtagagacagggtatagccttatgtttgtaatagaacagcctttaacaggacatggatcacagaaaagaaatgaacatacattgagtgcttagtatatacaaggcattgttttagacaccaaagctgtcttcttatttaatctctgcaatagctgtatgaaacagg

SEQ ID NO: 286957 - DNA, 608 bp, Homo sapiens
taacgtatgtgttttaggtaatgtctgacactctggtaaagtctgcctgacacatgagcttaaagcagaatggaaaggaaagaggagagaattggaacaagatgaaaagagaagatggttatacactgctaattctgyacagtgagatccaaggacaccaccatgtggtgtctgatttaatttctttttaaaagagatcattttcagttctaagttactcaaccctttattctattattacttctcagctcagtcactcttctcttccccacaattccgaaactatgttgaagttctttaaaggtcggccctcctgaagaactattttcttattctgcctactttgactctgtaaaattcccaaaagcaaaataaaggctaaaaaaattttttttgcctttactcattttcaaaatctgtcaaactctcctcagcattaaattaattatccctttaactaatcaatatacaatgataaatgagtagtactttgggttacttccttctcttcctccctctcttccaaatagactgagataaggcttctcagaaccatgggatgtatcagcagtatagaaaagggacagtgctgaatgagtcagcaccca

SEQ ID NO: 286958 - DNA, 608 bp, Homo sapiens
taacgtatgtgttttaggtaatgtctgacactctggtaaagtctgcctgacacatgagcttaaagcagaatggaaaggaaagaggagagaattggaacaagatgaaaagagaagatggttatacactgctaattctgtacagtgagatccaaggacaccaccatgtggtgtctgatttaatttctttttaaaagagatcattttcagttctaagttactcaaccctttattctattattacttctcagctcagtcactcttctcttccccacaattccgaaactatgttgaagttctttaaaggtcggccctcctgaagaactattttcttattctgcctactttgactctgtaaaattcccaaargcaaaataaaggctaaaaaaattttttttgcctttactcattttcaaaatctgtcaaactctcctcagcattaaattaattatccctttaactaatcaatatacaatgataaatgagtagtactttgggttacttccttctcttcctccctctcttccaaatagactgagataaggcttctcagaaccatgggatgtatcagcagtatagaaaagggacagtgctgaatgagtcagcaccca

SEQ ID NO: 286959 - DNA, 608 bp, Homo sapiens
taacgtatgtgttttaggtaatgtctgacactctggtaaagtctgcctgacacatgagcttaaagcagaatggaaaggaaagaggagagaattggaacaagatgaaaagagaagatggttatacactgctaattctgtacagtgagatccaaggacaccaccatgtggtgtctgatttaatttctttttaaaagagatcattttcagttctaagttactcaaccctttattctattattacttctcagctcagtcactcttctcttccccacaattccgaaactatgttgaagttctttaaaggtcggccctcctgaagaactattttcttattctgcctactttgactctgtaaaattcccaaaagcaaaataaaggctaaaaaaattttttttgcctttactcattttcaaaatctgtcaaactctcctcagcattaaattaattatccctttaactaatcaatatacaakgataaatgagtagtactttgggttacttccttctcttcctccctctcttccaaatagactgagataaggcttctcagaaccatgggatgtatcagcagtatagaaaagggacagtgctgaatgagtcagcaccca

SEQ ID NO: 286960 - DNA, 594 bp, Homo sapiens
tactctttccagtatatggaaactgttacactctttcctgtgtatcttcccattttgcctcattgttactcatttaaaagactattactcagtgttagtaactttctgttcacatgtttagaacttcagctgggatagaatagaataggtagaatttctggggactggccatatattttctgtcccagacattctcttcatgtggtgaggctggacttcctcaagctatggtgatctcatggtagttggatttctcatatggctgctagcttctaccagagtgagctttctgagacccaggcagaatccgcaaggctacttatgacttggtcttggaagccattcagtgtcatttcaactgtatgctgttggtcaaaagcaagtcataaarataactgagattcaaggggaagggactacataagggcacaaatactggaaggtgtgtgtgtgatttaattgacacttctttcagaaaactttttcagatgtctattggctattataaaacatgaagatgatcctcaagttgctatgaatactttctatttattgcaggaaaatcctgaagaaggaagggccagtatttacaaa

SEQ ID NO: 286961 - DNA, 465 bp, Homo sapiens
gatttacaaagctttagcaatggacatgggtattgtaaaaaaccactagatcctttccaaagaatttcacagtaggtcacagatttaggttctgaatatctgttgtttttgtrctatagagggattagaagtattagaaagtgcccaagaatagagtttatggtgtgattgtttttctgccaatctgatgctaatgttatgccattaccagaagtgcttgcaggtttgctattcgggtgtttttttatatgaagattttgatgccaactccaagtttaaaaatatgtattaaattttaaatttaattttttatgtttatagatttagcggtacaatgcagttgtattatgtggatatactgcatactgttgaagtctgagctttattgcacccatcaccaagatagtgtacattgtacacagcatgtagtatttcatccctccttcccttcccaccctctgtgct

SEQ ID NO: 286962 - DNA, 465 bp, Homo sapiens
gatttacaaagctttagcaatggacatgggtattgtaaaaaaccactagatcctttccaaagaatttcacagtaggtcacagatttaggttctgaatatctgttgtttttgtactatagagggattagaagtattagaaagtgcccaagaatagagtttatggtgtgattgtttttctgccaatctgatgctaatgttatgccattaccagaagtgcttrcaggtttgctattcgggtgtttttttatatgaagattttgatgccaactccaagtttaaaaatatgtattaaattttaaatttaattttttatgtttatagatttagcggtacaatgcagttgtattatgtggatatactgcatactgttgaagtctgagctttattgcacccatcaccaagatagtgtacattgtacacagcatgtagtatttcatccctccttcccttcccaccctctgtgct

SEQ ID NO: 286963 - DNA, 575 bp, Homo sapiens
acagtggaagaggaagctgaatccaaacaaaggtgactctagactctgctcttaacaacagccctattaccaatctcctcaacatgctcagaacttccttacagtckttagaggaccttctaattctttcagcactgtttaagttgtagctattaataatttttatttagagacatttttccccaaacttgtaaatgatttcaatagtttaaactgagggccatttttaaaaagctggggattgcaggcatcagtggccatggcagataaagcaactacaacatcagtaactgtggctagtgccataaaaccttgaccaatgcacctcctttccaactgggcaaaccctgcttccagaagatgtccttctatggccacttctggcacttcttgggtatcatcaaccctctcacactctttttcactgaggtatacagttctatgagttttgacaaacatattcagtcatatatccaccaccacaattgagataagaagcagtttcatcaccctaacacgttccctcaaacattatattcaattcctccctgtctgcaggccctggcaagcaatca

SEQ ID NO: 286964 - DNA, 456 bp, Homo sapiens
gtgttgagctcaggatacacgccagcattatgctaagtcactttcacactgcatctcattgaatcctcacaacaactgctggagctggatatcagtgttcatctgaaaatgtttcaagtgtggatgcgagcgggtaggcaaattttctaaagtcattttactactagagctagaaatcaaattctcatttgacacctaatctcacatactttccaccactctgrtttttccacagaagaaaggatgcaaaccatcaatcattatgttgttactacatgcaaggccagggggcttttcctgaaacaacaggagacctgatacatatccctcaccctattaaaaaaatagcaattatttatatccattgcctttgcttgtctccttcagtgtatattccaacattttaacggagattgactgcgtttaatttgaatagacttgaactagtgttacagg

SEQ ID NO: 286965 - DNA, 633 bp, Homo sapiens
attaattcatgaataatccattaatgggagcaaagcccttatgacccaatcaccccttaacaccttacctttcaatactgccacattgaggattaagtttcaacatgatctttggagcagacaaagattcaaaccatagcatgtttcacttatttttcttgttataggaggccatagagcaaacttttggtgattttatgtaggctccttaccttgcttagcagaatattgtgttacgtctgtgacacacctaattctctgtcactctttaagccaggtactccacttgtctcaagggtaatgacatcttccctgccttacaggattgttgtgagaaagmagtgaaatggatagaaaagtgttttgaaatgaatatagagctgttagaattttacggagtattttttattaaattcttttaaattttgttattatctccacaatgataagaattaagctagcagtaaaaggatacaaactgttagctgggacttaaaaaagagacaagtgaatagcagaacatgaattttctgtcccatttactctctcttcagtttgtttagaatcgctatataggtgcgggatttgtgactcaagttaaaagcagtgttaaaggcaagatctcaaactata

SEQ ID NO: 286966 - DNA, 611 bp, Homo sapiens
gcttaaattccaaaggttatatagttactaaatggcacgtaaacaaatacttaacttgttgggaggccgaggcaggcagatcacaaggtcaagagatcgagaccatcctggccaatatgatgaaaccccatctctactaaaaatacaaaaattagctgggcatggtggcatgcacctgtaatcccagctactctggaagctgaggtgggaacatcgcttgaacctgggaggtggagtttgccatgagacaagatcgtgccgctgcactccatcctggcgacagggtgagattccgtctcaaaaaaaaaaamaaaaaacttaacttgaagcctttatattttgcctaatataatatgtattgcctttcacaggtggggttcaactttagtaccctgaaagattattcccatgtagttaatccatttgacaatattcaagagactcagtacttgtaccaggtatagaataaattagcaggttaggcagaggagtagggattacgatttaagtgtaaactgattctgttatgtgatgaaaaaaattgctgtcttagaggcaacctaacaaaactgcaagcaacatatggacttaccaatagtccaataaaataa

SEQ ID NO: 286967 - DNA, 550 bp, Homo sapiens
aacaattttcagtaacctctgccggtcagaataatctcagatctgtgttttgctgagggaattttgcttcctatacatttcactcagttgtcatgccaaccttccagttcttcttaatgtgaagatggctgtgtgttaacctggacatttggaaagataagttgttaacttccaaacagaaatgatgatttagggtgcgtagggtgagttgccaaatgtctgttctagtcatttcactgtaaccaactttataaatgcttcagtttataccctgctttcttctgaaaaaataattttgaacttaccyatgattactgctgaaaagcactctatatttcagtattttccacgggtaaaagttctgctaactttttgcaagtcttcttctaatatcagagtaggtactgcgtttcattgcttatcaagcagatagtatacagttgcacatttcaggaatatactgtatctataattttgtaagtttgtatgtcacaaatttttcaggaagccctctcaatttcaggtattgttttgcgacaggaaaatcatt

SEQ ID NO: 286968 - DNA, 598 bp, Homo sapiens
ttcaattaattgaatctgaaagtgtttctctcaatatccaattagttatggattgtattctcccaaatcttgtactttttaattcatcaatccattatcacaacacatgtgtaacaaatccaaagcatgcttctgcagacgagtttgtggaccttaattaaccttgtattctctcacttggatccttcgtgtacccactgctctcttgctcatcgactctgggactagccacttcctgatctgtagcttctgagcatgtgtattaccccttcaactaggaagatatttgcttcctccattttgatgctcattagacttcctcatcatttgtccattgcctcttttcagtcccccagttagaaacaattgagatttcagtacagccagtgtggytgagtctctcacttgtttctgcacctccacaggagttgttttttttctatagttgccatagaagactatggcttttgttggaaactgcaagatattttgatataaagaatttgaaataagactttagtgttcatcagagctctgttttatttgccagctcaaaaactttaagtgccttaaactctctcatagttatatcacatga

SEQ ID NO: 286969 - DNA, 633 bp, Homo sapiens
attagatagtagtgatggctgcacaactctttgaatatactaaaacccaatcaattatatggtttaaaagggtgaattttatgatatgtgaattatttctcaataaagccatttaaaaaaatcagtcagcacaagcccaaatctcataaatagcctttccaaatttcctcttaccaaaaggcaccactctctatactctctctttgcagtaagctaaaagaaacttaccctttctatttttacaagaaaactttttattgaagcataatatacatacagaaaattgcacaaattttatatatatagctcagagagttatcccaatgtgaacacatctatacatcaattatctagtaaaagaattttaatgctcccaatacagatagcccctcttgtttattattgtctgtactatcactaattaataactctggagtagatctaaaaatctgaagtacgtctactgaaatcaaaytaacctagagctgggaataccttgaaggcaattaggtttttattttgtagcctgtgagtaaccttgctaattttctagtttcacaagcaagatacagaaaataatgtccctctaatcattacgtctttcctctcaaaatgtaaccaccattctgactt

SEQ ID NO: 286970 - DNA, 570 bp, Homo sapiens
ttttttcaaagtctggctaaaggtctgtcaattttttatatatatttttattatactttaacttctagggtactgccaattttatttaacttgttttacttttttatgttttattgatgttttgcattgttttgttcaatttcatttatttctgstctgatttttatgatttcttctactaattgttggtttatcatgcttttcaattcttcaagatatattgtttggttgttcatttgaagtttttcttcttttttgattaggaacttatagctataatcttcctttgtaaaaaataagctgtgtctcataagttttggtatattgtgttcacattatcatttgtttcaggaaagttttcaacttccttcataattaactttttatcctgaattaattttgtattcatagacatactgcccatcattcaggagcatattgtttaatttccatatattcatatcatttccaaaattcctcttgttattgatttttagttttatttcattgtggttagagaagatgcttgatattatttatggttttttttttggttttttttttggtttt

SEQ ID NO: 286971 - DNA, 566 bp, Homo sapiens
actcttgtcgcccaggctagcttgcagtggcgatcttggctcacttgtaatctccacctcctgggttcaagtgattttcctgcctcagcctcctgagtacctgggattataggcacctgccaccacaccaggctaatttttatayttttagtagagatggagtctcaccacattgaccaggctggtcatgaactcctgacttcaggtaatgtgcccgcctcagcctcccaaagtgctaggattacaggtgtgagccactgcacccggcctatttctgtttttttaatgttttaatacctgatttgtgaggtaacatatggtacatccttgagaatgatccatgtactgaggaaaaaaagtgtatattccgcagctattggataaaatgatctgtaaacatctatttggtccatttgatctgtagtgcagtttaagtctcatgtttctttgttgattttctggtgagaagatctgtctaatgctgaacgtggggtattgaagtctccagctattattgatagatgcaggaggcaggtaagggaacctgcacagggtcttgcctgggc

SEQ ID NO: 286972 - DNA, 503 bp, Homo sapiens
gaatgatattgtttggctctgtgtacccacccagatctcatattgaattgtactcccataattcccayatgttgtgggagggaaccagtgggagataattgaatcatggaggcagttctcccatactgttcccctgatagtgagtgagtgttcatgagatctgatggttttgtaagcatctggcatttctcctgctgatacattctctcttttcttgctgccatccacgtaagatgtgacttgctcttccttgcttttggccatgattgtgaagcctccccagccatgtggaactgtaagtccaataaccctcattcttttgtaaattgcccagtctcaggtatgtctttatcagcagcatgaaagcagactactacacttgtgtagtcattttgtgaggtcattttcctgggttatcttgacacttgtaattttttatctgtgtctgggcattgaaaagttaggtatttattgtagtctttgtagtatgagcttatttgtac

SEQ ID NO: 286973 - DNA, 503 bp, Homo sapiens
gaatgatattgtttggctctgtgtacccacccagatctcatattgaattgtactcccataattcccacatgttgtgggagggaaccagtgggagataattgaatcatggaggcagttctcccatactgttcccctgatagtgagtgagtgttcatgagatctgatggttttgtaagcatctggcatttctcctgctgatacattctctcttttcttgctgccatccacgtaagatgtgacttgctcttccttgcttttggccatgattgtgaagcctccccagccatgtggaactgtaagtccaataaccctcattcttttgtaaattgcccagtctcaggtatgtctttatcagcagcatgaaagcagactactacacttgtgtagtcattttrtgaggtcattttcctgggttatcttgacacttgtaattttttatctgtgtctgggcattgaaaagttaggtatttattgtagtctttgtagtatgagcttatttgtac

SEQ ID NO: 286974 - DNA, 576 bp, Homo sapiens
ttttttttcaacttttatcttaaaggggtacatgttcagctttgttagctgggtatattttgtgatgctgaggtttggagtacaaatgatcatgtcacctgggtactgagtgtacccagtagttcgtttttcatcccttgcctcactcctgacttcttcctctggtaatgttcagtgtctatttttgccatcattatgtccataaatatacactatttagctcccactttttataagtgagaatatgcagtatatggttttctcttcctgtgttagtttacatgggataatgtcattcagttgcatccatgttcctgcaaaggacactattttattctttttctatggctgcatagtattccatagtgtatatacaccacattatcttgccatggcctgctgtataaaattactgtcaaaataagagagtccatacatgatgaaaataataaaatgtccaacatagtgtattcacataaaaataacttacgaataaatattagctatcaacrtttttggctatcttacatgtcccccatactgtcatgcaactagctccagaacactgttcattaa

SEQ ID NO: 286975 - DNA, 602 bp, Homo sapiens
actgtttttctgttactacacacaaataatacattttagctgtcttctgactccactacccttacttcattcaaactatttttcacactctgatatagccttctccttgaaaagaactctcctttttttttggtctctttactcccttcttactttgaagatttatgccctgtacctggtcattacaaatactggcattttaagtcttatgcctagatccactttgatctattttctctttctagccaataataatttttkttgggtgaatcaatgtgtgaataagcatgtaaatgccacttagttccatatcttctaggtaatgagtcaatacaattttccttagaagctttccacttataaatatatttgttccttctttggtaaagtttttgttgttttgtcttacttcatactgaggatgtggtgtgaaatattgcctacaggtgcttatcatccacaaacttctaatgaaacccgcataatagttcaatcgttttaatattgacaataacttcgctaagcactttatatgtttctcatttaattatcaccacaacgtgctagttgtgtattaacaaccccaacttgaagatgaagac

SEQ ID NO: 286976 - DNA, 602 bp, Homo sapiens
actgtttttctgttactacacacaaataatacattttagctgtcttctgactccactacccttacttcattcaaactatttttcacactctgatatagccttctccttgaaaagaactctcctttttttttggtctctttactcccttcttactttgaagatttatgccctgtacctggtcattacaaatactggcattttaagtcttatgcctagatccactttgatctattttctctttctagccaataataatttttgttgggtgaatcaatgtgtgaataagcatgtaaatgccacttagttccatatcttctaggtaatgagtcaatacaattttccttagaagctttccacttataaatatatttgttccttctttggtaaagtttttgttgttttgtcttacttcatactgaggatgtggtgtgaaatattgcctacaggtgcttatcatccacaaacttctaatgaaacccgcataatagttcaatcgttttaatattgacaataacttcgctaagcactttatatrtttctcatttaattatcaccacaacgtgctagttgtgtattaacaaccccaacttgaagatgaagac

SEQ ID NO: 286977 - DNA, 574 bp, Homo sapiens
tactattgtttttctactttatataaaaaaaaattcaagagatcaagtacctgcccaacgtaaaacctgatacattttagatctttgattcattgtgtaatgtggcagacacggagatgccctccccagatccctcttcatagaaagatttgttgccccaagtgctgagagtgtggtcagcagacaccttccagctgacagcttcttcacagtttgtcttaggtaacagagctgccttgtccaaggaaacactcattctggagctgcccacatccagtgactaattaaggcaagtgtaaagtgtacaaggaacaggctatcccagcaacgacgggacaattttgacaggtcaaatatgctcctgctaaactgtttatctctaataaataccatgcatgctaattttcatttcagcatctgctttggggttgacaatctgcaataccaggcagattggatttttgaatccattgtttcaagccaccgtatttctcttactctttttccttcattcttttctrttttccattgcaggatgttgtacattattgggaaataaactctgagatacaga

SEQ ID NO: 286978 - DNA, 556 bp, Homo sapiens
actaagtctttgctggtagatgggatatcraaatgaatcaaatgtggccaatttctgctttagagatgtcatagttttggggagaagaaaaattgtagacaaatgactgcaatcaagttctatgtttaatgatggaaaatattgagataacaaagtgggcaaggtgcattacacttgggcaggggacatgaggtaggagtgacacgcccaatgagaaaaagtttcagagggtacaacatgtgcaagtaaaggcaaaatgatcacccttaacctttgctatggtggagattcctacattaataaaagttggaattatccactcttgcccaccctctgcattctccaaatccttttccttttccttgtagattttgttgctaactgaaataatcttgcccatctatttgctaatatccttattgtcttttcttcatcatgctggagtgggagaacaatgtttacaattctatccccagtgcgtaggtctctgcctggcacagtacaggtgctcaataaatgtcttttaagtgaaaggagaaaaatcaacctagattta

SEQ ID NO: 286979 - DNA, 1146 bp, Homo sapiens
actaagtctttgctggtagatgggatatcaaaatgaatcaaatgtggccaatttctgctttagagatgtcatagttttggggagaagaaaaattgtagacaaatgactgcaatcaagttctatgtttaatgatggaaaatattgagataamaaagtgggcaaggtgcattacacttgggcaggggacatgaggtaggagtgacacgcccaatgagaaaaagtttcagagggtacaacatgtgcaagtaaaggcaaaatgatcacccttaacctttgctatggtggagattcctacattaataaaagttggaattatccactcttgcccaccctctgcattctccaaatccttttccttttccttgtagattttgttgctaactgaaataatcttgcccatctatttgctaatatccttattgtcttttcttcatcatgctggagtgggagaacaatgtttacaattctatccccagtgcgtaggtctctgcctggcacagtacaggtgctcaataaatgtcttttaagtgaaaggagaaaaatcaacctagatttawtcatgcttgagttattcagctacttcagattcagtcactgtgtaaagttttgactcctcattatctgtcacaaatagtggctcctggccattttcaggaaccccctcagtgatgccatttctacttcccaccagacwaatgagcatatgttcaccaaggctccataagtgcagaaccttgcggctttaccctcagcccttaaaagacatcacatcatgggttttgccacagaaggataagcgtgatccatcttgttcagatcctcatcttcaaaattatcagacctaagatacgaaactacacaaaggaaagggatcccaaggtttagggatttggagtactttgatctgtcattatcaaagcaacaaatatccttctatctttagacaatataaattatacacatcttgattcagaaccagaggttttcaaaatttttctagacattgagattacttggggaatgtaaacaatacaaaactacagaaactatgccacgtccttattcaacatctctgggagtggggttgttaaaacctctccatgtaattcttacggatagccagggttgaaatgtagctttagccat

SEQ ID NO: 286980 - DNA, 565 bp, Homo sapiens
  misc_feature (1)...(565): n = A,T,C or G
nnnnnnnnnnnnnnnnnnnnttagataaattcaaaaaataaaatggttggttgtgtctgtastgaatatgtacaaactttcttcttgtgattattctctaaacaatacagtataacaactatttacatagcatttaaattgtattaggtattctaagtaatctagagatgtcttaaagtgtatgggaggatgggtaggttacatgcaaatattaccccattttatatagaggacttgagcatctgtgcatttggtatccaccacggggaccctggaaccaagacccctctcttttactttgcttactggctgctgtgacccttaggggctctcctacctgtttggcgggtccctcccagtctcctttgccatttcatcctttgctgtgcctcttaatgttggccagcgtccagggatctttcctgggtccctttctattctctctacacatgagccctggggctctctcccagtccctggttgtaaatgccagctataggcctatgacttcccagtctcaatctccagcctggaccacatccaagaaccccaggctcatagtttc

SEQ ID NO: 286981 - DNA, 296 bp, Homo sapiens
acagacagcttcagtagagaacaacacactcaamaaaagaaacgagtcaatgcagacagtggttgaatattagtttgtagaaacattgcaataaaaagtgcctcctaggaaagcttgctttatttatccactcgaatactagctatggggagggggaaggactgggtaggtcatgactagtgttcttaaacttactgttgaattgtttttttttaatgagaaaacaaatgttctcaaaacacaaaagtaaagacctggatacaatgaattattttattattcagaaattgacttat

SEQ ID NO: 286982 - DNA, 627 bp, Homo sapiens
tctcagcatgaagaaatacctaccgaaattcctatatgtaattcctatgcctgaaaatgtagcatggaaccacttctttggcaacatgctgaayatctccctgtgtggaatgccccaacacttatgtgtatgaatttctgttctcaatatataacaccaacaaagagagagaggctgcctggacccagaacttattataatgtagcattagcactctttttatcaacccaatttttaaaatatccaaaaatcatatcttttttcctcaatagcaaggaatataaaagcatttttctattaagacaaacaggcatacactactgtgcacaatgaaaatcccacacgcattcataagaatgtgtagacatctctagtctttctttgtactacttggggccacatttccagggttctcatccattcgagtctagagctaaggacacttaagagaaaaggcattgtacctcttgtttaagtagaatatgatggtactgacataatttaatccaactaaaatgtgaaattctggcaagagatacataaggctgctcttttctaaagtaaagaatcccaacaggacaaagggctagctctttccctcccccaccagagtctccatttaccatc

SEQ ID NO: 286983 - DNA, 627 bp, Homo sapiens
tctcagcatgaagaaatacctaccgaaattcctatatgtaattcctatgcctgaaaatgtagcatggaaccacttctttggcaacatgctgaatatctcccygtgtggaatgccccaacacttatgtgtatgaatttctgttctcaatatataacaccaacaaagagagagaggctgcctggacccagaacttattataatgtagcattagcactctttttatcaacccaatttttaaaatatccaaaaatcatatcttttttcctcaatagcaaggaatataaaagcatttttctattaagacaaacaggcatacactactgtgcacaatgaaaatcccacacgcattcataagaatgtgtagacatctctagtctttctttgtactacttggggccacatttccagggttctcatccattcgagtctagagctaaggacacttaagagaaaaggcattgtacctcttgtttaagtagaatatgatggtactgacataatttaatccaactaaaatgtgaaattctggcaagagatacataaggctgctcttttctaaagtaaagaatcccaacaggacaaagggctagctctttccctcccccaccagagtctccatttaccatc

SEQ ID NO: 286984 - DNA, 627 bp, Homo sapiens
tctcagcatgaagaaatacctaccgaaattcctatatgtaattcctatgcctgaaaatgtagcatggaaccacttctttggcaacatgctgaatatctccctgtgtggaatgccccaacacttatgtgtatgaatttctgttctcaatatataacaccaacaaagagagagaggctgcctggacccagaacttattataatgtagcattagcactctttttatcaacccaatttttaaaatatccaaaaatcatatcttttttcctcaatagcaaggaatataaaagcatttttctattaagacaaacaggcatacactactgtgcacaatgaaaatcccacacgcattcataagaatgtgtagacatctctagtctttctttgtactacttggggccacatttccagggttctcatccattcgagtctagagctaaggacacttaagagaaaaggcattgtacctcttgtttaagtagaatatgatggtactgacataatttaatccaactaaaatgtgaaattctggcaagagatacataagsctgctcttttctaaagtaaagaatcccaacaggacaaagggctagctctttccctcccccaccagagtctccatttaccatc

SEQ ID NO: 286985 - DNA, 1227 bp, Homo sapiens
aaaaacacatttgtttgtttttaaaggaaatgaatcagtcatggcttggatgcatggagggagaaattcttctgcaggccctcaggcaaatcgctgctctcagcttggtgggctgtgcttatgtaacttctcggtgactctgattcttctctgttgttctgtgacccagggcagaccatcctacccctgtgagtctctattcctgcatctgttgagtaggaacactagaatactgacaccccraccagccacacgatgacaactgagcaaggcagtctttgtagaaagctgagttcttggaagagagaaacaataggatcgggtctcagtatttaatattttgcagtgagtttaagctctatgcttggtttcaagtccttaaaatcattcctatttagtctaatctgctcattagatgttgaaatacaccctgaggcttttctttactaactacccagaatgacatgggttcaagtgccaggaaagaaacagctttttaaagaatcatttacacctgctagaataccctagaatagaggcaattttctccctcaatctttcctttctcatatcctacattttccagtggaaagacttacagaggtaggtaatawaaaaacacatttgtttgtttttaaaggaaatgaatcagtcatggcttggatgcatggagggagaaattcttctgcaggccctcaggcaaatcgctgctctcagcttggtgggctgtgcttatgtaacttctcggtgactctgattcttctctgttgttctgtgacccagggcagaccatcctacccctgtgagtctctattcctgcatctgttgagtaggaacactagaatactgacaccccgaccagccacacgatgacaactgagcaaggcagtctttgtagaaagctgagttcttggaagagagaaacaataggatcgggtctcagtatttaatattttgcagtgagtttaagctctatgcttggtttcaagtccttaaaatcattcctatttagtctaatctgctcattagatgttgaaatacaccctgaggcttttctttactaactacccagaatgacatgggttcaagtgccaggaaagaaacagctttttwaagaatcatttacacctgctagaataccctagaatagaggcaattttctccctcaatctttcctttctcatatcctacattttccagtggaaagacttacagaggtaggtaata

SEQ ID NO: 286986 - DNA, 609 bp, Homo sapiens
aagatctaaaaaagaattcttttttccctaactaatcaggaagcacatggcaaaatgtaaacttgttaaaaaatttagtctggtgtggtggacccatgcctgtgatcccagcactttgggaggctaaattgggagcatgtttgagtgcagaagttcaagaccaccgtgggcaacatagcaagaacccatctctacaaaaaataaaaataagctgagcatggtagtgcatgcctgtaggctgaggcagaaggattgtttgagtccaggagtttgaggttgtagtgagctatgatcatgccgctgcactccaacctggacaacacagtgagaccctgactcaagcaaaaacaaaaacgaaaaccaaaccaccttaatctcccaaggagcacacatttcttagtggctatttccggtaccacattaataagactggcttccttcccctctgctatctgctgaggcagggtgcaaaattccattcaaaggcaaatattcattgcagcgctccatgtgtgaggtgttgacagtaatgaggatacaaagaaaaatttgccataatagcctccctcagggacttatagsccaacacgagaaaaatgcataaacaaa

SEQ ID NO: 286987 - DNA, 1122 bp, Homo sapiens
ggagtggaaggaaagggggtcaattcttcatcttccagaataaggagttgatggagaaaatttaagttgatatatcaagaagcaggggtattaatgtgccatttagagttatagagagaatgaamgtaagaactacaagttaaaaatcactggctgtgattacatcttgagagacagacaaggatatacatgtctttgctgttctgatatttcttactctttgtttgtactttttataaccatgaaaaatgacaactgttaacaattcttgtgtatataaatgtgtgtgtgtgtatatatatatgaagtcaataagagaacaactttctataatcatgaaaaatgacaactgttaacaattcttgtgtatataaatgtgtgtgtgtatatatatatgaagtcaataagagaacaactttctataatcatgaaaaatgacaactgttaacaattcttgtgtatataaatgtgtgtgtatatatatatatatatgaagtcaataagagaacaactttctataatcatgaaaaatgacaactgttaacaattcttgtgtatataaaagtgtgtgtatawtgctttttaaaattaatgattcctgaagtctgacagtggaagaataagctaaaaagcaacccaggcattcaatgaaattattaagatcacaaattaagtcatttctatggactctatagcaggaaatatatttttaatgaggaaattgaagctaatatagaacagctgtcctgttacccagcaacagagtattaaggcagattaaattattaatgaaaaatatwctggctcagaaatttaacctcttaacatcctctcattcacttctctttaatacgcagtctttaaactgatattttaaaaaattcctttggtcaccatatacaattaacattgatagttggttctactactcactagctgtggcatcttcagcaagttattttacctctctttgcaactataaaatgaagagaagagcaaactcatggttaaggagatgaaatggagttagtagaaaaagtgctgagcacaggccaggtgcggtggctcacacttgtaatcccagcactttgggaggcagaggcaggcagatcacaaggtcaa

SEQ ID NO: 286988 - DNA, 546 bp, Homo sapiens
tatgtcttgagaaagaaatggaaaaggcacagtttgcagatcagagatgtgggagtcagtgtaggctagtggttcacgacatggaccctgaggccagctttctggggtttgaatcccagctctgctacttggctagtttggaaactttgggtaagttacccaatctttgtatgcctcagtttcttcaaacaggaccaggattaagatgaggccagtgaagcaactaggatgcaatatttaaggagataacagtcagggtcgtggaagtgctggtaggaacctgagagtaatgtcttcttaaatgttgcaccctaagaacctccctagctgcactccaagcccagttctggccttgtattcatttacaaataaacacaataatagtacctttgttatagatagttacaamgattaaatgacttaagagcaaatgacctaatgcttcacacagagtatgcatcatacaagtatttgcctttatgtaagaaaagctctagtttggctatttaatagctctaccaactttggcaaataatgcaccttcag

SEQ ID NO: 286989 - DNA, 570 bp, Homo sapiens
ttgtaaatgtaagtgggctatgtgaaatttcttaactgatcaaggttttggatgttcagttatggatgaaaactatctcaacttaactttacccycattatgatatgcagggtgggtagacaaaagctttttattagctaactatatgaaaggataaacactgtaataattcatgtgattcaaaatgggcaaaagcaaaagactagcttcccctcaagaagaaaaatttcagacctatgaaaaggacaacaatactaataaaaaaattgtatttacttagaagcattcagaatgtcaacaaaacagctgcaactttttttttttttttttgcaattacagagtggtattcagttaacagaacaacaattatttcgtataagctgcatcagagacaactgaagatgaaaaaactaccatccccatatataactaatttgtgctgtgcaccaacaagaacctgctttaaatttccatgccaatttacaacccccatactgtaccaagcaaggttagtggctattgaaaataccaccaggacagggctatctaaagacacattcggtagtgtg

SEQ ID NO: 286990 - DNA, 543 bp, Homo sapiens
cttgggtgcattgggatccttgaacttcttttttgtctcccctttgggagggatgtaggttttcatttctctttcataatgggccttgtccacctttgccatatcttgaaattttcctttgtctttagcagaaatggtcttccacctctctgagcacttcttagaaaactcttgagaagttgactgaagcatctgggtgcttcttcttatgctcctcccgacgtttgcacaaaaaatgcatatgatgacattttgcctctcagcttcttaggatctcctttgcccatgtttagttatttttcctcagcgaggcacagagtcgcccagtgcccgtccggctctcacttgccctggcgctgtctctgtggagctcaatgtactgccaaaacagtcatttttgtaattttatggattaactttcatagcaagarcctttttcctgtaaatggatcctgggttgttggtcgggaatggtatgttgactttggttctgggtggactcagtaacatggtctctgtacagatttttcaactgtaatcttc

SEQ ID NO: 286991 - DNA, 614 bp, Homo sapiens
ttcaatttttgctgacccgctgttttgtggcaaaatctactcacaatctttagcagacagctggggcataaagaattagaaaaccatttatggtaaattcttaagggacaacattattaatttgtgtacactgtagtttagtatgtatatgaaaactgctactaaaagacatcactttttttctcaatacaatggtgtgtccaactttagcatatggaagcatttctacagtgtaagttattctgaggaaaagacataatttgtaaatgctgtcaagtaaactatgcatttccaaatgctgctcaggtgacttgatacatctctgcaaaaactgtcccacaacagtgcaggaaaagaggacgctggtacagagtttaagtagctctttccagatgtttctgcccagaagtcgtcctcatgttcctgcaatatgaacagtatcacaaagaactattcaacttccattcttggcaattaattaaagatacytggcaaatgactacatttttaaaactttctgtggcttcatttgtggataaagtgaaaccaagagtaggaaaaaacttgagcaagactttaataaaacaataagttattagtaagggaaaatatgt

SEQ ID NO: 286992 - DNA, 612 bp, Homo sapiens
tagacattgcagaagaaaaaaacaagtgaacttgaagatattgcagtagaaactctccaaagtgaaatataaaaaggaaaaatagaatttaaaaaagatgaacagagcatcagtgaactctgagacaacttcaggttggctaatacatgggcaattagagtaccaaaaggagaagagatagggagacagaaaaaatatttgaagaaataatagaaaagtttccaaacttgatgaaaactatgaatccaagaatgtcaatgaactccaagcactagaagcatgaaaaaaaatggcatcaagtcacatcataatcaaattgctcaagaccactggtacagaaaaaaatttaaaaagcccttagaaaaaatagacatattacatatatgggaacaaagttaagaatgacagtagattctctgcctcctgtcattcatgcaagtgaagcaacatctttaaagtactaaaagaataaaattgttaacctaaaatttcatacccagcaaaaatatcttttaaaaatgaaggtamaataaagacattttcagacatacaaatgctacactacacctgccccataagaattgttgaaggaagttctttaggcagaaggaa

SEQ ID NO: 286993 - DNA, 609 bp, Homo sapiens
gggcaatgatttcccctgggcagtagacccagtgaggctcagttgaagcagactcatttgtcatttcttaccctttcatactgctgtgtaagcagagtcaaaaagagaaaccaaatcagtaatcttaacgcctaaatatgcagacatttcaatttggacataaaatgcccacttataaatacactgtaagccccaaagaccagagggacagaaatagctcaaggacaaaatattcctctgaactgtctcatcaagaacagaaaagtcatatactcccagaaagattttagatcagcacagaccagcatcaagctcatrccgaggcggaagcttcttagagtctgaatatgcttgaatctcatagcctgtgggaagaagaacaatgactttatgatgtccagtccaatcttttcagtgatgacaaacaccccagtgcgcattcccagtaggctaagagcatccccatctgtcaggtacccaagtaaggaatctcacacacttctgacttccctctccactggatttgtctttctatgcacagccctggtcattactctctatttgaaagacccacctggctcatttctgcctagaaaataaagttcaaac

SEQ ID NO: 286994 - DNA, 609 bp, Homo sapiens
gggcaatgatttcccctgggcagtagacccagtgaggctcagttgaagcagactcatttgtcatttcttaccctttcatactgctgtgtaagcagagtcaaaaagagaaaccaaatcagtaatcttaacgcctaaatatgcagacatttcaatttggacataaaatgcccacttataaatacactgtaagccccaaagaccagagggacagaaatagctcaaggacaaaatattcctctgaactgtctcatcaagaacagaaaagtcatatactcccagaaagattttagatcagcacagaccagcatcaagctcataccgaggcggaagcttcttagagtctgaatatgcttgaatctcatagcctgtgggaagaagaacaatgactttatgatgtccagtccaatcttttcagtgatgacaaacaccccagtgcrcattcccagtaggctaagagcatccccatctgtcaggtacccaagtaaggaatctcacacacttctgacttccctctccactggatttgtctttctatgcacagccctggtcattactctctatttgaaagacccacctggctcatttctgcctagaaaataaagttcaaac

SEQ ID NO: 286995 - DNA, 600 bp, Homo sapiens
tggtatttctctcatatgctggatgtttctcccactctcaatttctatatcactgcctatgtacccacttactctatatcacttctatttctttctttattataagtatgaagcatcgcaagcataattatcaatcatgataataagaagaggcatagctttcttccttgcattagaggaagttatttagatgcaggtctgtcaccttcagttaattaaagccaggagagatctctactcgagtttacctatccataaaaataattagcacagtgtacggtcagccatatccatgagttctgcatctgtggattcaaccaactaygaatcaaaaatattgtgaaaaaaatggatggttgcctcaatattgaacatgcatagacttttttcttgtcattattccctaaacaatacagtacaactatttacaaagtatttacattgtatcagtatcatatataatttagggatgatttaaagtataggaagatgtgtgtatgttatacacaaatactacaccattttataaaagaggacttgtacatcctcagattttggtatctgcaggggagtcctggaatcaatatcaatccccactgc

SEQ ID NO: 286996 - DNA, 583 bp, Homo sapiens
acatctgaaaagaccctttttccaaataagttagcatttacagcctccaggactagggcctgctatctttgaggactgagtgggagagggcagggaattattcaacctactacagaggaaaccatcgacaaacatcagctgtcattgctcttgttactattaatagagacaagacaaaaggactacacatccagaaaagggcttatggattgcaagcaagtgaggacctaaaaaaccttgagggatgtgagcactttatcctgagaaccaacaggcaggccatgtgtataacaggtcaaccacagcgggtattccctaaacctcacgtaaattacccgtgtccacattgtgggctcggggtggcaatgagaagagcaaggatgttagagtcagggaaccctgcactcaaatcccattccgtcccttcctggagcaggatgctggggacttctttaccttagttcagtgtcctctgtaaactggggctggttgaggytcaaatagtacatgtcaatgatgtggcacatagtaggtcctgcaaaaatggctgtgattactatgactgaatcaacaatatgtgcag

SEQ ID NO: 286997 - DNA, 337 bp, Homo sapiens
cctgcttcatgtgggacagaatttagactagaatttagagaagatggggcggacaatgagagacagcctggtgggaaccaggctgcttgcatttaaatccaggccccacacctcactggctgtgtgactcctccatgcctcagtttgctctcatgaaaaatctgtaaaactacagtgtttaccttattggttgttgtgaagattaaatgagttcacatgtggaacatgtttaaagtagtgcctggcaaaggtaagggctctgaacatgtctgcygtggctactattccatgcaaggggaatggcatgaacaaagtcaaacagaagcagatggcctct

SEQ ID NO: 286998 - DNA, 569 bp, Homo sapiens
cattgatgggcatttaggttgattccatgtctttactattgtgaatagtgccaatgaaagaacatacatgcatatgttcataatgcatgcatgtgtctttataatagaatgatttatattcctttgggtatgtaccmagaaatgggattgctgggctgaatggtatttctgtctctaagtctttgaggaattgccacagtgtcttccacaatgggtgaactaatttacactcccaccaacagtgtataagtgttcctttttctccacaaccttgccagcatcttgttatttttgacttaatgatagccagccatacagactcaggttcttaaagcttcaattagaattgatccacattgtttctgctcacatctcattggccaaagcaagtcacaaatcacacctaacttccaagggggaagggaggtaccctcccactatgtgctcaaaggaggagaaatggaatatctgtggctggccctagtgactagcaggcaggaagctccagtgaaattccctgaatgccttcctcgttaagtccaggtgacttttattaggttgtttgcaag

SEQ ID NO: 286999 - DNA, 546 bp, Homo sapiens
ggtttgagtttttattctgccacttactgtataatttgaagagaattatttaacttccacacaccttagtttcctatgcaaagtagaaataataccacttatttcagaggctgctgagaaaatgacctaataatgtgtaatgtactataaaagtatctggcatagccagcactcagtacaagttagcatcatttcattcaacaaatagttattaggtaccaagttactaggtaccaagtatgtatcggctactgtttgaagtggtgctgtgctggagttactaaacaaaacagacacaagtctctatttttgtgtaacagacatgcaggcaaaggatgacattaagttaagtttcaattaaagggaagattgtggacaagaaggaagatacactccaagcaagtccctcaatcttagaatagcttcttgggcctgctcccctattaaactgtgataagcactccacctgtctgctyatctgcaaagcaaaactgggtcttggaaaggactggtagactggtcttcatttttagcttacgctaataa

SEQ ID NO: 287000 - DNA, 585 bp, Homo sapiens
ggaaacaggctcacaaaaggtaggatcttgaccaaggtcacacacacacatatcaagtggcgtcacgtaactctttggggaagcgggggggtcgggggagacggagtttcgctcttgccacgggctggagtgcaatggcgcgatctcggctcactgcaacctcctccccccgggttcaagcgattctcctgccttggcctcccgagtagctgggattacaggcatgcgccaccaagccaggctaattttgttatttttrgtagaaacgggatttctccatgttgatcaggctggtctcgaactcctgacctccggtgatccgcccgcctcggcctcccaaatcgctgggattacaggcctgaggcaccacgcccggtccacaataccaagaactttctagcgaggcagaatagttgacgctgcagtccaattagagaaaaaaggctgaaatattaagattaaaactaaagtaacgacccaaaaacccatccttcccccaaacacggtcatttagatggcaagcaactccactgctttacatcccaatgcatttcctccgacttaaaatataactgaagagaatta

SEQ ID NO: 287001 - DNA, 583 bp, Homo sapiens
tgaaaatgcaagaaaacatgtcacctacaaagggaaatagtaattrtccagtaatagaacccaatcataaacatatgaaatggcagaaaaaagaataatcttaaggaaactcagtgagatgtaaggtaatacagatagacaagtcaatgaaatcaggaaaacatgatttgaaagagaaatttactaaagatacagatatcataaaaataaccaaacagaagccctaagagctaaacagttcaatggatgaaacgaaaaaatacaatcaatggctttacagacaagaataagcagaagaaataatttctgaacttgaagacaagtcttttgaaataacaggcaggcaaaaaaggataaaaaagaatgaaaaaagcctacaggatttatgggacaccattaatttgatcaaatattcatattatgggcattccagaaggaaaagtgtagagaaaatatgaggaaaacatatttaataaaatagcatgaaacttcctaactcttgagagaaagctagacatctagttccaggaagatcaaagaaccccaaatacattcaacccagacattatagtcaaattgtgaa

SEQ ID NO: 287002 - DNA, 583 bp, Homo sapiens
tgaaaatgcaagaaaacatgtcacctacaaagggaaatagtaattatccagtaatagaacccaatcataaacatatgaaatggcagaaaaaagaataatcttaaggaaactcagtgagatgtaaggtaatacagatagacaagtcaatgaaatcaggaaaacatgatttgaaagagaaatttactaaagatacagatatcataaaaataaccaaacagaagccctaagagctaaacagttcaatggatgaaaygaaaaaatacaatcaatggctttacagacaagaataagcagaagaaataatttctgaacttgaagacaagtcttttgaaataacaggcaggcaaaaaaggataaaaaagaatgaaaaaagcctacaggatttatgggacaccattaatttgatcaaatattcatattatgggcattccagaaggaaaagtgtagagaaaatatgaggaaaacatatttaataaaatagcatgaaacttcctaactcttgagagaaagctagacatctagttccaggaagatcaaagaaccccaaatacattcaacccagacattatagtcaaattgtgaa

SEQ ID NO: 287003 - DNA, 583 bp, Homo sapiens
tgaaaatgcaagaaaacatgtcacctacaaagggaaatagtaattatccagtaatagaacccaatcataaacatatgaaatggcagaaaaaagaataatcttaaggaaactcagtgagatgtaaggtaatacagatagacaagtcaatgaaatcaggaaaacatgatttgaaagagaaatttactaaagatacagatatcataaaaataaccaaacagaagccctaagagctaaacagttcaatggatgaaacgaaaaaatacaatcaatggctttacagacaagaataagcagaagaaataatttctgaacttgaagacaagtcttttgaaataacaggcaggcaaaaaaggataraaaagaatgaaaaaagcctacaggatttatgggacaccattaatttgatcaaatattcatattatgggcattccagaaggaaaagtgtagagaaaatatgaggaaaacatatttaataaaatagcatgaaacttcctaactcttgagagaaagctagacatctagttccaggaagatcaaagaaccccaaatacattcaacccagacattatagtcaaattgtgaa

SEQ ID NO: 287004 - DNA, 597 bp, Homo sapiens
ttgtaaaggaaataatttcattttgctgaaattgttcataaattaccaattttaaataggattagagaccaaagtactataaaaatataatcatatagcatatttgagtgtcattaactagaaactgcctgaattcatcctaaatcagttaaggtcagttaagggatcttagtaagaacttaaagtataacatactagttttagtttcaatattaacagatactgtcatctgcaaagtggtttttaaaaacatcctgatctgaaaaaaagttataaggaaagtgaatttttaaaaactttaattaagcaagaytaagcattgctatccatttctcctattactactacttaaccagtacaaccttaaatatctgtaaaaatttgacaggcctaactgcaccaaaaaaaaaagatttcagcaaattaattaactgttaataaactgttctatctttacctgcactaactctctgcaatgaaaacactgaacgtgtgtatacacacatctatctatatatatatacacacacaaataactatacccactactagaccagtacaccataccactttttccaatgagcgctctgaattaaa

SEQ ID NO: 287005 - DNA, 597 bp, Homo sapiens
ttgtaaaggaaataatttcattttgctgaaattgttcataaattaccaattttaaataggattagagaccaaagtactataaaaatataatcatatagcatatttgagtgtcattaactagaaactgcctgaattcatcctaaatcagttaaggtcagttaagggatcttagtaagaacttaaagtataacatactagttttagtttcaatattaacagatactgtcatctgcaaagtggtttttaaaaacatcctgatctgaaaaaaagttataaggaaagtgaatttttaaaaactttaattaagcaagactaagcattgctatccrtttctcctattactactacttaaccagtacaaccttaaatatctgtaaaaatttgacaggcctaactgcaccaaaaaaaaaagatttcagcaaattaattaactgttaataaactgttctatctttacctgcactaactctctgcaatgaaaacactgaacgtgtgtatacacacatctatctatatatatatacacacacaaataactatacccactactagaccagtacaccataccactttttccaatgagcgctctgaattaaa

SEQ ID NO: 287006 - DNA, 597 bp, Homo sapiens
ttgtaaaggaaataatttcattttgctgaaattgttcataaattaccaattttaaataggattagagaccaaagtactataaaaatataatcatatagcatatttgagtgtcattaactagaaactgcctgaattcatcctaaatcagttaaggtcagttaagggatcttagtaagaacttaaagtataacatactagttttagtttcaatattaacagatactgtcatctgcaaagtggtttttaaaaacatcctgatctgaaaaaaagttataaggaaagtgaatttttaaaaactttaattaagcaagactaagcattgctatccatttctcctattactactacttaaccagtacaaccttaaatatctgtaaaaatttgacaggcctaactgcaccaaaaaaaaaagatttcagcaaattaattaactgttaataaactgttctatctttacctgcactaactctctgyaatgaaaacactgaacgtgtgtatacacacatctatctatatatatatacacacacaaataactatacccactactagaccagtacaccataccactttttccaatgagcgctctgaattaaa

SEQ ID NO: 287007 - DNA, 573 bp, Homo sapiens
ctacttcctccttctgtaggcaaataaagacaattctaaaggactagctttcctcatcatgccaaataattaaaattccaaacagattattaatcctattctaacaattaaaataaatgataaatctgcyttgtaactactgacaactgtattttaaataacttacggcctcttgaatttaaatataaccgattaaaaatggcagcaacatcagggttaagaaacaaaatgaaacactattagtctccagaatattgaacaaaacaatatctaaaataaatatgacttctcagaaggaaaaaagttatctaccattaaggacataccttaaaagttcttagcacacattaagtaagcacaaactagtggcttgcctgttatattttcagacaaaaagcaatgaggttattcctctgcacttgtcactgcagacacataaaggcttttagaaactacatctattactcattgtctaagtatcataaaacttagcattttaagtcttgtttgatatcaatcaagaaacaacatccacttcaggggaaagaagtacagtaaaataagaacattgta

SEQ ID NO: 287008 - DNA, 573 bp, Homo sapiens
ctacttcctccttctgtaggcaaataaagacaattctaaaggactagctttcctcatcatgccaaataattaaaattccaaacagattattaatcctattctaacaattaaaataaatgataaatctgctttgtaactactgacaactgtattttaaataacttacggcctcttgaatttaaatataaccgattaaaaatggcagcaacatcagggttaagaaacaaaatgaaacactattagtctccagaatattgaacaaaacaatatctaaaataaatatgacttctcagaaggaaaaaagttatctaccattaaggacataccttaaaagttcttagcacacattaagtaagcacaaactagtggcttgcctgttatattttcagacaaaaagcaatgaggttattcctctgcacttgtcactgcagacacataaaggcttttagaaactacatctattactcattgtctaagtatcataaaacttagcattttaagtcttgtttgatatcaatcaagaaasaacatccacttcaggggaaagaagtacagtaaaataagaacattgta

SEQ ID NO: 287009 - DNA, 575 bp, Homo sapiens
tctctacatgttcttgtctgttgggagagaagaagcccttcagacttaacamgaatgcccataagtaaagagaagcaaaagagaagatgacaaggaaaatcagaaagatggaacaggctcctttcttttctttctttctcatacttgagtcctgtttagaaccttatcatattctgccttgataattgagggcagggaccattcatctaacacagctgttggtacccaatatgattttgttgaattattaatgaaaaacttacaattttaaacatcagtgattattagtttgtaattctaactgcatttggagcttttcagttacataaactgttcctggtcagaagctggaaatggggaatgtgaacatgagttgtcactaaatatgtaaaacagattttcttacatgtgcatgtagatgattaagtaacaagaatgtatcctctcctgccactgtaatttgggtgtgccaccatacattgcttatgaaatattgtccagtctatataaaagaagctagagagagaattctcaattattttcagaaagaaaacctaccagtttatgtaggaact

SEQ ID NO: 287010 - DNA, 477 bp, Homo sapiens
acatataaataaaactcttagcggatagatcagtgaatataatcatctttcaattttaaaagctacaacataataaggcgcttttttttttttgagggaggcagcgaaacagtaacaaatcatgatgctataatgtgaacaaagtggtagctttggagggcacagggggaaaacaagcacaaccgtttttgctcaraaaataattcagtagcaacaaggtctgagagccaggaatctccttgttcttactgaaacgattatttgtcaaaatatttgattgtttccctattccccctgaaaagtttggacttttctttttgctcgattttgacactggaatttttaactgtcagtgctattgtgtttacagcattcaagttctcagagttcaaaggttatccattaacatgtagaatgaggctacacttaaaggctcaacctggttgcacttgttcatagtttctttgttgtgtagca

SEQ ID NO: 287011 - DNA, 477 bp, Homo sapiens
acatataaataaaactcttagcggatagatcagtgaatataatcatctttcaattttaaaagctacaacataataaggcgcttttttttttttgagggaggcagcgaaacagtaacaaatcatgatgctataatgtgaacaaagtggtagctttggagggcacagggggaaaacaagcacaaccgtttttgctcagaaaataattcagtagcaacaaggtctgagagccaggaatcyccttgttcttactgaaacgattatttgtcaaaatatttgattgtttccctattccccctgaaaagtttggacttttctttttgctcgattttgacactggaatttttaactgtcagtgctattgtgtttacagcattcaagttctcagagttcaaaggttatccattaacatgtagaatgaggctacacttaaaggctcaacctggttgcacttgttcatagtttctttgttgtgtagca

SEQ ID NO: 287012 - DNA, 557 bp, Homo sapiens
ggcgaggaggttccttgcaatgaggagagtccagggctcacccccagcagcctcttggtgactygtcacttctaaaacccaggcctgaggggcatttgttttgccatcctttgatggagttcacactctcacacaggcgggtacatattaaggccgtgaagacttggctccgactccagtggcctctcataaggcaggctggctggagggtgcagatgcctcggacataccacctccatgaacacattcccagatgtgcacgggctgcagctggaacacatttctggcctttttgtttggggcctgactgggagttacacagccaggagccagctgacggaaagcagaggggatgcattgtgagaggccagggctccccagtaactgctgagcgtgggtgaggaactgcaagggtcaggagaggaaagcaggcctgggacaagggcaaggaactatggggcgtgcgtggcccaggccgcagctgagcagaacatttttatgtctccccagagctccggccaacccagaatctgactcgtttctggggattcaaaagt

SEQ ID NO: 287013 - DNA, 557 bp, Homo sapiens
ggcgaggaggttccttgcaatgaggagagtccagggctcacccccagcagcctcttggtgactcgtcacttctaaaacccaggcctgaggggcatttgttttgccatcctttgatggagttcacactctcacacaggcgggtacatattaaggccrtgaagacttggctccgactccagtggcctctcataaggcaggctggctggagggtgcagatgcctcggacataccacctccatgaacacattcccagatgtgcacgggctgcagctggaacacatttctggcctttttgtttggggcctgactgggagttacacagccaggagccagctgacggaaagcagaggggatgcattgtgagaggccagggctccccagtaactgctgagcgtgggtgaggaactgcaagggtcaggagaggaaagcaggcctgggacaagggcaaggaactatggggcgtgcgtggcccaggccgcagctgagcagaacatttttatgtctccccagagctccggccaacccagaatctgactcgtttctggggattcaaaagt

SEQ ID NO: 287014 - DNA, 448 bp, Homo sapiens
agaaggctccttctccccaggggtcctggcaggaggcgggtggcgggggtgggcagcagggagaagccataatcatcctggaggagctgagacagctgattgtccttgtcctgtccccttgcctgggcaatagccacagcccccagggaaggtggcctacagccttgtggaattacacgcccacggggccgactctggggctgggcaagcattgggtctctggagtgacagccaagaataggggaccactgcttccagggagcaccaaaccacaccctcttgggggtccagcaggcggccctggatgctcagtgctrcacactcgctccccagcctgacttctggtgagggttctggttcccatccccatcctgaaggcccttggttttgggggctcatcattcccggagtatgagcccaggtttgtgaccctgtctgccatgagcat

SEQ ID NO: 287015 - DNA, 448 bp, Homo sapiens
agaaggctccttctccccaggggtcctggcaggaggcgggtggcgggggtgggcagcagggagaagccataatcatcctggaggagctgagacagctgattgtccttgtcctgtccccttgcctgggcaatagccacagcccccagggaaggtggcctacagccttgtggaattacacgcccacggggccgactctggggctgggcaagcattgggtctctggagtgacagccaagaataggggaccactgcttccagggagcaccaaaccacaccctcttgggggtccagcaggcggccctggatgctcagtgctgcacactcgctccccagcctgacttctggtgagggttctggttcccatccccatcctgaaggcccttggttttgggggctcatcattcccggartatgagcccaggtttgtgaccctgtctgccatgagcat

SEQ ID NO: 287016 - DNA, 477 bp, Homo sapiens
  misc_feature (1)...(477): n = A,T,C or G
gatatactgnctattccagcatgaaccctgtcttctgattccctccaccccgcaaaaagcanagctggacatacagcccaatggatccttytcaaactgatgtgataaaagcaatatcactttatttcaggaaagccttgatcttattaacatcataccagcctgcctgtaatgatcctgattttgttatggtttgatgggaaaatgacagacttgagaagcaaaaatcagaaacagaggagggcacgaatatcaaacagcctcaaggctgaggatctttctatgtcactcattatggatgatctgagataatggagtcaagaatattctaatctaatctgcaactgggactaaattagacaggccttctctaaggtacaggagaattggaatacaattttaagagacctcagaaaattaggatgaagggaattgttgcagaaagaggaggacactccatataagctgggatataag

SEQ ID NO: 287017 - DNA, 581 bp, Homo sapiens
tttacttactagtaaagttatctactgggaatgaaacagatcatctcagaaaagatacttacagatctctggcaacttatttgaacyagcaactgaaaacaagcgtgacttttatggaggcaatttttcaactctactcagaaacaggtgtatctccacctgaacaatccccaataggcaatactttcataaaataatgataaatgccaaacctaatcacagattctaggtaagatttaggagtacttcttagaagagatcgaacaccctaggagtattcatttcactttttacatttagaatactatgtactcctctattcccatctgctatcaataaagatatagacatactcaattataattgcatgttaaaaaatattatgtcttaacacagtatacaattatacaaattgtgactatgccacagaggaaatgagtgtatatctggttttttattagcttacgtgagttcctggagggcttgttttgatctctgcagatctggcaaataatgagaaagcaatccttctgccagttgctccactgctttgtcttctatagtcaagtcctctattaacc

SEQ ID NO: 287018 - DNA, 581 bp, Homo sapiens
tttacttactagtaaagttatctactgggaatgaaacagatcatctcagaaaagatacttacagatctctggcaacttatttgaaccagcaactgaaaacaagcgtgacttttatggaggcaatttttcaactctactcagaaacaggtgtatctccacctgaacaatccccaataggcaatactttcataaaataatgataaatgccaaacctaatcacagattctaggtaagatttaggagtacttcttagaagagatcraacaccctaggagtattcatttcactttttacatttagaatactatgtactcctctattcccatctgctatcaataaagatatagacatactcaattataattgcatgttaaaaaatattatgtcttaacacagtatacaattatacaaattgtgactatgccacagaggaaatgagtgtatatctggttttttattagcttacgtgagttcctggagggcttgttttgatctctgcagatctggcaaataatgagaaagcaatccttctgccagttgctccactgctttgtcttctatagtcaagtcctctattaacc

SEQ ID NO: 287019 - DNA, 581 bp, Homo sapiens
tttacttactagtaaagttatctactgggaatgaaacagatcatctcagaaaagatacttacagatctctggcaacttatttgaaccagcaactgaaaacaagcgtgacttttatggaggcaatttttcaactctactcagaaacaggtgtatctccacctgaacaatccccaataggcaatactttcataaaataatgataaatgccaaacctaatcacagattctaggtaagatttaggagtacttcttagaagagatcgaacaccctaggagtattcatttcactttttacatttagaatactatgtactcctctattcccatctgctatcaataaagatatagacatactcaattataattgcatgttaaaaaatattatgtcttaacacagtatacaattatacaaattrtgactatgccacagaggaaatgagtgtatatctggttttttattagcttacgtgagttcctggagggcttgttttgatctctgcagatctggcaaataatgagaaagcaatccttctgccagttgctccactgctttgtcttctatagtcaagtcctctattaacc

SEQ ID NO: 287020 - DNA, 471 bp, Homo sapiens
catgatgtaaacattttttatttattttattttattgtttttttcagacagagtctcactctgtcacccaggttggagtgcagtggcatgatctcagcttactgcaacctctgcctcctgggttcaagcaattctcatggctcagcctccctagtagctgggattrcaggcacacaccaccacgcctggctaaaaatttttgtatttttagtagagacagggtttcaccatgttggccagggtggtcttgaactgctgacctcaggtgatccacctgtcttggcctcccaaagtgctgggattaccggtgtgaaccaccacgcctggtctatatattgtttatgaacataattttaaaagacttcagaaatcatcttgtgttccatattttagttaacctttccccagtgttttgatatttgcattgctctctgcccccatattaaagtggtgacctgagccttccctggc

SEQ ID NO: 287021 - DNA, 471 bp, Homo sapiens
catgatgtaaacattttttatttattttattttattgtttttttcagacagagtctcactctgtcacccaggttggagtgcagtggcatgatctcagcttactgcaacctctgcctcctgggttcaagcaattctcatggctcagcctccctagtagctgggattacaggcacacaccaccaygcctggctaaaaatttttgtatttttagtagagacagggtttcaccatgttggccagggtggtcttgaactgctgacctcaggtgatccacctgtcttggcctcccaaagtgctgggattaccggtgtgaaccaccacgcctggtctatatattgtttatgaacataattttaaaagacttcagaaatcatcttgtgttccatattttagttaacctttccccagtgttttgatatttgcattgctctctgcccccatattaaagtggtgacctgagccttccctggc

SEQ ID NO: 287022 - DNA, 471 bp, Homo sapiens
catgatgtaaacattttttatttattttattttattgtttttttcagacagagtctcactctgtcacccaggttggagtgcagtggcatgatctcagcttactgcaacctctgcctcctgggttcaagcaattctcatggctcagcctccctagtagctgggattacaggcacacaccaccacgcctggctaaaaatttttgtatttttagtagagacagggtttcaccatgttggccagggtggtcttgaactgctgacctcaggtgatccacctgycttggcctcccaaagtgctgggattaccggtgtgaaccaccacgcctggtctatatattgtttatgaacataattttaaaagacttcagaaatcatcttgtgttccatattttagttaacctttccccagtgttttgatatttgcattgctctctgcccccatattaaagtggtgacctgagccttccctggc

SEQ ID NO: 287023 - DNA, 495 bp, Homo sapiens
taaaatttggcttctggttttgcaggaatctacctatcctagcaccagttggctagggtgggacagggtcagggtttgcgatctggcaggtaggtttccctggagaataaagaatgtgcctccatcacctaccaatgatgtgttctgggragaagctggctggtagcccttctgtaccttgtcagattctaacagggctccccactccctggggtaaactcagttctccaactctggccaagcattgccctggttggggccctgcagtggagcagacattgagattactggcaaatcaaactttgggtgatcttgccctagggaaccagcctgtgcttaacccctgctgagaagtgggataatgcagccaaacatgatcctcagcccacgtgggttgtgctcaagtgctgaaggcaaatcctgggcagagaggctagagagccaaggggcctgtgagtgaagaggagataggcccctgtggatgctcagccatgg

SEQ ID NO: 287024 - DNA, 573 bp, Homo sapiens
aaaaatttggatggggtccaattgggttggagccatgcaaaggtatttggacttcacccttttaagtgacaaagttccatagacacacagtaggtccccagctaaccatgaatggatgcagcaaacaaatgaatccttagagacttagcaggaggctgctactgctacttaagtctccacgatgggaaaaagcagctcgttattgttaatgycaacacctcagataatatgctttttatctctgctcctaatggtaatgtagataaattccataaatcaaatctcagcagtaaaaaggttaataagtttacgctgtgtaattgaaagccatattggtgattaaaaggattttatatatcagttttctgggtcaccaactaattattttcaatggccggtaataaaacacagcaccatgcctggctagacactgcaaactgtcagatgttaaattgtgtaggaagtacttgagcaggttaccttaagttggttggtctttccctcgggatgtgaagtcattgaaatctctgctgtttgttttgtgccaagcttatatgatgcttgaggtcccct

SEQ ID NO: 287025 - DNA, 597 bp, Homo sapiens
tcaaattataaggctaaaatttatagcaataatatagggttttctttttaaatatattacttccaattccatcaatataacacagtagtttcagttttacatgttcttttataagctctgatcatagttttacatagtcacagtgagcacaattttgtattctgcttttttggtgaactttgcacaccaaagattttccatgttgttacacgttatggctgtaggctgtttgttgagttttttgtcccatattttacttataaattttattatttttaggtgacttataaattgtcttcaattttttcatataataatgtgaaaatgaatatgtttatttccatgartcttgtttcttcagttatttctttaaattatggtcccagaagtctgatttctgagccaagtccactgttgtctttcttagtgtataatttgtattgccatataatttttcaacagcatttagattttacaggggaaaacaaagaaattggagccaaaataattcttacatataggacaccttatttcaaatttaaatggcagtgggggaagtattcatctttaaaatttgatttatttatgagattgttc

SEQ ID NO: 287026 - DNA, 597 bp, Homo sapiens
tcaaattataaggctaaaatttatagcaataatatagggttttctttttaaatatattacttccaattccatcaatataacacagtagtttcagttttacatgttcttttataagctctgatcatagttttacatagtcacagtgagcacaattttgtattctgcttttttggtgaactttgcacaccaaagattttccatgttgttacacgttatggctgtaggctgtttgttgagttttttgtcccatattttacttataaattttattatttttaggtgacttataaattgtcttcaattttttcatataataatgtgaaaatgaatatgtttatttccatgaatcttgtttcttcagttatttctttaaattatggtcccagaagtctgatttctgagccaagtccactgttrtctttcttagtgtataatttgtattgccatataatttttcaacagcatttagattttacaggggaaaacaaagaaattggagccaaaataattcttacatataggacaccttatttcaaatttaaatggcagtgggggaagtattcatctttaaaatttgatttatttatgagattgttc

SEQ ID NO: 287027 - DNA, 597 bp, Homo sapiens
tcaaattataaggctaaaatttatagcaataatatagggttttctttttaaatatattacttccaattccatcaatataacacagtagtttcagttttacatgttcttttataagctctgatcatagttttacatagtcacagtgagcacaattttgtattctgcttttttggtgaactttgcacaccaaagattttccatgttgttacacgttatggctgtaggctgtttgttgagttttttgtcccatattttacttataaattttattatttttaggtgacttataaattgtcttcaattttttcatataataatgtgaaaatgaatatgtttatttccatgaatcttgtttcttcagttatttctttaaattatggtcccagaagtctgatttctgagccaagtccactgttgtctttcttagtgtataatttgtattgccatataatttttcaacagcatttagattttacaggggaaaacaaagaaattggagccaaaakaattcttacatataggacaccttatttcaaatttaaatggcagtgggggaagtattcatctttaaaatttgatttatttatgagattgttc

SEQ ID NO: 287028 - DNA, 448 bp, Homo sapiens
tattttcttttcacttgcaatagagccctgtggttacaccaactactttttctctctgcagtttattttgcaaaccagaggaacaattatactttatgaattttttttaaccaagagaatatttttgacacttctgatgataacccaatagtcatgtcagttgcaaatttaaatcggaacccactatatacatagcaagtatttgacactaaaacattattttttaaaaaattaatatcatacctctaaaaaagaactacaatcttctgtttcaattgtggatatgtttaaccatgmccagcaccttctagaccactcaggaattaaacagatgccaatgaaaattcaaagccatacttcacatttctgtgatgcattttcactgagacatttaaggccatctttaaaaaaatagtaatggcaaaagaaggacctgaggccccaagag

SEQ ID NO: 287029 - DNA, 448 bp, Homo sapiens
tattttcttttcacttgcaatagagccctgtggttacaccaactactttttctctctgcagtttattttgcaaaccagaggaacaattatactttatgaattttttttaaccaagagaatatttttgacacttctgatgataacccaatagtcatgtcagttgcaaatttaaatcggaacccactatatacatagcaagtatttgacactaaaacattattttttaaaaaattaatatcatacctctaaaaaagaactacaatcttctgtttcaattgtggatatgtttaaccatgcccagcaccttctagaccactcaggaattaaacagatgccaatgaaaattcaaagccatacttcacatttctgtgatgcattttcactgagacatttaargccatctttaaaaaaatagtaatggcaaaagaaggacctgaggccccaagag

SEQ ID NO: 287030 - DNA, 571 bp, Homo sapiens
ccaaagaaggggcagttgtctagacaggtagtctagatagagggcatcactgagcatcacttttgtgccctgtattttgaaacatacagcatcctggcaggaaacaggattgggttagatgtttccatgaagagactgccaagaaagaactacttgcagaggaatgagagtgttaagggaccagacaaggaatgttgaggcatcctgagaccagcaacaatggggagctgttgccatttggggctgagacagaaaatggcataacatactttcatctctaaacaaggggtaaagaaaaaagaaagacagaggccccaaaagccttcattttcctaaattgagtcaatgactgaattagtaattaaacaaatattccttatatatgggtcattgtctctctataaaagaattccattagcatttccctccaaaccaacattttgaaacataaaactyattctcaacctagataaataaaatggaagtaaaaagccaaagtgtgaccattgggaggtcaacatcttaaaagcaaatcttagctattatagagcctggtgggagccggaacgct

SEQ ID NO: 287031 - DNA, 624 bp, Homo sapiens
tccttatgaggaatggagtctgaaagaagctaagtatctcaccaggtaataccataatggggccagaattcaaatccaagagtctgagatcttaattaygtcaccattttatgcctttcccaacgaatgtttcactggtccctgaagctgtctgtggagagcagagtgacactgtctcatgtgggtgtctagtccctgacctgcaatccagtttccctggaaggtgccaagtgtggggtgcctgatccatctttagaagcctcctggtgggtgctaacagtcatgagaggtcttcttctgtgggataataatgactacacttggcatgttccccagtctgtagaatgagctcaccaggtggctgctgttcctcctctacagatggcataattcaggttgtgacagacatgtggatcatgcaagctggcgtgaattggcagccacgttggactgaccataacaccttccttcttctctttaattcatttctcactttctaatccacctcaaatcagttaaacccttgaaaagaagcctagcaagttgaaccatgaatcatcatggatccagaatgttacctctttggctatccctgtctcctcatgcgtgcaggtagattcaaag

SEQ ID NO: 287032 - DNA, 624 bp, Homo sapiens
tccttatgaggaatggagtctgaaagaagctaagtatctcaccaggtaataccataatggggccagaattcaaatccaagagtctgagatcttaattacgtcaccattttatgcctttcccaacgaatgtttcactggtccctgaagctgtctgtggagagcagagtgacactgtctcatgtgggtgtctagtccctgacctgcaatccagtttccctggaaggtgccaagtgtggggtgcctgayccatctttagaagcctcctggtgggtgctaacagtcatgagaggtcttcttctgtgggataataatgactacacttggcatgttccccagtctgtagaatgagctcaccaggtggctgctgttcctcctctacagatggcataattcaggttgtgacagacatgtggatcatgcaagctggcgtgaattggcagccacgttggactgaccataacaccttccttcttctctttaattcatttctcactttctaatccacctcaaatcagttaaacccttgaaaagaagcctagcaagttgaaccatgaatcatcatggatccagaatgttacctctttggctatccctgtctcctcatgcgtgcaggtagattcaaag

SEQ ID NO: 287033 - DNA, 624 bp, Homo sapiens
tccttatgaggaatggagtctgaaagaagctaagtatctcaccaggtaataccataatggggccagaattcaaatccaagagtctgagatcttaattacgtcaccattttatgcctttcccaacgaatgtttcactggtccctgaagctgtctgtggagagcagagtgacactgtctcatgtgggtgtctagtccctgacctgcaatccagtttccctggaaggtgccaagtgtggggtgcctgatccatctttagragcctcctggtgggtgctaacagtcatgagaggtcttcttctgtgggataataatgactacacttggcatgttccccagtctgtagaatgagctcaccaggtggctgctgttcctcctctacagatggcataattcaggttgtgacagacatgtggatcatgcaagctggcgtgaattggcagccacgttggactgaccataacaccttccttcttctctttaattcatttctcactttctaatccacctcaaatcagttaaacccttgaaaagaagcctagcaagttgaaccatgaatcatcatggatccagaatgttacctctttggctatccctgtctcctcatgcgtgcaggtagattcaaag

SEQ ID NO: 287034 - DNA, 624 bp, Homo sapiens
tccttatgaggaatggagtctgaaagaagctaagtatctcaccaggtaataccataatggggccagaattcaaatccaagagtctgagatcttaattacgtcaccattttatgcctttcccaacgaatgtttcactggtccctgaagctgtctgtggagagcagagtgacactgtctcatgtgggtgtctagtccctgacctgcaatccagtttccctggaaggtgccaagtgtggggtgcctgatccatctttagaagcctcctggtgggtgctaacagtcatgagaggtcttcttctktgggataataatgactacacttggcatgttccccagtctgtagaatgagctcaccaggtggctgctgttcctcctctacagatggcataattcaggttgtgacagacatgtggatcatgcaagctggcgtgaattggcagccacgttggactgaccataacaccttccttcttctctttaattcatttctcactttctaatccacctcaaatcagttaaacccttgaaaagaagcctagcaagttgaaccatgaatcatcatggatccagaatgttacctctttggctatccctgtctcctcatgcgtgcaggtagattcaaag

SEQ ID NO: 287035 - DNA, 575 bp, Homo sapiens
atgtcttcttgcccagggcataactcttatcaatctggtcaataattcaaaaagattttttaatgtgagggctgattaatcttgtttgatttttttcatttgtgaaattagctggacattcatgtaattgatacttatcatttcacaagtagatccaacttgattgtagaacaaattaagacggtcttcccctgccagttagaaaataaagcagtccttacccrtcttctgctgaatctcttacggtctataaatgatgttttagaaaacaagcagtgatggacaaattcaatgggaaactttttgtgttcttttttcattgagcccaaaaccatctccacagaggccaagtggcttgtttggttcaaacagtgttaaaataccttaacgaactgataataaaatccccccaaagtctatttacacatatttccaagtgaactaaaggacacgggagacattattttttaaactcccaagagaaacctcctttccctttccagtcaagcaaatctgagttgacttctcccgtaaattcaagaacaaaaagttataaattgagcatatgaaggaca

SEQ ID NO: 287036 - DNA, 444 bp, Homo sapiens
atcactccatatttggtccttcaattayatgtccccatcttgagttcaggtgttggatgtctctaactcctgcaccattctctttcagtttcttcgggatgaggacttccattttcctgcatgggggtgcacacctgctgctggccttctgtgtgggactggagctggggagggggtggcagtaggcgtttctgtgtgttacttttaactgctatcttcaactgcattcctctgactccagcttcctggatattttgatgggggcagtgcaattggactctcttcctgtcaagatgcctctttgcagactctttgggctattgcttcctccagtttgtcaaattagttaccactgctacatctgccttctgtttcctaaaaatatgtcaaactcttttgcccactgatgtctttgccaccattctctcaccttgtgggctgcgc

SEQ ID NO: 287037 - DNA, 552 bp, Homo sapiens
ctcgggggctctggtgcaagcactggcattttttaagtcttccaggagattctaatgtacaaccaaggctgagaaccactggtccaaccaaatcttgatttaaagggaaaagaagcaaaagagattgcaagtcattttcattaagatcacaattagcacaccaaccttgctgccaccccagtgccagcctggcacatgcctaaaaccttttgactccactgtcatccagccctcctgtttttcatcagagaaacaaagtgcatttgtgaaatcaaatccattctgaacacccacaattaatgtgcacttcagcacaaccctcctgagaatgggtactaaaatgacttgaaccaagtcacttctttattctttaaagtgtcctcaaaggttttcaacacctccctacaccaccacyccacaaaatacaaaccaaaatcaaagagacttgagccccttttattcatagagggagttatttcccccagccctcatctatagtttttcagttcagcttattagatgctgtttctcatctgtactctgccttctctc

SEQ ID NO: 287038 - DNA, 552 bp, Homo sapiens
ctcgggggctctggtgcaagcactggcattttttaagtcttccaggagattctaatgtacaaccaaggctgagaaccactggtccaaccaaatcttgatttaaagggaaaagaagcaaaagagattgcaagtcattttcattaagatcacaattagcacaccaaccttgctgccaccccagtgccagcctggcacatgcctaaaaccttttgactccactgtcatccagccctcctgtttttcatcagagaaacaaagtgcatttgtgaaatcaaatccattctgaacacccacaattaatgtgcacttcagcacaaccctcctgagaatgggtactaaaatgacttgaaccaagtcacttctttattctttaaagtgtcctcaaaggttttcaacacctccctacaccaccactccacaaaatacaaaccaaaatcaaagagacttgarccccttttattcatagagggagttatttcccccagccctcatctatagtttttcagttcagcttattagatgctgtttctcatctgtactctgccttctctc

SEQ ID NO: 287039 - DNA, 552 bp, Homo sapiens
ctcgggggctctggtgcaagcactggcattttttaagtcttccaggagattctaatgtacaaccaaggctgagaaccactggtccaaccaaatcttgatttaaagggaaaagaagcaaaagagattgcaagtcattttcattaagatcacaattagcacaccaaccttgctgccaccccagtgccagcctggcacatgcctaaaaccttttgactccactgtcatccagccctcctgtttttcatcagagaaacaaagtgcatttgtgaaatcaaatccattctgaacacccacaattaatgtgcacttcagcacaaccctcctgagaatgggtactaaaatgacttgaaccaagtcacttctttattctttaaagtgtcctcaaaggttttcaacacctccctacaccaccactccacaaaatacaaaccaaaatcaaagagacttgagccccttttattcatagagggagttatttcccccagccctyatctatagtttttcagttcagcttattagatgctgtttctcatctgtactctgccttctctc

SEQ ID NO: 287040 - DNA, 528 bp, Homo sapiens
ttcagctgtcaaaatagaaagaaaaggaaatcaggagtgtagacttctgtttccaaatgacttagcatttaacagtcatgcttcaaatgttcctttaaatgaggaaagattgaccaagcaggagagtccattgggaaaagtttggacaaactatcattttcaagcaatgaaatcatcattactatctgagagcyatttacttctagacaaaatcttgtcaactcccaaaattacagactagagacaatggattcaccagcctccttgagcagaggcagaatcaattaatatgagccaagcactttctcagcttagtaccctggttggctgttggtcacaggcgcattccacagatgataaaatcactcacaaacctgtcagaagtcacattcacatagtcaagaatggggcctttaggccggaggcggtggctcatgcctgtaatcccagcactttgagaggctgaggcaggcggatcacttgaggtcaggggttcaagaccagccttggcaacatggtgaaaccccg

SEQ ID NO: 287041 - DNA, 592 bp, Homo sapiens
catttatagacatcaagtgtctttagagtttttgtatttgccattcaatctgcctagactaggtttgcaccacttatctacttagaaaatttgtactcgtctttggggacacagtgcaaatattccttagtcrcataccactaccatggtcatggaggctggagaaatagcaggtcctgtgttatgtgaagaaaaaataatagtcaattatgcctccaagactcctcccctaacaaatggattaatggtggtactatttcttgctatggggaagactagaaggggagcaaatttaaaggacaagatcaagagcttaatttgaaacagattaagactgaaatacccatagactctcaaatggagaatttgagtggactgttggctattctagtaagggagtctgtactccacactagtaaggtcaagtttgaaaatatgaatttaaaagtcactgcatgtagaaagtatttaaaccagagactgcgtaaaatcaccaataaagaaactgtacagtagaaaaagatgagaaccaggaactgctcctgggaaattcctacctgattaaagaaaaaggatatcaatatgagcgaca

SEQ ID NO: 287042 - DNA, 587 bp, Homo sapiens
ttatgcctccaagactcctcccctaacaaatggattaatggtggtactatttcttgctatggggaagactagaaggggagcaaatttaaaggacaagatcaagagcttaatttgaaacagattaagactgaaatacccatagactctcaaatggagaatttgagtggactgttggctattctagtaagggagtctgtactccacactagtaaggtcaagtttgaaaatatgaatttaaaagtcactgcatgtagaaagtatttaaaccagagactgcgtaaaatcaccaataaagaaactgtacagtagaaaaagatgagaaccaggaactgctcctgggaaattcctacctgattaaagaaaraggatatcaatatgagcgacatattcagacaggtgaagcattcagtaaacaaaatatatcaaatttctctggtctggagatacattttttattctttaaatttgtattctttattcatttttattctttttttaacactttcttcctgaattacaattaacagtggtttttgcaacgtgttttgcagagaaaaggaaaaatgctttcattccagtaagtaaac

SEQ ID NO: 287043 - DNA, 597 bp, Homo sapiens
ggtactatttcttgctatggggaagactagaaggggagcaaatttaaaggacaagatcaagagcttaatttgaaacagattaagactgaaatacccatagactctcaaatggagaatttgagtggactgttggctattctagtaagggagtctgtactccacactagtaaggtcaagtttgaaaatatgaatttaaaagtcactgcatgtagaaagtatttaaaccagagactgcgtaaaatcaccaataaagaaactgtacagtagaaaaagatgagaaccaggaactgctcctgggaaattcctacctgattaaagaaaaaggatatcaatatgagcgacatattcagacaggtgaagcattcagtaaacaaaatatatcaaatttctctggtctggagatacattttttattctttaaatttgyattctttattcatttttattctttttttaacactttcttcctgaattacaattaacagtggtttttgcaacgtgttttgcagagaaaaggaaaaatgctttcattccagtaagtaaacatcatttttctaaattattgctacagtttagccacaaaagcatctttcttta

SEQ ID NO: 287044 - DNA, 555 bp, Homo sapiens
gaaaatgataacaatgacccaactgcatctgcataaacttgtgctttcatagacatgatgaaaatctaatttgatagtaagtcacgagcctggcaggcaggaggagttcaatgaccgctgtgtaaataaacgggttgtttttgtttttgttttgttttgttttctgttttttcaagacagggtcttgctctgttacccaggctgcagtgcagtggcacgatcttgcctcactgcagcctcaacctcccaagctcaagcaatcctcccacctcagcctcctgagtactaggactacaggtgcatgccatgacaccgggctactttgtatttgttttttgtagagacaggttctctctatgttgtccagactagtctcaaactcctgggttcaagcaatccaccagcytcagcctcccaaattgctgggattacaggcatgagccaatgtgcccggcctaatttttttaatacatgtttttttacattttcacattctcctgctgtcaaatactaaattatttatcatcagcaaaagcgagttgaaaaaaaattacc

SEQ ID NO: 287045 - DNA, 553 bp, Homo sapiens
gcaaagctcccagcatgcccttccaaggacacgtgtcacttgggccagatctacccctgaacyctccagcctgtccctgaggtctcagatgctggcccaataatttcactgtgcctctgtccaaatctcattattatagatacaaactcagttacttcacaaatactaatccctgcataatcctcctagtgcaatgaagcaaaatgaagccacatccacagaaatgtgacaagggaataccaacggtgctaaaaaatgaaatatgtgtcaagtccccaaagaagttcattacctgaaggacacattatccccttctcttcccatgagtcagcacagtcagtagtcattcctaattggttcacagcttagtatgacatattaggatgccacgggatgtgatgacacagctgtattcctgaggggatggctgagatgaatctgtgtacagcagagacaggtggagacaaagggagcaggtggaaatgggttgtaaatatactataacttaaaaaataatggggtgtttttttctctacagctttctgatgtttca

SEQ ID NO: 287046 - DNA, 553 bp, Homo sapiens
gcaaagctcccagcatgcccttccaaggacacgtgtcacttgggccagatctacccctgaaccctccagcctgtccctgaggtctcagatgctggcccaataatttcactgtgcctctgtccaaatctcattattatagatacaaactcagttacttcacaaatactaatccctgcataatcctcctagtgcaatgaagcaaaatgaagccacatccacagaaatgtgacaagggaataccaacggtgctaaaaaatgaaatatgtgtcaagtccccaaagaagttcattacctgaaggacacattatccccttctcttcccatgagtcagcacagtcagtagtcattcctaattggttcacagcttagtatgacatattaggatgccacgggatgtgatgacacagctgtattcctgaggggatggctgagatgaatctgtgtacagcrgagacaggtggagacaaagggagcaggtggaaatgggttgtaaatatactataacttaaaaaataatggggtgtttttttctctacagctttctgatgtttca

SEQ ID NO: 287047 - DNA, 541 bp, Homo sapiens
aaggctattgtcaaatgcagaaaatcaatagacaaatctcttggaattcttgggtgattcataccagagagcagtatttgaataatttatggtctcatcctccaagcttgcaatggtgaggcacttggaaccctcagacatggattctgcatcttggctttcgtgtaagatgatctataacrgtggaaagaagcaagaagcctctggaaccatatagtcataggcacttagagttgggtgggccctcaaagttcgacttagccaacttcccccattatcagcagtgcccagcctctccacttatctccctcatcctgtatctcaggatcaggtggtggcagacaccataaaacaattcctactaggagttcattgttacccaaaactccacctccctaccatttttctcggggttctattctgcttgaaggataacacaaggaagtgtcttcctcttccgctccatgtgacactctggtggctggacctggagtctttcaacccaccttcctggttcagttttcccattcacagccaagga

SEQ ID NO: 287048 - DNA, 541 bp, Homo sapiens
aaggctattgtcaaatgcagaaaatcaatagacaaatctcttggaattcttgggtgattcataccagagagcagtatttgaataatttatggtctcatcctccaagcttgcaatggtgaggcacttggaaccctcagacatggattctgcatcttggctttcgtgtaagatgatctataacagtggaaagaagcaagaagcctctggaaccatatagtcataggcacttasagttgggtgggccctcaaagttcgacttagccaacttcccccattatcagcagtgcccagcctctccacttatctccctcatcctgtatctcaggatcaggtggtggcagacaccataaaacaattcctactaggagttcattgttacccaaaactccacctccctaccatttttctcggggttctattctgcttgaaggataacacaaggaagtgtcttcctcttccgctccatgtgacactctggtggctggacctggagtctttcaacccaccttcctggttcagttttcccattcacagccaagga

SEQ ID NO: 287049 - DNA, 562 bp, Homo sapiens
gggagccatttggggtcctttggagagtagtggcatttggactaccaagactcttggagytgggctattttctggataggaagagctttgtccttgaaagcgtcaaaaaaacaaaaaagtcagagcagaacataaagaaaaagaatctgagtgattgtcactgatgccccaactccagcttaaatgaaagactgacagaaaaccttggaactttgtcttatgctttccagaccagggctgtagaggaggaaaggactaggtactggagccccattcaggaaaagcatgtgagtggtgtcacttccctagagcaagataagcagggcattagggtggaaatccctggagtgggtggggagcaagaatctttgccattgcacagaattgctgagccattgtgctgacattagtacctctcaagaggaagcgatcatcatgacatgccccagatgacagacacttatcaatagtgattattgtaattgctgtgaagaaagctcaggtcctttggtctgaacttcactggggttgaaggtaacagagagtgggtgatgcaatgtgc

SEQ ID NO: 287050 - DNA, 548 bp, Homo sapiens
accaagctaaacttttcatgtatcctaatacataacaataattgcctataaatcacgtttttactcttaaatttcctttggtacatgcagattaatgagattaatgtctactgaatttagtatttttgatttaactagtttggaaaaactcatagtgaacataygttttgtgtttacatgcttctattacttaatatttcagaatataaaataatagatgtaacatatatacacatgtatgtcacgtgtggacgttacgacgcacagttttaaaatacctgaaaacaccagtaccattacccagcaacttgaactacccctgaggtagtatttttaatttcatatttgaatttaattaaaaatgcatagtatttttaatttcatattttaaataattaaaaatgcatagtatttttaatttcatatttatgctcctcttgtttttgttattcaacaaaacaatgttatttcatttttcttatttcgagttttctacacattgtaccatactgtagttagtcttttgaaacttgatttgtcacttaaca

SEQ ID NO: 287051 - DNA, 584 bp, Homo sapiens
tgcagcaaacaggcaatgctcccagaagctaatatatggcagcctgattttgaaggagagaaagccttactaaatttcagcattgcatggacctgtacacccttggagctaaaaaatataactgataatcactttaggggaacagaatatgagtcacagcttatagcaattctgagaaatcktaatcaaagaagcaaattctaaagcaaaggcaaaggacatgaacaaactagacacaaagaagagaaatacctgagtaataaagaagaggacctgaactggatgggacaaagagagtttccttagtcacacatgaccaagaattccagtaatgtcttcatgaagaaggattacccataatatatgcatgtgaatgcatatgtctttgttagatttaactctgtagtaaactttgcatttgttttcactttttaacccttttgttgactcttttagatccatgctaaatattcctttcagatttttctgtaattagatctctgggcctggtgaatttcaaggagacactgcagtcaggattctggtgaccagatgggtaggacagataagctgcatgaatttcc

SEQ ID NO: 287052 - DNA, 584 bp, Homo sapiens
tgcagcaaacaggcaatgctcccagaagctaatatatggcagcctgattttgaaggagagaaagccttactaaatttcagcattgcatggacctgtacacccttggagctaaaaaatataactgataatcactttaggggaacagaatatgagtcacagcttatagcaattctgagaaatcgtaatcaaagaagcaaattctaaagcaaaggcaaaggacatgaacaaactagacacaaagaagagaaatacctgagtaataaagaagaggacctgaactggatgggacaaagagagtttccttagtcacacatgaccaagaattccagtaatgtcttcatgaagaaggattacccataatatatgcatgtgaatgcatatgtctttgttagatttaactctgtagtaaactttgcatttgttttcactttttaacccttttgttgactcttttagatccatgctaaatattcctttcagatttttctgtaattagatctctgggcctggtgaatttcaaggagacactgcartcaggattctggtgaccagatgggtaggacagataagctgcatgaatttcc

SEQ ID NO: 287053 - DNA, 638 bp, Homo sapiens
attcttccagggagtttcacttaaaaggagaggtttgagtttctttcctcctactgctgtaatgtggcattaatatgatgtgattagatggtaacgtgatattacatgatgtaatgtgatgtgataagtgaaaatccagcttccatcttagaataggaggatgagggctccaatccygggaatgtagaataaagagctggaagtcactgggatgcctgaaaacccgagtggttacacaccatccctggactgcccatttctgaacttcattacatgagataaacttctaactttctcttattttctattacattagaagttataaataagcttctaactttcttctattttctattaaatggcagaggcagaggttgcagtgatctgagatcgcaccactgccctccagcctgggcaacagagtgagactaaaaccataaaactcttagaagagagcataggggaaaagcttcatgacattggacttagtgatgacttgatgggtatgacaccaaaagcacagacaacaaaagaaaaacagatagatggaactttatcgaagtttaaaacttttctgcttcaaacactatcggcagaatgaaaaggctacccacaaaatggaagaaaatttttgcaaa

SEQ ID NO: 287054 - DNA, 638 bp, Homo sapiens
attcttccagggagtttcacttaaaaggagaggtttgagtttctttcctcctactgctgtaatgtggcattaatatgatgtgattagatggtaacgtgatattacatgatgtaatgtgatgtgataagtgaaaatccagcttccatcttagaataggaggatgagggctccaatcccgggaatgtagaataaagagctggaagtcactgggatgcctgaaaacccgagtggttacacaccatccctggactgcccatttctgaacttcattacatgagataaacttctaactttctcttattttctattacattagaagttataaataagcttctaactttcttctattttctattaaatggcagaggcagaggttgcagtgatctgagatcgcaccactgccctccagcctgggcaacagagtgagactaaaaccataaaactcttagaagagagcataggggaaaagcttcatgacattggacttagtgatgacttgatgggtatgacaccaaaagcacagacaayaaaagaaaaacagatagatggaactttatcgaagtttaaaacttttctgcttcaaacactatcggcagaatgaaaaggctacccacaaaatggaagaaaatttttgcaaa

SEQ ID NO: 287055 - DNA, 536 bp, Homo sapiens
atgcttgttgactgtgtgtatgtcttcttttgagaagtgtctgttcatattttttgccttttttttttttttttttttgagacacagtctcgctctgtcgcccaggctggagtgcagtggcatgatctcarctcactgcaagctctgcctcctggattcatgccattctcctgcctcagcctccccagcagctgggactacaggcgcccaccaccacgcccggctaattttttgtatttttagtagaaacggggtttcactgtgctagccaggatggtctcgatctcctgacctcgtgatccgcctgccttggcctcccaaagtgctgggattacagacgtgagccaccgcactcgggtctctttgcctattttttaacagggctgtttgctttttgcttgttgatttaagtttcttatagattctgaatattggacccttgttgtatgcatagtttgcaaatattttctcccattctgtgggttgtctatttgctctgctgtagtttcttccgctttcagaagctctttagttta

SEQ ID NO: 287056 - DNA, 536 bp, Homo sapiens
atgcttgttgactgtgtgtatgtcttcttttgagaagtgtctgttcatattttttgccttttttttttttttttttttgagacacagtctcgctctgtcgcccaggctggagtgcagtggcatgatctcagctcactgcaagctctgcctcctggattcatgccattctcctgcctcagcctccccagcagctgggactacaggcgcccaccaccacgcccggctaattttttgtatttttagtagaaacggggtttcactgtgctagccaggatggtctcgatctcctgacctcgtgatccgcctgccttggcctcccaaagtgctgggattacagacgtgagccaccgcacycgggtctctttgcctattttttaacagggctgtttgctttttgcttgttgatttaagtttcttatagattctgaatattggacccttgttgtatgcatagtttgcaaatattttctcccattctgtgggttgtctatttgctctgctgtagtttcttccgctttcagaagctctttagttta

SEQ ID NO: 287057 - DNA, 597 bp, Homo sapiens
tctgtgaatagagcatgtattcagcactagaggcctcagacactctcctgttgatagatttctattgaaggctcaggaaaatcccaggaaagggcaaagggctggacttttgttcaaggtacccttaataaacatgcttggattgaactgatccacacaatgagaactgtgttaacaaatcaggaggggtctggggggacctctttgctctctgtagacaatagaatggctgagaactgggcctgcgactgataacactcgtctcttcacaagaggcgtggatgtggcctaagtttactcttctgtaaaattggaataggaaaagccccttcacaagattttagtgaagattcratgaaatattgtttatgaaagggcttacaaatgataaagtgcaacataaatcccaagtgtttatgattagctattttcctgtgccacttttcctaacagaggctaggtgccaggtgcacaacacgaggtcctaagaaaagcaggtggtccctggactccaggagatgaaaatacagtgcaaaagccattctccaccccttgcaatggttttgttgaaaaagtttattccaaataaattcttta

SEQ ID NO: 287058 - DNA, 565 bp, Homo sapiens
catctccctctgtagacttgccccgtagatatttgaaatggggattaacatatttaagagtagcaggaagtgctatttcatcagtgtctagaatgggaggcgaattcagtccctgcctggacttgttgactagctcgctgggttgtgaaaaccacggcattctcctgggaattkgttccagggcactgactgcatttcttctgaagctaaagcacttagctttgcttccatgccttttaatataatttgtaggcttcagcagatttctaaagtacaccacttgatatctttcacagctcaaggtaaattctgcagcacgaacttatagaatttttttcttttacctggggtgagaacataccttttcctagtgctattttttttttctgggctacctttcatctgtttacatgaattccacttcttctcgctgtgttaaagaaatcccctaagctgtctacataggtgtgaaacttttggttgtgatttccttgaagttagttggaactggaacatttttttctgtgtcctgaatggctcacacattccctaacacagaatggat

SEQ ID NO: 287059 - DNA, 565 bp, Homo sapiens
catctccctctgtagacttgccccgtagatatttgaaatggggattaacatatttaagagtagcaggaagtgctatttcatcagtgtctagaatgggaggcgaattcagtccctgcctggacttgttgactagctcgctgggttgtgaaaaccacggcattctcctgggaatttgttccagggcactgactgcatttcttctgaagctaaagcacttagctttgcttccatgccttttaatataatttgtaggcttcagcagatttctaaagtacaccacttgatatctttcacagctcaaggtaaattctgcagcacgaacttatagaatttttttcttttacctggggtgagaacataccttttcctagtgctattttttttttctgggctacctttcatctgtttacatgaattccacttcttctcgctgtgttaaagaaatcmcctaagctgtctacataggtgtgaaacttttggttgtgatttccttgaagttagttggaactggaacatttttttctgtgtcctgaatggctcacacattccctaacacagaatggat

SEQ ID NO: 287060 - DNA, 546 bp, Homo sapiens
ggtaaactcaactctctactctcactgagcatgtggttgagctctgaacaccactggagccaagcatgcaacagggaaatctgcaatcaccttcttcatttgagccatcgccatgcccaccattgctactacactcctctgcccaactcccctttctctcaatgcagtgctgatctcgaaccctccccttctcagcttcgcattcctcatcttatccctttcttttggcagtggacaagcacgcacttcacagagtcatcccctggtccagactctttgccgcggtttgaatgtttatgtccctccaaaattcatggtgaaacttacctcattgtgctggtattaagaggtggagccttttgggttaaggcccaaagtcatgagggctctgccctcatgaatggaattaatgccctcattaaaraggctcaagagggcttcttggcccttttgccctgcatctcttctgccatatgaggacacagcatttgtcctcttcagaagatgcagcaacaaggtgtcatcctggacacagagagcttacca

SEQ ID NO: 287061 - DNA, 524 bp, Homo sapiens
tggtttttgttaaatggtgactcagaatataggccaactttcctgtctatggcagcattctgtagtgtggaagtacatattcaatatcctgatatttctatggtgaaaggaagtcaatccttagttccacacctgggaggagtctttgaagcttcaatgacatataggcactagtttaaggtctgaccttctctatgtcagcttgtgtctagccaggaaagctggaaccatgctaggtatttctaacagagggatttaacacagggaattggttatgtcagtgtcagtgtctgcacgagcaaagagggaagctgatataacccaggagataggtatcatcctagggctggagaaataaaaggtgaatttccaggatcacagagcgtgaaggagggggctgtggggctgtggcttatacctttgaagggacagaccatggagggagtatacccaagttggtgcctagatggctgcacctctgrgggagcatggggaggctgggtcctgtaatagcccaagagctg

SEQ ID NO: 287062 - DNA, 608 bp, Homo sapiens
aagtccctgatataaaatagcagagtatttgcatacaattgtgcactttccttctgtatacttgaaatcgtagtgttaatgccatgtagctagttgttataaggtactgtttagggaataatgacaggaaaaaacgtctgtacrtgttcagtacagacccagttcctccccctacccccaatatattcaaattccatccatggttggtcaaatccatccatgaattcagaaccatggacagggagggccaactgtatacacagagatggcataagtatgcagagtagagcctaaaccacagaccccccaagctcactgtccttattagtataacttgagtattccttattttcattagtataatttactattccagaagaacttttgtcaggcaaataactatattgttcatttgaggaccttctcacaagacagtgataggccttggtagacagcttactccttaaaagccctgagactctttgaacacctcaggaccttggcattgctgctttcaccagccctaagctgtgctatcgccatcctcagccagtcctagaaagctcaatgcggtagggcctggtccttcccccactgagcagtgccgc

SEQ ID NO: 287063 - DNA, 504 bp, Homo sapiens
ttgcttgttctgtgtttccttttcttcttttattttggattaaatattctgtaccattgcattttcccagctcttagcatatgaaactgcagctaggactaaaaccagaggaaggcacacagaatcttgactgctcttcagaaatacrtggcactccgttaaaatgaagatttttgctgctcactccagaaatattgaatcaaaacgtggagcaagagacaggcaaggtgcgtttgtttttaaagctccataggtcattctgatggacagtctagactctgtttcctcctacacctttgaaaggtaaatacagaaaatgaggctgagaaaacacctttagaatcagtcccctttcttagcacttcagtggttcctgcacagggtgcagatgccgagctctccttaggctccagcccccaggctggctgggctggttccaccgtacatagcccagaggctcaccccaatcaggcaaggggctccccatgtcagccaggctcctct

SEQ ID NO: 287064 - DNA, 607 bp, Homo sapiens
ttatgattttttttgctagggttctgttgagtgatctcaactgaaagcatttttgagtggaaggagggaaatttgtctagctgtatgcactttctccccatcctttcaccccacagagcctagccaactgcttggtacatcattcagagaaccatattacctaagcccaaacccaggccattcttatttgtgaatttacttacagcaaaagtcataaaaaagtgtgaaaactaaatcacattttttcacagttttaatgcatgcccttcaagaattaggacaaattcatggaattgagctgatcctaggaaatccaggttatatgttaaataaarcaaagaggttgacttaatcagacttgtttggatgcaaacagagattcatctaagttactcataggtttgtcataagtttacatgtgcatgggaactcagggaaagctatttagctggccttggtaagatgaagaagtccagcagaatctgagccatacagagacagaagtggaattcaacgtcatttggatcctggctggttccaggaatgttggtctcaggagttggtcttggatcttgactctggttgtccaccattttgatgactcatc

SEQ ID NO: 287065 - DNA, 441 bp, Homo sapiens
gtgcacactcctatccacatgctcagcagtgccagtacaaacacgggacgcagtgaagcacccaacactccttccaaaacttttcttcctcctttctctttttaaaaaattacttatgtgtctctctgtctctctaaataaactgttagttccttgaggccagggactatgtcttgctcctttttacttcccacaacatgtggcacagaatagacacttaataaatatctggggatgggcaaggtggttcaagcctgtattcccagtacagtgcgaggccaaggtgggaggatcgcttgaggccaggagttcaacaccagcctgggcaacatagcaagcccttgtctctaaaaaamaaaaaaacaaacaaacaaacaaacaaacaaaaaaaaaaactgagtgtgatggccctatggccccaactactcaggaagctgaggt

SEQ ID NO: 287066 - DNA, 366 bp, Homo sapiens
ctgccttgaattccctttgaacaaagtagtggtttaaacaagaaaactatccctcattagctctgtgagttaagtattatgattatcctgtaattcagayggggaacccatgactctgagaggcaaaacatcttgtgcaaggtcacctcttttctagctaggaaggggcccagccaggttccaaatcttgatctgtataagttgacccaaaactctctccactgtactagcatgctaaagaggctgagcatttacctgggggcattccacagcattttctacttaaacttaaccctgaacatctgagccccaatatctgctccaccctcaaggacacaggcacagtcagtatcttttctaataaca

SEQ ID NO: 287067 - DNA, 621 bp, Homo sapiens
tgcttctggtgccatttctgttccaaagtaaataaaactgagacaagtcaattggccttgataagccttagtttctgcagtcaaattaatgggtaaagaactttaaggacaccccagcttaaatattgtgattctatcctctttccctcaaaatttgaatctatttttaaaattctgtatatggtttcttttggggcccccttttctcttatttcaaaagaataaaaatttgcagtctcctcactatatctaatccagaagtcccaattgcaaatgtctacaaaggtcatggtaggtgatataatgactgaagtatgcaatagagagaggtggaggctgtggcaaaacaaagagggcacaccctattcaaagggggccatttcttttcagctgcagcaaattattgcttcatacaaaaatgcaagctggatccaacttctgttttcctttaaatcatctgtcagttttgtccttttatctcttcttcctgattatctgtccttcaggattagatgcaatctcttacgtggacttccagtctggagttttacctttctaatagttttgtttgtttgtttgttcgtttttatayagttttaatccagaaagtcttcccacctc

SEQ ID NO: 287068 - DNA, 532 bp, Homo sapiens
ccgcataaattcatagacacaggtgtcagaaccgcagaartcactagatcaattgtcctccttacaggagataggcactggatgaccgaagaggacagttttcttgcctctttacccagagctctctcctcctttccgcattgatgctattattagtattatcggcattaataataatggagaggtaaccagctgcgcattaggcacaatgttccaggaccagcacttccttcgttagcttctgggactgcctgggtcccgctgggtcctctcccgcggccgcagcggcttcgggcctgctctctggttctgtgcatccggtggtctgtctgtcgccggtcacgtctgcaacccgcgtcctcccagctcacaccggctcctgctctgaaagccgagaagctcgccggctgcgggcgggttttccaagtgggcaggggtggggaggaggggcgcgggcgggcgggcccgcggagggaggagggggcgtcgcggaggggaagacctcgcattgtaatccaatgacattgccaac

SEQ ID NO: 287069 - DNA, 619 bp, Homo sapiens
attcctacacagttaaacagtgcattacaggaaccagaaagctaggtctctgtagcccagaaaaaaaaaaaaaaaaaaaaaaaaaggttcattgaaaaccctcgctagaggggggkggaactggttggaggcggtgcagggggcgtcggtggggatcgatcaagtgtccgggtgcgggcagggggcccccgagttctagcacgagcacttgcactcggaaatgatggggtactggatgggaatccagccgcagcgctggcccccgcgccgctgacagcgccaccgcagcaccgtgaggtgcacggacttggacggcttgcacaccatgccctcgggcacggagcacgagcgcttactgaagcagctgcccaccttcacgtagcgcggccaaaagcggctgcccaggtcgttccacgcgtacagcacggggcagaatgtctgcgaccacagccacatctgtaacttcctccgcagcttcttgcttaggcgctgcttcttgccctgggccaagccctcggagaactctagccctttgatctcgctcggcatggcccccgacggccgctgccgcagcagctggtccagctccgccaggtcctccgcgcccccagctgcaccc

SEQ ID NO: 287070 - DNA, 913 bp, Homo sapiens
tgtttctcccagttgtgaccattcttattctatccctcttctactattcccttatgttctgtttaaggcatctgtcctaattttccacaygttgtgtacctattttatacagaaaagtactgggtactaaggacacaaagcaatgaaaaacatagccttaccattaatttcacagtttagttcaagaaaataacacgaaagaaaaatataagtactccttctgctgtaagcctacactgcctctattataaaactgatttcaatatattgtgatcatctgtttacttctcctttttgacctcctcaaaagtagggatgacatcatattcatctgaaaccccaatgtctcacatggtgcctgacacattatagggactcaatatgtgtttgataaaggatgagacagaggagacaatgtacaataacatctgctagatgttgcagatggttaattctwtgtttctcccagttgtgaccattcttattctatccctcttctactattcccttatgttctgtttaaggcatctgtcctaattttccacatgttgtgtacctattttatacagaaaagtactgggtactaaggacacaaagcaatgaaaaacatagccttaccattaatttcacagtttagttcaagaaaataacacgaaagaaaaatataagtactccttctgctgtawgcctacactgcctctattataaaactgatttcaatatattgtgatcatctgtttacttctcctttttgacctcctcaaaagtagggatgacatcatattcatctgaaaccccaatgtctcacatggtgcctgacacattatagggactcaatatgtgtttgataaaggatgagacagaggagacaatgtacaataacatctgctagatgttgcagatggttaattct

SEQ ID NO: 287071 - DNA, 456 bp, Homo sapiens
tgtttctcccagttgtgaccattcttattctatccctcttctactattcccttatgttctgtttaaggcatctgtcctaattttccacatgttgtgtacctattttatacagaaaagtactgggtactaaggacacaaagcaatgaaaaacatagccttaccattaatttcacagtttagttcaagaaaataacacgaaagaaaaatataagtactccttctgctgtaagcctacactgcctctattataaaactgatttcaatatattgtgatcatctgtttacttctcctttttgacctcctcaaaagtagggatgacatcatattcatctgaaaccccaatgtctcacatggtgcctgacacattakagggactcaatatgtgtttgataaaggatgagacagaggagacaatgtacaataacatctgctagatgttgcagatggttaattct

SEQ ID NO: 287072 - DNA, 544 bp, Homo sapiens
caggcaacaataacacacgrtgatatgatacagtactaggattagactacaatgctaggaaggaacattggcacccggggaacatgggaaaaggcagctaactcagcagtgaagggagatcagagacttccagaaggaggcagcacctaagctgagccctaagggacaaagtctcctggagatggaggtgcagatgtagctggatgttcaccagtagctcaccactccaagcaccttctgatgggttattatttctgagaataatgtgggagtgctagagaggagcagatatggtgctatcctgagttgcactaagtaagttacaacagatttggtccctcttgaagtgaaaaatatccaacagactaatttggtgaagacaaaagagagaaaagacaaaggaacatacagctatagaatcaaatttggcaaatgtgtatcatagtttttgtatcctctctggtgagttctgaaatgattgaatggccaaaccccaggcagcaataaccaagggtcagtgggggagaaggttgggaaccatttg

SEQ ID NO: 287073 - DNA, 607 bp, Homo sapiens
ttatgattttttttgctagggttctgttgagtgatctcaactgaaagcatttttgagtggaaggagggaaatttgtctagctgtatgcactttctccccatcctttcaccccacagagcctagccaactgcttggtacatcattcagagaaccatattacctaagcccaaacccaggccattcttatttgtgaatttacttacagcaaaagtcataaaaaagtgtgaaaactaaatcacattttttcayagttttaatgcatgcccttcaagaattaggacaaattcatggaattgagctgatcctaggaaatccaggttatatgttaaataaaacaaagaggttgacttaatcagacttgtttggatgcaaacagagattcatctaagttactcataggtttgtcataagtttacatgtgcatgggaactcagggaaagctatttagctggccttggtaagatgaagaagtccagcagaatctgagccatacagagacagaagtggaattcaacgtcatttggatcctggctggttccaggaatgttggtctcaggagttggtcttggatcttgactctggttgtccaccattttgatgactcatc

SEQ ID NO: 287074 - DNA, 595 bp, Homo sapiens
taagctttcaggaaccagataagagaatctggttgccttcagccaaatcctaacttttgtaaaacctcccggccttccaagaaggtttgcatctttctacaatttttcccaccacccgacctatctcttacatgctcctgactactgggtcacacaaacctgccagtactgaatagttcatgcatcgtattaactagtttacatatatatatatatatgtctctttagaccacagctcctttcaaatccctaaaactcaagcatcttccaacctgttagccttggttactcgtcatgggcctgctgaagaacagtcgaaagatgggaatgagccacgggaatgtgcccatgccctcttagtgcaaggaagtgagaggcagcgggccgagcagcagagcaaggcagtgtttggcaggtaaaagactgtttccattctagcattaaacatgaaaactgtaatagtaraacatagatttctgttataaaagcagcaagactacattagtgtagcgggtgatttatgccatatggttattgatatgtaccacgtacatttagaatctctgaaaaccacagatgcttcctgtaactatgt

SEQ ID NO: 287075 - DNA, 590 bp, Homo sapiens
gatgtcatttaaccattacctcctaaaaaccatatccccaattacggtagcatcaggaattaaggcttcaacatatgaatcgcagggggctggtgggagagacacaattcaatccatagcatggggcaaaccaatctcygaatcctttataatcaaagactgtgaggagcttctaactcagtagcttccaagcagtgtttctaggagcattgggcatcccaaggagcactttctggcgacaaagtaaaagtgggctctactttacctgtttactgtattagacctccatataaatttccatagaagacagggttttacagataaaaacatattagaaaacccctgatctggtttgatgacttgattttatgagaaaaagataggatattgagatttagaaaggaaaggagacttgcctacagtcacacagcaggtagggacaaattctagtagccaatgagtagatctacgatcttgtgtgtggattcctagtccagtgttttgtccattgttcttcttaggtccctccaggtccaaggggggaagccccagatgtgctcaccgggagcgctcaccgggagcatagtgaa

SEQ ID NO: 287076 - DNA, 1153 bp, Homo sapiens
ttctcttgttttgttgaagatcaaccgtctgtatcttcctgttacattctataatttctatagctatggatttgcagcctagagccaaaaacaagaaggaatgtgagaartgattttagtctgtaattggctaatgaaaaatcaaatcctggaatggaaattcctgtgataaattcactcatttagtttttcaacaaatatttattgatcaagtactataatacttgcactgtaaagtacaagggatacatcatgaacaagatatagtctctgtcttcacagagtagagagaaaaaaaggaattaagcaaagttgttgagaaaatcagcaggatgatgagatggggtgtaagtagggcagactatgttgatagggggccacagaaggctgccttatactaagacctggaggatgagaagccactggttgtataaaacatagacagagggaacaataatgtaagagccttaaggtgggaatgagcttagcatgttggaaagacagaaaggagacgagactggccagaggagagtaagcaagagggaagaagtgtgggccgagatgagtggtcatgaawttctcttgttttgttgaagatcaaccgtctgtatcttcctgttacattctataatttctatagctatggatttgcagcctagagccaaaaacaagaaggaatgtgagaaatgattttagtctgtaattggctaatgaaaaatcaaatcctggaatggaaattcctgtgataaattcactcatttagtttttcaacaaatatttattgatcaagtactatawtacttgcactgtaaagtacaagggatacatcatgaacaagatatagtctctgtcttcacagagtagagagaaaaaaaggaattaagcaaagttgttgagaaaatcagcaggatgatgagatggggtgtaagtagggcagactatgttgatagggggccacagaaggctgccttatactaagacctggaggatgagaagccactggttgtataaaacatagacagagggaacaataatgtaagagccttaaggtgggaatgagcttagcatgttggaaagacagaaaggagacgagactggccagaggagagtaagcaagagggaagaagtgtgggccgagatgagtggtcatgaa

SEQ ID NO: 287077 - DNA, 576 bp, Homo sapiens
ttctcttgttttgttgaagatcaaccgtctgtatcttcctgttacattctataatttctatagctatggatttgcagcctagagccaaaaacaagaaggaatgtgagaaatgattttagtctgtaattggctaatgaaaaatcaaatcctggaatggaaattcctgtgataaattcactcatttagtttttcaacaaatatttattgatcaagtactataatacttgcactgtaaagtacaagggatacatcatgaacaagatatagtctctgtcttcacagagtagagagaaaaaaaggaattaagcaaagttgttgagaaaatcagcaggatgatgagatggggtgtaagtagggcagactatgttgataggggrccacagaaggctgccttatactaagacctggaggatgagaagccactggttgtataaaacatagacagagggaacaataatgtaagagccttaaggtgggaatgagcttagcatgttggaaagacagaaaggagacgagactggccagaggagagtaagcaagagggaagaagtgtgggccgagatgagtggtcatgaa

SEQ ID NO: 287078 - DNA, 1221 bp, Homo sapiens
ttctcttgttttgttgaagatcaaccgtctgtatcttcctgttacattctataatttctatagctatggatttgcagcctagagccaaaaacaagaaggaatgtgagaaatgattttagtctgtaattggctaatgaaaaatcaaatcctggaatggaaattcctgtgataaattcactcatttagtttttcaacaaatatttattgatcaagtactataatacttgcactgtaaagtacaagggatacatcatgaacaagatatagtctctgtcttcacagagtagagagaaaaaaaggaattaagcaaagttgttgagaaaatcagcaggatgatgagatggggtgtaagtagggcagactatgttgatagggggccacagaaggctgccttatactaagacctggaggatgagaagccactggttgtataaaacatagacagagggaacaayaatgtaagagccttaaggtgggaatgagcttagcatgttggaaagacagaaaggagacgagactggccagaggagagtaagcaagagggaagaagtgtgggccgagatgagtggtcatgaawtcattgagcccctttaaatggcctgcaacacacatgaattaaacatggtgggctaagtgagagaggctctaagtggcagatattctggctcttttagccaaatgttctgaatagaatccaggtgggacttatgactgcaaagtaatgctgatggccactgtctccccaggtattttcaggaaagatggagaaattaaaatgtatcaaggagaaaaggatatggggaaatggagggagagagagagagagacaatttctgaaataccagggactgcctgatcaagtatcttgaccaatttgagatactaaaatggataaagtaatcagtgttttattaagtcaggctatgaatgcgtgtagacacacacagtcaaagggaaaawgagagggagctgggcgtggggaaatgagacaagtaacaggaataatgtggccaccatttattgaatttgtcatgcattatgctaaacccttcagacaacacatgcggtgtagtcctcacaaatcacctatgaggattatctccatttcacagataagaaaactgagcctcagaagatttcagtgacttgcttgtagaaaaacggctagtaactggtagaacaaggatttagctccagattagcatgactgcaaagcctgtt

SEQ ID NO: 287079 - DNA, 498 bp, Homo sapiens
ccagtcaagtccacacataaaattaaccatcaccacaacaaagcccctatcaaacaacatcactagtacccaggtggcaagagcttttaggaacatctactgccattacaatgaccagctctttcataaaagttgatgccatttgattaaggttttgcagacaggttkaatgagatctaggtctctgtccaggggccaggcatttgggttgtttcccagtgccttaggggaatgattcgcagacttctagaactgtaagaagcctggaggtcatcacatctgagcacctcccaatgcatgaataacactctggccttgcaacacaggcatcaactttcagccttatctatgcatagtcctgggataggtctagaatccttgcagcagttgcctgctaatttcttagagcccagtgatgaaaagactgagataggaagtttcttctaacagaaccatgaatcccagcagtcacagtggacatggtagcaatgggaacag

SEQ ID NO: 287080 - DNA, 305 bp, Homo sapiens
tgtcctgtcaattaccaagtcctacttctgctgaaggtaaggccggcttctcaaaggagagtgmggaatgacagaggagcccaattcaggcctctcccctcactatgctttaaaaggctttccctcaacagggggtactttctattcactagcctcacatgctctaagggacagaattggaaagtcaatgtcagccaggtggagaaagccagggcccttgtcttagagactgtcttctccaaggcagtagggacattaaatgagaaaatgtgcaaaactcctcttgatgcaatgaaggcagagga

SEQ ID NO: 287081 - DNA, 570 bp, Homo sapiens
gccttggcagaccccacaggaaactcgagataaaacatcctatgttggcttgaaatgactgggcttttacaccctgtctccttcagtcattggatggggccattctcagaagggcatgaccttgagcaaggcagctgtcttcacccagcgttagacgtcctcccagtttctacagaacttttgcttacttctgcattttgtcaaaactttttttaaaaaaattctgaggccaagaatagatgtaaaagtacgaagaaacccccagtttggggggataattaaaaccctggtttcctttktcggtaattgttagaatctcttggctccagggctttctttcaagtccccatctccactagcctcatctctggcctctggccaaggtacagaagacaaacaggacctggtttccctccaactcactgcccctcaggcctggcctttggtctgactgctgcttctttctctaactcagagtcctgcagcatgttatccatagcttaggggaagatcagcactgagggataagccccaggctctcagctcccaggggagagttagggccccagc

SEQ ID NO: 287082 - DNA, 476 bp, Homo sapiens
attcctggctcagacctctgctcacactcctaattgtgattcctatgaagtgaagatgctcagagcacctggcttttctttcctacaatagtgtctcatttatcttccctgtctgaggtaaacatctgttgaaccaaattgacaacaataggggaggtgttattgacatggggcagggtgctttgtgtatccagatgcttagaagcctagtcctgggcaattttcctggatgatggggaagaaatagccaaggggggcaggctgtgtgatgggccacatggaattcttagttacacagccccttggttcttgctgctcccctttgtgcttgtcactttccatttgycttccctttgtctcaagtcaattcatattactcttcctattgaggcatgatgttacctggtaccattccaattctgaagctgcctgcatattaatcttgacaatgcacctgtggtttcactcattcttat

SEQ ID NO: 287083 - DNA, 581 bp, Homo sapiens
ttcatctcctatttactcttttttgctttcccagcatcagtttctctgataagtgtggctgacagcctctcatgggcctagagcctttggattacagagcgggtatgaagtgcactcattgtcattttgtaaggggtgggaaaagatagaaggcagaaggtgcagtcatggcttgagatgagaaaacactccccagggagtttttgaccctgatttctttttaaggactcctctcatcctgcccatgagcagaacaggcttcacataatccaaaggtgaaatatgtagcacctcctaagttgggaacacgtgtggagatagaaagatgttaaggagggggaagggaagtggaagggtaaaaaaacagtttccaagatcagaactgatcatcctgcaaatgacttaaggttattggacgaattaaaagggaatgtggaagggcagggagtagtgggggtctgagcccctggaacctgatttgtggtcttgcctagtgtgttggttaataaygagtgtcaacttgattggattgaaggatgcaaagtattaatcctggatgtgtctgtgaaggtgttgccaaa

SEQ ID NO: 287084 - DNA, 1072 bp, Homo sapiens
gatactaagaaaggtttagtgatgggtacacagagacagaggcacagaccaaaagagagcagaataaaagaaaaggagagagaagagaggacagccccaacagttaatgcttaggggaaacttccagtgtgccaggcggggaccagatctcgttatatacattctctttatggttttacgcccataacacttgattgtcagtatcatttcttaagsgggggaaggtgagtaattaagtatcttgcccaggattacactgggattgagtggtagagcaggacttgagcccatgcctgacttcagagctcgcactcagacagtgtgtgcagcagatggcatggccacacataggaaccagcagaaccagaatgggggatagggacaagtacctactgccactgcagagactgctgaaccgtttgaggctaataccttgtctgtttccctgggaagacagctccaaaatgacactattgatcgaggtgtcaawctgggttcaaatgtcagcttggaaatctactagcagcaaaactataggcaattgagttaatacctctgagacttaacattgtcaactataaaacgaatataatagggctgttataaacccaaatgcccatcaawgatagactggataaagaaaatttggcacatatacaccatggaattctatgcagccataaaaccaaatgagttcttgtccttcgcagggacatggatgaagctggaagccatcattgtcagcacactaacacaggaacagaaaaccaaacaccgcatgttctcactcataagtgggagtttaacaatgagaacacatggacaaagggaagggaacatcacacaccggggcctgtcaagggatggggggcaaggggagggagagcattaggacaaatactcaatgaatgcggggcttaaaacctagatgatgggctgataggtgcggcaaaccaccatggcacatgtggcaacaaacctgcagtttctgcacatgtatcccagaacttaaagtaaaatttaaaaaaagaattaaataggttttggatggaaggtattggcacctgtaggc

SEQ ID NO: 287085 - DNA, 355 bp, Homo sapiens
gtttatgatttatttaatctgcaatcatataaggcagatagttttaaagatcttttcatcaagacagaaaattaagaccaactcattttctagttttcacttaaacacactagaccactagacttcacttccttagtgtctagggagaccccttccccctaaggtggcctataatgtctcctttcataacactcatccatactagtaataatttgtttcatctttggtrttccactagactgtcagctatacaaggacagggttcatgtctattttgcttactgctgtatctccaacacttagcacagagtctagcacatagtaagtaaataataaatatttgttaaatgaatga

SEQ ID NO: 287086 - DNA, 355 bp, Homo sapiens
gtttatgatttatttaatctgcaatcatataaggcagatagttttaaagatcttttcatcaagacagaaaattaagaccaactcattttctagttttcacttaaacacactagaccactagacttcacttccttagtgtctagggagaccccttccccctaaggtggcctataatgtctcctttcataacactcatccatactagtaataatttgtttcatctttggtgttccactagactgtcagctatacaaggrcagggttcatgtctattttgcttactgctgtatctccaacacttagcacagagtctagcacatagtaagtaaataataaatatttgttaaatgaatga

SEQ ID NO: 287087 - DNA, 563 bp, Homo sapiens
tctgacatttttaatagaatgcaaaaagacagtgcttctaagtaatataaacaaaactcaagacatgrtgaaattaaaataacatgggtaaaagaaatataaatgatatatggaagaatttggaggaaataaaatatacacatagattagaagagttagtgtgtactttggagttagtaaagaggagtacctttactatggaaagtggaatcataatttgacaatctagtgggataccaaacatggaacaaatcattcctatatgatttagatgaaacaaattattcctgtatgatatattattcctatattaatttagaggcaaagaatgaagagatgaaagtgggggagggaaaaagaagaccataagaagaccacaggcatgttgtaatgaattgggaagggggaaagagtaagcaatggttaaattttagtcacccaaagatgaaatttggaataccaaagataatgtttcactgtttacttaaaacattccataaaatataaaaagtacatttttaaaatttaagagaattcaatatggtaccactgcattcaaacaa

SEQ ID NO: 287088 - DNA, 563 bp, Homo sapiens
tctgacatttttaatagaatgcaaaaagacagtgcttctaagtaatataaacaaaactcaagacatgatgaaattaaaataacatgggtaaaakaaatataaatgatatatggaagaatttggaggaaataaaatatacacatagattagaagagttagtgtgtactttggagttagtaaagaggagtacctttactatggaaagtggaatcataatttgacaatctagtgggataccaaacatggaacaaatcattcctatatgatttagatgaaacaaattattcctgtatgatatattattcctatattaatttagaggcaaagaatgaagagatgaaagtgggggagggaaaaagaagaccataagaagaccacaggcatgttgtaatgaattgggaagggggaaagagtaagcaatggttaaattttagtcacccaaagatgaaatttggaataccaaagataatgtttcactgtttacttaaaacattccataaaatataaaaagtacatttttaaaatttaagagaattcaatatggtaccactgcattcaaacaa

SEQ ID NO: 287089 - DNA, 563 bp, Homo sapiens
tctgacatttttaatagaatgcaaaaagacagtgcttctaagtaatataaacaaaactcaagacatgatgaaattaaaataacatgggtaaaagaaatataaatgatatatggaagaatttggaggaaataaaatatacacatagattagaagagttagtgtgtactttggagttagtaaagaggagtacctttactatggaaagtggaatcataatttgacaatctagtgggataccaaacatggaacaaatcattcctatatgatttagatgaaacaaattattcctgtatgatatattattcctatattaatttagaggcaaagaatgaagagatgaaagtgggggagggaaaaagaagaycataagaagaccacaggcatgttgtaatgaattgggaagggggaaagagtaagcaatggttaaattttagtcacccaaagatgaaatttggaataccaaagataatgtttcactgtttacttaaaacattccataaaatataaaaagtacatttttaaaatttaagagaattcaatatggtaccactgcattcaaacaa

SEQ ID NO: 287090 - DNA, 436 bp, Homo sapiens
aactaaatcataaactaggcctcctccaaacctcatctactaatatagtagtaaaagtcctaaacatgatgcaaaccatattacatatttcaaatgcaccataaccaagtaaggcttatgttagaaatgcatgggcagttagtattgggaaatacattaacataatttgcaatgcaaacmaattattgatagatcaaaggagaaaaattatgattaacagataccccaaatcaaataaaattcaagatgtctttttgattacatatttttaaaaacttctcagagaactatgacaagaaagatacttccttaacaaatgaattttttgtctcacactaatagccaacatcatacttgattataatgtcttagacatagccctattagttttagaaaaaacataaggatgcctgttatcaccactattatttatcac

SEQ ID NO: 287091 - DNA, 555 bp, Homo sapiens
tgtatttagctttggctaacaggaatgattttgctgatttgatcgatgtgtaccactaaactttctccatatcagcaataaggctgtttggctttcttatcatttctgtgttctctggagtagcacttttaattttcttcaaggacttttcttttgcattcactrcttggcttactgtttggcacgaggccttgttttcagcctgtctcagcttgcgacatgccttcctccccaagcttaatcatttctagcttttgatttcaagtgagagatttgagactctttcctgcactgaacacttacaggccattgtagggttattagttggcttgaattcaatactgctgtgtctcaaagaatagggaggcccaaggagagggaaagagacagggaaacagctggttagtgaggcagtcagagcacacacaacatttatcaagttcaccatcttctatgggtgtggttcatggtgccctcaaacaattacaatagtaccatcaaagatcactgatcacaaatcatcataacagacataatcctaatcaaaagtttgaa

SEQ ID NO: 287092 - DNA, 435 bp, Homo sapiens
agtatctttgtgtaccaaatgggcatacatccacactgaagcatcccccaagtatcattgtgaggcacatgtaaggaagcatattgaaagcagattttgaaactacaaaagcatcataaacctattaatttgacttatcactgctstctatgcagagaggaaaaaaataacaggcctcttttacttgaggaaggatttattttgcaattcacaaagcacagtggggaccttttctgacatttgactttagggccaagagatttttcctaagcagctgggatcaaggaaagtgagaggaatgtagcaaacaaagctttggtctaatatttcattttaaccaaaaataacttatatttgtaaatcatgttagcatttacaaagtacatttcataaagtgcatctcattttatcctcacaactctgtgaggcaagtat

SEQ ID NO: 287093 - DNA, 371 bp, Homo sapiens
aaccccacctctccacacccaagtgacaaaagattagaggctattccctttgcaactcccctttccactgcattgtagatgaaaaatggaaaagtacctctgattggctgcaggccacacacgggccaatcctcatttgcrtaaggtgccaattcacttcagcctttgagtagtcatggaacaagcctccacttcaatctttcatttacatagggtgtaaccaatgggaaatctctagagggtattcaaaccccaaaaaactttcctgccagggccctcaagcttcttgctcaggcctactcccattctgtggattgtgcattcacttctattgcctttcacttcagcaaatttactttcattgctggttt

SEQ ID NO: 287094 - DNA, 371 bp, Homo sapiens
aaccccacctctccacacccaagtgacaaaagattagaggctattccctttgcaactcccctttccactgcattgtagatgaaaaatggaaaagtacctctgattggctgcaggccacacacgggccaatcctcatttgcataaggtgccaattcacttyagcctttgagtagtcatggaacaagcctccacttcaatctttcatttacatagggtgtaaccaatgggaaatctctagagggtattcaaaccccaaaaaactttcctgccagggccctcaagcttcttgctcaggcctactcccattctgtggattgtgcattcacttctattgcctttcacttcagcaaatttactttcattgctggttt

SEQ ID NO: 287095 - DNA, 576 bp, Homo sapiens
tgcttcaattgtctttttttaaataaataaataaacatttttgtttgttgagaggctattatcagctgatcactaaaaacatgtatttttgcatattttttctgaattaatcctccaaaaattgaaggaagaggtgttatttccattttactaataaggaaactgaggtacagagaggttaagaaacttgyccaagttcatacgatagtaagtgtaatggagccagaatttgaccccacatctgatcaattccatagactactccttatcccagactacatgaacttctttgtgtctctggtgctttctaaacactggccctggcgtagacagagcttctggaggtcattgtatgttaaattttgattcatgtagtacctgtgcaaatagatttctaacagatatcgcaatgtggtgattgctcacaaggtgttttcgtgttagttattccaggtttgaaaattattttttagcttagtaggtacatgaccttgaacaggtcattcttcctccataggtcactatttccccatctgtagaatgaggatagtgtgaggaatcaattacacaatgtat

SEQ ID NO: 287096 - DNA, 551 bp, Homo sapiens
ctgctctctactcctttattaaactcaatccagaatccctgccccttcacctgaaatgtttagaattgggaacatctgtttgcctctccattgacattgctgactttgatactcattggaatgagtgagttttcctttttgagctgctgtcccataataaagtaaacatggtattgattttccatgcatgttcagttgggagtaaatcttaaacaaatgtgcaacctgctgagcaytcctcactcctccaccttcctacaagagtccttccatgtttttggcacttttgaggaatgtcaataaatttttcaggggttaagaagaaccagggtggaaagagaagaggaaggataggagggaaaaaatgcactggttttcattttcaaaaacaatgataaacatttcaaagatattcattattcacaatgaatacccacagttattagttcttttgcttctcaatccacaagggaaaaaaatcagcctagtccaaaagcatttactgagcatctactagaaaccagaaaagtaaagattcaggaggcataaag

SEQ ID NO: 287097 - DNA, 551 bp, Homo sapiens
ctgctctctactcctttattaaactcaatccagaatccctgccccttcacctgaaatgtttagaattgggaacatctgtttgcctctccattgacattgctgactttgatactcattggaatgagtgagttttcctttttgagctgctgtcccataataaagtaaacatggtattgattttccatgcatgttcagttgggagtaaatcttaaacaaatgtgcaacctgctgagcactcctcactcctccaccttcctacaagagtccttccatgtttttggcacttttgaggaatgtcaataaatttttcaggggttaagaagaaccagggtrgaaagagaagaggaaggataggagggaaaaaatgcactggttttcattttcaaaaacaatgataaacatttcaaagatattcattattcacaatgaatacccacagttattagttcttttgcttctcaatccacaagggaaaaaaatcagcctagtccaaaagcatttactgagcatctactagaaaccagaaaagtaaagattcaggaggcataaag

SEQ ID NO: 287098 - DNA, 551 bp, Homo sapiens
ctgctctctactcctttattaaactcaatccagaatccctgccccttcacctgaaatgtttagaattgggaacatctgtttgcctctccattgacattgctgactttgatactcattggaatgagtgagttttcctttttgagctgctgtcccataataaagtaaacatggtattgattttccatgcatgttcagttgggagtaaatcttaaacaaatgtgcaacctgctgagcactcctcactcctccaccttcctacaagagtccttccatgtttttggcacttttgaggaatgtcaataaatttttcaggggttaagaagaaccagggtggaaagagaagaggaaggataggagggaaaaaatgcactggttttcmttttcaaaaacaatgataaacatttcaaagatattcattattcacaatgaatacccacagttattagttcttttgcttctcaatccacaagggaaaaaaatcagcctagtccaaaagcatttactgagcatctactagaaaccagaaaagtaaagattcaggaggcataaag

SEQ ID NO: 287099 - DNA, 572 bp, Homo sapiens
caggtgtggtggctcctgcctgtaatcccagcactttgggaggctgaggcaggcggatctcgaggtcaggagatcaagaccatcctggctaacacggtgaaaccccgtttctactaaaaaatacaaaaaaattagcygggcgtggtggcgggcacctgtagtcccagctacttgggaggctgaggcaggagaatgacatgaacccgggaggcggagcttgcagtgagccgagattgtgccactgcattccagcctgggcaacagagcgaagatgctgtcagaaaaaaaaaaaaaaagaataagctacagacctagcccataaaaagcagaaaatctcagtcagaaagacagatgtataataaaaaagtaggattgtacagaaaatagtccaagtatgtacaaagtttaggaccagaacaatgactcatctctctaatataatggggagacctcagaggtccttagtaggattttgtaaatagaaaagagaagtgagatatagaacattgcagacagaggatagacaggtggaaaagcatgaaacagcaaggtccttttataggactatgaga

SEQ ID NO: 287100 - DNA, 572 bp, Homo sapiens
caggtgtggtggctcctgcctgtaatcccagcactttgggaggctgaggcaggcggatctcgaggtcaggagatcaagaccatcctggctaacacggtgaaaccccgtttctactaaaaaatacaaaaaaattagctgggcgtggtggcgggcacctgtaktcccagctacttgggaggctgaggcaggagaatgacatgaacccgggaggcggagcttgcagtgagccgagattgtgccactgcattccagcctgggcaacagagcgaagatgctgtcagaaaaaaaaaaaaaaagaataagctacagacctagcccataaaaagcagaaaatctcagtcagaaagacagatgtataataaaaaagtaggattgtacagaaaatagtccaagtatgtacaaagtttaggaccagaacaatgactcatctctctaatataatggggagacctcagaggtccttagtaggattttgtaaatagaaaagagaagtgagatatagaacattgcagacagaggatagacaggtggaaaagcatgaaacagcaaggtccttttataggactatgaga

SEQ ID NO: 287101 - DNA, 600 bp, Homo sapiens
aatcttgtcttgctgaggaaaaagtggaaatgagtgcttcaggatgggtggaaggaccaggaaatcttcaggagacatatgtagggctaacgaygattctgtaaagtgccttgtaggccacactaaggagcttgacttttatcctgaatgtcaaaggaaggcaatgagagattgtaaaaaggaaactaactttaaatttgtacattctaggaagaagatatgagttcagtttttgatatgagtttgaagttcctatctaaattagttaaatgtagatatatctaatttaaactatccaatggggatatattgggttggaatccaggggaagctggagttggggaggagatacagagaggggaatcattgcataagtggtatttgagccagcatagaagatgaacttccccaagttgagtgcatggagtcaacaacagctctggacagcaccctgggaagcatcagcattcaaaaggtggacagagaaagataagcccatgagagagatcaagaatgtcctcagcattggaagatgacaaagatagaatggggtcaggaaagtcaagacacatttcaaggagtgtggtcatcaaagctgaa

SEQ ID NO: 287102 - DNA, 518 bp, Homo sapiens
aggaagtggcagcatctcctgaccctaccacagtgggcaggggtggagaaagcagaaaaggatcaagccccttcataggctcagagtgaaataaagctttcaaagacaagtaaagaacctctacaagtaatggatgagctgatttgcttggacctgttttaggtctcagtgaccttatagctcctcacaccctaggtgtgttgctctttggttcccactcacctgtggatggaggatgatgagaaaaggaagaggctggtttgggagagggagactaaggtgatcaggaaagctaccaacgtccccacaaaccaggggtgggctccagatacagaggggacagggagagtgatctgggacamctatgctaatgctccttgaattgggtactagattctgagaatgaggggctgccctgaaaatgggagtctgagttaagagtgggagaaatgagcttggaatacgggatgatctggaaaggcagggtgatgcaaggaaggggtcactgttgattctgg

SEQ ID NO: 287103 - DNA, 558 bp, Homo sapiens
catagctcactgtaacctcaaacttctgggcacaaacaatcctcctgcctcagcctcccaagtagctaggactacacgtgcgtaccatgacacccagctaatttttaaatttttttgtagagatagsgtcttgcaatgttgtccaagctggtctcaaactcctggtttcaagcgataatcccacctcagcctcccaagttggtatcctcaagttcaaactcttattgaaactcctggcctggaaaagtttcaataagactttgaacttgaggataccagacaccactgagggcagggctgagtaatcttactgaaaacgtggagattgagcatctaaatattagaaaacaaagtccaaagaaacaaataaagacaataaacttgaagggaacagagacaatgtatacaacagaaaagaaccattttaaaacaatttcccaaaaaaataagatattgcatccatgaaacaagagcagagtactataaaaaattgaaagcacagaagaacttttggaaattaaaaatataatagcataaataaaagttttaatagattgg

SEQ ID NO: 287104 - DNA, 558 bp, Homo sapiens
catagctcactgtaacctcaaacttctgggcacaaacaatcctcctgcctcagcctcccaagtagctaggactacacgtgcgtaccatgacacccagctaatttttaaatttttttgtagagatagggtcttgcaatgttgtccaagctggtctcaaactcctggtttcaagcgataatcccacctcagcctcccaagttggtatcctcaagttcaaactcttattgaaactcctggcctggaaaagtttcaataagactttgaacttgaggataccagacaccactgagggcagggctgagtaatcttactgaaaacgtggagattgagcatstaaatattagaaaacaaagtccaaagaaacaaataaagacaataaacttgaagggaacagagacaatgtatacaacagaaaagaaccattttaaaacaatttcccaaaaaaataagatattgcatccatgaaacaagagcagagtactataaaaaattgaaagcacagaagaacttttggaaattaaaaatataatagcataaataaaagttttaatagattgg

SEQ ID NO: 287105 - DNA, 542 bp, Homo sapiens
agtctttttgtttgtacaaagccttccttcaaaagaagatgtgtatttagaagctggcaatacatctgaattcatatatttcaagtgctcgataacggtgtctaccatatccaacagcagactttgttttgttttcgttttaagtgacgggtgtggaagacacgcaaaatagaatgtccagtaatgtacacaatcttgaaagacaccacgagggaggttccatggtgtaatggttagcactctggactctgaatccagcgatccgagttcaaatctcggtggaaccttgaagcttttcttttaatatcagyatgttgaatattgttaattgattttcacagaggggatactcctatgacccaagataatacgacaaaaaaaaaaagtaaactaggacactaccaattatttgtgcttttcctaccggataattgagtcctataacacagtgttaagagaacgtacaataaattatttaaatatgttggaagttgagctaacatttgaaaacatgttaaaatagagatgttatgaagaaacga

SEQ ID NO: 287106 - DNA, 401 bp, Homo sapiens
tctgaaaaaaagcctggtcaactccagacagggtcacccaggctggagtgcagtgacatgatcatggctcactgcatcctcaaactcctgggctcaagaaattctctcaccccagcctctcctgtagctgaggccacaggcaycaccacgcctggctaattttttgatttttggtagagacagggtcttgttatattgcccaggctggtcttgaactcctgggctaaagtgatcctcctgccttagcctcccaatgtgctgggattataggtgtgagccactgcatctggcctagacaattctaatcaaggaggaaaataaaaaagagaaagaaagggaacataaatacacagcattaggaatgggaaaggcgtataaccacaaatgcagagaagattttt

SEQ ID NO: 287107 - DNA, 519 bp, Homo sapiens
ggggagcgcctgagccggaaacaccccccaagcgggcagccggagctctgcactcgctcgctcagccattttcggttgctctccctccctgttttttcgacccatgtgcgccctctctctcacctggctaacatgctttgcgcccgctacctctacctggcttggcytctgagatccaaaccgcgccctcctggcatgtcccgcccaagtcccttagccccgctccccaaccctgccccattcccactctagtacccgtaagctacaagacgccgccgttcgtcgggtggctctgtggcgcaatggatagcgcattggacttctagtgacgaatagagcaattcaaaggttgtgggttcgaatcccaccagagtcgattttatttcaatttttcctttttatccgtttttttcttaaaggcccccatcccttctccccctaccctatctctctctttccacctggtttcaatttcgatctcagttcccgctctgctctcttctttacttacctgtctgc

SEQ ID NO: 287108 - DNA, 519 bp, Homo sapiens
ggggagcgcctgagccggaaacaccccccaagcgggcagccggagctctgcactcgctcgctcagccattttcggttgctctccctccctgttttttcgacccatgtgcgccctctctctcacctggctaacatgctttgcgcccgctacctctacctggcttggcctctgagatccaaaccgcgccctcctggcatgtcccgcccaagtcccttagccccgctccccaaccctgccccattcccactctagtacccgtaagctacaagacgccgccgttcgycgggtggctctgtggcgcaatggatagcgcattggacttctagtgacgaatagagcaattcaaaggttgtgggttcgaatcccaccagagtcgattttatttcaatttttcctttttatccgtttttttcttaaaggcccccatcccttctccccctaccctatctctctctttccacctggtttcaatttcgatctcagttcccgctctgctctcttctttacttacctgtctgc

SEQ ID NO: 287109 - DNA, 504 bp, Homo sapiens
tattccttttaacagtatattatgagcattttctatactttaaaattcttcgtaagtgtattttataatagtgcttactctttatgtttatagatgcaccatgatgtaatcattcattgcaggacatttggcttgcttccaactgtttgctgccataaataatggcatgataaaatctctgtacattaatctttgtccccatttctgataatttctttaggagagattcccagaaatggaattgctgggtcaaagagaatgaatatgtttaagatctttgatatatttccaaatttgcttccataagyctttgtgaatttgtataaccaccatgagtttataaccaggcctgtcttactcactaagttctgtcagatttgtatgttaaaaagtgttttaattaactgcccaatactactgtgatatttgattaagttacgataccatcactagatggaataatatgcatttcattacaattaaaattattgcaacattaaactt

SEQ ID NO: 287110 - DNA, 488 bp, Homo sapiens
aagcttattaagaaagttttagagcaggattctgaagtacacttggaagagggccaagtgggtgacttgagaggttcaagtaaacattttgacctttgacttagggttttatattttggcttacttctggggccttgtgttccttctgctgactcttcccttggggtgggctgtccrcatgcacagtggcctgctagactttggcacgggcgcacgcgcagtgtgtttactggcattgtacacatgtccacttgaggtatttttcccttatcagtacagtgttcctagaggaaggtcatcagccattctgcctcttagtgcacatgcctgagtccacttgctcaactcctgagatcttaccgggaagctgctgatcaccagtttcaggtgcttttgtctcttgaaagacttcctttccctggtgctggctgtggccaattactattattcctttagagagacagtgtaacaactgcctaaccatcacc

SEQ ID NO: 287111 - DNA, 488 bp, Homo sapiens
aagcttattaagaaagttttagagcaggattctgaagtacacttggaagagggccaagtgggtgacttgagaggttcaagtaaacattttgacctttgacttagggttttatattttggcttacttctggggccttgtgttccttctgctgactcttcccttggggtgggctgtccacatgcacagtggcctgctagmctttggcacgggcgcacgcgcagtgtgtttactggcattgtacacatgtccacttgaggtatttttcccttatcagtacagtgttcctagaggaaggtcatcagccattctgcctcttagtgcacatgcctgagtccacttgctcaactcctgagatcttaccgggaagctgctgatcaccagtttcaggtgcttttgtctcttgaaagacttcctttccctggtgctggctgtggccaattactattattcctttagagagacagtgtaacaactgcctaaccatcacc

SEQ ID NO: 287112 - DNA, 465 bp, Homo sapiens
tattactttcttctataggtttgctaactcgtttttgctattctaggaccagcaactatgaacacattatcttactttctatgaacaacagaaaaaaaagcaaacacagtttgacttgtaagtcattgcaaagaaacagaccatatgtttcacattgtgccaaagcttcacaatgaaaaattttaagacagaatgaaaatgtagatgaaaaagaaaggaaggaagaagtggaaggagagagggaggkaggtaagaagaaaggaggaaagggagagttcattcattttctcttcctgaatgataactaataacaaatagtcttttcaagtcatgtcttcatctttacttttcttcctttaaatatgatatatttctacccccttcttatttcttgcagtaaatccatgaataaaaaagccatgttgatctgtattagctctcaatatgacattataatgtgacaga

SEQ ID NO: 287113 - DNA, 483 bp, Homo sapiens
ttggtataagagtttgaaaggcattgtctgatttcagaagccttttcctgtaaatgctgggcggcttctcctactatccctgactggttagtgtgaaaacaacactcttcccctaagaaggtgcagagtcctcctttctcagcagtgaggaggtctaggcctcggcggttttggagagtcactgctgccagagtctatttgggattgtaaagtaaggatagatttcgttatttcytacaaattgtctgagaaatcctttgagagtgtgtggtagtaggataatgaagtagataaaccagcaatcttattaccagttgtatacccaaaggaatataaatggttctaccataaagatacatgagtgcatatgttcatcaaagcactattcacaatagcaaagccatagaatcaagctacttgctcatcagtggtggagtgggtaaagaaaatgtggtacatatatactatggaatactgtgcagc

SEQ ID NO: 287114 - DNA, 1391 bp, Homo sapiens
gaacaaacaaaacaaaagtttataggactaaatcaaaccatatcaatattacattaaatattaatggaatgagcagaccaataaaaacagaaattaccagactagattaaaatgaaatatctaactatatgttgtctacaaaaatgcactgtcaacataaagacacatagaaactgaaaatacayttatgggaaaagatacagcatagaaattataagcataagaagattgcaatggctatattaatatcaactaaaatagacttcaagacaaagtatattwttgctcgctaaacacagagattatctatctatctatctatctatcaatctatctatctatctatccgcctttaacgtgactttatgatgaacatagtttacatactttgctcttgataatgtaatacttgaatttttccataacaacaaatagaaatctacattgtcattttcattattgagtcatattcattgatacgattatacatttgcaattttgtaggcaatctggttttgttgtgaattggttttcaatattaaactattcaaagagcctaaccaaaaatatttttccacatatcttcttatacatttcaaatcatttatttaaggtatattaaaawattaataatgtgaaatattgtggtttgtaatgtcaaattgcctctaaaatgtgtgtaccaagctatattcccaacagtaatgagtgttatcaatattttaaattttagaaagattggaatattttaaaattcaagcaaggagctttactgaacaattaaaagaaaaataggtagatagataaatatagctgtagatatagataatatgtatatctgtaacctctcaaagtgwtttttgctctatctaacaaatcttaaaaacaaaatccaaaattatcgaactgttttcatgtaatttaactgcatctgaaaacaaagctcaagaatattcaagggaacaaaaaaaaatgaagcccctaaaaagaaaaaaaattcacawtatctagcattaaataaaaatttaccagacatgtaaagacgcaagaaaataaaacttgttataaggagaaaaaaaaatcactccattgaaaccaatcctgaactgacacaaatgttaagaataaacatagaaagacattacaatggctgttataactacgttcaaaaggtttaaaatgtgagcggcaatatcaagcatgctgagacacaaaatttgttgaaaaaatcaaatttgtagagagaaaagctacaatgtctgagatgaaaaatacattaaatggaattaatggcagaagagacactgcagaagaaaagatcagtgaacagaaaggcatagcaatgcaaactattcaaaatgaaaaacagggaaaaatgactaagaaaaaat

SEQ ID NO: 287115 - DNA, 534 bp, Homo sapiens
tttttgctctatctaacaaatcttaaaaacaaaatccaaaattatcgaactgttttcatgtaatttaactgcatctgaaaacaaagctcaagaatattcaagggaacaaaaaaaaatgaagcccctaaaaagaaaaaaaattcacaatatctagcattaaataaaaatttaccagacatgtaaagacgcaagaaaataaaacttgttataaggagaaaaaaaaatcactccattgaaaccaatcctgaactgacacaaatgttaagaataaacatagaaagacattacaatggctgttataactacgttcaaaaggtttaaaatgtgagcggcaatatcaagcatgctgagacacaaaatttgttgaaaaaatcaaatttgtagagagaaaagctacaatgkctgagatgaaaaatacattaaatggaattaatggcagaagagacactgcagaagaaaagatcagtgaacagaaaggcatagcaatgcaaactattcaaaatgaaaaacagggaaaaatgactaagaaaaaat

SEQ ID NO: 287116 - DNA, 685 bp, Homo sapiens
tggctgcggtctcaaccaggtatctatcattgattctcttagatgaaaaatgattttatggttgagaaagctttagccaatgactattggactgacttatgccaaactatagaatatctgtctatctattctgtctaaatagattaaatagatagattaaatagataaaatagattagatagatatatagggtatctattatctatctagatagaatatctattatctatctatctagatagggtatctattatctatctagatagataggatatctattatctrtctagatagataggatatctattatctgtctagatagataggatatctattatctgtctagatagataggatatctattatctgtctagatagataggatatctattatctgtctagatagataggatatctattatctgtctagatagataggatatctattatctgtctagatagataggatatctattatctgtctagataggtaggatatctattatctgtctagataggtaggatatctattatctgtctagataggtaggatatctattatctgtctagataggtaggatatctattatctgtctagataggtaggatatctattatctgtctagatagataggatatctattatctgtctagatagataggatatctattatctgtctagata

SEQ ID NO: 287117 - DNA, 685 bp, Homo sapiens
tggctgcggtctcaaccaggtatctatcattgattctcttagatgaaaaatgattttatggttgagaaagctttagccaatgactattggactgacttatgccaaactatagaatatctgtctatctattctgtctaaatagattaaatagatagattaaatagataaaatagattagatagatatatagggtatctattatctatctagatagaatatctattatctatctatctagatagggtatctattatctatctagatagataggatatctattatctatctagatagataggatatctattatctgtctagatagataggatatctattatctgtctagatagataggatatctattatctgtctagatagataggatatctattatctgtctagatagataggatatctattatctgtctagatagataggatatctattatctgtctagatagataggatatctattatctgtctagatagrtaggatatctattatctgtctagataggtaggatatctattatctgtctagataggtaggatatctattatctgtctagataggtaggatatctattatctgtctagataggtaggatatctattatctgtctagatagataggatatctattatctgtctagatagataggatatctattatctgtctagata

SEQ ID NO: 287118 - DNA, 685 bp, Homo sapiens
tggctgcggtctcaaccaggtatctatcattgattctcttagatgaaaaatgattttatggttgagaaagctttagccaatgactattggactgacttatgccaaactatagaatatctgtctatctattctgtctaaatagattaaatagatagattaaatagataaaatagattagatagatatatagggtatctattatctatctagatagaatatctattatctatctatctagatagggtatctattatctatctagatagataggatatctattatctatctagatagataggatatctattatctgtctagatagataggatatctattatctgtctagatagataggatatctattatctgtctagatagataggatatctattatctgtctagatagataggatatctattatctgtctagatagataggatatctattatctgtctagatagataggatatctattatctgtctagataggtaggatatctattatctgtctagatagrtaggatatctattatctgtctagataggtaggatatctattatctgtctagataggtaggatatctattatctgtctagataggtaggatatctattatctgtctagatagataggatatctattatctgtctagatagataggatatctattatctgtctagata

SEQ ID NO: 287119 - DNA, 1335 bp, Homo sapiens
tggctgcggtctcaaccaggtatctatcattgattctcttagatgaaaaatgattttatggttgagaaagctttagccaatgactattggactgacttatgccaaactatagaatatctgtctatctattctgtctaaatagattaaatagatagattaaatagataaaatagattagatagatatatagggtatctattatctatctagatagaatatctattatctatctatctagatagggtatctattatctatctagatagataggatatctattatctatctagatagataggatatctattatctgtctagatagataggatatctattatctgtctagatagataggatatctattatctgtctagatagataggatatctattatctgtctagatagataggatatctattatctgtctagatagataggatatctattatctgtctagatagataggatatctattatctgtctagataggtaggatatctattatctgtctagataggtaggatatctattatctgtctagatagrtaggatatctattatctgtctagataggtaggatatctattatctgtctagataggtaggatatctattatctgtctagatagataggatatctattatctgtctagatagataggatatctattatctgtctagatawagtgatgccatgtgacttctgatgctggattatgaaagaccacacagctgttgccttacattccagaacacttgcttttggagccatgtaaggtgttcaacaaccctgataccaccatgatggggagaccacaggtaagcatcctcactgacagtttcagctgagtcattcttcggagatcccagtcagggccatawctggagaaagcatctaggaattggattgtccagctgttctgtccccttgtcattcaagtcaccgctggtcattatgccacctgcactgaagccacaaacattacagaaagaagaaagactttcatgtttcacccattctcgattcttcacacacaaaatttgtgaacataataaagtagtttttgctttttattgctaaatttgggggaaagaatagagttgttatgcagcaatatataactaaaatggaggtccacataaggcaaaaacctcacagaactcttctctatgctgggcagctgcccttttccaaaccccagcagtttactaaagggtaaaacagggtctggatatcagagggagatgacaggcacatctgagagcagaagtatagcactaaaaacctggtatgcatgaaaatgtatctactaaatcttaatgctgccaatttt

SEQ ID NO: 287120 - DNA, 595 bp, Homo sapiens
gtgtgttgcaggggtaggaagggcaatgacattttgagataccagaaaagagagaactgcataatacaaagtaaaaatgaagctgaaaaatgtcaaacagacaaagatactaaacctcatttgcttcagcttgtcaaactcaatttcgtctactacatgtaaaaaatcttttgaaaaataattaaatgcaagaggctgcaaggtctaaaaatgattcctgaagttaccagaattcttaataaaaatttcaaggggtatggatgtatctgggtrgcacagaaagctcaagctttatatctggattaacaaagaactacaaaaatagcaagagaggcctctcctcacacagtcactacagtgccaaagaataattgaaactatgaatggaggacggggatggagtaaggtttaaggccaacacttttctatttataattttattgtattaagagatcaattccaagaaactgatgtttttcaaggaagcagactactttgtttcctataaatctttttttttttatttctgttgcgacaaacacagtgataaaggaaaagttcacacagaaagtaaaggttggtcacattgaaaata

SEQ ID NO: 287121 - DNA, 513 bp, Homo sapiens
gaaaacgaataaaaattacaatgttattgtatcttactatgaccttagaatttctcataactactatcctgagtctgtttccatttggacatcatttaagacagaccatttggayaccagttagttaaatctagccttggtgcatatatatatatttgagatgaagtcttgctctgtcccccaggctggagtgcaatggcatgatctcagctcactgcaacctccatctccaaggttcaagcgattctcctgcctcagcctcctgagtagctgggattacaggagtgtgccaccatacccacctaatttttatttttagtagagatggggtttcaccatattgaccaggctggtctcgaactcctgacctcaggtgatacgccagcctcagtctccaaaagtgctaggattacaggtaagagccaccgtgcccagcctggtgcacccatatttttgaatcaagagcattgacataaatattgaaacaaaaacacagccctataatatgaagtc

SEQ ID NO: 287122 - DNA, 619 bp, Homo sapiens
agagtgaggtgtcaagtacacagtagtaagaatacaaggtagaattaggatgcatagtgtaagagagaagaaagtgccatgtgaatttaaaagaatgcattaataaggcaatttggaaaaaattaggatatattgtatgaaagacctctgtgcatagaactcacttattgctaaaaggtttcctttaccctaaaataaattagcccacctcctaattcttttttacagtactatagcatcatatatgtatttttaaacaaatagtcattgaaatattatttgartacttcctatgtgctgtgattaaaacagtagttaatgtgacagaaacatattttggtgagaaagaataatattaaacaagcatttctaactgtaatgaatatgcaggacattttgaggaaaggaacaggaagacatcatccagtgtgaggtaacaacaggcttcaccaacaagtggagtaatagtgattaagtggtaggataaactcctgaaagtcttaataaaaattcgcttggagtggtgttactgggaataagtaaccaggaaggatgagatgatcacagaggggaaggtctggacttggttgtgacaatggaagtgaatatttgaagtagg

SEQ ID NO: 287123 - DNA, 566 bp, Homo sapiens
gtaggcagaggttcacaaacctcagttgttgtcttctgtgcacctgcaggctcaataccatgtgaaagctgccaatgcttaaggcttgctccctctgaagccatggcccaagctgtaccaaggccccttttagccacagctgaagcagctgggacacagggcaccaagtccttaggctacacacagcaggggggccctggacggagcccgggaaaccatattttcctcctgacctctaggcctgtgatgggaggggctgccacagaggtctctgggttgccctggagacattttctccattstcttggtgattaacatttggctcctcattacttatgtaaatttctgaagccagcttgaatttctccttagaaaatgggtttttcttttctattgcatggtcaggctgtcaatttttcaaacttttatgttctgcttcccttttaaatgttaagttccaattccaaaagatccaattccatctttgtgaatacataaaactgcttctaacagtattcaagtcaacttttgaacattttgctgtctagaaatttcttctgacagat

SEQ ID NO: 287124 - DNA, 499 bp, Homo sapiens
aatatgttcccatatatattttgaaataactgtgattcaggtgcttctgttagctgccaagagtacatcctaatgcacaggagttaagaattgcctcaagagacrtaaaaacatatattattaacattttaaatatcaaaatactgcttcatcaagagatattgagcctgaataatattagagcttttaaatctctaggcttttaaagctctattacttatacaatctttacatatggcagcagaaactctaccttttaggctttgcttttcaatctcctttctgagagcactttaactagagagtttctctgtcacaccatgtcacagagtcttcctcaacaattaaggttgggcagctatttgctccttgattctcctacacactttgtacataaagccctgaccaggtttgatttaaatttctggttttacacatatctccccaatgagactgtaggcactttgaaagcatagaaaatgtcatattcaccattgca

SEQ ID NO: 287125 - DNA, 581 bp, Homo sapiens
agtactcatgctatcagttgagttcctaaatggagctgtgtctgcagtaaacatgtgcctgggattttgacctgcatgagtcaatatgttcccatatatattttgaaataactgtgattcaggtgcttctgttagctgccaagagtacatcctaatgcacaggagttaagaattgcctcaagagacgtaaaaacatatattattaacattttaaatatcaaaatactgcttcatcaagagatattgagcctgaataatattagagcttttaaatctctaggcttttaaagctctattacttatacaatctttacatatggcagcagaaactctaccttttaggctttgcttttcaatctcctttctgagagcactttaactagagagtttctctgtcacaccatgtcayagagtcttcctcaacaattaaggttgggcagctatttgctccttgattctcctacacactttgtacataaagccctgaccaggtttgatttaaatttctggttttacacatatctccccaatgagactgtaggcactttgaaagcatagaaaatgtcatattcaccattgca

SEQ ID NO: 287126 - DNA, 537 bp, Homo sapiens
ttttaaaaataagtttttctgttgggtttcaggttccttttaagttgttatcttttattctcatcctactaggagagtaactcaataatatgatcatattaacaataataataattgctgacattcattgaatgttagtgtgttacgtactatggtaaactctttccatggattactttatttaatgctcacaatagccctaaagattatgtacttaaattagcttcattttatggataaactgaactgaggtatattgagatgaaataattgacccaaggtcatataggtagcaatttgcaaatcatagtttcttattcaggcattctgacctcagctctggcactcttatcrctagaaattgtcaggcaataaaaaaatactagttagtttatacagtattaggtttgacttatgcagctagcaataaataggtgccagaataatttctttgactctctcaagttttattttaaagctgaatgtgttcagagtagacattatcatgtacttgttagcatctaggacatgccccca

SEQ ID NO: 287127 - DNA, 557 bp, Homo sapiens
acaggcacagacacacacacactcacacacacacatatatgtttaaagatatatctgtgtgtgtacatttattttatatgtgtatatatgcttatttattccaagactactctaccttttaataatttttgaaagaaatgtatattttacatgatataaaattcagaattaaaatattatcaaaayattggtacactattagacatgcttctcttgctggttaatatctacttaaggcatataaaatattaagtaaacaaaattattttaaaaagtaataccacccctgctcctgggatctgataaaatgtgacacaagcttactgaattacttccatattcaaagtctgttttcctattgttttaagctctttgtctaccagagcaaatgttgcaaaagcactactcatttttctagagaattataaatctagaagtataaattataggatattaaaatataatttcttaagaattgtgaacacaattattaatatgctgaggataattaagccatgggcatgtgagagtagttattggatacaggaatcattcgt

SEQ ID NO: 287128 - DNA, 557 bp, Homo sapiens
acaggcacagacacacacacactcacacacacacatatatgtttaaagatatatctgtgtgtgtacatttattttatatgtgtatatatgcttatttattccaagactactctaccttttaataatttttgaaagaaatgtatattttacatgatataaaattcagaattaaaatattatcaaaacattggtacactattagacatgyttctcttgctggttaatatctacttaaggcatataaaatattaagtaaacaaaattattttaaaaagtaataccacccctgctcctgggatctgataaaatgtgacacaagcttactgaattacttccatattcaaagtctgttttcctattgttttaagctctttgtctaccagagcaaatgttgcaaaagcactactcatttttctagagaattataaatctagaagtataaattataggatattaaaatataatttcttaagaattgtgaacacaattattaatatgctgaggataattaagccatgggcatgtgagagtagttattggatacaggaatcattcgt

SEQ ID NO: 287129 - DNA, 557 bp, Homo sapiens
acaggcacagacacacacacactcacacacacacatatatgtttaaagatatatctgtgtgtgtacatttattttatatgtgtatatatgcttatttattccaagactactctaccttttaataatttttgaaagaaatgtatattttacatgatataaaattcagaattaaaatattatcaaaacattggtacactattagacatgcttctcttgctggttaatatctacttaaggcatayaaaatattaagtaaacaaaattattttaaaaagtaataccacccctgctcctgggatctgataaaatgtgacacaagcttactgaattacttccatattcaaagtctgttttcctattgttttaagctctttgtctaccagagcaaatgttgcaaaagcactactcatttttctagagaattataaatctagaagtataaattataggatattaaaatataatttcttaagaattgtgaacacaattattaatatgctgaggataattaagccatgggcatgtgagagtagttattggatacaggaatcattcgt

SEQ ID NO: 287130 - DNA, 376 bp, Homo sapiens
ctctgtggggtaacaacctctggaaaatcagagtttgagggaacatttctatttccatctaaaggaaaacatgcatttcccatgtcaaggagctacaggaagttcctaacgcatggaaatttcccaggatcccacacagataccaaggaaagagtgagccttaaacagctgtcatctagagcaccctaactcagatagtaatgtcactctrtgaaaacttgtcttttcccccaatctctaacatgagagtggagagaagcttacataagcagactggagggaggtgaaaaagtggggatggataaaagaaaaactgaccacatactcattcctggttttgtttgttggagaccccaggctggggaagggaacaaga

SEQ ID NO: 287131 - DNA, 475 bp, Homo sapiens
attgtatctaaatgtgtggtacagactatggatgaagcaagagactaatggctgttaagaagcaagtgactaatggctgtttctataaaagagtgatggctttgcccctattacaaaatgatattgattttagctggcagtacagttcacagattggaagtcagccagcagttgaactcatgcagagaaccatatgtcaaaactagacttctgtgcaagtaatgcggagtttgtccttagtgaaacctmtgtcacaggcaaataccttaaagataatcccagggttcaaaagtccttttaagtcttagtagatatgaacaaaaggttgacagaaatgaattttgagtgtccaacaacattgtcttaccaatttgccttgtgaaacgtgattagacactccaagtttccataaaataaactaagatgacaaatcttcttatataatgagattaccttacttttgtttaaggaatat

SEQ ID NO: 287132 - DNA, 475 bp, Homo sapiens
attgtatctaaatgtgtggtacagactatggatgaagcaagagactaatggctgttaagaagcaagtgactaatggctgtttctataaaagagtgatggctttgcccctattacaaaatgatattgattttagctggcagtacagttcacagattggaagtcagccagcagttgaactcatgcagagaaccatatgtcaaaactagacttctgtgcaagtaatgcggagtttgtccttagtgaaacctctgtcacaggcaaataccttaaagataatcccagggttcaaaagtccttttaagtcttagtagatatgaacaaaargttgacagaaatgaattttgagtgtccaacaacattgtcttaccaatttgccttgtgaaacgtgattagacactccaagtttccataaaataaactaagatgacaaatcttcttatataatgagattaccttacttttgtttaaggaatat

SEQ ID NO: 287133 - DNA, 430 bp, Homo sapiens
attttattgagtgacagaaagctctcagcatggagaggggacctgaaagtggtttgccatctgtgaggctgagtctggggtttttatgggcttataatgggagaacgtggccgattggtccgtttgtggtcttggcaaaagcaccattcgattagttaaaaggcataattcagaaggaaccaatcgaaagggagtgggtaaggtggggatggaagttctcactccagtcatggaccatatccagaastggcatttcacttttcaggctttaggctgtccttggcttaaggagtttgatttcactggggacccatccctgtctgcctcctgtcactatcagagagtcatgtctatcttgattggagaaatggtctttatttcttccttacaagtattttctgttcttcctgactctgggttaaacctcctg

SEQ ID NO: 287134 - DNA, 430 bp, Homo sapiens
attttattgagtgacagaaagctctcagcatggagaggggacctgaaagtggtttgccatctgtgaggctgagtctggggtttttatgggcttataatgggagaacgtggccgattggtccgtttgtggtcttggcaaaagcaccattcgattagttaaaaggcataattcagaaggaaccaatcgaaagggagtgggtaaggtggggatggaagttctcactccagtcatggaccatatccagaactggcatttcacttttcaggctttagrctgtccttggcttaaggagtttgatttcactggggacccatccctgtctgcctcctgtcactatcagagagtcatgtctatcttgattggagaaatggtctttatttcttccttacaagtattttctgttcttcctgactctgggttaaacctcctg

SEQ ID NO: 287135 - DNA, 562 bp, Homo sapiens
gcacattttattaagattactatcttattttttaaacatttccagaaggtattattatgtgaatattacttcttttagtatgattttgctttttattttaaagatacaatatcctgtcttatctctcttaggatattatatataatatgacataacataatataatgtcattatataatatataatatgtatttttgttaatattactttttaaacctatattgtytctattttgcgtttttaaaaattattgtttaactgttatgctttatcttttatgcttaaaagtttggtgattttatttaagagtgacacactaaaaacttgattggatagaagtagtttagattagtgattccactatgatgtcaggaacttgatttttttcacccgtcagtatccatagaattcttttctgaagtgattcagttttccagaaaagagtctctcagtttcctgcctaacaaaaaatgtctggcaactggtgccctgagccaattcaggcaagggtgactctgacttgtacttactgaggctattttctccctctcttcccttgcac

SEQ ID NO: 287136 - DNA, 613 bp, Homo sapiens
atttcactgctgaattctatgaaatatttaaatttaaagaactaatgttaatgctacttaaactattctgaaaaattaagaagggaatacttctaaactatcctacgaagccagtaataccctgataccagaaccagacaaagccacatcaaaaaaaagaaaactacagaccattatctctgatgaacatctatgtaaaaatcattaacaaaatacttgcaaaccaagttcagcaacacattaaaaagttcattccatgaacaagtgggattcatccaagtgatacaaggatggctcaacatacacaaatcaatcaatgtgatatatcacatcaacaggatgaaggataaaaaccaaataattttaattgatgctgaaaagcattttataaaattcaacatsacttcatgataaaaattatcaaaaactgggtacagaaggaacatacctcgatacaataaaagctaacatcatactaaatggggaaaaattaaaggctttcttctaagatctagaagaagacaagattgccactttcaccagtgttaatgctctagtcctagctagagcaatcagacaagagaaagctataaagggtatgcaaactggaaag

SEQ ID NO: 287137 - DNA, 598 bp, Homo sapiens
tgccctgctactatgctccagggacattcaatactctacctaccacaatttatagggctccaaaatctcattttagtttcttgggtcactcctggtatcagcggtcacaggtttggttcctttggaggcattcactaacaggaaggctagagggcataaagctgggttggacataaagagatgttgagttgtgacgtggccccaacaaaggcctcaggtcaccctatgggagactctggagttctggagctgaaatggcccatgttgggctaatgaaactaggccttcccacccttctattgatcaacattgaacatgcacagccccagaaagaaagcrtgaccttgggcataataattttcttcagctgaggcaatccttaaagagggttgacagctgaggtgtgtcttctggcagtactcccagaacctagggggaagattcttctgatgatatttctgataagatatctggcagtatatcatggcatctaccacagtccttgtctctacttctttcgtgtagctcagaaatcaccccactgctttctgactttcctaatccctacttcacgaagacaaccctaacagaggtcact

SEQ ID NO: 287138 - DNA, 386 bp, Homo sapiens
accaatcctcaaaggagccctcagaaaaatggatccccaatttcccayagttgtaatttgatcattaacataccctgtactgacccctcagtcttatctggctctccccatgtgctaccccaggtgcacctcctgggataaactctgaaataactacctgtccccaagtctctatctcgaggtctgcttttgtggaaacccaaactaacaccatgggctttggaataagataaatttttattcttgtttaatcacttggtagttgtctggtcttgagcaatttacttaacctttctaaatatcaattttcttatctacaaaatatagatgatagtcactatgcttacttcatagaactactgtggagattaaagatgtaaaacaaa

SEQ ID NO: 287139 - DNA, 1123 bp, Homo sapiens
tttcacacgttgatttttcagcaagccttcagagggccaagtccttggcccctgcaatggctatcttctccctgcatggtcttctgtctgtacctttctgtgtcctaatttccttttctaataaaaacaccagccagattgaattacrgcccccactaaagactttattttaatttaattaactcttcaaagactctacctctaaatacagtcacattctgaggtactaggggttaggacattaacattaatttgggatgagggacaatttagcctataacatttacaaactagggagaataatgcctatcatgcaagtactgggtaaaaaccaatgaaaaattgcacactgaaaatagaatcttataattatcaaagtaactgaggctgcccaattataatactatgtatgtagttcaggccagctcaaccttcaagcagacaacaaatcctgctatggtcctttgcagcaaataaagatagaagagcatcaccacattctgtgacagaaccacaaaaawcaccccaggctacagcccggtgaacggaactgtgatgcatgaaatgaggggggaaagaccggtgaggtcatgctggccttgttaactgttggcaaaaaagcaggcaacagaaaggggaatgtcaggtaagtgttttacagtttaaagatggaggtgtagagaagtaaggcatccggcctagaaaattcccaagccctcccaggcggcttccccttcccctccccagctctgaggactttgctgaggtgcccgtggacttaaatggcctgcatttgtttatcacccctgccttggcaggggattatccccagttgtcacaccatttgtgacggtccacagttctcctgctattgtggtggctgatggcgactgggtattttaaatgatgaagwaaagagaagtcaatgatcaaatccaacaacattagccataataatttttttttgtcttttgaaagcccctggaagagaataaggagacaggcctggacaggatttctgctttgcttaattacaaatagacatattatagtaggtattaatgattgtattagtttaggaatttcaaatatgactcaagtttgaatattatgaatattatgt

SEQ ID NO: 287140 - DNA, 591 bp, Homo sapiens
gcttgtgtatgttgctttatatccctgagtctttccttttttatcactcaagtgcaaatactctgtttactaagttcctttaaaacgttcagatttgataagctttatcctcatttaccgcattgtgcccctacctttggacacacacacacacacacacacacacacacacacacacacasagacactctcctctctctaccttattttacttccttggtaaactttaaaaaagtcttcatgactcagctcagtaatcaattcttctcgaagtgataaattgttctctaattcctctttcctacctgagccaggcttaagtagatatcctttgtgttgtcttcatacctatgtctatctacataattgaactctgctgtgttgttataaggtatttacgtgtcttttaccccaactacagtctaagatccttaaaggcagggattatgtactgttcattttgaggactggcaattagttgtttcttaataaatattctttactgagtaaataaatgaatgaatatttaacgtatgagaagctctttgaaaagaataaaataaaatgtacaatatgatatttttcaaatat

SEQ ID NO: 287141 - DNA, 336 bp, Homo sapiens
atattatgaatattatgttataattatcaggctttaaatgcaaatctatctcaaaagaaaaatccccatcaggtaaaatgatctcattgcatattggggatatgatgattgaggtcatctctggctcacaaggggctttgtgggtagctccagagtatttctgttattcttgtagtagtcagtgaagaattgatagrtgtttatggtttagctgtgtctttctttataaaactggttttggataagtattttatgacagagtagactgaagagaggcaattgatagaataatgaaagggcagagtggggttcaaattctaggtctgccacttggct

SEQ ID NO: 287142 - DNA, 1757 bp, Homo sapiens
ctgggctgtctctgcctggccctctccctgtgctccrtcctccatctatctccacagttcctttaatgaagaagtttgagacaagcaaactcttgtctcatagttactgtctgacagtttttagaaattggacatttccttttaggtcaatgagattgtccaactgatgaagattcacccagagctccaccattaatttagctttggccttgaccactattgtttttcacctgctgggccttgtctctccatcactgggaacttggaggaataatgatagacttcaaaaaatgttgtgcccaaacctgaaatgcacattctcaatacagtaggtgtagaagaaaacttaggaaaggtgactaaagctaacaagggggcaaaatgcacagattatagtgttttagaaagacttgattctagaaagaccaaaccagagagaggatataatctagaaaatgcataagattatggaaagtaaacatatgctcttcatcatgcttgatagaaagactggctgcgtgttgaaatgtaaaagaaccagttctaagaaaataagaaaaaaatattttacaagtaaataaaacawctgggctgtctctgcctggccctctccctgtgctccgtcctccatctatctccacagttcctttaatgaagaagtttgagacaagcaaactcttgtctcawagttactgtctgacagtttttagaaattggacatttccttttaggtcaatgagattgtccaactgatgaagattcacccagagctccaccattaatttagctttggccttgaccactattgtttttcacctgctgggccttgtctctccatcactgggaacttggaggaataatgatagacttcaaaaaatgttgtgcccaaacctgaaatgcacattctcaatacagtaggtgtagaagaaaacttaggaaaggtgactaaagctaacaagggggcaaaatgcacagattatagtgttttagaaagacttgattctagaaagaccaaaccagagagaggatataatctagaaaatgcataagattatggaaagtaaacatatgctcttcatcatgcttgatagaaagactggctgcgtgttgaaatgtaaaagaaccagttctaagaaaataagaaaaaaatattttacaagtaaataaaacawctgggctgtctctgcctggccctctccctgtgctccgtcctccatctatctccacagttcctttaatgaagaagtttgagacaagcaaactcttgtctcatagttactgtctgacagtttttagaaattggacatttccttttaggtcaatgagattgtccawctgatgaagattcacccagagctccaccattaatttagctttggccttgaccactattgtttttcacctgctgggccttgtctctccatcactgggaacttggaggaataatgatagacttcaaaaaatgttgtgcccaaacctgaaatgcacattctcaatacagtaggtgtagaagaaaacttaggaaaggtgactaaagctaacaagggggcaaaatgcacagattatagtgttttagaaagacttgattctagaaagaccaaaccagagagaggatataatctagaaaatgcataagattatggaaagtaaacatatgctcttcatcatgcttgatagaaagactggctgcgtgttgaaatgtaaaagaaccagttctaagaaaataagaaaaaaatattttacaagtaaataaaaca

SEQ ID NO: 287143 - DNA, 552 bp, Homo sapiens
gttttctattacatctgcattgctttttctgtgtgctactgtttcacatcttaataaagagaaacaattcatttggtaaataatctataatacaatttccagagagtactctgccatttctcaactgccagatatattttatttttcctctgcatgtaaccaaggaaaacaaggttgcaaaatgatgccagcttctgcttttcagctacgaggtgtcaatagcccttgattttgttgctgttgtcactaatttctgcaagttcaaaaaaaagtgtcataaaaacaaattgcctttaaatatcctatcgttattcacacagtattcttgtgagaggactttcaatatatttggcgtcgtttttgaaatcacttttaatcactaatattcaggcccttagaaaggctactcagactctattttttatttcctctgagtcttttttttttcttgtgttttcatartgacatttttactataaagtcgcattcttgtttaggacaatggcatcttgtttttaaggcaaacaaacactagacaatttgttttgaaaa

SEQ ID NO: 287144 - DNA, 472 bp, Homo sapiens
tcttgtaagagtgtaaatggatgtcatcttgagctgactgaatgctaattattttgccacttctgaatccttaaaaaataaaagaaagagaagaaaagatggcccatttgcatgctaaaaatatgcgaaagactgtatgaaatggaagytggggacattatgacactctcaggtctcaggatgccattggggatttaatttattttactcttttgcttggagatagtctttggcctaagaaactttggctagtaaaatctttgaggtccacctgagacagtgttcatgagcatcaatacctgtgggcagccaaaaagtgtgtgccaggctcagagctgggactggtaagtgtcttgaattcaactctgggaagagagagttttcatagtgtcttctcagtgccaacacctttgtaaaataaaggtcagatctgcataatgaaacaaaagcagggccagatcaggaagaaggg

SEQ ID NO: 287145 - DNA, 602 bp, Homo sapiens
ttatttaaaacaggagccagttggtgtatgatgggggtggcatggtgctagcggtagataggaggcaaagctggtgaataagcaaaggtatgactgggtgatcacattcagaaagcaggcaggattagatcattttagttacatacgccaaaagaaaggggctgaaaaagaagagtaaaatttaccactacgttaaagtttttcttaactaaacttctagaaatttgcttctcaatgttggttgagattcctttttagtccccagtacttacaacacatctatccttggcatataagatcccttcaatttagaaggaaaacatatcagctgatgaattacaaatacactcccctttcagtgtcactctatatttaaatgagtttagatgatttatatgtatgaatgyaaatataagatgcatgaggtgtgcatataagcggactacctgatttcttaagcctcacacacaaatcagtctccttactttaggtctcacttcttatgtgaaagataactgatggtatcacgtttccatgttaaaaaaaatatgaattatcaagcacttcatttgggtgcttctgtttatacattgatgcccaaa

SEQ ID NO: 287146 - DNA, 594 bp, Homo sapiens
atggggatattaaagctgttctcaagttttggaggcacattatctaggagcaagagtggagtgattctggattgcttcgcaagacaaaggtgcaatcaatgggcatatattagaaacaggcagattgtatctcattttaagggaaattttctaacaagcagttgtcttgcagtggaatgagctgccttccaaagtcattactgataatatttaaaaaggatctaaagggtcattcaccagggccttgtagaacagcttcctgcacttatagactagacaatctctgaggctctttaaatactatgatgctrcctttctgtaaaaccctcaacactagattagctggctgacccacccgagtgacatcaggattttgtgtgagccttgggaacaaggacaggaggcaagtaacagcaaaaatgagtcagaggaagcaacacttccaatctgtcacctgttggcagttgtagtcttttgactgtctttagcctgttggctactcacctccccatctattctctaaatgaagtactccagcaattgagcttgattcaacaagcatggacgctgtgctgctataaatcatcggtccct

SEQ ID NO: 287147 - DNA, 587 bp, Homo sapiens
aattgtaagcagaggctgcctggccccatcaatttttctgggacacagacgccagggatgaaaatgtcaagtggtccacaggcagcattgttagtgtgcctggtgaggatgaggagcaggagcgactgcggtctgagatttttaataggcagggctgtaaaatgttggccaggcctaagtcacagatgcaccacagagctctttcaagcccttattccaatgttccatttgtaactatttttaaccttattaaaaaggagcgaaatgcatcagcttcacaagcgcgtactagagtcytgcagtaaatttctttggtttataactccacctttgattcagaaggtcagcgggcatgagaacgtggataaacataaatctcctccagatctgcttgtgggaaccatacgcagttagggatgtgctggagaccagcaccgggtctccgctggagcagaggggaaggcgaggctccactcttcgagttttcaggcagctcaatcttcaattcaatcttgcaaagacagaattggtggcatttgtgtaatagaaacacagacaaaagtcataagcatgtacccaggcaagtg

SEQ ID NO: 287148 - DNA, 587 bp, Homo sapiens
aattgtaagcagaggctgcctggccccatcaatttttctgggacacagacgccagggatgaaaatgtcaagtggtccacaggcagcattgttagtgtgcctggtgaggatgaggagcaggagcgactgcggtctgagatttttaataggcagggctgtaaaatgttggccaggcctaagtcacagatgcaccacagagctctttcaagcccttattccaatgttccatttgtaactatttttaaccttattaaaaaggagcgaaatgcatcagcttcacaagcgcgtactagagtctkgcagtaaatttctttggtttataactccacctttgattcagaaggtcagcgggcatgagaacgtggataaacataaatctcctccagatctgcttgtgggaaccatacgcagttagggatgtgctggagaccagcaccgggtctccgctggagcagaggggaaggcgaggctccactcttcgagttttcaggcagctcaatcttcaattcaatcttgcaaagacagaattggtggcatttgtgtaatagaaacacagacaaaagtcataagcatgtacccaggcaagtg

SEQ ID NO: 287149 - DNA, 587 bp, Homo sapiens
aattgtaagcagaggctgcctggccccatcaatttttctgggacacagacgccagggatgaaaatgtcaagtggtccacaggcagcattgttagtgtgcctggtgaggatgaggagcaggagcgactgcggtctgagatttttaataggcagggctgtaaaatgttggccaggcctaagtcacagatgcaccacagagctctttcaagcccttattccaatgttccatttgtaactatttttaaccttattaaaaaggagcgaaatgcatcagcttcacaagcgcgtactagagtcttgcagtaaatttctttggtttataactccacctttgattcagaaggtcagcgggcatgagaacgtggataaacataaatctcctccagatctgcttgtgggaaccatacgcagttagggatgtgctggagaccagcaccgggtctccgctggagcagaggggaaggcgaggctccactcttcgagttttcaggcagctcaatcttcaattcaatcttgcaaagacagaattggtggcatttgtgtaatagaaacacagacaaaagtcakaagcatgtacccaggcaagtg

SEQ ID NO: 287150 - DNA, 569 bp, Homo sapiens
catctgcacaaaaacttcatgcagaggcttgactaagcccacaggcactcagtattgaaataataagtatacatattcccatattattcaatgatattttatgtggaagtcaaaatacttactgaaatttaaactgaattcattgaataaatctctagctccagatgagtatggaaagaaacatagaaatttctagtagagctgtctcctgtacagagttctaattgccaagctgtaaaatgtaagtgtttagtatgccatatgtggagggatagatatacagaattcacaagtccccagatcttcagccagtcccataaggcagggcctgtgttgaccttaaatcttagttgcaactgaatcaccattactcatgacagcacctagcacacagcaggcaataaatatttgctgaatggttgayggcgatgtcagaaaagtcttggtaacacttgctaaacacgaaaagatgtccattattagcatttaggaacctcaaagtatacataacagcaaattttttatgtcaagtttcttctttgggacaatagtcccaaagggacaagtct

SEQ ID NO: 287151 - DNA, 461 bp, Homo sapiens
caacaatttaatgagcctaccttctgctagacaatgtgcaagattaaactctctgatttattgaagaaagccacccacattctcaccttgtgattagtggcatttatgtataaagtgactacctgggattcagtcttctgtctggatccaggaaagaattgttctctctggagcaaagggtgctctaatctgctgtctgcttcttctagcatcaagttctagcctaaatacaggcttttaatgaggaaaccatatggaaataattagtgtaaaagagaaattaactataattaccagatcagtttttttccttttagaaatgagttgctattccatttcaagctttccaactatkttgatgggaatgtatatccaagttggagaaatagtgcgtttttttgttcttattatctcctcttgttaagattgcatagttaatttctggaggtatacaacccctt

SEQ ID NO: 287152 - DNA, 345 bp, Homo sapiens
ctatttttaatggagccatatttactcatcatcttcaggagactgtaggaattgaattacaaatgcaatttctttagtcactcactagacactggaggatgttttcagcaattttggaaaacagagctgagtgatgtatcacaaaacttagcctttacgttgaatggtcctaactcaaatttgattatattaaaatagagtgcactggagggagcaagaygtgcagaaagaatatggatttggagtctaagaagctccaccactcatccacaagaggactttggtaatttatgtatcttccccaagcctcagtgactccatctgtaatatggggattatagtagc

SEQ ID NO: 287153 - DNA, 457 bp, Homo sapiens
acactcattctcacccatagctaatgctacaaaacattcactttcacatcattcttccttgcttaactgcatagagactcagaatccttttcaccattgatttcagggaagctatyacaaattaatcagagttagtatacaaacacacacacacacacacacacacacacacaccccactctgtccctaatttataaaaacaatagaggtacatattaatgtaatataatatttagaaaaagatgaatgaaaaaatctcagaaaaaccattcacatttgcacatacaccacatgcacacacacactttttaccaacaagggtctccatagacccagaatgcttaaagattggggaaaattctttagttaattcaagcccatgaatgatatgctgggatacttaatgacaaagtctatcagaaaatggtgactgaaagacaaatcttccaccatcatt

SEQ ID NO: 287154 - DNA, 610 bp, Homo sapiens
gtcccaaactccagtcatttgctagtttttgtcatatctacctataacgtttgctattatttatccaatattgtgtagaaaaaaattgcttgtgcttttaaagctttttaaaaactatcttttggagaaatttaaaatataaagaaaagttacaaaaatgatgcagaatttttgtagacctttcacctagtttcctgcattgttggcattttactgcattgaccttactatcattctctctctacacacacacacacacacacacaactgtatattttttctcattcgagagtaagttgcagatatgatgccccatttccccttaatacttcagtgtatatttcataaaagacaagattacttttcttcatgamcaaagtgaaaccatcaaaatcagaaaattcacattgatacaatactaccctctaatccccagattttgttcaaatttcaccaattatccaataacattctttagtaggtccaacattcaagtcaggattatcatttacttgtcgtgtattttttccttctatctggaagcgttcatctttccttggctcatataaccttaacacttaatgaaaactacaggccagttattttgtag

SEQ ID NO: 287155 - DNA, 506 bp, Homo sapiens
gagtacaataaaggaactatagtaacccagtggagcatgaaaactgaggatgaccacatagaaaagtgtaggaagcattttaacctatgctacccctccctcagtctggtataggtaggtaccaagagcgatcccttggcatgacctctccctgtgggggaaaaagggagcgggaggacctcagtggtcctcatcactgccaaggaacactaacagctttctccccatggtcttcagtgatgttgagccygtgtaatgaagcttcctggagtctacaaagatgttcctgccttgaggaaggagctgctattatgtttccacaggagtaagaaccaccactgtgtcctgccctccttcagggccaaagccactacctccttcccacaatcacgtgcatgctccagagcctagctctgtggctactgtgcatgttccatgcctcagacaccagcacagtcactgcagtgagtgtatttacatgccagacctgttgcaaagagggattt

SEQ ID NO: 287156 - DNA, 542 bp, Homo sapiens
tgtttatatttataacaatgtgacttccgaaaagctcaactggcccaccattttgactgagttgacttgtcattagttggttttcaacgaatgagttgggtgagtgccagcatctctgtgcattctaattggaagccctgacgcagagaaaggtgggggagattgagaatgggtggatcctgggaccctgactcacaccatccctcctctcttgcagctttatttatgtgttactaatgtatggtcagatgtggctttgctcatctgttgcactaagaggcctgctgttcccctaacaaggctttgggaagggagagaataggcttccttgacccacatgccacatggctcatggaagatgagagatgttggacatgtgcatttgcaggaactaaatgaaattatattcagagtatgagccagacagcaccagaaagcgatgggtgtggcttgactyggcatgtcagattttggcggaggaaaagagctggcatagtggttgtgaatgaggaaagcctctatcttgttactctctttttcct

SEQ ID NO: 287157 - DNA, 542 bp, Homo sapiens
tgtttatatttataacaatgtgacttccgaaaagctcaactggcccaccattttgactgagttgacttgtcattagttggttttcaacgaatgagttgggtgagtgccagcatctctgtgcattctaattggaagccctgacgcagagaaaggtgggggagattgagaatgggtggatcctgggaccctgactcacaccatccctcctctcttgcagctttatttatgtgttactaatgtatggtcagatgtggctttgctcatctgttgcactaagaggcctgctgttcccctaacaaggctttgggaagggagagaataggcttccttgacccacatgccacatggctcatggaagatgagagatgttggacatgtgcatttgcaggaactaaatgaaattatattcagagtatgagccagacagcaccagaaagcgatgggtgtggcttgactcggcatgtcagattytggcggaggaaaagagctggcatagtggttgtgaatgaggaaagcctctatcttgttactctctttttcct

SEQ ID NO: 287158 - DNA, 613 bp, Homo sapiens
gttgggcttggtgaaccaagcaagctggccaaacccactcccctcacctcttgctgtgggatacccttgtgtctggacgtgcctggggatctgttctctcactggatactcacagmattctgggaagtcactgatggaggcccagccatccaccatctacagcagaaaaaggcaaagacagatctgagagattccccttagtggggcgtgggaggcatcagtggatgcgtccttgattcttccaccagcccacttttacaactagaaaagtaaatcaaataacacttcaaaggatgttgaatatcaggtatttttaatgtttgtgccatccaataacaggtttccctgaggtttaggatgctatcttgggtctctttgtatttcagccactgggaaggttcttgtattagtccattttcatgctgctgataaagacatacccaaatctgggtaatgtaaaaagaaaaagaggttcaatagactcacagttccatgtggctggggaggcctgacaatcatggtggaaagcaaaaggcatatcttacatggcggcaggcaagagagcgcttgtgcaggggaactccccttgataaaaccatcagatgttgtgaga

SEQ ID NO: 287159 - DNA, 613 bp, Homo sapiens
gttgggcttggtgaaccaagcaagctggccaaacccactcccctcacctcttgctgtgggatacccttgtgtctggacgtgcctggggatctgttctctcactggatactcacagcattctgggmagtcactgatggaggcccagccatccaccatctacagcagaaaaaggcaaagacagatctgagagattccccttagtggggcgtgggaggcatcagtggatgcgtccttgattcttccaccagcccacttttacaactagaaaagtaaatcaaataacacttcaaaggatgttgaatatcaggtatttttaatgtttgtgccatccaataacaggtttccctgaggtttaggatgctatcttgggtctctttgtatttcagccactgggaaggttcttgtattagtccattttcatgctgctgataaagacatacccaaatctgggtaatgtaaaaagaaaaagaggttcaatagactcacagttccatgtggctggggaggcctgacaatcatggtggaaagcaaaaggcatatcttacatggcggcaggcaagagagcgcttgtgcaggggaactccccttgataaaaccatcagatgttgtgaga

SEQ ID NO: 287160 - DNA, 613 bp, Homo sapiens
gttgggcttggtgaaccaagcaagctggccaaacccactcccctcacctcttgctgtgggatacccttgtgtctggacgtgcctggggatctgttctctcactggatactcacagcattctgggaagtcactgatggaggcccagccatccaccatctacagcagaaaaaggcaaagacagatctgagrgattccccttagtggggcgtgggaggcatcagtggatgcgtccttgattcttccaccagcccacttttacaactagaaaagtaaatcaaataacacttcaaaggatgttgaatatcaggtatttttaatgtttgtgccatccaataacaggtttccctgaggtttaggatgctatcttgggtctctttgtatttcagccactgggaaggttcttgtattagtccattttcatgctgctgataaagacatacccaaatctgggtaatgtaaaaagaaaaagaggttcaatagactcacagttccatgtggctggggaggcctgacaatcatggtggaaagcaaaaggcatatcttacatggcggcaggcaagagagcgcttgtgcaggggaactccccttgataaaaccatcagatgttgtgaga

SEQ ID NO: 287161 - DNA, 613 bp, Homo sapiens
gttgggcttggtgaaccaagcaagctggccaaacccactcccctcacctcttgctgtgggatacccttgtgtctggacgtgcctggggatctgttctctcactggatactcacagcattctgggaagtcactgatggaggcccagccatccaccatctacagcagaaaaaggcaaagacagatctgagagattccccttagtggggcgtgggaggcatcagtggatgcgtccttgattcttccaccagcccacttttacaactagaaaagtaaatcaaataacacttcaaaggatgttgaatatcaggtatttttaatgtttgtgccatccaataacaggkttccctgaggtttaggatgctatcttgggtctctttgtatttcagccactgggaaggttcttgtattagtccattttcatgctgctgataaagacatacccaaatctgggtaatgtaaaaagaaaaagaggttcaatagactcacagttccatgtggctggggaggcctgacaatcatggtggaaagcaaaaggcatatcttacatggcggcaggcaagagagcgcttgtgcaggggaactccccttgataaaaccatcagatgttgtgaga

SEQ ID NO: 287162 - DNA, 623 bp, Homo sapiens
aagtggctggcataggaacagaccatatccatgtggctttggactccagtcattcccccaccagttaacgtcctcccttcttcttacctagaccctccagttcttacctgtgccctagtttttctccagttcatttcctaacagccaggttggctttstaaaagcttttttaaagctttctaaagttttctgggacagagttttgctctgtcgcccaggctggagtgcaatggcacaatcatggctcactgaagccttgacctcccaggttcaggcaattctcctgcctcagcctccgaagtagctgggactacaggcacatgccgccgcacctggctaatttttttttaatttttagtagagacaacatctcaatatgttgtggggctggtactgaactcctggcctcaagcgatcctcccgcctcagcctcccaaagtgccgagattataggcgtgagccaccatgcccagcctaattgcactttttgtgtgtgcatttacatttttttcattttggttttagcagatttattaatgtataattgacatacagtaaactgcacataagtgtacagttctacacattgtgacacagacacacacccatgaaaaaaatcacaa

SEQ ID NO: 287163 - DNA, 623 bp, Homo sapiens
aagtggctggcataggaacagaccatatccatgtggctttggactccagtcattcccccaccagttaacgtcctcccttcttcttacctagaccctccagttcttacctgtgccctagtttttctccagttcatttcctaacagccaggttggctttgtaaaagcttttttaaagctttctaaagttttctgggacagagttttgctctgtcgcccaggctggagtgcaatggcacaatcatggctcactgaagccttgacctcccaggttcaggcaattctcctgcctcagcctccgaagtagctgggactacaggcacatgccgccgcacctggctaatttttttttaatttttagtagagacaacatctcaatatsttgtggggctggtactgaactcctggcctcaagcgatcctcccgcctcagcctcccaaagtgccgagattataggcgtgagccaccatgcccagcctaattgcactttttgtgtgtgcatttacatttttttcattttggttttagcagatttattaatgtataattgacatacagtaaactgcacataagtgtacagttctacacattgtgacacagacacacacccatgaaaaaaatcacaa

SEQ ID NO: 287164 - DNA, 623 bp, Homo sapiens
aagtggctggcataggaacagaccatatccatgtggctttggactccagtcattcccccaccagttaacgtcctcccttcttcttacctagaccctccagttcttacctgtgccctagtttttctccagttcatttcctaacagccaggttggctttgtaaaagcttttttaaagctttctaaagttttctgggacagagttttgctctgtcgcccaggctggagtgcaatggcacaatcatggctcactgaagccttgacctcccaggttcaggcaattctcctgcctcagcctccgaagtagctgggactacaggcacatgccgccgcacctggctaatttttttttaatttttagtagagacaacatctcaatatgttgtggggctggtactgaactcctggcctcaagcgatcctcccgcctcagcctcccaaagtgccgagattataggcgtgagccaccatgcccagcctaattgcactttttgtgtgtgcatttacatttttttcattttggttttagcagatttattaatgtataattgacatacagtaaactgcacrtaagtgtacagttctacacattgtgacacagacacacacccatgaaaaaaatcacaa

SEQ ID NO: 287165 - DNA, 537 bp, Homo sapiens
ctcagtgtcctcctgccagaatccttcagccttgcctcgattcctagcagtgcctgctcagtcctcatatctggactcatgcatcacttagcaaggaagctgttccctggcggggacaaagctccttatgacagcacaggctctttctcctgtgaagcgtctgtcacagtctcaattttatacagcatgtgccttgcatttagtgcccgctttcaccattaaattgtgagctccacgaggttggagattatatctgcttttgctcaccatttatccccaggacttaaaacactgtcagacttataayaggcactcaataaatatttgtcgaatgaattggtgactacataaatcactttgctatggggccctcgacacaggactgaccctccccatcgccttctcctgaggctggcaaaataatgcaaattgtagaaaaaaatagcctgaaaacctgagtgagtctaacacagatgaatcctattagactctgctaaaaagaatggtttttgactttctgggaaaggatccagtaca

SEQ ID NO: 287166 - DNA, 423 bp, Homo sapiens
ggtctaaatctgcttttgcatggaatatggtcttatttttaggctttttataayaaccttattgaactattgcatgatcactgtgtgcaattacctcattgcatctatctgggtgtgttgtttttctcccttattttttgcaattatttcaatggagtataattcaattacctggaaacaggtttttttcaagtagaatcttaatatcaataagtatttaagttctcactgtatgccaggcatgctgttatgtgcacatgataacaaacttgaattaacccatgagtgttcctctcaatggggccacacagtcatgaaagtgaccaaagagtaaaataaataagccccaaaattcattgaaataagttgtcattagtcttataaagacattctatgaaaagaaaagagtaacatggataggag

SEQ ID NO: 287167 - DNA, 423 bp, Homo sapiens
ggtctaaatctgcttttgcatggaatatggtcttatttttaggctttttataataaccttattgaactattgcatgakcactgtgtgcaattacctcattgcatctatctgggtgtgttgtttttctcccttattttttgcaattatttcaatggagtataattcaattacctggaaacaggtttttttcaagtagaatcttaatatcaataagtatttaagttctcactgtatgccaggcatgctgttatgtgcacatgataacaaacttgaattaacccatgagtgttcctctcaatggggccacacagtcatgaaagtgaccaaagagtaaaataaataagccccaaaattcattgaaataagttgtcattagtcttataaagacattctatgaaaagaaaagagtaacatggataggag

SEQ ID NO: 287168 - DNA, 423 bp, Homo sapiens
ggtctaaatctgcttttgcatggaatatggtcttatttttaggctttttataataaccttattgaactattgcatgatcactgtgtgcaattacctcattgcatctatctgggtgtgttgtttttctcccttattttttgcaattatttcaatggagtataattcaattacctggaaacaggtttttttcaagtagaatcttaatatcaataagtatttaagttctcactgtatgccaggcatgctgttatgtgcacatgataacaaasttgaattaacccatgagtgttcctctcaatggggccacacagtcatgaaagtgaccaaagagtaaaataaataagccccaaaattcattgaaataagttgtcattagtcttataaagacattctatgaaaagaaaagagtaacatggataggag

SEQ ID NO: 287169 - DNA, 423 bp, Homo sapiens
ggtctaaatctgcttttgcatggaatatggtcttatttttaggctttttataataaccttattgaactattgcatgatcactgtgtgcaattacctcattgcatctatctgggtgtgttgtttttctcccttattttttgcaattatttcaatggagtataattcaattacctggaaacaggtttttttcaagtagaatcttaatatcaataagtatttaagttctcactgtatgccaggcatgctgttatgtgcacatgataacaaacttgaattaacccatgagtgttcctctcaatggggccacacagtcatgaaagtgaccaaagagtaaaataaataagcccyaaaattcattgaaataagttgtcattagtcttataaagacattctatgaaaagaaaagagtaacatggataggag

SEQ ID NO: 287170 - DNA, 603 bp, Homo sapiens
tttttgctaaaagcatagcaagaaagaccttctctccagttcccaacgagttcctcatcttcatctgagactacctcagattggacttcattgtccatatcactattcaacrttttggtcaaagccattcaacaagtctctaggaagttccaaactttctcacattttcctgtcttcttctgagcccttcttgtactgatgttcagcttagttattttctttttccttgaggctcgatgttaagttgcttattagaaacctctcttattttttgatgtagatatttagtgatgtaaacttccttcttaaaactgcttttgaagcatcccataagtttaatatgatgtgttttcattttcatttgtcccaggatattttctgatattttctttgattacttcttatatgcctggtgttcaggattgtgttgtttaattttcacatatttgtgaattcaattctccttctgttactaaattctagtttcattttattatggtcaaaaaatataattgatatgatttcaattttattaaatttgttaaggcttgtcatgtggcctaataaatgacttatgttagagaacattccatgtgcacttgg

SEQ ID NO: 287171 - DNA, 577 bp, Homo sapiens
cagggacaaaatgccttcattctttttgctaaaagcatagcaagaaagaccttctctccagttcccaacgagttcctcatcttcatctgagactacctcagattggacttcattgtccatatcactattcaacgttttggtcaaagccattcaacaagtctctaggaagttccaaactttctcacattttcctgtcttcttctgagcccttcttgtactgatgttcagcttagttattttctttttccttgaggctsgatgttaagttgcttattagaaacctctcttattttttgatgtagatatttagtgatgtaaacttccttcttaaaactgcttttgaagcatcccataagtttaatatgatgtgttttcattttcatttgtcccaggatattttctgatattttctttgattacttcttatatgcctggtgttcaggattgtgttgtttaattttcacatatttgtgaattcaattctccttctgttactaaattctagtttcattttattatggtcaaaaaatataattgatatgatttcaattttattaaatttgttaaggcttgtcat

SEQ ID NO: 287172 - DNA, 592 bp, Homo sapiens
aaaggggctgaacctgagatttagggtcacttcaagatctgctatgagagaggccagcaaacaggtccatgcatgtgttctagcagttgcctgtataggcaagataacttcaggactccaacagagaagggtcagtacccagacagggccccttctggatcagatctgagatggagctcagtaagactatccccttggcatagagtgttgcaccttccagtggttctttctgccatttggattgctctctgactgcaaccaagaggggttggaattgagttttcacgaccccttcagaatctgctgtggactggaagctagatagcctacaaagacggcagaaatgtactagtatatcagcaaatttctgaggggagtactcccagactgtggcaarcaggggctggagccatgacagggctccctcaggatctgtgtgggactgagagtggcaagtctggtgagtgataagcatcaagttatagacaggtgagtctcccagcagattcctgtgcctttgggattactgcctggctgcagcagagaatgactagagctgagaccgggcctcttcaagatctattgtggacag

SEQ ID NO: 287173 - DNA, 552 bp, Homo sapiens
taacagggtaatagaatatcacaaggcaagtggaggcagggcgagatcacaaggccacaggatggaggcgaaattaaaattgctaatgaagttttgggcaccattgtcattgataacatcttatcaggagacagcgttttgagatcaatcggtctgaccaaaatgtattaggtgggaatttcctcttcctaataagcctgggagcgctatgggagactggagtttatttcacctctgcaatctcgaccataagagacaggtacgccccgggagggccagttcagagacctacccctaggtgcacattctctttstcagggacgttccatgctgagaaaaagaattcagcgatatttctcccatttgcttttgaaagaagagaaatatggctctgttctgcccagctcaccagcagtcagagtttaaggtttactctcttattccctgaacaattgctgttatcctgttcttttttcagggtgcccacatttcatattgctcaaacacacacgctgtacaatttgtgtagttaatgcaattattacagggtcc

SEQ ID NO: 287174 - DNA, 476 bp, Homo sapiens
atgtgtgtgtgtgtgtgtatatatatatatttatttaaagcattacatgctatgtctgagattatgcaaacaggacattgccaagccaaaccaccacttccatttctgtgattttttcgattgcatattctctccaccacatttcgtggttttaccttaacataaagaagcttctttttaagttaagggacaagacaatattatctcctgcttagaaataatgcatttcttgcccctgggtgctcatgcartgactggacattttccagggtgttggcactttctaaaacattctaaaatataggttggtaccagatgaccatacactttgtttaccattatttttgacagtagagagagagtaatcatttttctggctcctgttgtttctagatatctgacttgatagtttatttatcaaaatgagtgtcccagacctggtttataatgatgctttctgctatatgttctatgta

SEQ ID NO: 287175 - DNA, 529 bp, Homo sapiens
aacctctatcatagatttgccaagggagaaargaggttgataaaacccacatctatagttgtaatacttgatttgaggttttattccaagttaatagtacaaaattattgtattgtgcttttattatatgacattacataagttaaaaaaaaagttaacatttaaatacaggtgggtctagttttaaattatggttcaaaccacacactttgtgaccttttaaaagatatagcctctagagtttagtttcctagttcgtacaatttggtcacaaggattagagatgatgtttataaaggatctagaaacctacctgttactcaataaatggtagtttttttattctttatatatccacatatatctccagtaccctattcctattttataagcaaagtagagtgtaaattttaaaaagaaaaaaatgcagtaaaatttcaagcttaaagttggatgaagccatgtctgcatgtgtttctccatctgtaaaatgataaagatagactgggctgtcccttcagttacttgc

SEQ ID NO: 287176 - DNA, 552 bp, Homo sapiens
gtaaccagaacaatgaagcagaagtgatgctgcataacttctgaggcaagggcggaaaagggcaggaagctttctctttgtcctcttggaaactcactctggaaaaaccagccacagtgcaaggtctgggccaacatcaactaccctgaggccaacatcctggagaggagatatataggttcacaccccagttgtgtctccagcctgacagccagcaccaatggctagccatgcaggttcacsaccttggagacccagaccctctgcttttctggtaacagcagctgcagccaacagttggctgtgatcacatgatcaatctcaaacacgagccttccctacatgaaactgttccataatttcaaactcacaaatttgttaatcaaataaattggttgtttttaggtctctaagtttttggtagaattttctgcacagcaatagtagctgaaacacctacatctcagggtcattttaagaattaaatgagataatagacgtagattactagagtggtcatttctcagtacaaagtatattgccagtacatcc

SEQ ID NO: 287177 - DNA, 621 bp, Homo sapiens
cttttccttttttatcaagatttctttgacttttcagggtgttttgtcatttcataaaatgttagaattattttttctgtttgtgcaaaaacataatattggcattttgatagaaaacgcattgaatctgtaggtcttttggggtttgacatgttactaatagtaattcttctaatccttgaacacaaaataattttccatttatttgtgctgtgtacttttgtcgttattaatgttttatacttttcagtatataggttttctatttccttggttaagtttactcataaatagtttatttttataaaactattgtgaatggaatttttttatttttattttttagatagtttgttgttagtgtaaagaaatgctactgagttttatstgttggcattgtattctacaactttgtttctcaattctaacgttttcttgatagtcttgatttttctgtatataaaatcatgccatctgcaaccgaagacaattttacttcgtctctttcaatttagataccttttgtttttcttgtcaattctgtggctagattttgggattgaatagaagtgatgagagtagacatccttattttgtttctcatcttagaggaaatgatta

SEQ ID NO: 287178 - DNA, 556 bp, Homo sapiens
aattttgtcctatgttttgtagcatatgttgagatgattacatgttttttgccttattctgtattacatttactaacatatatatatatatatataaagatttttgcatcccagaaataaatgatcattagaaatactggactgtaattttctgttcttytagtggctttgatatcagggtgttgtgggaagtcagggaccctgaatggagggaccggctggagctgtggcagaggaacataaattgtgaagatttcatggacatttatctgttactaaataatacttttataatttattatgcctgtctttactttaatctcttaatcctgttatcttcgtaagctgaggatgtacgtcacctcagcatcactgtgataattgtgttaactgtacaaattgattgtaaaacatgtgtgtttgaacaatatgaaatcagtgcaccttgaaaaataacagaataacagcaatttttagggaacaagggaagacaaccataaggtctgactgcctgcaggtcaggcaagaagagccatatttttcttcttgcagagag

SEQ ID NO: 287179 - DNA, 516 bp, Homo sapiens
tgcttttgaaccctgttttctgttgtttaagatgtttatcaagaaaatacgtgcaccgatgaacatggacccttatcagtagttctgcttttgccctttgctttgtgattgttggacccttgtcagtaattctgcttttgccccctccttttgaaacagttaataaaaacttgcttgtctgagactcagccgggcatcacagtcctaccaatatatgatgtcacccgggtggcccagctgtaaaattcctctctttgtactctttatttctcagctggccaacacttaaggaaaatagaaagaacctatgttgaaatattgggggcagtttcccccagtatcagggtaatgctggcttcataaaataactttggaaatatttcctctatttcagctttttaaaaaagttttgagaatgattgattttatttatttmaatatctggtagaattccaccacgaagccttctggccctgagcctttctttgaaaagaagttgtttttttttgtttttgt

SEQ ID NO: 287180 - DNA, 647 bp, Homo sapiens
catcgtgggactcattttctttaaaatttggacttgtacagtaaggacttcaactgaccttcctcagactgaggactgttcccagtgtatacgtcaagtcaatgagataggacaaaaggttgctgcagtcctattattttatagttattatgaatgtactgggactctaaaaggaacttgtttgtataatgctactctgtacaagatatgtagcccaggaaatgaccagcctgatgtgtgctataacccatctgagccccctatgactactgtttttgaaataagattgaggactggcagctggggaaaagctgatacgagtaaagtygtaactggaacagaagagaaaggcatccccaaacaaattatcttaaaatttgatgcctgtgaggcaatcaacagtgacccatatggaaatagaataagacgtggttctctagattgggaaaggggctatatagtagaaaataagtatattgtcatgaattgagactgtgtagtgatgaatgtagttactgtgtcatttatgccacctggaaaaaaaaagatgagaaggaccctgtccaccttcaaaaaggaaggagtaactctttctgcactagtggtcactgtaacccattagaactactaattacctatccccttga

SEQ ID NO: 287181 - DNA, 635 bp, Homo sapiens
atgggttgtatcttttcatcttatctagaagcataaaaatttatgttatctctcacaaaccaayagagagcaagaacaaaattgagattttaagagaacatttttaaccactccactgaggtataattgacatacaaaaagctgtacatatttgctgtgtacaacttgatgagtttggagataagtaatcacccataaagccctcatcacattctatgccataaacttattcaccacttccaaaagtttcctcctaccttctttatttattttttgtgataagaacatttaacataagatctactatcctagaacatttttaagtataaaattctgtatcgtcaactgtaggtgttatgctgtacagtggatctctagggcttatttattgcgtatgaggaaaactttgtaccctttgattaataccgctctattttcctctccctctagtccttggcaaccttcattctactatttgcttctatgagtctgattattttagattagtcacataagtaatgttgaactaaagggggaaaaaattcatgcaaacttaatataagtagagagtttatttgggccaagtttgaggacagccacccaggggcatagattccagttgtcctgaatatatg

SEQ ID NO: 287182 - DNA, 635 bp, Homo sapiens
atgggttgtatcttttcatcttatctagaagcataaaaatttatgttatctctcacaaaccaatagagagcaagaacaaaattgagattttaagagaacatttttaaccactccactgaggtataattgacatrcaaaaagctgtacatatttgctgtgtacaacttgatgagtttggagataagtaatcacccataaagccctcatcacattctatgccataaacttattcaccacttccaaaagtttcctcctaccttctttatttattttttgtgataagaacatttaacataagatctactatcctagaacatttttaagtataaaattctgtatcgtcaactgtaggtgttatgctgtacagtggatctctagggcttatttattgcgtatgaggaaaactttgtaccctttgattaataccgctctattttcctctccctctagtccttggcaaccttcattctactatttgcttctatgagtctgattattttagattagtcacataagtaatgttgaactaaagggggaaaaaattcatgcaaacttaatataagtagagagtttatttgggccaagtttgaggacagccacccaggggcatagattccagttgtcctgaatatatg

SEQ ID NO: 287183 - DNA, 586 bp, Homo sapiens
tttcctcctaccttctttatttattttttgtgataagaacatttaacataagatctactatcctagaacatttttaagtataaaattctgtatcgtcaactrtaggtgttatgctgtacagtggatctctagggcttatttattgcgtatgaggaaaactttgtaccctttgattaataccgctctattttcctctccctctagtccttggcaaccttcattctactatttgcttctatgagtctgattattttagattagtcacataagtaatgttgaactaaagggggaaaaaattcatgcaaacttaatataagtagagagtttatttgggccaagtttgaggacagccacccaggggcatagattccagttgtcctgaatatatgctctgattatgaatgggtttttaaaggaaaaggagagaccattcctaagtttttgtttttttaactgagaattacattaaaataacataagctattaattgattatacattattctctgtatcacaaatttcatgatcatgaagataatgagtgaggcaattgcctttaaacaactatccctggggcatggggatgg

SEQ ID NO: 287184 - DNA, 586 bp, Homo sapiens
tttcctcctaccttctttatttattttttgtgataagaacatttaacataagatctactatcctagaacatttttaagtataaaattctgtatcgtcaactgtaggtgttatgctgtacagtggatctctagggcttatttattgcgtatgaggaaaactttgtaccctttgattaataccgctctattttcctctccctctagtccttggcaaccttcattctactatttgcttctatgagtctgattattttagattagtcacrtaagtaatgttgaactaaagggggaaaaaattcatgcaaacttaatataagtagagagtttatttgggccaagtttgaggacagccacccaggggcatagattccagttgtcctgaatatatgctctgattatgaatgggtttttaaaggaaaaggagagaccattcctaagtttttgtttttttaactgagaattacattaaaataacataagctattaattgattatacattattctctgtatcacaaatttcatgatcatgaagataatgagtgaggcaattgcctttaaacaactatccctggggcatggggatgg

SEQ ID NO: 287185 - DNA, 577 bp, Homo sapiens
tgatgtgggacattttcaagtatttcagtgaaatcagcaccaactaccttctacttttgtttttcaaatgtaactgggggccttttcttactgccaaccatagaattagtcttgagcagtgaagactcaagacttcaccaggatgtatggtgctttcaggggatttttatctagtctgaagcacagggaagttggtacagggcaagataattatgtctattcatttcttaaaattccagaatttgatgcttttgttctcaggatgcagaatagcttctccctttaggacaagaccagtatcatatatagcacccaaatataggagaatcacagagataaaaagagtttaatctcactgcaattatttttatttcattttaaacaaaaactttactttttctctatatttcacaacacagagctcttctgagctacacatttttgggtaaatttktataacatagggcaatgagtggctgacctttatttcatatctttgggaatttttttccccaatgttgtcaatgaccacctgcaataaaaaatcatctgggatagttgtttaaaattaaaatgc

SEQ ID NO: 287186 - DNA, 573 bp, Homo sapiens
tcaatttcccagtgacgattctttaatgctaatggacattattgcttctacccaagcccctttgccttgctcagtatttctctggcactagtctccttctgactcatcatattaatgggcttacttagtaggtgtattgtttgtcttccctagtagaatatgaactcctcaattacaggaaatttgtccactttgtttatgggatgtatctttagagcctagaacactgtcaggctcttcttaggcactttcagtgactatttgttgaatgaataagccaatgcagaaaggacattctgctttcaaatggacacagaactggaaaatcaagcagaaaagtcctgtttcctcagtaattaggagaggttgggccaaaggccaacgaacggcagaataacaaacatctcactcaagagaaggactgtgggtggtaatgaccagaatgaaggagaataaattatgacagatgttaaaattaatcaatatcataggtggacataccttgaaataccktacaactccattaggcaaattgttgcggttatctttctcctgagagtggaactaggagag

SEQ ID NO: 287187 - DNA, 550 bp, Homo sapiens
ggaataacagctctagaagttttcagattcatctttgacagtccttaacaatgtaacaaacactgcttactttggccttaacttttttatttataaaataaaagagtttatgaatttaggaacatttgttctcaattttttttcctttctacattctcattttggaaataatttgcaaatgtctggcctttgctttttgcccaaagactatcaagataaacttgatagaccctcccaaatcccacctataaaacctgtattacgctcgctttacaaaartgaagacttgtttctcatatattctatttaatctatttcatctatgagttaattttcaatatatacttctacggaaaggatgatatggggacaaagaaccacaatagcttcttccaatgagaagagtatgatgtaggtggataaactagaaaaaaaatgctattatatcactcaggattcttagttgtaaaagacaaaatctagtctcttgagttgatacagaagaaaaatttactaaatgaagtcacttggttcatagtgccagtgatcc

SEQ ID NO: 287188 - DNA, 550 bp, Homo sapiens
ggaataacagctctagaagttttcagattcatctttgacagtccttaacaatgtaacaaacactgcttactttggccttaacttttttatttataaaataaaagagtttatgaatttaggaacatttgttctcaattttttttcctttctacattctcattttggaaataatttgcaaatgtctggcctttgctttttgcccaaagactatcaagataaacttgatagaccctcccaaatcccacctataaaacctgtattacgctcgctttacaaaagtgaagacttgtttctcayatattctatttaatctatttcatctatgagttaattttcaatatatacttctacggaaaggatgatatggggacaaagaaccacaatagcttcttccaatgagaagagtatgatgtaggtggataaactagaaaaaaaatgctattatatcactcaggattcttagttgtaaaagacaaaatctagtctcttgagttgatacagaagaaaaatttactaaatgaagtcacttggttcatagtgccagtgatcc

SEQ ID NO: 287189 - DNA, 547 bp, Homo sapiens
atttttagaatgttttatttgtcatcatgtttaaatatcaagtctgtactctcagataaaccattkatataataaatttgcaggtaaaaacaatgctgtataacacagcacgaatgtaaaatgcttatagacaattttaaaggcacttcttacaaagatcattcagtaaattatgtccacagaaagtactgtcttcattgcacaatattagtggaaaatgctacattttattcttcgtgactattgcattccatgggttattaccaagaccatcaatatctggaaatgcaaagtattacttgtagtactgtgttgaaagttacttgataatgtctgattatgtgtgttcatgtaaaactaaaaaatcttgatggatctatagtcagactgctgggctgaaaccctggctccaccatgtaatagttgaatgaggtttggcagtttacttaatctctcttcttcagttctttaattgtaaattatgaaatgatcataatacccataagagctgttgtgacaattaaagtaactgatccatgtcagtgtc

SEQ ID NO: 287190 - DNA, 547 bp, Homo sapiens
atttttagaatgttttatttgtcatcatgtttaaatatcaagtctgtactctcagataaaccattgatataataaatttgcaggtaaaaacaatgctgtataacacagcacgaatgtaaaatgcttatagacaattttaaaggcacttcttacaaagatcattcagtaaattatgtccacagaaagtactgtcttcattgcacaatattagtggaaaatgctacattttattcttcgtgastattgcattccatgggttattaccaagaccatcaatatctggaaatgcaaagtattacttgtagtactgtgttgaaagttacttgataatgtctgattatgtgtgttcatgtaaaactaaaaaatcttgatggatctatagtcagactgctgggctgaaaccctggctccaccatgtaatagttgaatgaggtttggcagtttacttaatctctcttcttcagttctttaattgtaaattatgaaatgatcataatacccataagagctgttgtgacaattaaagtaactgatccatgtcagtgtc

SEQ ID NO: 287191 - DNA, 547 bp, Homo sapiens
atttttagaatgttttatttgtcatcatgtttaaatatcaagtctgtactctcagataaaccattgatataataaatttgcaggtaaaaacaatgctgtataacacagcacgaatgtaaaatgcttatagacaattttaaaggcacttcttacaaagatcattcagtaaattatgtccacagaaagtactgtcttcattgcacaatattagtggaaaatgctacattttattcttcgtgactatygcattccatgggttattaccaagaccatcaatatctggaaatgcaaagtattacttgtagtactgtgttgaaagttacttgataatgtctgattatgtgtgttcatgtaaaactaaaaaatcttgatggatctatagtcagactgctgggctgaaaccctggctccaccatgtaatagttgaatgaggtttggcagtttacttaatctctcttcttcagttctttaattgtaaattatgaaatgatcataatacccataagagctgttgtgacaattaaagtaactgatccatgtcagtgtc

SEQ ID NO: 287192 - DNA, 547 bp, Homo sapiens
atttttagaatgttttatttgtcatcatgtttaaatatcaagtctgtactctcagataaaccattgatataataaatttgcaggtaaaaacaatgctgtataacacagcacgaatgtaaaatgcttatagacaattttaaaggcacttcttacaaagatcattcagtaaattatgtccacagaaagtactgtcttcattgcacaatattagtggaaaatgctacattttattcttcgtgactattgcattccatgggttattaccaagaccatcaatatctggaaatgcaaagtattacttgtagtactgtgttgaaagttacttgataatgtctgattatgtgtgttcatgtaaaactaaaaaatcttgatggatctatagtcagactgctgggctgaaaccctggctccaccatgtaatagttgaatgaggtttggcagtttacttaatctctcttcttcagttctttaattgtaaattatgaaatgatcataatacccataagagctgttgtgamaattaaagtaactgatccatgtcagtgtc

SEQ ID NO: 287193 - DNA, 403 bp, Homo sapiens
taacttcattatctgtcctgaagcagccacgtattttgaaaaaataaccaagaacaccaagttgggatatgcttcatactggaggccctagatttcattctggcaatttagaaaccatccatcccaaacaatcccacagccatttgttccactttgaaaatctcaytggtctcttttagagaccaagaagagttgctaaaaatgttagtgttgtatcactttatatattcatttatttattcatttattcactgatttcattctattttatattttgttccagataaaatcccctttccctattgacccattttctatttatttgtacttctaggggagcccttttcaagtttttcacacttccagtaaatccccaagctaaattggaatacctagtaaaatg

SEQ ID NO: 287194 - DNA, 403 bp, Homo sapiens
taacttcattatctgtcctgaagcagccacgtattttgaaaaaataaccaagaacaccaagttgggatatgcttcatactggaggccctagatttcattctggcaatttagaaaccatccatcccaaacaatcccacagccatttgttccactttgaaaatctcattggtctcttttagagaccaagaagagttgctaaaaatgttagtgytgtatcactttatatattcatttatttattcatttattcactgatttcattctattttatattttgttccagataaaatcccctttccctattgacccattttctatttatttgtacttctaggggagcccttttcaagtttttcacacttccagtaaatccccaagctaaattggaatacctagtaaaatg

SEQ ID NO: 287195 - DNA, 558 bp, Homo sapiens
aacacacatactaaatttagttactccctcattacttacattatttagaaaatcttttgtatttagttttcctgtcactcacttctgccttaaycgaagagctctttgagcgaaatcatatttctgcaatgttcagataaacattctgtgagataaaacctttagcctcaataaggtggaatcacattactttttatactttgttccttatcttctagagcaatcactctcctatgaaagaaagccagttgaagttgactgaatttgtcagcttggatgaattattactgtaatatgtaatatgttgccaagtttaaaaggctacttttcctttagtccagccttctttttcctcaagaggattctgcatttgctcttcttcagtctttaggagttactctttttgttagtaaactctcagaagtaatggagaaaactcttcagtgactacatttgctggattttgctaagacatcatcacatgtgtggtgggatacatttaatttgtgaatgcagccttcagacaaccctacctatttcactatggccacctggtct

SEQ ID NO: 287196 - DNA, 558 bp, Homo sapiens
aacacacatactaaatttagttactccctcattacttacattatttagaaaatcttttgtatttagttttcctgtcactcacttctgccttaatcgaagagctctttgagcgaaatcatatttctgcaatgttcagataaacattctgtgagataaaacctttagcctcaataaggtggaatcacattactttttatactttgttccttatcttctagagcaatcactctcctatgaaagaaagccagttgaagttgactgaatttgtcagcttggatgaattattactgtaatatgtaatatgttgccaagtttaaaaggctacttttcctttagtccagcctyctttttcctcaagaggattctgcatttgctcttcttcagtctttaggagttactctttttgttagtaaactctcagaagtaatggagaaaactcttcagtgactacatttgctggattttgctaagacatcatcacatgtgtggtgggatacatttaatttgtgaatgcagccttcagacaaccctacctatttcactatggccacctggtct

SEQ ID NO: 287197 - DNA, 558 bp, Homo sapiens
aacacacatactaaatttagttactccctcattacttacattatttagaaaatcttttgtatttagttttcctgtcactcacttctgccttaatcgaagagctctttgagcgaaatcatatttctgcaatgttcagataaacattctgtgagataaaacctttagcctcaataaggtggaatcacattactttttatactttgttccttatcttctagagcaatcactctcctatgaaagaaagccagttgaagttgactgaatttgtcagcttggatgaattattactgtaatatgtaatatgttgccaagtttaaaaggctacttttcctttagtccagccttctttttcctcaagaggattctgcatttgctcttcttcagtctttaggagttactctttttgttagtaaactctcagaagtartggagaaaactcttcagtgactacatttgctggattttgctaagacatcatcacatgtgtggtgggatacatttaatttgtgaatgcagccttcagacaaccctacctatttcactatggccacctggtct

SEQ ID NO: 287198 - DNA, 602 bp, Homo sapiens
taatgaattttacccacatatagtttgattgaatattaccagtatggtattttattatctgttaatgcaaatctcatatcatgtttcttcttttaaaaatgtcttagctatttttacctattatttctagcagccgattttggagtagttcagctggaatttttattgcaattgtattgtatttatatttatacttagttttagaaggaataaaatttttattatattcagtttgccttttargaaaaaatacttctccttactaaatttcttttatgtatcttagtgatagcatatagctttcctcatacaagtcctgtacatttcttgttaaggtatttataggttgtttaaactattttctatgtttattactaagaatcttttttaatacattttctaaggggttattgctggcagataggaaagctattgatttttaaataattttcaactgagttactcacatttttgtgactgttaatttttcacacacttgcttcagattttctaggcatacaagtatattcctcaaaaatagtgcccacagagtacaaatgcctaaatacattcagttaggcataataagcctgtagattcaa

SEQ ID NO: 287199 - DNA, 550 bp, Homo sapiens
ctttgcaaaactgttatattttgatgaccaaaagatatgatgcttctcttgaggaagaaacattcctcaggtttcctacagattaaggtttctgatcagacatgcttgcctggagaaaactatttatgaaaaattaaaaagtttaaattttagamgtctatgaactatttttttcaaattattcaaaactaatgaaataattcagtctttcaggtaataatgtacgaaaattaaggacagaaaacactacattgctttgctggagtacttgatacactacgtctacatttaagagctccaataaaaagtgtaatgttaaaaacttaaaagaacacattccatgataaatattcaagatgaaatattcattatggaggtatgaatgtttttttgtaaagaggcagcaaagatgattgaaaaatgaacacataaattattagatacactcatgcctataggatagttttcatttgtcatatatagattttccatttttggtttttgaactataacaattagaaggagataattataaatggcacttttgttc

SEQ ID NO: 287200 - DNA, 550 bp, Homo sapiens
ctttgcaaaactgttatattttgatgaccaaaagatatgatgcttctcttgaggaagaaacattcctcaggtttcctacagattaaggtttctgatcagacatgcttgcctggagaaaactatttatgaaaaattaaaaagtttaaattttagacgtctatgaactatttttttcaaattattcaaaactaatgaaataattcagtctttcaggtaataatgtaygaaaattaaggacagaaaacactacattgctttgctggagtacttgatacactacgtctacatttaagagctccaataaaaagtgtaatgttaaaaacttaaaagaacacattccatgataaatattcaagatgaaatattcattatggaggtatgaatgtttttttgtaaagaggcagcaaagatgattgaaaaatgaacacataaattattagatacactcatgcctataggatagttttcatttgtcatatatagattttccatttttggtttttgaactataacaattagaaggagataattataaatggcacttttgttc

SEQ ID NO: 287201 - DNA, 550 bp, Homo sapiens
ctttgcaaaactgttatattttgatgaccaaaagatatgatgcttctcttgaggaagaaacattcctcaggtttcctacagattaaggtttctgatcagacatgcttgcctggagaaaactatttatgaaaaattaaaaagtttaaattttagacgtctatgaactatttttttcaaattattcaaaactaatgaaataattcagtctttcaggtaataatgtacgaaaattaaggacagaaaacamtacattgctttgctggagtacttgatacactacgtctacatttaagagctccaataaaaagtgtaatgttaaaaacttaaaagaacacattccatgataaatattcaagatgaaatattcattatggaggtatgaatgtttttttgtaaagaggcagcaaagatgattgaaaaatgaacacataaattattagatacactcatgcctataggatagttttcatttgtcatatatagattttccatttttggtttttgaactataacaattagaaggagataattataaatggcacttttgttc

SEQ ID NO: 287202 - DNA, 550 bp, Homo sapiens
ttctcaatatctaacctgttgtatgcaattttacatttctctggccagactaataaggcagctttcaatgaattttttaaccatggtcactaatgttagacatcaaagctcaaattttagagttcaaaagctattaaagtaagaatattcaaacctagagagagtgaaaaaatgcatgatttacttcctctctgttgtggtgtgttttttcttgaaagcaaggcaagttaagtcctttgccatgcctcatgatcttatagatttagctttctagattgctcagtctgttttttccacacatattcactgtggacccyatgacataataatcaacacgaccctttagaaatcatttaagagtttaagacctaaaattcttgtcattacactcttagggtgaacaatatgtttctggcagattttttagaatgtgtgtgttattaaaccattttaatcaatctttagcccatactaacaactgatgctcaagtatggaaaatatgtccaataccaccagccagcattcaagatcttcatctacgtttcttcc

SEQ ID NO: 287203 - DNA, 593 bp, Homo sapiens
acttttctaaattgaggtttgactacaccccttaaaaatgatatcaaaacatcccagatatgtctttctcaatatctaacctgttgtatgcaattttacatttctctggccagactaataaggcagctttcaatgaattttttaaccatggtcactaatgttagacatcaaagctcaaattttagagttcaaaagctattaaagtaagaatattcaaacctagagagagtgaaaaaatgcatgatttacttcctctctgttgtggtgtgttttttcttgaaagcaaggcaagttaagtcctttgccatgcctcatgatcttatagatttagctttctagattgctcagtctgttttttccacacatattcactgtggaccccatgacataataatcaacacgaccctttagaaatcatttaagagtttaagacctaaaattcttgtcattacactcttagggtgaacaatatgtttctggcagattttttagaatgtgtgtgttattaaaccattttaatcaatctttagcccatactaamaactgatgctcaagtatggaaaatatgtccaataccaccagccagcattcaa

SEQ ID NO: 287204 - DNA, 601 bp, Homo sapiens
ttccaagaagcagtcactaactctgaatccaaaacctgaagaaccagctactcacccgctcccacgaccacctcacacatgtacatgcattcacgcttggcctttacctaataggctccgctgataaattttcaaacatttaccatggaaaatttcatacatatacaaaaataaaagtagtaaaatgaggaagcacatactcattacctagctttaattattataatcttaaggccagtctaagctgatgagcattatgtctctttcacacattttaaaagggctctgtggacacttaatggagttgtaaaaaaggtgacaaaagtattcaagagaagggaagctatttcatgaatataaattggacacataagcttacctggactgtaaaatatgaaaccaaagattgcaaaagcctcttccaaatatacatagaattaaccataatcagagcacataacaattatatttcatccttaccaatgaccaataaagttataggagcttaaaatgcccccaagagagtttagataagcccaaaataatttttgattacaccayaatttaacgctgaaatgatattctatgggaagctattaat

SEQ ID NO: 287205 - DNA, 551 bp, Homo sapiens
ccaacttctgctagtgttcttgttttttgtcttctccttgaatctttaccttgcacctctttcagtgcaatcctctgatccactgtaattgtactggtgccctatggatgtggtggtgtgttgaggaaggtggttgaaagtgttctataaacttcctattaaatttgagtctgtgtccttggtctgtgaccattataattctattaattttctctttagcaatttctaaatccactgagcttttaatttcagttactagatatttatttctggacatacagcttattcttgcaaaacttgttgtttttacttatgttttaagcctctttcatttcttgggaaatattaaaaatagtttcagaaatgcatgcttctcctgmaaattcaatttctgaaggctttgtgagtctctttctgttatctgtttctgcctattcttgcttatatattggtttttcttatatgttttataatttttgattattaattgccttttaaaggaggtttatatttgtaaattcttttaggcttatgaaaatggtagattcttc

SEQ ID NO: 287206 - DNA, 551 bp, Homo sapiens
ccaacttctgctagtgttcttgttttttgtcttctccttgaatctttaccttgcacctctttcagtgcaatcctctgatccactgtaattgtactggtgccctatggatgtggtggtgtgttgaggaaggtggttgaaagtgttctataaacttcctattaaatttgagtctgtgtccttggtctgtgaccattataattctattaattttctctttagcaatttctaaatccactgagcttttaatttcagttactagatatttatttctggacatacagcttattcttgcaaaacttgttgtttttacttatgttttaagcctctttcatttcttgggaaatattaaaaatagtttcagaaatgcatgcttctcctgcaaattcaatttctgaaggctttgtgagtctctttctgttatctgtttctgcctattcttgcttatatattggtttttcttatatgttttataatttttgattattaattgcyttttaaaggaggtttatatttgtaaattcttttaggcttatgaaaatggtagattcttc

SEQ ID NO: 287207 - DNA, 655 bp, Homo sapiens
ttcagttactagatatttatttctggacatacagcttattcttgcaaaacttgttgtttttacttatgttttaagcctctttcatttcttgggaaatattaaaaatagtttcagaaatgcatgcttctcctgcaaattcaatttctgaaggctttgtgagtctctttctgttatctgtttctgcctattcttgcttatatattggtttttcttatatgttttataatttttgattattaattgccttttaaaggaggtttatatttgtaaattcttttaggcttatgaaaatggtagattcttccaaaaaagattttctttgcttctgtcaactgcctgtgagtcttaccaatttacattttaaactaaattcttgacttcacatttttcttattatccaggtgctgtgaattaggcctgaaaacttacatgataggttctggttattaattttctargaagatttttcatcttctctcctccccgtcttcatatacagggataaagatttgagaaagatttttatcatttattaccacagttagatgtagagctttttttatttctaatttgctaagagtgaagctctcttttgttccttgctttatagtggaaaccaacatattagactccccagtttgagaggaattggggc

SEQ ID NO: 287208 - DNA, 552 bp, Homo sapiens
tctttgcttctgtcaactgcctgtgagtcttaccaatttacattttaaactaaattcttgacttcacatttttcttattatccaggtgctgtgaattaggcctgaaaacttacatgataggttctggttattaattttctaggaagatttttcatcttctctcctccccgtcttcatatacagggataaagatttgagaaagatttttrtcatttattaccacagttagatgtagagctttttttatttctaatttgctaagagtgaagctctcttttgttccttgctttatagtggaaaccaacatattagactccccagtttgagaggaattggggcattctcttctatccccacagcactctgaaactttcaattcaaagtcaagtttagcacatgttttacctatctgtacctctaactggaggaaaaactaaatttgcttacatcttagccagcatatttctttctttcatgacagctcttgaatacatttataaagatatatttgcattttatctaccagtttaattagagagattagcttattgg

SEQ ID NO: 287209 - DNA, 595 bp, Homo sapiens
cttacatgataggttctggttattaattttctaggaagatttttcatcttctctcctccccgtcttcatatacagggataaagatttgagaaagatttttatcatttattaccacagttagatgtagagctttttttatttctaatttgctaagagtgaagctctcttttgttccttgctttatagtggaaaccaacatattagactccccagtttgagaggaattggggcattctctyctatccccacagcactctgaaactttcaattcaaagtcaagtttagcacatgttttacctatctgtacctctaactggaggaaaaactaaatttgcttacatcttagccagcatatttctttctttcatgacagctcttgaatacatttataaagatatatttgcattttatctaccagtttaattagagagattagcttattggttattccgctgtaaaagtagaggaagtgaaactctatgggctggacttctgatccctgcattgcttttgaaagtttggttacagatctgcctgtcaaatgcagatctcctcatagggtactgatacattcacagaactagatattttgttt

SEQ ID NO: 287210 - DNA, 1155 bp, Homo sapiens
tacatttcagcttttattgtttctaaagaaaagatcttgaaagtatcttaaaatggcttgtaaagctctagttatgaactaactttttagaagcctatgtgacaatagatcagaaacatactgattatgtttatcctaaaatgcttaagcgtttaaggattaataggcaaagatataggaaacacaggttagacatttccaaaggcaatagttttgagtttaggtctttaacccattttgagtttatttttgtgtatggtgtatggtaggagttcaattttactttttgattttcttttcatgtggatatccagttttcctaacaccatttgctgaagaaaccatccttttcccatcgcaaattcttggcaccttttcaaagatcagatatatatatatatatacacacagacacacatacacacatatatatgtatgtgagtttattttggagttctctattctgttctattggtttatatatctgtttttatkctagcattgtatggtttgaattaatgtagctttttaatatattttaaaataggaaagtagtttgcctctagatttgtcgttcttgctcaacattgctttggctactcaagatctwataaagacaaaagatggctagtcatggtggctcacacctgtaatctcagcactttgggaagctgagtcacactgcttgagctcaggagtttgagatcagtctgggcaacatgacaaaacctcatttctaccaaaaatacaaaaaaaaaaaaaaagccaggcatggtggcgtgttcctgtagtctcagttactcaggaggctaaaatgggaggattgcttgaggtggaggttgcggtgagctgagattgcaccactgcactccagcccgagcaagagagtgagaccctatctcaaaaacaaaacaaaacaaaaaagacaaatgaagcaaagtgttagaggtactagggatgctattgtaggtcaggataawtttttttttataattaataaaaactttaattttaaaactcacacataactagtggacaatgaagcatgattttctgcaatgtgtgaaaactagtttacttgcatcaaaattacttgaggtcaactgaggcatttattaaatgcaaattactgaaacccacaccaaaacctgtgaa

SEQ ID NO: 287211 - DNA, 595 bp, Homo sapiens
gtgtccttgcatacccccacagagagacatttccacagaaaacctaccctgtaaagtctacaaaaggtgatcgctctagcaaatgtgcagacatcaacttaaagcaacaacaaaagaaacaatatgaaaaacacaaaagatttaataacaccaaaacaacacaaaaatcccacagtatctgatccccccaaaatagatatgtagaaacttactgacaatgaattcaaaataattactttaaggaagcttagcaaatgtccagaaaatacgagaaataattcaaygaagtaaggaaaacaattagtgaccaaaattagaaattaaatagactgaaattttttttaaaaaagaaaattctggtgctaaaaaatacaataaatgaaataaaaatgtaatagcataacagcagaattgatcaagcagaatacatctgttaactaaaagacatattatttgaatatatgtagttagaggaggaaaaaggaaaagaataaaaaggaataaagaaagcttatgggatttataggaaagcatcaaagagctaatattcaagttgtaggagttcaaagaagaaaaagaaagtggtaaagggtga

SEQ ID NO: 287212 - DNA, 566 bp, Homo sapiens
aacaataaaaagatcaatgaaatgagagttgattttttgaaaagactarcaaaattgacaagtctaactagactaacaaagaaaaaagaagactcaaataaaatcagaaatgaaagaggcgacattacaatggacatcgcagaaacacatgggatcataagagactactatgacaattatatgtcaataaagtggataaccagaaaatgaataaattcttagacaacttatcaagattaaataatcaagaaataaaaatctgtttaggccaacttctccttaacaagtaaggagattgaatcactaatcaaaaaacctcctcacaaagaaatgcccagaaaatcatggcttcactgcctaattttatcaaatatttaaggaagaactggtaccaattcttctcactttcaaaaaattaaacaggaagtacttaaaaatgtatttttgaagccagcattaccctgatgccacagccacacaaaacactacaaaaaaaaaaacccagaaaattacaagtcaatatccctgatgaatgtagatacaaggactctcaacaaaacactagc

SEQ ID NO: 287213 - DNA, 398 bp, Homo sapiens
ggcacactacattacacagggccacatgggcagctagcaaggtcagtcaggatacagaacaagtatcagtggaacatagaccagagcctttagtggagctttcatgaggagcaggcaaagcagggtagagatattgagtaaggttaagattggatagtttgaaractttttgtgggctgtgagctgcagaaatgttctcttgttgcccaatacctggtcctggggtgatttagggtggggggactattgatgtgtgaaagtttgacaaaaaaaaaaaagagtttggaaacgtggactttgaattgcttggtttgtatatgaaaggtgggcttgcagggaagttatttgctatctctagaaattacctagccctggaaggagcattttcttcttaagtc

SEQ ID NO: 287214 - DNA, 568 bp, Homo sapiens
taggtttaggaaaaaacaatctaatacctttacttaaaataaataattgtrtatatagactaaataggagaccactcaaagaatttatttacatgatgaataagaagagtaattatttattttctccgtgtgggagacaggttttgggacagagagaaaaggaaaggttggatgtaggaaaaggttctcaggacagagaagtttaagatagatgccatgcctctgaagcaaaaggtgcccagtagtatattctctgtgatgggtatggtggagaactacacccagtatagttcatcacaacacatcacagtgagacactaatgcctcatattcaataatgcctgtgctagacagaagctggcaattgagataagaatttggagtcatcaggagttcaaagcaagatgtaaccatagaatcataaacacccaaagaatacctggattatttgagaagaatatagcttcctcataatagatgagataggattcaagccattctgtttagttattaaagcaaaatgtagcctgggaattcaggataagcttgaagacatccaggtgggtaa

SEQ ID NO: 287215 - DNA, 598 bp, Homo sapiens
ctcaacctacggtttctattgactcctggggagtttaacaaggtggacatcattaataaacattagctgaagaagaaaacgaacaagattgatatctggggaaaaacatgaaggttgcacaaaattaaaaggctgagaagataagaaatctaaatcaatattacccatgtaggacaaaggcacatatgatcaaataaatcatgagaccttcaaaaagaatgcatgttttgtgaagaaaaatggacagattcataaatatatgtgaagtgagaacgcaggaaaggaagattataagcccctagagagagactgaaatgaattcaatgacagaagaggcaaatgcagcaagaaaaatgaataacttatttggtttagtgctcactgaagaggacttgaagttgtactagaaagtgaaaagtctcccagagggagatggcacactcctaaaagctaagaactggaaaatcatttacataggtaacatctcattataacgaaactaacagtaccactaaattgttttattgggacaaaattttattaaaatgatttcaggtgtgaaagctcctatgamttgataaagctgggagtgacagtc

SEQ ID NO: 287216 - DNA, 612 bp, Homo sapiens
ttgatttcttttaaattcttctccctcttatctcctagttacgtttatttgatcttgcattccttctaatttattctttgtttaaggagtttttaaatttttttcttttcttaatacatcagtccatttttgagtttctaattctgatgtaggttattcttttacatattggaccattttgatgaagacttttggattcattagaagtggttataaaaaaaaacagaaggtagaaaaaataatattttatcttttttattgggggtggcctgtctttctgacatgtactgcctgtctgtaggtatgctatttttctacttatcctgggtttttctcttaaaataattttgagtttaaaccttgattttgttgttgttgtttttgttgttgttgttgctaattttacgttaaacttgttttccttaactattaaaaggagacatgattcagaaacctttttaaattcatggttttaagctatgtttcaaaactggctaacarctttctaagaccttctagttcgtctccttcactttatcaggaccttgtttttttctttgtctacatttttcctatactactcaatatgcactcttctcagaaggaaggtca

SEQ ID NO: 287217 - DNA, 682 bp, Homo sapiens
aaaaattaattcaaaatgaacaaattatctaaatataagagttaaagccataaaactcttagaagaaaacatagaggtaaatcttcatggctttggattgggcagtggattcttagatataacattaaaagcatgagcttactatataattccatttatggtaaatatctaaaataggtaaatccacagagacagaaagcaaattagtgattgccaaggtcttggagaagggtagaatggaaagaaactgcttactaaaataagaggttttgatctggagtaatataaacgttttgaaactagctatgyagaggtggtggttgccaacagtgcgaatttactaaatgccactgaattgttcactttaaagtgattcattttctgttatgtgaacttcacctcaataaatcactttttaaaatgcattaacccagtaaaaagataacctacaattccatatatacttctttataaactgtaggatagactgatgtactcttttgttgagaggagaggaaaaatgaggagatgttaattctgaaatagtgactttaggcagagaaaggtcagattccttgtctcactcatagtcattatggtaattatttcaaaaaatgaaaagtttccatttctccccacatatcaaattcattctaatgcatttcctctggcttagtgacaa

SEQ ID NO: 287218 - DNA, 480 bp, Homo sapiens
tttagtggttatatcaatggttttataacttcaaaggaggcatgatcaaatcatgggactcaagttatacacaamccctgattcgtccatctattcacatatatctgaaactgcagcccagctcaatctcttgattagattatgtattttctttggttcctaagatctttgtatgtctcttctatctcatgttatagacttttgaatgcaatagaatctaaaaatatgtgaacgtcttttcagtctaactctaaagatctttgtgcttaatggaatcctgcattctatctaagaagctgttgcaagtgtataatgacacttcggggtacatttgaacttcggtccagatgattcaggtatgcaggcagactacttctattccttgaggtttgtagcaaattacaaaatatatatatgccaaaatagtttttgaaattatgatatgtgttaaatttttgtgtttaacaaaggtatacttct

SEQ ID NO: 287219 - DNA, 577 bp, Homo sapiens
atagttccaggatcagggttagtactcaatagatattaactataaattagttataaaagcagaatttgcagaggaagagggtgatttagtatgagaagggatatatgaagctggaaacagaaacaatgatcaagtcatgaaatgtctaaatgcatgttacattaaggagttagtattttatcttgaaagcaattaggaaccatttaaaggtttttaaggagcaaagtgccttgattagatattcatttcttaaggattcatctagcttcatggtgaagggaattgtaaacaggcaagaaagaaggtcataaaactatttatgaggtaactacaggaagccagatgcaaaattaaggagcactgaattagaacactggaagagggaatcgagagatacatagaaagcaaaatctagaggacttgacccactgcatgtaaagaatgagggagagtctagcttgttgtcttatsggtttatagttaggagaaatgggttgtgcacagggaaaagaagccacaatagtaggatcaagcttgttcagcaataaaatcgatttcgaacaaactgagattgagt

SEQ ID NO: 287220 - DNA, 577 bp, Homo sapiens
atagttccaggatcagggttagtactcaatagatattaactataaattagttataaaagcagaatttgcagaggaagagggtgatttagtatgagaagggatatatgaagctggaaacagaaacaatgatcaagtcatgaaatgtctaaatgcatgttacattaaggagttagtattttatcttgaaagcaattaggaaccatttaaaggtttttaaggagcaaagtgccttgattagatattcatttcttaaggattcatctagcttcatggtgaagggaattgtaaacaggcaagaaagaaggtcataaaactatttatgaggtaactacaggaagccagatgcaaaattaaggagcactgaattagaacactggaagagggaatcgagagatacatagaaagcaaaatctagaggacttgacccactgcatgtaaagaatgagggagagtctagcttgttgtcttatgrgtttatagttaggagaaatgggttgtgcacagggaaaagaagccacaatagtaggatcaagcttgttcagcaataaaatcgatttcgaacaaactgagattgagt

SEQ ID NO: 287221 - DNA, 565 bp, Homo sapiens
acatatccgtacacctggaggcagacatacaggctacactctcagatatagactctgaagcagtactataacttgattccaagccaccctgccaaagaacccacccagaaacctacctagtaacctggtaagagccatccaaggggcctggcaagagccagaattgtctgtaaaccagatagcatgccagctgtccatgaacctaactgctgcagaccctgaagtaggtcctgtcccggctgcaatcttactgacccaggtcrtggaggcagtccagtctacccagggaccagacaggatccatatctgaccagctctggtaataggccaaccaatcactgaacccatgatagaccaatcagcagccatgtaaactgaccccaatcctacacaactgtgatcctagaggcaatcccatcagggaaaggacccaacaggaaaaggtctttacctgccaaacccagtctgtaaaaattggaaaaggcgtttgctccttcaaatgcgcagacaccagtgcaaggcttgatgaaccacagtaatggaggcgaatatgtcatcactaaag

SEQ ID NO: 287222 - DNA, 557 bp, Homo sapiens
ccctctgccttgtgatcttttattgccctctgaagcatgtgatccctgtgacctactccctattcgtacacccctccctttttgaaatccctaataaaaacttgctggttttgcagctcaggygggctccacagaaactgccgatacatgatgtcacccccagaggcccagctgtaaaatttttctctttgtactctttatttctcagaccggttgacccttagggaaaatagaaaagaacctacactgaaatattgggggctggtttccctgatatgtaacaggaatatgaggaggagaaagacggaaaggtacagaagcagtatttgaagcaataataactaatttcccccaaattaatatcagatgctaaaccagaaatccaagaatttcagaaaacaacaagccagataaatcccaatagcaacaaaaactacacctaagcatattatattcaaagtttgaaaatcaaaaataaagaaagaaaccttgttagaagtcagagggaagaaaacactttacctacagaaaaacaagaataagaattacaccatact

SEQ ID NO: 287223 - DNA, 556 bp, Homo sapiens
tcttgaaatactggattcaaccagaattgaaatgaaactctcatgaaagctagcatttaatgatctctggaatgtcctatacattttcttgaaaacagctgaaagttctagtaatgatgaataatgtactttctcagcaatcaaagggagacctagtctcaagcttgaaaaagctcacatctgaagccatcactaagttgtttgccactgggattattgggcaaaaaattaaatsagggtacccctgtaaaatcttttaagttaagacaatctaggataccacttaactttcctttagcagcaacgcagaccctagagtcactgtctctccctgcatacctatcctcccaatcccaacttcatggctgctcagtatgtatcaccatctcaatcactggaaccgcaaccactgtgggctggctatcctgtgccctggaccctatggccactgtcattctacaggtgtctatgctcctaaccccagctccatggctgttccatgtgcacttgcatgtcacgccctgaagctatcaccactgtgggctagctactgaaa

SEQ ID NO: 287224 - DNA, 589 bp, Homo sapiens
gaacagctcttgtggtaagctgagtaatgtccctcaaggatatccacatccttatcccctgaatctgtgaatgtgttgtcttacatggccgaaaggactttgcagctacaataaagttaaggattttcacatggggacagtatcccgtataatccaaacaggcccaatataatcacaaaggtccttattagagtgatacaggagagtcaaagagaagcaaaggtaagaggggatggggtcaggggggagatttgaagatgctgtatggctggacttgaaggtggagaaggaagtcatgagccaaggaatgtaagtggtctctagaagctaaaaaaggcaagaaatatattctcccctagaatctccagaaggaatgcacccggctgatatcttgattttagcccttgtaagacgcatttcagatatttgacctccagaactacaggataataaatctgcgataagtggttactgcagctaatagaaaactaacacagtcccttgccccamaactgtcacaattgaagaggcctgcaagccttttgagtcttacggtagatgccttgacctacctgcacaagctttgtgt

SEQ ID NO: 287225 - DNA, 477 bp, Homo sapiens
gactcattcttcaagtgtgttctttaggcagggcctccatctagtggtttgccctggaaattaacccgcagcctttattaaatacacactacttcttttcacaaactttatgaaaatagaaaattagagctccctcatgtagcatggcagaggaaaatttccctcctgaactcatgaattctgtcctttcattgcttgctaagaagtgcagcattcttaacstctagattttgtcatgccctctccattcatggagttttcatacccagtgtatctctttgcacatagaagaaaactgtgatttctaacaaccaaagaaacaaaactgtgtgtgtctatgtgtgtctgtgtctctgtgtgtgtgtagagtgtgctaagaaagagctcagctgtagaatagacaatagcaattggtaaaggtgtggacatatcataagtattagtaagaacaacaggagaatggatgaatgttaactg

SEQ ID NO: 287226 - DNA, 603 bp, Homo sapiens
tctaatactatttttcaataaaaggaaccagggatccttggagaaatggctgattccagagctggggcacagaaaatacaaagtgagcctgragcatctttcaatgctagaaagtaaggaggtattcaaaaagcaaaaggatgataaaagtatacacgagtcaacctggaaaagcacctgatggccaaagctaaaataatttgaagaacaaaataatgtagtattaggttattatccaaagtataaataaatatttatccatctcccttttatagataatatttggaaaacaattatagctgataacaataattacttacatatattactatgtggtaggtcctattctaaacactttggatatattaattattttaaggtaaatactattgttataatcattttacagatgagaaacacaaggcttgtcatgtcaaggcacaaatcgaaaagaataacatttgtacagcactttgtaggtcctggcaggcataagaaaccatctgtgggggcactggccacctcaggccctatctagccatccaacagttgactatactagtgaattgtttcaaggcacaccaagaagctctggtataattt

SEQ ID NO: 287227 - DNA, 603 bp, Homo sapiens
tctaatactatttttcaataaaaggaaccagggatccttggagaaatggctgattccagagctggggcacagaaaatacaaagtgagcctggagcatctttcaatgctagaaagtaaggaggtattcaaaaagcaaaaggatgataaaagtatacacgagtcaacctggaaaagcacctgatggccaaagctaaaataatttgaagaacaaaataatgtagtattagrttattatccaaagtataaataaatatttatccatctcccttttatagataatatttggaaaacaattatagctgataacaataattacttacatatattactatgtggtaggtcctattctaaacactttggatatattaattattttaaggtaaatactattgttataatcattttacagatgagaaacacaaggcttgtcatgtcaaggcacaaatcgaaaagaataacatttgtacagcactttgtaggtcctggcaggcataagaaaccatctgtgggggcactggccacctcaggccctatctagccatccaacagttgactatactagtgaattgtttcaaggcacaccaagaagctctggtataattt

SEQ ID NO: 287228 - DNA, 603 bp, Homo sapiens
tctaatactatttttcaataaaaggaaccagggatccttggagaaatggctgattccagagctggggcacagaaaatacaaagtgagcctggagcatctttcaatgctagaaagtaaggaggtattcaaaaagcaaaaggatgataaaagtatacacgagtcaacctggaaaagcacctgatggccaaagctaaaataatttgaagaacaaaataatgtagtattaggttattatccaaagtataaataaatatttatccatctcccttttatagataatatttggaaaacaattatagctgataacaataattacttacatatattactatgtggtaggtcctattctaaacactttggatatattaattattttaaggtaaatactattgttataatcattttacagatgagaaacacaaggcttgtcatgtcaaggcacaaatcgaaaagaataacatttgtacagcactttgtaggtcctggcaggcataagaaaccatctgtgggggcactggccacctcaggccctatctagccatccaacagttgactatactrgtgaattgtttcaaggcacaccaagaagctctggtataattt

SEQ ID NO: 287229 - DNA, 565 bp, Homo sapiens
atagcactgcatggaagctatataactgttgaataaaacttataaggccacaagtttatagtagaaaatataaataaatactttggaaactttacgcccaaaacgtttaggaagaattggggacccagtgccccccagcatctgtactggattacgtccttgasagctgctcataggatcaacagggaagcagtctaatcatggcttcaccatgggctgtttgtaagcgagaagtcgatctgagcttttcatgtgatttcccagatctctctgatcctcctctactgcggacttgcctcactctttctgcaggggtgttttaatacctgctatgtcctttgaggtccttgggtgaaagtttgcttgaaaaatgtagaatgctactactactgcccagtgttatatcttcatgagttccttgcaggcaggcttcattggataaataaaataaggtcaaatagaaatgtgtctagtgagttgttgatctaatccaccagccagaccagttaaggattcacaacactgaaatggcctctgggaagtacaactataatatatagctttc

SEQ ID NO: 287230 - DNA, 565 bp, Homo sapiens
acaagattccttccaaccctgacattccataatcctatgaaacagctaccatttattatttcctctgtgccagatactgtgctgagtatttcacataatcgcaaaatcatcacagccaacaaatagctgtgatggagctgcaaatgatggagcactgcttatttgccaggctctgctgtaagtacttscccctgtattatctcatttaatcctcagaacaacactaagaggaaggtattattatccccaccaccctcaaggatctaaggctcagaagaatgatacaaagctactcaaagtctcccaatcattaagtgctgctcttggggtttgaacccagatttttctgactccataacccatgcttttaatcactgtactacttcaagtgccccctcaacgtcaggcaagggcagacaccaggaataggctgtgttggtttttggttgccccactgactatccatctgcagttgtttttcttccattctgatcatcaatcatagtgtgacttaaatgggtcaggataaggagtccccagctgccatgcacagccacagcagcca

SEQ ID NO: 287231 - DNA, 538 bp, Homo sapiens
ttgtaacttctttgtaactttgcttcttcctcttcatctacatagggtgtaaccaagtaaccaatggaaacctctagtgcatatttaaaccccagaaaattctgtaacaggggtcttgagcccctgtgcttggcccgctcccaccctgtggagcgtgctttcattttcaataaatctctgctttggttcctttattctttccttgctttgtgtgttttgtccaattctttgtccaagatgccaagaacctggacaccctccactggtaataactacaaccaaggtcaccacatcacactacctgtactttgctccccaaaaacagttgctagcatttattcagaaccttctctgttctatcrgttaaaaaaaaaaaaaccctagtaatttctggaacaaaatcacaaatatactcactttcacaaacagtgtagacatgtcaagaatcctatttcttacccacaagaggaccagtcttgtccctttactgtgtgtttttgattgcactggtcactaagttttttctcagcgaaacagc

SEQ ID NO: 287232 - DNA, 538 bp, Homo sapiens
ttgtaacttctttgtaactttgcttcttcctcttcatctacatagggtgtaaccaagtaaccaatggaaacctctagtgcatatttaaaccccagaaaattctgtaacaggggtcttgagcccctgtgcttggcccgctcccaccctgtggagcgtgctttcattttcaataaatctctgctttggttcctttattctttccttgctttgtgtgttttgtccaattctttgtccaagatgccaagaacctggacaccctccactggtaataactacaaccaaggtcaccacatcacactacctgtactttgctccccaaaaacagttgctagcatttattcagaaccttctctgttctatcagttaaaaaaaaaaaaaccctagtaatttctggaacaaaatcacaaatatactcactttcacaaacagtgtagacatgtcaagaatcctatttcttacccacaagaggacyagtcttgtccctttactgtgtgtttttgattgcactggtcactaagttttttctcagcgaaacagc

SEQ ID NO: 287233 - DNA, 610 bp, Homo sapiens
gtttctctgacagaatctgaaacgcttttaaccagcaagttaccaagaggcttttaagtgaagaggctaatgttgtaggtttataaataaatggatgtttgtggtgacttctttgtggttcatgtgacagggagaacatcagggaggggagattatgtcttgtattaacaggtaaattgctttttctgcctcttggttaagtgagcaggaggacagagtgccctgggtaaggaattgggagaccccccttttcttttcaactgatcctggctttccctgtgataagcagtgtgaccatggacaagatattaaccgtyctctgcctcagtttcctcatctgcccaatgaaatttataatgccttgtcaaatttttataaaattaacttgtaatactggtagctaaaacttactgagcacttaatatatgtcagccccatatgaactcggtcaatcttcacaaccacccgtgagataggttactactattgcccctactttacagaagagaaaactgaggcacagacactctaaataccttgtccaatgtcacaaagctggtaagtagtggcactgggatttgaacctaggctacctggctctggaaccaga

SEQ ID NO: 287234 - DNA, 610 bp, Homo sapiens
gtttctctgacagaatctgaaacgcttttaaccagcaagttaccaagaggcttttaagtgaagaggctaatgttgtaggtttataaataaatggatgtttgtggtgacttctttgtggttcatgtgacagggagaacatcagggaggggagattatgtcttgtattaacaggtaaattgctttttctgcctcttggttaagtgagcaggaggacagagtgccctgggtaaggaattgggagaccccccttttcttttcaactgatcctggctttccctgtgataagcagtgtgaccatggacaagatattaaccgtcctctgcctcagtttcctcatctgcccaatgaaatttataaygccttgtcaaatttttataaaattaacttgtaatactggtagctaaaacttactgagcacttaatatatgtcagccccatatgaactcggtcaatcttcacaaccacccgtgagataggttactactattgcccctactttacagaagagaaaactgaggcacagacactctaaataccttgtccaatgtcacaaagctggtaagtagtggcactgggatttgaacctaggctacctggctctggaaccaga

SEQ ID NO: 287235 - DNA, 591 bp, Homo sapiens
gatatgtttattctctgggctgcattttacattgatagtgttttttcgggtcagggtaattgataggtttttggggttcactcccacactcacatttgcctaccaatgggcaattttcttgtcctttggtgtgaggcacatagccatttcagaggaggttttagccttgttgaggataaggtctcagccccatcccagtgatgaactggaaatggacaggaaacataaggacactggattccatacacttttcctgggtaccatttctgtgctggacccaggggtgttggttgttcaaccaggaagccagctggctagttggctgtggtctcagctgagaggaacttgaagacatgacgagaacttcctatcaaggaagtggggagccaggagagtcagcagacaaacycatgccagagtctatgagggctgcttggactcatactccagagagtccagaggcaaagtccagtaaggtcgggagagatggggattacacataaaatcttaaaagctggattgcatctggaaaaggccacagtgcaagttctggatacgtccaggtaaataggtacaatctggatttaagga

SEQ ID NO: 287236 - DNA, 585 bp, Homo sapiens
gccaagagtctgttgtgttgaagtggctctgggtgggaagcattctccccagagactggggcagggtatgacttgccaggggagggtttgcagaatgtttagactgtgactcatgaaggtcttagatgaataaatagctctctttctgctgtgactgttgacagggctggtgacagcttacctttgcagttgccaaggagaatctcactctgatttttgacaagttcaattttcctaaccagctggggtctccagaatggccaccatgaataaaggcctggccaaatataaagggcaatgaagcaataggtaatatttggaggtatgaaatctgaagtgcaaacatctcctcccagccaaggaagagtcatcattgggaagggaagattaaaggaagaaagttttctgctytctggattgggaaaacaatatcttgcatctttgtgtggctagttggccattttattaatagtcttagagcttcataatcctggtgagaagaaagatagtcctctttctggaaacatctatataatttaaaatctatttggctataagtaataaaaccctgacggatagtggccc

SEQ ID NO: 287237 - DNA, 585 bp, Homo sapiens
gccaagagtctgttgtgttgaagtggctctgggtgggaagcattctccccagagactggggcagggtatgacttgccaggggagggtttgcagaatgtttagactgtgactcatgaaggtcttagatgaataaatagctctctttctgctgtgactgttgacagggctggtgacagcttacctttgcagttgccaaggagaatctcactctgatttttgacaagttcaattttcctaaccagctggggtctccagaatggccaccatgaataaaggcctggccaaatataaagggcaatgaagcaataggtaatatttggaggtatgaaatctgaagtgcaaacatctcctcccagccaaggaagagtcatcattgggaagggaagattaaaggaagaaagttttctgctttctggattgggaaaacaatatcttgcatcttygtgtggctagttggccattttattaatagtcttagagcttcataatcctggtgagaagaaagatagtcctctttctggaaacatctatataatttaaaatctatttggctataagtaataaaaccctgacggatagtggccc

SEQ ID NO: 287238 - DNA, 556 bp, Homo sapiens
ctgggtcccatgactgcccttagatgcaagggagcctggaaaagtgagtgtctggcaaatgttaatgaaatagtcatgactgacttaggtcaatcacgatttaacccccaccaacccagggctggcacttttctgtcttgaataaagctaatgttttgttggtaaggaagaaggttgttggggatggggcctgtttctaccgcatgcstttggaaagctagtccaacattatagtatgataatacatcattagtacaaaataaaaaactagaaatagaggtgtgaatttgcaggattttcaaggcatgaaggtctttgagagtgtgatggaccccaaagactgtcagtatgtgctaatagaagattgcagagaaaaataacaagtcacttaacacacccattgtcgtactcaccctttaaggcccaagccaactttgcctgcttgtgaatcttcccatcccttgcaggtagagctagcccgtccctcctccttgctcccattgcacttttcacataccttgattatacgaatcaccagcttgaattcagaatcaac

SEQ ID NO: 287239 - DNA, 192 bp, Homo sapiens
gcttccccttgtaatgaggtaatggacattcagggatagtaaactcaagtgaattttaaacttagctcgyaaggccctttgtagccactctggtttacttctcttatctcaactatcctgaccaccatctctttaaaacctgtgtttcatccattctcttgactcatggaagctatccatttcttctctccc

SEQ ID NO: 287240 - DNA, 192 bp, Homo sapiens
gcttccccttgtaatgaggtaatggacattcagggatagtaaactcaagtgaattttaaacttagctcgtaaggccctttgtakccactctggtttacttctcttatctcaactatcctgaccaccatctctttaaaacctgtgtttcatccattctcttgactcatggaagctatccatttcttctctccc

SEQ ID NO: 287241 - DNA, 621 bp, Homo sapiens
ccttcttagaaagatttctataaagctatttgtttcaaaacttaaaaaaaaaagaatgttaaattttatcccattgtataatgtctggtggattggggtatgtatgtatttaagttttccatccaaaacatgatttacaaagacaggtaaggaatacatcctttaaaaattttatgtattttattttattttttctattctattctattctattctattctattctatattttattttatattttattttgatggaatcttgctctgtctcccaggctgaagtgcagaggctcagtctctgcttactgcaacctccgcctcctgggttcaagcaattatcctgcctcagctttcygagtagctgggattacaggtgcctgccactatgcccagctaatttttgtatttttagtagagacggggttttgccatgttggccagactggtatcaaactcctgacctcaggtgatccccccgccttgacctctcaaagtgctgggattacaggcgtgagccaccgggctcagactaaaaatgtcattttaaaaaagagaaataaaacaaatgttagcctaataagaagaatatgaatgagcattttatgaagtacagcaaatacc

SEQ ID NO: 287242 - DNA, 621 bp, Homo sapiens
ccttcttagaaagatttctataaagctatttgtttcaaaacttaaaaaaaaaagaatgttaaattttatcccattgtataatgtctggtggattggggtatgtatgtatttaagttttccatccaaaacatgatttacaaagacaggtaaggaatacatcctttaaaaattttatgtattttattttattttttctattctattctattctattctattctattctatattttattttatattttattttgatggaatcttgctctgtctcccaggctgaagtgcagaggctcagtctctgcttactgcaacctccgcctcctgggttcaagcaattatcctgcctcagctttctgagtagctgggattacaggtgcctgccactatgcccagctaatttttgtatttttagtagagayggggttttgccatgttggccagactggtatcaaactcctgacctcaggtgatccccccgccttgacctctcaaagtgctgggattacaggcgtgagccaccgggctcagactaaaaatgtcattttaaaaaagagaaataaaacaaatgttagcctaataagaagaatatgaatgagcattttatgaagtacagcaaatacc

SEQ ID NO: 287243 - DNA, 621 bp, Homo sapiens
ccttcttagaaagatttctataaagctatttgtttcaaaacttaaaaaaaaaagaatgttaaattttatcccattgtataatgtctggtggattggggtatgtatgtatttaagttttccatccaaaacatgatttacaaagacaggtaaggaatacatcctttaaaaattttatgtattttattttattttttctattctattctattctattctattctattctatattttattttatattttattttgatggaatcttgctctgtctcccaggctgaagtgcagaggctcagtctctgcttactgcaacctccgcctcctgggttcaagcaattatcctgcctcagctttctgagtagctgggattacaggtgcctgccactatgcccagctaatttttgtatttttagtagagacggggttttgccatgttggccagactggtatcaaactcctgacctcaggtgatccccccgccttgacctctcaaagtgctgggattacaggcrtgagccaccgggctcagactaaaaatgtcattttaaaaaagagaaataaaacaaatgttagcctaataagaagaatatgaatgagcattttatgaagtacagcaaatacc

SEQ ID NO: 287244 - DNA, 549 bp, Homo sapiens
tgatttggccacctcgtaatggtatgtgccaggcaagttacaaaattctaagtctccgttttcctgctggggaagtgggtgcagtaacacctacctcacagagttgttgggtgtaatttgaactaacacaggaattcatgccttgccaatcttgaggactaaataaatggtgatattctttgaggaggggaagagaagccaggcagggtacagtgaacatttttaggatggagatttccaaatattatcttttagtcccagaggatcaggcaacatccaccaaccagagcaggagggaccagttgaattctctgtctagctgtctccayccagctagaggtcagggttactctggtctttccaaggaagaaagcaaggatcctgtttttaggatcagcttatctccctcactagcctcatgctctttggtgtctttttctacaattttcaggataggtaacgtagatgattacccatgagggtaagcgtctacatgtcatcagaaaatttgattaaacacccacccatggctgtggtttgagggatttt

SEQ ID NO: 287245 - DNA, 1295 bp, Homo sapiens
ccacatcccgacttgaggactttactcccagatttcactgcttgctagctagatagaaatgttgtttactcttacatttctcacctgaaaaaaatgagaataatagtagtaccttccccctagagttgtaaagattaaatgtgttatgtctatagtacttgttatggatactcaaaatagtgttatttttattattgctgttgtactccttatcatcactactattacttacttttatttatttatttttgagatggaatcttgctctgttgcccaggctggaatgcagtggggcgatctcagctcactgcaacttccgcytcccgggttcaagcaattctcctgcctcagcctcccaagtagctggaattacaggtatgggccaccatgcccggctaatttttgtatttttagtaaagacggggtttcaccatgttaaccaggctggtctcaaactcctgaccttgtgatctgcctgcctcggcctcccaaagtgctgggattacaggcataagccaccacacccagctgcaccattactatttctaatactcttggcaggaatcttaattgacaactagcttcagttatcacagaaagtttggggatcccaggtttagaggatgtaggtcaagaactgtagatctwccacatcccgacttgaggactttactcccagatttcactgcttgctagctagatagaaatgttgtttactcttacatttctcacctgaaaaaaatgagaataatagtagtaccttccccctagagttgtaaagattaaatgtgttatgtctatagtacttgttatggatactcaaaatagtgttatttttattattgctgttgtactccttatcatcactactattacttacttttatttatttatttttgagatggaatcttgctctgttgcccaggctggaatgcagtggggcgatctcagctcactgcaacttccgcctcccgggttcaagcaattctcctgcctcagcctcccaagtagctggaattacaggtatgggccaccatgcccggctaatttttgtatttttagtaaagacggggtttcaccatgttaaccaggctggtctcaaactcctgaccttgtgatctgcctgcctcggcctcccaaagtgctgggattacaggcataagccaccacacccagctgcaccattactatttctaatactcttggcaggaatcttaattgacaactagcttcagttatcacagaawgtttggggatcccaggtttagaggatgtaggtcaagaactgtagatct

SEQ ID NO: 287246 - DNA, 608 bp, Homo sapiens
tgtctttaatttcacaggcttatgggtggcagagacttaccctgtcttagatgaaactttaaacttcagacttttgagttaatgctagaatgagttaagactttcagggactactgggaaggcatgactgtattttgcaatgtgagaagtacatgagatttggggggcraggagcaaaatgatatggtttgcatgttccacccaaatctcatgttgaactgtaatctccaatgttggaggtggggcctcgtgggaggtgactggatcacaagggatgatttctcatgaattgtttagcaccatcctgttggtactatcctcacaatagcaaatgagttctttgaagatctggttgttttaaggtgtgtagcaacacctcccttatctgtttctcctgcttttgctatgtgatctgcctgctccccctttcagcttccatcatgattttaagtctcctgaagcctccccaaaagccaagcagatgtcagcaccatgcttcctataaagcctgtagaacagtgatccaattaaatcccttttctttatgaattacacagtctcaggtatttatttatagcaatgcaagaacaggctaatataccagcctt

SEQ ID NO: 287247 - DNA, 589 bp, Homo sapiens
cagccatgccatgggggagatggagttagtcctcaaatcaatctatccaacgctcataggttagragtttttcaaaggcattctgggaaaggagtggcagcgactaggcttgctgctgatttgtttgggcagagatgaaatcatagggggtcaaagccatcctcctgtgggctaaatcatttctgagtggggccacaggggcaggattggtgggtctaggtagacccatggggtccagtggagccataggtgtcagacatgaaaaaaaaaaacaacaaaaaaaacatctcaaaggcccatatacaatagtggtgttacctgcaggaatggctgacaatctgtttctatgccttagcagaatcaggctcctctctttcccctaacctgatggtctttcattagttttgcaaaggccattgagttcttggggaaggcctattcccatttaaaactataaattaaatatctctcaaagacagcttagcctaagcccaggaatgattaagggaaaggcaagatggaggaggtgggttagatcagatctctttcattgccataattttctcactggtataattcttgcaaaggg

SEQ ID NO: 287248 - DNA, 589 bp, Homo sapiens
cagccatgccatgggggagatggagttagtcctcaaatcaatctatccaacgctcataggttaggagtttttcaaaggcattctgggaaaggagtggcagcgactaggcttgctgctgatttgtttgggcagagatgaaatcatagggggtcaaagccatcctcctgtgggctaaatcatttctgagtggggccacaggggcaggattggtgggtctaggtagacccatggggtccagtggagccataggtgtcagacatgaaaaaaaaaaacaacraaaaaaacatctcaaaggcccatatacaatagtggtgttacctgcaggaatggctgacaatctgtttctatgccttagcagaatcaggctcctctctttcccctaacctgatggtctttcattagttttgcaaaggccattgagttcttggggaaggcctattcccatttaaaactataaattaaatatctctcaaagacagcttagcctaagcccaggaatgattaagggaaaggcaagatggaggaggtgggttagatcagatctctttcattgccataattttctcactggtataattcttgcaaaggg

SEQ ID NO: 287249 - DNA, 579 bp, Homo sapiens
tgcaagatggggctgcccttgttctgactgtaaacctaccaggggagactcagaacctgggaagcacactgcagtgycctgtgcttttctcaggtgccactaatctgcaggttgctcccgcaaaatctgcctaattttgggcttcatttgtaagctccagataaacttatcttcctctttccttttctaaactccatccatacttccagctagaaaacacataccacatgttcagatataaatattaaaaataagtctattttactagatgtattgatgtattaaataaaattttttaaaagcctgtatactactacatctattactttttaaatgcttgagtaagaggtatattaattatattcttcttcaaaaattattttctcattacttaacaacttcataagacaatgttagtgctagacgggaccttgaaaagctggtatcttaaaatatttaaaaagccttggcaaagtttgaggatatctttgagaacctaaagcaaatatatttccagaaataattattacagtccattccctttttatacctttttagtttagttgccacattgagaat

SEQ ID NO: 287250 - DNA, 579 bp, Homo sapiens
tgcaagatggggctgcccttgttctgactgtaaacctaccaggggagactcagaacctgggaagcacactgcagtgccctgtgcttttctcaggtgccactaatctgcaggttgctcccgcaaaatctgcctaattttgggcttcatttgtaagctcyagataaacttatcttcctctttccttttctaaactccatccatacttccagctagaaaacacataccacatgttcagatataaatattaaaaataagtctattttactagatgtattgatgtattaaataaaattttttaaaagcctgtatactactacatctattactttttaaatgcttgagtaagaggtatattaattatattcttcttcaaaaattattttctcattacttaacaacttcataagacaatgttagtgctagacgggaccttgaaaagctggtatcttaaaatatttaaaaagccttggcaaagtttgaggatatctttgagaacctaaagcaaatatatttccagaaataattattacagtccattccctttttatacctttttagtttagttgccacattgagaat

SEQ ID NO: 287251 - DNA, 536 bp, Homo sapiens
atctcctttgactccatatctcccattcaggccacaagaggtggactcccaaggtcttgggcagctctgcctctgtgggtctgcagggtatagcccctgtrgctgctttcacaggctggcattgagtgtctgtggcttttctaggtacatggtgcaagctgtcagcggatctaccattctggggtccggaggacgtggctaatgtggtaccttggggatgttatagaaccctgtttttttatacttgccagaattatttttctgtttccttctcatttggatagactatttcttttaattattgttgacttctttttatttgactgttttatttcttttttcccctgaaggatgtgactttaatgtttatagtttattgcagccttattcagctcttggtgctttcaggggtgaagactctgtaagagtttctcattatagtctttgtatgatgactttctcagatgctggctgtagtaatgatgtgcttggtgtatgactaagttcactgtctcttatgaggttggaatagcaga

SEQ ID NO: 287252 - DNA, 584 bp, Homo sapiens
aaccgttgctgggagcagatgttctaagattaattctgctccacatacagcattttccatctcaactgatgatggcaactccatctctccagtagcaggcttacccttgactactgtttgtctctcaygatactcatccaacttattagaaagttatatttgctctatcatcaaaataaatcagaatccaaccatatcttgctgcttctactgttaacccgctgtccgcactaccaacatcatatgcccttcttcttcctcctatagcttatttcctattcccatcctgctctttctttttaaaaaatgctttaaaatcattttccatatggcagcaactgagctcagcacttaatatttactgcactgtttaatcctagcaataactcccaggcagcattattattgtaaccattttatacacaaaaattaggctgatagaaataaataactagtttgtaatcaaagagacatgaagtatcagagccaaagtttgatttaagggtatctgaactattaaatgccttctattttcctcctcttctatgtgctcacagcaatttgtatgggtcctctctctgtca

SEQ ID NO: 287253 - DNA, 596 bp, Homo sapiens
tgaagagggccttctgtgatctttttatggatgtcatagaggagagtcacaaggacagagagtaaaacaattatctatctttcctgccaactctaaggaagtctgggataataatctttctttctgatatcctttggtgcgtgttttccttcaccatacaacccttttcccattgtcttcagtcaaattgtgtgggaatcctaaatctgacacatattgtctgatgctggacaaattatctaagctccttgtgcctttctcctcatcaataaaatgagaacaatgatagagtatctgttatgggattgttgtgagatttatataaattaatccatataaagtccttagaagggtgcatgaaatcataagtgctcaataaacgttaggttcattgttttttaaattatttttcatacactgccatttatggtttctttattattttacgtgtaattcttgttttcttcagatagatggtcattccagtcataagcrtgagtatacagactatgttagtattagtgtttcttcatcattttgtgttatttttgttttctccagctagatggtcattctggtcataggactgagcatac

SEQ ID NO: 287254 - DNA, 567 bp, Homo sapiens
atacagactatgttagtattagtgtttcttcatcattttgtgttatttttrttttctccagctagatggtcattctggtcataggactgagcatacagagtatgtcaggttactaacagtccaacatgaaaatgtgtgtctctcctttcaagcaggttacacttgtttagaagccccacttgtacattctcagcaatactttcagagttttatggggttaccacctaaagattttatgtatttcttcatcttttaaaatagaaaagtgcactcagacacaatctcatttttcaggggttgctttgagcctctagtcatcattaggaaataaacaaagatttgttttgcatatagaccataaaagttttctgaaaaccttcagtgttgggctacacaagttggggaggaaggaaaggagcaatattggtgaaaaaataaagataagtgacatgatcctcataggtcatgaagaacttacaatctagcggaagagacagagccttgcctgagccagcccttgcctacttttccaccttcatctggtacacgccctcttgccccagttct

SEQ ID NO: 287255 - DNA, 625 bp, Homo sapiens
ctgtgatctttttatggatgtcatagaggagagtcacaaggacagagagtaaaacaattatctatctttcctgccaactctaaggaagtctgggataataatctttctttctgatatcctttggtgcgtgttttccttcaccatacaacccttttcccattgtcttcagtcaaattgtgtgggaatcctaaatctgacacatattgtctgatgctggacaaattatctaagctccttgtgcctttctcctcatcaataaaatgagaacaatgatagagtatctgttatgggattgttgtgagatttatataaattaatccatataaagtccttagaagggtgcatgaaatcataagtgctcaataaacgttaggttcattgttttttaaattatttttcatacactgccatttatggtttctttattattttacgtgtaattcttgttttcttcagatagatggtcattccagtcataagcgtgagtatacagactatgttagtattagtgtttcttcatcattttgtgttatttttgttttctccagctagatggtcattctgktcataggactgagcatacagagtatgtcaggttactaacagtccaacatgaaaatgtgtg

SEQ ID NO: 287256 - DNA, 567 bp, Homo sapiens
atacagactatgttagtattagtgtttcttcatcattttgtgttatttttgttttctccagctagatggtcattctggtcataggactgagcatacagagtatgtcaggttactaacagtccaacatgaaaatgtgtgtctctcctttcaagcaggttacacttgtttagaagccccacttgtacattctcagcaatactttcagagttttatggggttaccacctaaagattttatgtatttcktcatcttttaaaatagaaaagtgcactcagacacaatctcatttttcaggggttgctttgagcctctagtcatcattaggaaataaacaaagatttgttttgcatatagaccataaaagttttctgaaaaccttcagtgttgggctacacaagttggggaggaaggaaaggagcaatattggtgaaaaaataaagataagtgacatgatcctcataggtcatgaagaacttacaatctagcggaagagacagagccttgcctgagccagcccttgcctacttttccaccttcatctggtacacgccctcttgccccagttct

SEQ ID NO: 287257 - DNA, 1148 bp, Homo sapiens
atacagactatgttagtattagtgtttcttcatcattttgtgttatttttgttttctccagctagatggtcattctggtcataggactgagcatacagagtatgtcaggttactaacagtccaacatgaaaatgtgtgtctctcctttcaagcaggttacacttgtttagaagccccacttgtacattctcagcaatactttcagagttttatggggttaccacctaaagattttatgtatttcttcatcttttaaaatagaaaagtgcactcagacacaatctcatttttcaggggttgctttgagcctctagtcatcattaggaaataaacaaagatttgttttgcatatagaccataaaagttttctgaaaaccttcagtgttgggctacacaagttggggaggaaggaaaggagcaatattggtgaaaaaataaagataagtgacatgatcctcataggtcatgargaacttacaatctagcggaagagacagagccttgcctgagccagcccttgcctacttttccaccttcatctggtacacgccctcttgccccagttctwgaaaatccttttaaattactctttcaacacatacaaagttaaaatttctgtgcagacatcatagaataattttcctgctggacttaataaaatgtagtatgatttcaggtatattagtacaggcatactttgttttattacacttcactttactgagcttcacagatactgcattttttacaaattgaaggcttgtagcaacacgcaagcaagtctatcagcacatttttccaacagcatgtactcactttttgcctctgtgtcacattttggcaattatcttagtatctcaaactgtttaattattttcatawctgttatagtgatctgtgatcagtgatctttgagcttactactgtaatttttctggggtaccataaccagcactcatatatgacagataatttaataaatgtatgtgttctgaccactttactgtccagccacattcccccatctctctctctctctctctctctctctctctctctctctctgggcctccctgttccctgagagacaacaatatttaagttaggcaaattaataaccccacaatgacctctaagtctttcagtga

SEQ ID NO: 287258 - DNA, 513 bp, Homo sapiens
tctggggtaccataaccagcactcatatatgacagataatttaataaatgtatgtgttctgaccactttactgtccagccacattcccccatctctctctctctctctctctctctctctctctctctctctgggcctccctgttccctgagagacaacaatatttaagttaggcaaattaataaccccacaatgacctctaagtctttcagtgaaaggaagagttgcatgtctctcactttaaatcaagagctagaaattattaygtttagtgagaaaggcatgaaagctgagggaggccaaaagctaggcctcttgcaccagactgtcagcccagttgtgaagaatgcaaaggaaaagttacagaaggaaattgaaagtgctactccagtaaacacacaaatgataagaaagcaaaacagccttactgctgatgtggagaaagtttgaggggtctgaatagaagatcaaaccagccacatttccttaagccaaagcctaattcagagcaag

SEQ ID NO: 287259 - DNA, 513 bp, Homo sapiens
tctggggtaccataaccagcactcatatatgacagataatttaataaatgtatgtgttctgaccactttactgtccagccacattcccccatctctctctctctctctctctctctctctctctctctctctgggcctccctgttccctgagagacaacaatatttaagttaggcaaattaataaccccacaatgacctctaagtctttcagtgaaaggaagagttgcatgtctctcactttaaatcaagagctagaaattattacgtttagtgagaaaggcatgaaagctgagggaggccaaaagctaggcctcttgcaccagactgtcagccmagttgtgaagaatgcaaaggaaaagttacagaaggaaattgaaagtgctactccagtaaacacacaaatgataagaaagcaaaacagccttactgctgatgtggagaaagtttgaggggtctgaatagaagatcaaaccagccacatttccttaagccaaagcctaattcagagcaag

SEQ ID NO: 287260 - DNA, 1194 bp, Homo sapiens
tcacacctggctgaaagacttgatttctagggttatcttgaagctgaagagagagggatgagattagggaaagttaaaatgccataaattgcaatattcttacatattcagccattttcttcttgtgtaaacacttctcaaattgttacaacactttgattaatgtctagagttcaggaaaagttgattttgatagtttttgcatgtgtttctgttgctttcatagaggagtagattttcagaggtcttactctgccattttagaagtcaaaactcctcaagttttaaaagtaccatttgytggttcttatttggtattgccctaaactagcgaattaatgtaagaattttaatttatagtattttctttttcaattcaagtatataatgatgcttcattttttttctgtccatatattaaatgtctcagttaagttttgttgtgttctatgttcttattatattatccaactggtttatgctggtctgaagaaaagctattaatttcttcttttttttacattgctgctctactgaaccctcttgttaattctaatagctttcagtttatttwgttttacaatagaaataaagagatacaagaaagaggcagaagctttaatagcctctatgcaaacccacaaaccccagaattcccaaggtaccctgttaactgctacagatgtggaaagaacagttatctctcttctactcagggtacaatgttgttagtatattttacttcttatttctgcaatcattggcactagattctttctctgtataatacacatgtttaacccatctatacttwaccttataaaacttgtttgtttttggccgagcatggtggttcatgcctgtaatcccagcactttgggagactgagaagggcagattacctgaggtcaggagtttgagaccaccctggccaacatgacaaaaccgcgtctctactaaaaatacaaaaattagctgggtgtggtggtgggtgcctgaaatcctagctactcgggaggcttaggtaggagaattgcttgaacctgggaaggggaggttgcaatgagccgagattgtgccactgcactccagcctgggggacagtgtgagactgcatctcaaaacaaaacaaaacatatatatatttttttcctctctcttgcctagaggccatcaaactccaaatggtcaggc

SEQ ID NO: 287261 - DNA, 653 bp, Homo sapiens
tatcttatatatacataaatacaataaagtttaatttataaattaggttcagcaaaaaataaacaacaaaaacttaaaactataattataacaatatattgtaataaaagttatatgaatgtgcttgcttcctctctctctctctctctcaaaatatcttattgtactgtgttcacctactttcagarcacagttgactctgaataactgaaaccatggctaaagtgggactattgcatttaattattatttgttgaacaaataaatagattgaatggatgaacaactgaaataaactttgcttctttgtttaaatatcacaaaacagcatatgataatgcatctatgccatgtgttacatcatataaagccaataatacgtaacatttaagaattctaaatttattgtagtaaattaatgtaaccttattataaattgctcagagttatccatttacaaaataagctataaatgtgaaaatgaaagcaatgggaactgattctaattttagaggagaacattttgaatgagaatattaaaatttgcaaggacatttattttcaatttttatcaagatgactaactggcaatatgcggttttgctttgtgtatgaaggtgtagttggtagattcaatttatgcgctggaatga

SEQ ID NO: 287262 - DNA, 597 bp, Homo sapiens
tttttctagagataatgtctacttaaaattcatttgtaattatactcagaatatatttttttcagttttcaaaaatttaaataatctagggagtcaaacattgactttccatttcatcttgtgaaataacaagaaattcaaatagggaaacagagagagattacactcaaaaacctaagtgtttagttcttagaacttmaaattttgtaaaaattttagattgaatagcaatagtcagtacttggtgaattcgatgatactctagattgtctttcacacatctgtgtattctcaaataagaaactcaatatctgcataaccatcccaagtctcttcttcaaataatttatgaaacaatgagaaaaaatgagtgttgtaatttcgaacaatatatttctaaatgataaaatatggatttttagaatttagcaattacattaaaaatgagtggcagagttagatgcacacagaagtttaaccttcatggaggaaactgaccttgatcttttcctttcagaattcataaggtttattttactacttcatacccaaaaggggtattttcattcaatcattgtttcttcatatattagatga

SEQ ID NO: 287263 - DNA, 645 bp, Homo sapiens
tttgtaattatactcagaatatatttttttcagttttcaaaaatttaaataatctagggagtcaaacattgactttccatttcatcttgtgaaataacaagaaattcaaatagggaaacagagagagattacactcaaaaacctaagtgtttagttcttagaacttaaaattttgtaaaaaktttagattgaatagcaatagtcagtacttggtgaattcgatgatactctagattgtctttcacacatctgtgtattctcaaataagaaactcaatatctgcataaccatcccaagtctcttcttcaaataatttatgaaacaatgagaaaaaatgagtgttgtaatttcgaacaatatatttctaaatgataaaatatggatttttagaatttagcaattacattaaaaatgagtggcagagttagatgcacacagaagtttaaccttcatggaggaaactgaccttgatcttttcctttcagaattcataaggtttattttactacttcatacccaaaaggggtattttcattcaatcattgtttcttcatatattagatgaaatatttctattaagagataatttcttcatctagtcagatagtatttggttacccagtggagtgattagtgtaagatggg

SEQ ID NO: 287264 - DNA, 645 bp, Homo sapiens
tttgtaattatactcagaatatatttttttcagttttcaaaaatttaaataatctagggagtcaaacattgactttccatttcatcttgtgaaataacaagaaattcaaatagggaaacagagagagattacactcaaaaacctaagtgtttagttcttagaacttaaaattttgtaaaaattttagattgaatagcaatagtcagtacttggtgaattcgatgatactctagattgtctttcacacatctgtgtattctcaaataagaaactcaatatctgcataaccatcccaagtctcttcttcaaataatttatgaaacaatgagaaaaaatgagtgttgtaatttcgaacaatatatttctaaatgataaaatatggatttttagaatttagcaattacattaaaaatgagtggyagagttagatgcacacagaagtttaaccttcatggaggaaactgaccttgatcttttcctttcagaattcataaggtttattttactacttcatacccaaaaggggtattttcattcaatcattgtttcttcatatattagatgaaatatttctattaagagataatttcttcatctagtcagatagtatttggttacccagtggagtgattagtgtaagatggg

SEQ ID NO: 287265 - DNA, 1146 bp, Homo sapiens
aagtagaagtttccacaacccaagccccatttttaaaattctgataaaaataagcagcatgcataccatccttaagattgataaaataaataatggaaggatcaaaatgcaagtgggttacctgcctgctacttggaactataaggacagatacattccttttttcccttttcactaagtatatcatactttcataactatgagtaggagtgcagcttggaacttcagctttgtgaactttcttacaccacatactcctcattctgtcagttataggagaaaatgtatttacagaaacatatttattgagcacctcttatgtatcagtcactactataggcacttgtattaaaacaataagccagatacgatgcaagccttctgataccttccagaagagacttgcaaacagacacttgtaatgcaaagaagaacgtgataagtgaacttttcttatagaagattagattataaagcaatcaaagatatgggaagtgaaactccagacacctggctgygcttaagtattcctataatatactttgattttatggcataaaatcaaatcttaaaatgcaaaatataaggtctgtaacccwtgcaaacagacacttgtaatgcaaagaagaacgtgataagtgaacttttcttatagaagattagattataaagcaatcaaagatatgggaagtgaaactccagacacctggctgcgcttaagtattcctataatatactttgattttatggcataaaatcaaatcttaaaatgcaaaatataaggtctgtaacccctacttggcaattgtgtatctgtgagaataatactgtgttggcaaggagaaaaataaggtatattatttcaccttaaatgttgtatttctggccaagaattcaaatatatcatgaaacaaawgatctagaaatcataatacaagcattactctggcaatcaaaaactcacataatagcttttagaaagtttagattttgtgcaaatacattttatcttctttgcagttctgatgaattgtgaattatatttgtttgaaatatgccataatttagacataagaaaatctttcaaaactgtgatatataatacacatgcacttttaaagaaacatttgaatatattaatgtagt

SEQ ID NO: 287266 - DNA, 634 bp, Homo sapiens
tagtcctaatgatgcttacaaataagtataaaagtattgtgatactgaaataatcacttgaatattttaggtgctgaaagaaaagtttactgaataacataattgatcttaatggctaaatattttaatatctccaacactgcaagatcgtgctggttaacaaatgccaaaccaaagtgattcaaagaaacaayatgatatcctttctttgatcacagatagaaaaattaaatcacaaaatttgtttgtgttcttccctctaagaataccacagagttttaattaggcttactattttgtaagtcttaaagtcaagtaaactgattcctcccactttatttttctttttcataattcttcagctattctaggtcctgtgcccttctatgtaaatgtcacaacaagcttgtctattaaaatttaaatcaaaaatttttatttaagtctactaaaatccatggtacaatcttgatagaaactgcatgaaaccagtttcaatatcagttttggaagaatggacatttttacattgttgaatcttccagttcatgaacatggtatgtctctccacttatttagagagcaaagcttagtatacttacagtaaagttaaaaatgagcaaaattttgctta

SEQ ID NO: 287267 - DNA, 634 bp, Homo sapiens
tagtcctaatgatgcttacaaataagtataaaagtattgtgatactgaaataatcacttgaatattttaggtgctgaaagaaaagtttactgaataacataattgatcttaatggctaaatattttaatatctccaacactgcaagatcgtgctggttaacaaatgccaaaccaaagtgattcaaagaaacaacatgatatcctttctttgatcacagatagaaaaattaaatcacaaaatttgtttgtgttcttccctctaagaataccacagagttttaattaggcttactattttgtaagtcttaaagtcaagtaaactgattcctcccactttatttttctttttcataattcttcagctattctaggtcctgtgcccttctatgtaaatgtcacaacaagcttgtytattaaaatttaaatcaaaaatttttatttaagtctactaaaatccatggtacaatcttgatagaaactgcatgaaaccagtttcaatatcagttttggaagaatggacatttttacattgttgaatcttccagttcatgaacatggtatgtctctccacttatttagagagcaaagcttagtatacttacagtaaagttaaaaatgagcaaaattttgctta

SEQ ID NO: 287268 - DNA, 607 bp, Homo sapiens
aaatacagtcaattaatgttatcactgtaaatcaagattacagttttccatgcaaataacagttaataataagcataaataacagcacaagtgactcaatttagcaaatcacacaggctgctgtgcatggtcagtgtactgaactgttgaaggaaaaatgagccaatttagtactggcagaaagattgctcaaatgctaattcaatattaaacagacatcaaaatagctgatagaaccgaaagcaaaccacaggcaaggaaattacagacaagtagcaaacaaacacaaaagtactggaaagacaagttttagaaatttgaaattaatagccaaagaaacctcaaaatcccctaaaaaatgtagcctgttcaatagtggttgtgagacagaatgcaacacagaaagtagaggttacatgctacagtgataagtcacattgactatgtttgsgcactgccaccaaaacttaccagatatcacttagccttttatctgtaaaaattgaaaaatatattaattttaccccataaagttgtcatgacagcaattcaagtttgtgcacttagcatggaacaccgtatatcataaacactaaatagattttag

SEQ ID NO: 287269 - DNA, 577 bp, Homo sapiens
ataaatttcaacatcctttcatctatcctacttgattgctctccatgtcactaatacattaaaattcaactatttgttaatgttccatttagtccagtagaatataaataaccctgtaagcttggttgtctgtttttatcactactttatgtagcagcaagaacagagcctgcacaaattaggcactcaataaatatctcttgagtttataaaaatatgaaatatgatctatacttgcaaggtttttagaaaagtatctggcatatcatcagcactcaatatgtgtaaattattgctttactattattattaataaatactgctccttgaaaaaatttatgacaatcatgattattgcacttattgaggacatactatgttttagaaaatgtactcaatttgttatagatattacctcatttaattcattaaataattmtaggaggcaggcataattaatgtcatgattattcaagtgagaaaacagagacattcggagctaaaattagttcaaacacaaatattttataaagtatagaatctgaattctaacccaggatatttgacttcagattcc

SEQ ID NO: 287270 - DNA, 579 bp, Homo sapiens
ctattatttttaccagacacaaaattggctccagaaacgtagctaattctctctctcaccttaagatcatcaacagtaacttcagagtggaattaactatgctgaattatagattgacaacagatttaatagtgtttaattttaccataggccagaaaacatcatctatgcagacatggaattttcaatataaagaaatgtcatcatcatgaataattgaaaagggatttactatgtgattcattgataccaagaataaaatcyttcaaatctgttgctgttcaaagtggtaatattgcaattctataggcattctctaaaaacatccttaaataccatgtcagcagagagatgcagaaagctataatttgcaagtggtaaaattgaaacaaagatattataaattagttcttctacttacatgattaaaaacatttttatttctttattttcaaggtaacagctagcacatctttcttttagtagtttatatttgtattttacattaaaatgtaaatgcttaggatatggacaaaaggaaaaatataaaatttactagtggaaaatatacatttagct

SEQ ID NO: 287271 - DNA, 623 bp, Homo sapiens
aggtaagacatcactccatatatagcaatacttaaaaggatactctaacttsattattaataaagatgacagaaaccataattgtaagtaatttagtagacaacatgcaataagaattaattttactttataatatagtcacttaagcagtgaaattcaacaaaatatgaatcttgcattaatgtttcttcactgagtaatggtgaaaccttgagctgaagaggctgtatcacgaagggaaagttcttcagcatactaacaagaaaagctttgaaacaaacaaacaaacaaaaaagctaggaatatatttaaccaaggaggtgaaacatttctgtaagaactacaacacattgatgaaagataccctaattgacacaatttgtatcaaattgtcaagacagttttttacctaattagaaaaaacaatactaaaattcatatagaatcaaaaaagagctcaaattgccaaagcaatcgtaagcaaaaagaaggaagctgaaatcatcacattcacgtgacttaaaatcacactacaaggctacagtaaccagaacagcatcgtactggtataaaaaaccacatatagataaatgaaaccgaatagaggacccagaaataacgta

SEQ ID NO: 287272 - DNA, 623 bp, Homo sapiens
aggtaagacatcactccatatatagcaatacttaaaaggatactctaacttgattattaataaagatgacagaaaccataattgtaagtaatttagtagacaacatgcaataagaattaattttactttataatatagtcacttaagcagtgaaattcaacaaaatatgaatcttgcattaatgtttcttcactgagtaatggtgaaaccttgagctgaagaggctgtatcacgaagggaaagttcttcagcatactaacaagaaaagctttgaaacaaacaaacaaacaaaaaagctaggaatatatttaaccaaggaggtgaaacatttctgtaagaactacaacacattgatgaaagataccctaattgacacaatttgtatcaaattgycaagacagttttttacctaattagaaaaaacaatactaaaattcatatagaatcaaaaaagagctcaaattgccaaagcaatcgtaagcaaaaagaaggaagctgaaatcatcacattcacgtgacttaaaatcacactacaaggctacagtaaccagaacagcatcgtactggtataaaaaaccacatatagataaatgaaaccgaatagaggacccagaaataacgta

SEQ ID NO: 287273 - DNA, 593 bp, Homo sapiens
tcacagttcatgaatcttgctcttgggtctttggcctttcctctctgtagtttgtcctgtgtgttggagacaggaatgtgagatgccatttccagttgttttgtttttattgttttaattcatgttttcttattgaatttaagaaaacgttaacagataaacaaattccataatatttcctgtgaaactttactaacatgtktctttttctagctataatcaatgatataattttaccattttataaaacgagacatctttaaaaaggactacagaactgcactttttatacctatcattgcaaagtttttccagtatagcgaccattaaaatgtatttgttttattctccattttttctacaaaaagtttaatggtgctatttgaatacaaataaatttatttctttttaagcattaactgggttaaactcattctgtgttttgactgaaattttagctaacatcctaataacacgttgaacataatctgtattacaataaataaatgcaaaaattttactgacaaataactatactccatcaaaataagaaaatagaatagtagaccttcttaatcatagtataaagttaa

SEQ ID NO: 287274 - DNA, 1217 bp, Homo sapiens
ataacacgttgaacataatctgtattacaataaataaatgcaaaaattttactgacaaataactatactccatcaaaataagaaaatagaatagtagaccttcttaatcatagtataaagttaaaattcttacaaaattatgaggagtgaaagaagaatgcctaaatcatttaaaaattgaaactatcatgacttgataatggatttggtaaatatattgttcaatctaagaataaaatacaaaaatggaagaaattttaactaatattcaagaaattaaatttctgaataacgtgtacatgtacattttattctactcatgttaatcaaaaagtatgcataattaatttttgacaatcataactgttataatgcataatttaagcactgtcaattcacttacatcagccattcattyagatcatttaaaatgccaattcacgttttaaatacttcattccattttatttcatgatatttcaaaagttcaaaattgacccttggcaacagtggactcttttttggaaggtatacattaaaatattctgtgagttaaacattggtaaatattttttgtcagtcttgggagttctggctaagtggataataagaaaaaattcaagwattattgaataaaagtttaaatcacacgctgcactatccctccacctctgccctcacactcacaaccaggtgggggatatatgaagtcaaaatgtacttttcaagtgcttcttgggtgtgcacgtttgtcttcaccatggaaaatcatggcttttaagattatttacatttgcaaaactcaagawtgtgtctgatgaaacactgcacgcaagagtggtccaactgaacctatttctctaaatattgagaagacaattcacaatgaaatgctaagctataatatcataagtataataaatagaccaacctcactggcattgccaaactactaagggtctagattgaatttagaaatcagttttctgaaaagggtacaatattatattgcagcttcataatttatttattctttttgatgggccaccaaattttgctttctaatgattagagtggcaaaattgtgtttgggaaaaatcatggcttattcagttgcatttgtccataaaaatatttcaaaattccaattaagattgggacagagacaggacaatttctaatctcctgagaccaattttataaagttttccaaatga

SEQ ID NO: 287275 - DNA, 589 bp, Homo sapiens
atactgcaggccacagaattcggtaaactactaaaaaaatgaacatttcatccttggttgaatattgttattgctctgtagttacattgtgcactgtatatagatataatttatctatttttccattaaacaaaatcataactggcaagtagagctatggaattgtcttctgtagtgttgctctctttataagatgtgatgtcctcattctagctgtgctagctttttgcagcagcagtttttgtttgtaaaatgaaacagcaccaccttgtatcctgaagtaaagctacagcttctttaaaatatctaacattcagatgtttacmcatttcaaatatatgtagtaagcgtcgtattatgaagtagataaaatttaattacaggcctgctctgtgctagattcagctgtgtaattactaaaccgctaaaccgataccactgtatttatgcccccaaaatacatacttttagctataaatttaccccgatacaaccaaaagcagaaaaatatgttaaattgtgtaatagctatcaaatggcaaattgtctgtcatagctcacaaaaataattcaattaaatgttgagatc

SEQ ID NO: 287276 - DNA, 1179 bp, Homo sapiens
atactgcaggccacagaattcggtaaactactaaaaaaatgaacatttcatccttggttgaatattgttattgctctgtagttacattgtgcactgtatatagatataatttatctatttttccattaaacaaaatcataactggcaagtagagctatggaattgtcttctgtagtgttgctctctttataagatgtgatgtcctcattctagctgtgctagctttttgcagcagcagtttttgtttgtaaaatgaaacagcaccaccttgtatcctgaagtaaagctacagcttctttaaaatatctaacattcagatgtttaccyatttcaaatatatgtagtaagcgtcgtattatgaagtagataaaatttaattacaggcctgctctgtgctagattcagctgtgtaattactaaaccgctaaaccgataccactgtatttatgcccccaaaatacatacttttagctataaatttaccccgatacaaccaaaagcagaaaaatatgttaaattgtgtaatagctatcaaatggcaaattgtctgtcatagctcacaaaaataattcaattaaatgttgagatcwatactgcaggccacagaattcggtaaactactaaaaaaatgaacatttcatccttggttgaatattgttattgctctgtagttacattgtgcactgtatatagatataatttatctatttttccattaaacaaaatcataactggcaagtagagctatggaattgtcttctgtagtgttgctctctttataagatgtgatgtcctcattctagctgtgctagctttttgcagcagcagtttttgtttgtaaaatgaaacagcaccaccttgtatcctgaagtaaagctacagcttctttaaaatatctaacattcagatgtttacccatttcaaatatatgtagtaagcgtcgtattatgaagtagataaaatttaattacaggcctgctctgtgctagattcagctgtgtaattactaaaccgctaaaccgataccactgtatttatgcccccaaaatacatacttttagctataaatttaccccgatacaaccaaawgcagaaaaatatgttaaattgtgtaatagctatcaaatggcaaattgtctgtcatagctcacaaaaataattcaattaaatgttgagatc

SEQ ID NO: 287277 - DNA, 598 bp, Homo sapiens
tcctttctgatttttggaagatcttcaagggcagagactaggttcttttcaaaatttatcttcactttgtttactgtaggcacttaaaaataaattcataacttaaaaaatggtgaagaaaaataggattaagagtgtgtgtgcagggattggccttcagggtaggaaattttttattttagtggtggtggtggtggtaattgtttttttttattgatcctagaaagaatgttaggaaacggattttgaggagtggacaagaatatgtgtgaaaattcatatttaatttgggtgttgtcctttctaatgtaggaggtaaggtcatctactgagatttatagggttgtgaatgggaaatggacaggagaaagtcaagagtttttttgagagggatgtttagtagtggatcgggtgaataaagtatcagggtatcaggaaaaaaacatattagacaccartttgtgctagttaagtgaatttgatgttttgccttaccacaatataggcagaaagtctagtgtatttctaaatggttttgggttattaaaattaagattgactgaacttttgaaggtcctggcaaagagtaggttggcag

SEQ ID NO: 287278 - DNA, 604 bp, Homo sapiens
caacccagttagttatttaaaaaataataagaaattaatatttaagtcaattgttgatgttgttttgggtgctttgagatgtggtaggagtaaccaaaatacgggcaaaatcatgaaaagtttaggtacctgtggtaaaaggcataagggaaagacagtctgtgaaagagtaagaaagtgagaatgaatacatatgaataactaggatgctcatataagtttaacgtgcaaatagtaacatgattgagtgaggaaaaaatcagaatgaatgttacatcaagatgaccagcagaaacatggtatatattaaatgaaggggaaaaggcacaataagaaaggctggtttgattgtcttgtgaaataaaagttatgtaaaaatatgttagtatgagccrggcacagtggcttacgcctgtaatctcagtactttgggaggctggggagggtggattgcctgaggtcaggagttcaagacctgcctggccaacatagtgaaatgccatctctactgaaaatacaaaaaaattagctggtcatggcggcaggcacctgtaatcccagctacaagggaggctgaggcaggaggatggcatgaacccaggag

SEQ ID NO: 287279 - DNA, 613 bp, Homo sapiens
cttctccagcagttaccatatagaggatgcactcaggttatgacaacagctactagccaattaacagtgagattctgccatgtaggagagagacaacagagaggattttytaaactcttaagccctttgctgcaccacacaaaactcaagcatatgtaatttatggagtgagaagtaaaagttataagcttttgagcagaagccatggcacctagaaatgatatctgacttcctggaatagttccttaatttaaaattatgcatagtttttattgtcatggctatgtatcacaaagtcatatccacactctggatgacaagattacacaatagggtggatactaggaggcaaactcgttgggagcacctttgcactgtccaccacaatgtttgactttcaaaacgtaattcacctaaaaatatgtaattggttagagttgaagttaagtgtagaagctagagcaatagtatcacttgtgcaagttaaccatataagaataataaaagcaataccaatggttcagttcaacaagaagtatcagaaaaagacagaagaaaagatctcaagagatgtttacaactaaggaggagaaagtggaattagtaacaacga

SEQ ID NO: 287280 - DNA, 516 bp, Homo sapiens
tctgagattagagctatgcaataatggggtagaatgtcttatgtggtaataagctctctgtcgtttggtgcatttggtgacactcaagcaaagactggtattggtgtagcagtctgtgtgttaaaaaaatctctgcactgtattttggatactattaaacgtctaaagcagttcaaaattctaaagtatatgattttttcaatgmcttgtgtaaagtttgcttttcatgctcatcactttgcctattaataaataatctaaaaagggagccatatgaaacattttaaatcataattatatatgaaccaagtcactatgtattattaatatatatttaagtacacatatatgatttttgtccaatgctagtgattggaaactaattcaaatcatttaacttaaattatgcatatataaacaaaagattaaacatcttttgaaatgacagacatgcatctgtatcaagacattaagaaaaagatcctgagttaatgctgaatagttacaaaacacaaa

SEQ ID NO: 287281 - DNA, 651 bp, Homo sapiens
aaccctggatttgaataggtatgcagcttgttatgtggtcttgagaaaatatacctctatatgactcagttccatatatacgtatgtatatatatgatacaaataaaattgggataatatctactttcatttcagtttgacaaatgattatatgagatgatttatatttagtgcataccgaattgtattacataatatgttaaaatagaataaactgggtttggcatattayggacattttgtactatcttgcaaattttttataaatttaaaacaattctaaaataaatatttcttacataaaattagaaaaaacctaatgacaccatttatcaattcatctgtcaaaataaacatttttcccattggagtaatacttacaaaatgatttaaacataacaatatttttgcttataaaagtaatataaatttgttttatcaacttcagaaagcagtaacaaattgaagaaaatttaagagctgaagttccaagctgcacccctgctcatagttatgatagtatggtaactatcataactatcctaaaattctacttccagataataaccattattagcattgtgtcagatacccttttgtttcttatatttatataaacacatttttaaacaaaaattttaccatatacct

SEQ ID NO: 287282 - DNA, 466 bp, Homo sapiens
tggagagtgaaaaaatagccagctggtcaaggcggaagttaactgggacaaagtagtgagcaggacttggccccaagcaacttcccagcttgaagaaggtctgagatgcaagagtgtrgacgaattaatagtaggacaaatttgaaattttgtttactaaatgggattgagtattgtaattactgaattgaggattgtttttaactttaaagtaaactctcagttagccaaagatgagaagaaaagccactaaatctatctcagttcttatgtggaataagattatcccagttgaataaaatctaaaggaatggcaaaaggtgaaattgtgttaggaagaattatatgctgtttgttcaacacaacttatcattatgattgtataactatagcttttcctccaaaatggaataatttttcccccttaagaatgcttggtaattgtatgtcttggtaattgtataag

SEQ ID NO: 287283 - DNA, 491 bp, Homo sapiens
aaggcatcagtagacttgtgtggcacattattttctaggaaaagtttgatatggtagagttaacagtgggtcatcttcaaactgtattattaaaccctgagaataaagagagggtttttagtcatcctggcagattaataaaaatacttaaaggaagaaagaaaaataaggcttatatgggacttcataacattcgataccagaaaataataaatctatgtacacaaasttctgaaagaaatcaacaggcaccaaagactccttggacactggccaaaatataactcaattacaaaacaagagagatattttctcaaatattaacttattaagaaaatacagctcttggccaggtgtggtggctcacacctgtaattccagcacttttggaggctgaggcaggtggatctcctgaggtcaggagttagaggccagtttggccaacatggcgaaaccctgtctctactaataaaacccgaaaaaaaatctta

SEQ ID NO: 287284 - DNA, 556 bp, Homo sapiens
tagaagttctcatgaatatagattagaaaagatgtcctttacagagaaagaaattgaaaactcagagaaaaatggttttccaaaataaatgaagtgcagtgctctttgaaatctgtgttgttttgattttggattgaagacactgcagcagaaactttactatgccagaaatcccagtgaaactgattctccatgccaataatggagattccctctccttagaatatttttgtcaaccttaggaaacattaactttcctmtagaattccgcagttggaaataatctctccttttccccttggactctttcatcatggagatttttgtcttctttccataatgaatgtcttcattattcacgttcctgtttcctccagactgcaaagtcaggaaccaggatttatttatctttttgttttccataagaaagtatttttcacgcggtagtgctttatatgtatttgtttatttaataaagtatatcattatcattttgatgatctgtaagtaaggaaattaatgtgaaactatggataaaacaaacatagcaaatcat

SEQ ID NO: 287285 - DNA, 556 bp, Homo sapiens
gtaagtcgcctttttctgataacatttgtttgacaatacatcagaatgtcctagtaattgaaaactaatacaaaagtgataaactactttttgacatttatttcaaatttaaattttcattagttgggattaaactactccttacatcagacctaaattcaggcaaatatttacaaatagcatcgtggaaccttctttcctaggccattatttggaatagaagcttcataatacataacattaaataattttaaattatgaaacataaaagctctaaaatttaatgtctgcctctctgtcacttttttttaagatgaagaaaatactcataatattaagattcaggtttaggtttgtyttttatgctttgacctctgtagcagaccaaacttccaatctagttcaccttatttcaatactggtttcccagcagaagtcagtcagagctaccaaatggaagttaccatttttcttcatgattatgcccctataaataggaggaattgcttgctcagatctgccatgtttcttagcctattacaatctaatgacatct

SEQ ID NO: 287286 - DNA, 576 bp, Homo sapiens
agatgtgcatggaaggtcagtgaagttaactcacaatatgctaagaatttgagatttctatgaagtagataatagaaattatttgacacattttgacagaggatagttacatatttaaatatgtttgtatttaatgtgtatgaaattagaataggaaagccaattaggaggccactgcagtaattcatggaagaatttatagatatctaaactagggttatggtaaaraggctgaaatggagataataaggatataattaatagttaagaggctgagaagctgtttggggcagaaaagagcttcagaggtaagagtcacacctggtttttaaataaccaaatattagacatttttaaacacctgaacaagttaaaaggctctctctctctctccttcttcttctttctctctctccctctgtctcaatctctctcccgttccctccctccccctttcttttatctcttaatgtatacttaaaagttattgtattaatatttgaattgtctcaaatatatctacagtgaacactaatgactaacaattccttgcttgggtacaagtctgtgtcctga

SEQ ID NO: 287287 - DNA, 578 bp, Homo sapiens
gtctactatattgtaagagattctatgagtttcttggggcaaatacacataggaataagtttccgcaaaagaacttaatgtaatttttagaaaacaaatacatacacatataaattaatgaagtagataaatgtcagaaacaggccatgaatatatatgtgagctacatacagtgatggacagcctccaartttcaaaactgtataagaccttagttaaaagtagtcaagtatgaccaccagtgaagaatagaatagagagagtgcagagtagagatgaccagaagtagaatactttaaaagaaaaaaaaatacattcttacatctcattcaaacttttatgtacataattgctcccacatctgaaaggtgctgccattactggttgaattttatgtttgatttccatattatagaatgtctaagaccatattaaatctcaagattagggtatggtctgaattaaatcctgacctcatttctgaggactgagtcagagcttaatgtccttgaaacactagaatttctgttgcttttgctgtacttttctatgctatagtcatggctcccaataaattc

SEQ ID NO: 287288 - DNA, 578 bp, Homo sapiens
gtctactatattgtaagagattctatgagtttcttggggcaaatacacataggaataagtttccgcaaaagaacttaatgtaatttttagaaaacaaatacatacacatataaattaatgaagtagataaatgtcagaaacaggccatgaatatatatgtgagctacatacagtgatggacagcctccaagtttcaaaactgtataagaccttagttaaaagtagtcaagtatgaccaccagtgaagaatagaatagagagagtgcagagtagagatgaccagaartagaatactttaaaagaaaaaaaaatacattcttacatctcattcaaacttttatgtacataattgctcccacatctgaaaggtgctgccattactggttgaattttatgtttgatttccatattatagaatgtctaagaccatattaaatctcaagattagggtatggtctgaattaaatcctgacctcatttctgaggactgagtcagagcttaatgtccttgaaacactagaatttctgttgcttttgctgtacttttctatgctatagtcatggctcccaataaattc

SEQ ID NO: 287289 - DNA, 578 bp, Homo sapiens
gtctactatattgtaagagattctatgagtttcttggggcaaatacacataggaataagtttccgcaaaagaacttaatgtaatttttagaaaacaaatacatacacatataaattaatgaagtagataaatgtcagaaacaggccatgaatatatatgtgagctacatacagtgatggacagcctccaagtttcaaaactgtataagaccttagttaaaagtagtcaagtatgaccaccagtgaagaatagaatagagagagtgcagagtagagatgaccagaagtagaatactttaaaagaaaaaaaaayacattcttacatctcattcaaacttttatgtacataattgctcccacatctgaaaggtgctgccattactggttgaattttatgtttgatttccatattatagaatgtctaagaccatattaaatctcaagattagggtatggtctgaattaaatcctgacctcatttctgaggactgagtcagagcttaatgtccttgaaacactagaatttctgttgcttttgctgtacttttctatgctatagtcatggctcccaataaattc

SEQ ID NO: 287290 - DNA, 578 bp, Homo sapiens
gtctactatattgtaagagattctatgagtttcttggggcaaatacacataggaataagtttccgcaaaagaacttaatgtaatttttagaaaacaaatacatacacatataaattaatgaagtagataaatgtcagaaacaggccatgaatatatatgtgagctacatacagtgatggacagcctccaagtttcaaaactgtataagaccttagttaaaagtagtcaagtatgaccaccagtgaagaatagaatagagagagtgcagagtagagatgaccagaagtagaatactttaaaagaaaaaaaaatacattcttacatctcattcaaacttttatgtacataattgctcccacatctgaaaggtgctgccattactggttgaattttatgtttgatttccatattatagaatgtctaagaccatattaaatctcaagattagggtatggtctgaattaaatcctgayctcatttctgaggactgagtcagagcttaatgtccttgaaacactagaatttctgttgcttttgctgtacttttctatgctatagtcatggctcccaataaattc

SEQ ID NO: 287291 - DNA, 578 bp, Homo sapiens
tgaattttatgtttgatttccatattatagaatgtctaagaccatattaaatctcaagattagggtatggtctgaattaaatcctgacctcatttctgaggactgagtcagagcttaatgtccttgaaacactagaatttctgttgcttttgctgtacttttctatgctatagtcatggctcccaataaattcagagtcattccctgttacaggagctaattatttttggcatacattctaaaatcaagtgtaaatggtgttcctcatttcaaattcaggaaggtaagagtctttgttctaattctatgggygaatacttaaactaatataggtaatgaagtctaaaatattcaccttcagaatccaaagaaaaattatcttattggtatttcttcaatatttaagaacttgatgatattttaagtctttatggcatgaagattgtgttataatgatagaaattagaattgtttaaactatatcactgtgagtcaatcaaaaaactcagttttaggcacatgtaaccaaattgtatttttccatccaatgacctgctcctactggcttaatgaatatc

SEQ ID NO: 287292 - DNA, 533 bp, Homo sapiens
gactattctatgctaagattagatagaagacgtagaagtgtatattaacaaacagagataaaccacccaaagtaatgtactttaaataaaaattaaattatagttttctggattgatattggtggcattattactgaggtaataattagrtttgcttctgaggcactacatattttttaatatgtactttaaatacattgtgtgttttcacatttcatcaaatattatatgagtgatcaatatttataaatatttgacagccaattttgaaatatgaaaaattactattggataattattgcagaaataaatatttgatctatatgaaattaattcagcagtttattgcaggaaggaaactaaaatttttttaggacatagtgtatgccaagcatatttccaggatccttacaggtatttatttaatataattttaatgacaattttataaaattaatataatgctcttacaagatacaggctaagagctctgattctggggttgattctgttcctatcattcctgaaatttt

SEQ ID NO: 287293 - DNA, 623 bp, Homo sapiens
gtaagaaaaataaaatggtccaatatgtgttagtcagtatacacatatcatcacaatgggaaaaactcaaaacacaatagctacagcatgacttatatgtgacttcaaaatgtacaagcaactcaatatttgcctaggtgttcaatcaggaaggcacggtctgccttgtacagggaagatgtcagaatacgttacaagcgtaccatagtgtattcgctgcagaacacatggctaaatatgtctccatccttatcttcaaggcctaacctttgatgacacagaaattctgggaagaaaggacagcaaactttctccagtgtttggattgaatctctttgggttaaactattattcaaagaagcaaaaatatagtccattctctgaaaaggcacaccaatttgtaactgatctggaagatttccactgataaaatatatgcttcggttatatattttaggcacaaccagagaattttagggataatcctgatatctttacacagttctctaccttcataccatatctgatatctggaataatgaagggagaaccaaggacaaccactcasagtagggggtctctgagtttaggcaagaaggaactctttcaccaaaatactcatc

SEQ ID NO: 287294 - DNA, 602 bp, Homo sapiens
cattattttgcatatatgactcaccaactgtattgataatccttgatggcatcttcttttcagttatattcaaacataagtgtttaatatctatctgttgtatttaactgaatatattctatttttctgtggattttatttctaaaggaaagcastatgcaccaaagaaaataaaatgcaaaaacaccaactgaatgttctttgttatgtttaaataagacactttatcagatttgcagatgatgcttaatgtattcaacagatgacagagcaagattcaaatatatctcagctggctgaagtactgaaataaaatttgtatggataaacacatagtaccatatttatgttttaaaatataagttgcacaaaatctagatgtgggagacatattgagtaacagttcatgtgaaaaataactggaggttttatctgatgactaaatatgacccaaagtactatttgactagtaatgaagctaaagcaattttaatttgcactcataaaagtttggtgtccctatcacaggacataatggtccctctgtgagctacgatgatgagttcaaatagtagatgttatgctgagtctgtgccaccata

SEQ ID NO: 287295 - DNA, 551 bp, Homo sapiens
gaaggtgatgaaaatgctattggttatattttggaatgccagtctatgaaatgtaattatttcaattcaaaggagctatatattcaaaaagaaaaactaggtgatattttctcttgyggttcactactgtatgtctttgtatttcttttttcatgcttggaattgatgttctgatggattacacagtgcaacatttatgacgaaagtagctttagaaaagactgttaaaaaaccaccattagccctagagttcttagcaaagttattgacatcagaatgttttgttataatattaaattttttcaaacattcctgatactatttatatagtcattcaaagcaaagctagcatgatattcttctgtcttgactattgcattacaactacattacttctcactgaggcaggcattcacctgaagatacattctgctgaagcacagaatttcttataaacctcctaggtcacggatttaatctaatactgtgcactgattataaaaccttttagtgttcttatatgtcatattattatatttatttttcttagt

SEQ ID NO: 287296 - DNA, 641 bp, Homo sapiens
atttatatttaaacaggaagcagagtgtaaaagtttaaacaatttgcccctggccatatagcagagaaaggaaaagctcttttggaagaggaatttaagcaggctgtggatcaacctcatgctagagaaatttggataactaaaacagagccaaatggtaataaacaaaacaatggttaaaaggcctcaaatgcatttcagagatcttccaggcagccctttccattgcaggccctgaagcctataaagactgaatggtttcatggcccagcctaaagtcccactgttttgtgcatcccaagacactgctccacatatatgcctactctagctccagctaggattctaagagactcgggyatagcttgagttgcaactttggagaatgcgagccataagccttggcagcttctatgtggcattaagcctgtaggtgcacagaatacaagagtgaagaacggttggtagcctccacccagatttcagaagatttatgagaaagctttggtgcccaggcaagtgcctgctgcagtggggaagccttcacagaaaacctctgctagggaagttgaaaggaaaatgtggagttgcaatctccatacagagtccctaataaggcactgcctagtgtagctgtgaga

SEQ ID NO: 287297 - DNA, 879 bp, Homo sapiens
cggggcattgccctgctgcctccagggaccatctgcagccctccagcctgggatctctgcactgggctgcctggagccccagcctgaaggtttacaccatgggggcaaagcttttcctccacactcaccaccaccgagggccccccagtttggctccccaagagcaacaatgggcctggggcacarctccaaagttcctggggtggcctcatagtgagtttagcgagcttagtgtgctcagcccattgcagggctgggttgccagggcaaggcaaaaaaaatgctctcactccccaaagcctgcggggaccaggctgcccactccccctcacctgataccttccccaggagaacccccaaggtgggggaaggcccwccctgctttcaattctttggggtatatactcccaagtggaattgctgggtcatatggtaattctgtttgtaattttttgaggaattgccatactgtttactatagcagctatgccattttatattcccatcaaaagtgatcaaaggttccgatttgtccacatcttcaatgtttgttatatatatatatatatatatatatatatatwtttttttttttttttttttttttttgatagtagccatcctaatgggtatgaaggggtatctgtctcatggggggtctgatttgctttccctaattagggatattgagcatatttttatgggcttattggccatttgtattttttttctttttgtttgtttcttttttttcttagatggggtctcgctctgttgcccaagctagagtgcagtggtgcaatcttggcttgcggcaaccttcgtctcctaggcgatcttcccacctcagcctcccgagtggctgggactacaggtgca

SEQ ID NO: 287298 - DNA, 503 bp, Homo sapiens
ccctgctttcaattctttggggtatatactcccaagtggaattgctgggtcatatggtaattctgtttgtaattttttgaggaattgccatactgtttactatagcagctatgccattttatattcccatcaaaagtgatcaaaggttccgatttgtccacatcttcaatgtttgttatatatatatatatatatatatatatatatttttttttttttttttttttttttttgatagtagccatcctaatgggtatgaagkggtatctgtctcatggggggtctgatttgctttccctaattagggatattgagcatatttttatgggcttattggccatttgtattttttttctttttgtttgtttcttttttttcttagatggggtctcgctctgttgcccaagctagagtgcagtggtgcaatcttggcttgcggcaaccttcgtctcctaggcgatcttcccacctcagcctcccgagtggctgggactacaggtgca

SEQ ID NO: 287299 - DNA, 503 bp, Homo sapiens
ccctgctttcaattctttggggtatatactcccaagtggaattgctgggtcatatggtaattctgtttgtaattttttgaggaattgccatactgtttactatagcagctatgccattttatattcccatcaaaagtgatcaaaggttccgatttgtccacatcttcaatgtttgttatatatatatatatatatatatatatatatttttttttttttttttttttttttttgatagtagccatcctaatgggtatgaaggggtatctgtctcatggggggtctgatttgctttccctaattagkgatattgagcatatttttatgggcttattggccatttgtattttttttctttttgtttgtttcttttttttcttagatggggtctcgctctgttgcccaagctagagtgcagtggtgcaatcttggcttgcggcaaccttcgtctcctaggcgatcttcccacctcagcctcccgagtggctgggactacaggtgca

SEQ ID NO: 287300 - DNA, 503 bp, Homo sapiens
ccctgctttcaattctttggggtatatactcccaagtggaattgctgggtcatatggtaattctgtttgtaattttttgaggaattgccatactgtttactatagcagctatgccattttatattcccatcaaaagtgatcaaaggttccgatttgtccacatcttcaatgtttgttatatatatatatatatatatatatatatatttttttttttttttttttttttttttgatagtagccatcctaatgggtatgaaggggtatctgtctcatggggggtctgatttgctttccctaattagggatattgagcatatttttatgggcttattggccatttgtattttttttctttttgtttgtttcttttttttcttaratggggtctcgctctgttgcccaagctagagtgcagtggtgcaatcttggcttgcggcaaccttcgtctcctaggcgatcttcccacctcagcctcccgagtggctgggactacaggtgca

SEQ ID NO: 287301 - DNA, 452 bp, Homo sapiens
tgatgatcttctctgtcttcagaaytgagaactaccctgagtcagtgcgaacgagaaaacttttcattgcccttttaaccaaacttggcattacaacgaaaaaatgaaataaagcgaggctttttgtgtgcgtgaagagcaaaacttgcttctacaagaaaaagtaaatttagtttctttagaagacactaattatactcttaacatttaaaacaagcgcttgaaatgaaaacattcgcatttccccctcatttcaaaacttttctctggggaataattaattcctttgcagtaagagagtgcatggacatactgtgttcctctcttggtgtactgaatacaaaaactgtgagcaagtaaataatgcccgaggacaatggattggaaggagtcttccagcctttcttaaatatacctacccagtaatcactctgccactgtgcaagggacaa

SEQ ID NO: 287302 - DNA, 555 bp, Homo sapiens
ttctggacaatagtttggcagattcttataaaaccaaatatgcaattactactgtacaattatactcttgggcatttatcccacaaaagtgaaaacgygtgttgacacaaaaatgggcacatacatatttacagcaatttttttcctaatagccaaaaaaataccccactgcgcttcaataagtgaatgtttaaataaactgtgatacatcaataccatcatggaatattattaagcaataaaatggaacgaactattgatacatgcaacagcttggatgactccaaggaattatgctaagtgaaaaaagcccattttcaaaggttacatacagtataatttcatttacgtaatggtcttgaaataaacaaattatagaaatggagaagagattggtagttaccaagtgttagggatagcagaaatggcagagggtcatgggaatggatgtagctataaaatggcaaaacagaatttttgtgatgatggattgttctaggtcttgactgtagtggtagatacacacacctacacgtattaccaaaatagaacaaa

SEQ ID NO: 287303 - DNA, 555 bp, Homo sapiens
ttctggacaatagtttggcagattcttataaaaccaaatatgcaattactactgtacaattatactcttgggcatttatcccacaaaagtgaaaacgcgtgttgacacaaaaatgggcacatacatatttacagcaatttttttcctaatagccaaaaaaataccccactgcgcttcaataagtgaatgtttaaataaactgtgatacatcaataccatcatggaatattattaagcaataaaatggaacgaactattgatayatgcaacagcttggatgactccaaggaattatgctaagtgaaaaaagcccattttcaaaggttacatacagtataatttcatttacgtaatggtcttgaaataaacaaattatagaaatggagaagagattggtagttaccaagtgttagggatagcagaaatggcagagggtcatgggaatggatgtagctataaaatggcaaaacagaatttttgtgatgatggattgttctaggtcttgactgtagtggtagatacacacacctacacgtattaccaaaatagaacaaa

SEQ ID NO: 287304 - DNA, 638 bp, Homo sapiens
atggagggagtgtcttaactctatccatacattctgttactactgcccgggcaaagttatgaattcctagagaatgggaccaattgacttctaaacataagatccgtttctcacttagatgccaatgtagctgaatgcacaacagatgtctcaaaataatgtaagaattgaatggctrtcctccctctgatagggatagcactgaggcaaaaatctgtcttgccaggatggcttcctcccagctgctgaaaggggagattttctgcttacaaatagggcatggggcctgatcactgagagagggacgtaagagggaaaggaatcagggaactagaggttctggaaggactgacaaggctccccatggagaagattcccaccccactaggtagcactggagtgcttaaaatgtcaggaaaaaactctgattccaaattctttccaagcagatgttagaaagagaagttggggcttaataggatgtccccacaacatgcctactagcaggaaaaaattaacttgtcatagaggaactgcttaaattcactggggaatgctgagctcttacatgaggaaaaaaaaaatggagcagagggtattcactcggggtgaaatatccgcacatacagtgccaggaa

SEQ ID NO: 287305 - DNA, 498 bp, Homo sapiens
acctcattgggttggtgtgaagattaaatgaggaaaggttttagagccaggcttggcacatacataatgaatactcaataaatgttaactctaatcataatcattctttccattatatgttttatactacrctacagaaaattcaattgtgtttgaactagatagaatgagactgtttcttatagagaaacctcattaaaacaagcaggtgaagctgggtgtggcagctcacgcctgtaattccagcactttgggaggccaaggtggaaggatcacttgcatccaggagtttgagaccccagcctgggcaacctctcatctctacaaaaaataaaaaaaaattagccaggtgtagtggtgtgtacctgtagtctcagctccacaggaggctgaggaggggggatcgctggaatctgggaggtcaaggctgtagtcaattctgattgctccactgcactcagcctgggtgacagactgaaaccctgtctcaaaaaacca

SEQ ID NO: 287306 - DNA, 565 bp, Homo sapiens
cctgttgtaaaagaaaatagatcgttattgcacagaggcaaacaactrtactgccataagttaagaatactcccagcttccaaattctggagaagccaggcagaaagaagcaagcatgctccaaattttgtttacaggagtatgccttatgtaattacgaaaggctgtaaatagcttaagataagtttccttgattctgaaaaaaaaaacaaggatcagcaacattttgagcaaaaactttaaaaagcccgtttttttaactgttgttttgctcgatattcatgaacatttcagctcttcatgggtcctgagcacttttcctttattccaatgtcataatctacaaactgattagaaacttgcatttgagggcacctgtcaaagtcctatagctgattatgaaccaatctttgaagaggattaaagtaagataacaattatctgtgaatgatgaaatgtccagggtagttacagtcaagaacacaattgacaaagaaatttggttatttctgtggtttacaataacttaacataaaaatcttaattatgattgatggtatacact

SEQ ID NO: 287307 - DNA, 581 bp, Homo sapiens
tttaatctcaatgtcttctcctcactttcctcccattcctgcaccactagaattggatgctgttgctgcagcagctttgggcctgtgagccagggtgccagtggggtggagggttgagcctttaccagtaattaccgctcctgggaagccctcttggctcagctccacactcakcgtggcgaggacgacagccacttgtcagaagcctcccagagagaccacctgcaaatgagagcagccccaaccggggagccgtgctgaagggggaagggcagtgcgagtccctttgtcattaggcagccagcgctggagggatcactccagcttaaattaaggatttaatgagatgaggccaaattagatgcaattaaaaagacactttagagctggcagacgaccaagagaggcagtaatgacttttgtagaagggaatcccacaggctgggggtgcggggctggggagggcttggttttctactcctggaaacatccagggctgggggatgggaggataaaatagactccctcattgtcaaggctgatgcccatggaggcatgcacagccctctgatgtctgccca

SEQ ID NO: 287308 - DNA, 646 bp, Homo sapiens
ttccctgcccaaggccaggtaggaccctctgagagggccagcctcattcatcccttagtgcagcaaactaccactatcttatttcaggcccttgtgtttccagacactggaaatgttttagacrtgtggatccctgtttttttgtttgtttgtttttttgtttttttgagagagggtctcagtctgtcaccgaggctggagtgtaatgatgtgatcactgctcactgcagcctcaacctcccaaggctcgaatgattgtcccacctcagcctgccaaacagttggaactactggtgcacaccactacacctggttaatttttgcatttttttttgtagagactgggttttgccatgttgcccaggctggtcttgaactgggatcaagtgatctgcccgcctcagcctcccaaagtgctggaattacaggcatgagccaccgtgcttggtcttggatgccatctttaatccatttcatgagtcagttgccaaatattaaaaatattaataggctccttcttaattgctgagtaaagcattaaagattctcaaagtgtcataatatgtattttgcatttagggaagcagtttaaatgttcaaattttaaaacaccaaaagctattatttttgtctttagtgccctgta

SEQ ID NO: 287309 - DNA, 553 bp, Homo sapiens
ccttttgtgtaatctggctaaatcccagtacatagaatagatagaaagagcaggttgtgagatcctagggcatttgttcagttcctgcctgaatctctgaaactgccttatcccctgtaatccaccctccacatagctacctagtgacctaatgcagagacctgatcacatggcttgtggtagagtgcatggatggacctgactctccagtcctccgtatagccatgaactttgtcatatgacttggcaggagctctcactggttcccctcctcttgaatctagactgggtcatgtgactttggtggacagaatgaggtggaagtgacaacgtgccagttctgagcccaracctcaagacaccttgcatgtttctttccgtgctcttgtgcctctgtcattgccatgagcaagacatgcccaggctggcccagcagttccaggaggaagacaagacatatatggagaagagccaagtcacttcagcaaggcccagcccaaatcagctaagccccagccaaccccagatgcataagccataaatgctgattgtt

SEQ ID NO: 287310 - DNA, 553 bp, Homo sapiens
ccttttgtgtaatctggctaaatcccagtacatagaatagatagaaagagcaggttgtgagatcctagggcatttgttcagttcctgcctgaatctctgaaactgccttatcccctgtaatccaccctccacatagctacctagtgacctaatgcagagacctgatcacatggcttgtggtagagtgcatggatggacctgactctccagtcctccgtatagccatgaactttgtcatatgacttggcaggagctctcactggttcccctcctcttgaatctagactgggtcatgtgactttggtggacagaatgaggtggaagtgacaacgtgccagttctgagcccaarcctcaagacaccttgcatgtttctttccgtgctcttgtgcctctgtcattgccatgagcaagacatgcccaggctggcccagcagttccaggaggaagacaagacatatatggagaagagccaagtcacttcagcaaggcccagcccaaatcagctaagccccagccaaccccagatgcataagccataaatgctgattgtt

SEQ ID NO: 287311 - DNA, 453 bp, Homo sapiens
tggagtctctgagggaagaatccacttctgagttcattcagcttgttggccaaatccacctctttgaggctggagggttgtagagcatttccttttctctaaggcccacaaagcaacctctattcattccttaacacccaactcaaatatcaggtctttggggaaccttccttcagcagcagcmcagcacagcagtgggaagaaaatgggctttgaagttcattggaattttgcttctgccattttcaagctgagtggccttgggcaaattatataagctctctgaacctttgtttcctcatctgtaaaccaagtacaatgcagtcttcgatagtaagtgcatctgactgactgataagcagaataataataaaagcagtgaccacatatggtatgcttgccatgtgctggacactaagcatggctaagtgctttatatgcctttttcactta

SEQ ID NO: 287312 - DNA, 579 bp, Homo sapiens
tgacccggatccattgagctccaggtttgtgcctcagatccctcagccattatgtccttccagaattggatcctcttccatcctgttcacccattcctgatgtgttatggtttaccatagtctctctctctgagtgaagcacagcactccagagctgtgtgatgaatgcatctctttaatgcttattgcaggactaggagctgcttgtacaccagcctgagtcacatgaccttgtgacccaaggtccatctaccagtgaccctctgctcccacctcaggatgtaggcaccccctgattcctctgtgtatatgggggaggggtaggacaggcagggcccagtgaaaatggtttcaaccctgtgtgagtgaaagcctgggcatataggaggtgttctaaaaattaacagcccccagtgacttggctggcaaatagctttcattcccttgctcctccaagtgtggktcatggaccagtagtatcagcatcttctgggggtttattagaagtgcagtatctgaggccccattccacacttactgaatcagaaactgtgacttaagatctctgggcgacccata

SEQ ID NO: 287313 - DNA, 375 bp, Homo sapiens
gctgtctcagtctttgccgccgcgccggcgagcgccgcccgggaggcagcggctggaggagcggacgggccccrcggggcccgagggcaaggagcagccgcctgccttggcctcccaaagtgccgagattgcagcctctgcccggccgccaccccgtctgggaagtgaggagtgtctctgcctggccgcccatcgtctgggatgtgaggagcccctctgcctggctgcccagtctggaaagtgaggagcgtctccgcccggccgccatcccatctaggaagtgaggagcgcctcttcccagccgccatcacatctaggaagtgacgagcgtctctgcccggccgcccatcgtctgagatgtggggagcgcctctg

SEQ ID NO: 287314 - DNA, 572 bp, Homo sapiens
gttgcaagtatcagtagttcattccttttattgctgaataataaaaagaatggatatatcacatcttacgtatctcttcatcagttcacagatgtttagcttatttttagctcttcrtcattatgaacaaagctataaatattcaagtcctcttgtgaacatgatttcatttctcttggcccagtagtatgattgctctatggtaagcatatatttcattgtggatagtttctaaggctatagcttcaagttcactgatttttccttcttcagaatctaatctcatattactaccatctgtgtgtatgtgtttcatttcagatattatatttttcacttcaagaaattccatttggagcttaaattttacaaacttccatttcactcttcatcctggtcattttcctctaccttcttgaccctgtgagtcataatagctgttttaatgttcttgtcttctaattctataatttctattacttattggtttgtttctactaattagttttccatccggttgtaacccacattttcctatttctgtgcttgctgcccaagggagcacttcggtg

SEQ ID NO: 287315 - DNA, 572 bp, Homo sapiens
gttgcaagtatcagtagttcattccttttattgctgaataataaaaagaatggatatatcacatcttacgtatctcttcatcagttcacagatgtttagcttatttttagctcttcgtyattatgaacaaagctataaatattcaagtcctcttgtgaacatgatttcatttctcttggcccagtagtatgattgctctatggtaagcatatatttcattgtggatagtttctaaggctatagcttcaagttcactgatttttccttcttcagaatctaatctcatattactaccatctgtgtgtatgtgtttcatttcagatattatatttttcacttcaagaaattccatttggagcttaaattttacaaacttccatttcactcttcatcctggtcattttcctctaccttcttgaccctgtgagtcataatagctgttttaatgttcttgtcttctaattctataatttctattacttattggtttgtttctactaattagttttccatccggttgtaacccacattttcctatttctgtgcttgctgcccaagggagcacttcggtg

SEQ ID NO: 287316 - DNA, 570 bp, Homo sapiens
tgtgtatgtgtttcatttcagatattatatttttcacttcaagaaattccatttggagcttaaattttacaaacttccatttcactcttcatcctggtcattttcctctaccttcttgaccctgtgagtcataatagctgttttaatgttcttgtcttctaattctataatttctattayttattggtttgtttctactaattagttttccatccggttgtaacccacattttcctatttctgtgcttgctgcccaagggagcacttcggtgctggatattgcaaattttaccttgttggttgctgaattttattatatccctttaaataccattggactttgttctggagcatgaatcaattgtatccttttgagggtgacagagcagcttttagggtagggttaatttggcctcactaataaggctgagaatcctactcagtatcccgcgtggtaggaggtctttccacttgagttggggagaacatgaaaaattctcagctctgtgtgagctccaggaactattctggagactcgttggctggaaacagacatatttgtttaggatt

SEQ ID NO: 287317 - DNA, 570 bp, Homo sapiens
tgtgtatgtgtttcatttcagatattatatttttcacttcaagaaattccatttggagcttaaattttacaaacttccatttcactcttcatcctggtcattttcctctaccttcttgaccctgtgagtcataatagctgttttaatgttcttgtcttctaattctataatttctattacttattggtttgtttctactaattagttttccatccggttgtaacccacattttcctatttctgtgcttgctgcccaagggagcacttcggtgctggatattgcaaattttaccttgttggttgctgaattttattatatccctttaaataccattggactttgttctggagcatgaatcaattgtatccttttgagggtgacagagcagcttttagggtagggttaatttggcctcactaataaggctgagaatcctactcagtatcccgcgtggtaggaggtctttccacttkagttggggagaacatgaaaaattctcagctctgtgtgagctccaggaactattctggagactcgttggctggaaacagacatatttgtttaggatt

SEQ ID NO: 287318 - DNA, 570 bp, Homo sapiens
tgtgtatgtgtttcatttcagatattatatttttcacttcaagaaattccatttggagcttaaattttacaaacttccatttcactcttcatcctggtcattttcctctaccttcttgaccctgtgagtcataatagctgttttaatgttcttgtcttctaattctataatttctattacttattggtttgtttctactaattagttttccatccggttgtaacccacattttcctatttctgtgcttgctgcccaagggagcacttcggtgctggatattgcaaattttaccttgttggttgctgaattttattatatccctttaaataccattggactttgttctggagcatgaatcaattgtatccttttgagggtgacagagcagcttttagggtagggttaatttggcctcactaataaggctgagaatcctactcagtatcccgcgtggtaggaggtctttccacttgagttggggagaacatgaaaaattctcagctctgtgtgagctccaggaactattctggagactcsttggctggaaacagacatatttgtttaggatt

SEQ ID NO: 287319 - DNA, 573 bp, Homo sapiens
ggtaaaggggaatattgcaaagctctgaatgcttgggtaggatttgaccagagacttacaaaggactggtccccactcttacagtcaggaagtccaactccagttccaacttgccactgactctctggatgtttagcaagtctctctccctctctgggcttcagttttcccatctataaaacagggatggtaaatcccaaagccctatctgcttccagaattgctggatgataatagatttgaaagctgtacagatgtgagacattgcacatataaartaacccaattctccagtgaagagtgccagctaagcccatccagacagcccgaggggctctatgggcagctgtggaagaaggctcttccatgtagaaacatgtgtgttcctctggaaatgaccctccttattggacccatttaagcgagtgttcacaatgattctggtgggttattcctcagtgtctgaagttcagctgggaattggccttgtcccccatctaatcaccaaagggttgagcctcagaagtctaaggtagatacctacctttcttcagctccagggggtacagttga

SEQ ID NO: 287320 - DNA, 646 bp, Homo sapiens
cccaagggcccatcaatggataaatggattaaaaaacatggtttatatacagaatgaaatattattcagccataaaaaagaatgcaatcctgtcatttgcagtaacatgaatggaacgggaggtcattatgttaagtgaaataagccaagtacagaaagacaaatatcgcctattcccacccatatgtgggagctaaaaaagtgaatctcattaagatagagaataaattggtggttgccagaggttgagaagagtagtggggaggaggagatgaagagaggttgattaatgtgtacaaatgtagtttgataggagaaataaggcttagtgttagaccgttaaggtgtctatagtttacaataatctgttgtacacttcaaaatagctagaagagaataatttgaatgtttctgacataaaggaaagacaaatatttaagtgatggatatcccaagtacactgatttgatctttacaaattatataaatgtgttaaattatcgcacatacccccagactatgtacatctattatgcatcaataaaatttttaaaaaggttcaaagaacaacaacaaagcagrctgggctggtgaggaagacagtgacattgcaggcaaaaagctgcaactcagacctgggaggacc

SEQ ID NO: 287321 - DNA, 947 bp, Homo sapiens
tggatgttgtaggtaatggtccctgggaaccacatacttttatctgaagaattgaccctgcttttacaaacctttgctgtgaattgtggctatatctgatgtttccatgtatttaacaagacaaatatgtgtatactcatgatcgcttagtctttgccacatgagtatttcttggatgcttttaactcaggsattatgtctttgaatttattgagccaaaagcaatacaaacaaattacgttcaatttatccctctaaataatgtagaaactaaaaattattatgcaacatgctcatctatgaatgttgaaatatttattttatatttaacacgttgaattaatttttgcccatctatattatcgtgatatatatcttacagagttttgttttaaaccatgcataaacaaactcataagagtttatcaaaatgagtggaagatttggtttggctatttcagtattcagccagtwtggatgttgtaggtaatggtccctgggaaccacatacttttatctgaagaattgaccctgcttttacaaacctttgctgtgaattgtggctatatctgatgtttccatgtatttaacaagacaaatatgtgtatactcatgatcgcttagtctttgccacatgagtatttcttggatgcttttaactcaggcattatgtctttgaatttattgagccaaaagcaatacaaacaaattacgttcaatttatccctctaaataatgtagaaactaaaaattattatgcawcatgctcatctatgaatgttgaaatatttattttatatttaacacgttgaattaatttttgcccatctatattatcgtgatatatatcttacagagttttgttttaaaccatgcataaacaaactcataagagtttatcaaaatgagtggaagatttggtttggctatttcagtattcagccagt

SEQ ID NO: 287322 - DNA, 670 bp, Homo sapiens
aagtttaacaatatattttggaaatcacaaatcattacataacaatttatacataccagtctgttttttgtattgcttcatcctttgccaatattttaggtatgaaattcaggttatttacaatgttttgcaataaaacataatgccataaccaataaacttatgcatatgtattttgtactgtagaagatatttcttcatgagaaaattcttagaattgagtttgctgagtgtgtctatgcaattttcttagatgtttccaaatccacctccacatatattgaaccattttgtttgcctgctagctgtgtataaccctgtctacccacagccttgcccatacactgcgctttccatctgacaagtgagagatggtatatcggtatagttttaattttcatttatcttaygatgggtgcatttttgaagtgtctgtaattatctttttcttacagcttacattgaatgcatcagcaaatcctactagacctatcttcaaatttattccaaaccgtatttctcaccacctctactgccaacatctttaatccaaagcagcatgattacttacctacaagtaattactcatctatgagttccctcctaactggactcccgcttccaccctttcatcactatagtatactctcaacaaagcagtcaaagtgaa

SEQ ID NO: 287323 - DNA, 522 bp, Homo sapiens
gtgcatttttgaagtgtctgtaattatctttttcttacagcttacattgaatgcatcagcaaatcctactagacctatcttcaaatttattccaaaccgtatttctcaccacctctactgccaacatctttaatccaaagcagcatgattacttacctacaagtaattactcatctatgagttccctcctaactggactcccgcttccaccctttcatcactatagtatactctcaacaaagcagtcaaagtgaaccttttaaattctggcgtattaytacactccctgcttaaaactctccagtggtttcttatcacacacagctaacagccaaagttcttgtgataacccccagggccctaaaatcatctctgacctcattccatctgttcctccctgcctccctctgctctagacatgcgcactaggcctgctgtgtcctcagggccctgcactggtctccctcccacctagaacactctcacttcagaggttcaggtggccaaggatccaccagttgt

SEQ ID NO: 287324 - DNA, 522 bp, Homo sapiens
gtgcatttttgaagtgtctgtaattatctttttcttacagcttacattgaatgcatcagcaaatcctactagacctatcttcaaatttattccaaaccgtatttctcaccacctctactgccaacatctttaatccaaagcagcatgattacttacctacaagtaattactcatctatgagttccctcctaactggactcccgcttccaccctttcatcactatagtatactctcaacaaagcagtcaaagtgaaccttttaaattctggcgtattattacactccctgcttaaaactctccagtggtttcttatcacacacagctaacagccaaagttcttgtgataacccccagggccctaaaatcatctctgacctcattccatctgttcctccctgcctccctctgctctagacatgcgcactaggcctgctstgtcctcagggccctgcactggtctccctcccacctagaacactctcacttcagaggttcaggtggccaaggatccaccagttgt

SEQ ID NO: 287325 - DNA, 600 bp, Homo sapiens
attacaaatatagttttagcccactagggctgccataacaaaataataccaaagactggatagctcaacagaaatttattttctcacaattctggacgctggaagtccaaaatcaaggtgttggcaggtgctcctgaggccttcctcctggacttgcacatggcaccttctcatgaggtcctcccatggctggcactttctctttgtgagcacatatctggtgtctctctgcaagtcctaatctccttttattacaaggacatcagtcagattgaataaaggtccaccctaatggcttcattttaactaattacctctttaaatgcyctgtctccaaatatagccagactccgaggcactgggatttagggcttcaacataacaattttgatagaggctgggcatggtggctcacagctataatcctagcactttgggaagctaagacggaaagattacttgagcctaggagttcaagatcagcctgggaaacatagtggggccttgtatattttttaaaaaataaatacaacaaaagaaaaaataaacattttgagagaatacaattctgtttataaaataaaaatatatacattaaat

SEQ ID NO: 287326 - DNA, 223 bp, Homo sapiens
gaaagttctgtataaacagcatgccttttgtaagtggttgcagtcttcctgttcaggccactgccactgcgctctctcccctatatgtaagctccaakaaaactccatgtctcatttgctggcagagcatccctaatcatggtacagattaatgagtttaaagcaaagaggaatttgctgaacacctggtaaaatgtaatacttcaacgagaatcacccttcc

SEQ ID NO: 287327 - DNA, 616 bp, Homo sapiens
aaacagcatgccttttgtaagtggttgcagtcttcctgttcaggccactgccactgcgctctctcccctatatgtaagctccaagaaaactccatgtctcatttgctggcagagcatccctaatcatggtacagattaatgagtttaaagcaaagaggaatttgctgaacacctggtaaaatgtaatacttcaacgagaatcacccttccccaaaataaggaaaaaaagaaactatataagtattagaaaaaataagataattatcttgtatccataattcataattaagaaataaaactcagaagccataaaatcacatatgcaatcatatattaatatgtaaatataataatcaatataaataatatcaaaattaraatgataaatattttttcaaataaaaaatatttgcaacaagcatctcaaataactaatttccttaaaatataaatagcttctacaaatcgacatgaaaaagcctatttttaaaaatgtggacaaattatctgaactggcagttcacaaaagaggaaatgcatatttctgaggcaggcaaatagggcctggaggcagggaacctaaagacttcctagaactaaattaaatggaaaaacc

SEQ ID NO: 287328 - DNA, 581 bp, Homo sapiens
tatgatgttcagtattttattcccaagcaaagaggaaactttctttgcctctaaaaagcaattttgaatattcaatcctgatttactcattctccacacctttgtcccttaaaactttcttgatagaagaggatcataggaaactatgtttctgtaagttcacactcattttttaaaggagagtttaaactcctaaattagtaaatattgatagctttgtattgaatttgtctgaatattgaagaaattttatagcatcatgactcagaataattctcgatcttacaggtccatgaaataaggtttttcaatcatgggaaagcagctactgtcatgaaataattccagttgtgtattgaaaattttgcacatgagtaagatatttcctttcgtaggtatcaacrtattttatcttgcactgtgacattgagtaacaattttagaaatacttcttttattcaatgggaatctcacaataaccactagttccccaagacattaggttttatttgcaatttgattgctgcttaagaaaacccagctccctgcttctgaaatcacttccaatgtattaatagaag

SEQ ID NO: 287329 - DNA, 581 bp, Homo sapiens
tatgatgttcagtattttattcccaagcaaagaggaaactttctttgcctctaaaaagcaattttgaatattcaatcctgatttactcattctccacacctttgtcccttaaaactttcttgatagaagaggatcataggaaactatgtttctgtaagttcacactcattttttaaaggagagtttaaactcctaaattagtaaatattgatagctttgtattgaatttgtctgaatattgaagaaattttatagcatcatgactcagaataattctcgatcttacaggtccatgaaataaggtttttcaatcatgggaaagcagctactgtcatgaaataattccagttgtgtattgaaaattttgcacatgagtaagatatttcctttcgtaggtatcaacatattttatcttgcactgtgayattgagtaacaattttagaaatacttcttttattcaatgggaatctcacaataaccactagttccccaagacattaggttttatttgcaatttgattgctgcttaagaaaacccagctccctgcttctgaaatcacttccaatgtattaatagaag

SEQ ID NO: 287330 - DNA, 442 bp, Homo sapiens
tgggaaaaagtgattagagaaattttctattttggttacctcagaaraaaactctaataaatgaggtgaaattcttctaagattaaattttacatttttttctatcatggatccaaaattttctcctaacttttactcattaatgggaagagataagactggtaaatataaaaatataaccatttaaatatgtaagccatgttgttcacaggaaattatatttatctattaaaattacatacttcttagcatattaaatatgttcatgtaagctgaaaatggttacatgagccttgtttttgattgttatggacacatgttgtgtggattttgtttcccctatactacttagaaagttctaaactctgggcgtattttccattttgcaaatttgaaaaatacaagtcagaaaaattactcttcatggattaatgttcaaaca

SEQ ID NO: 287331 - DNA, 590 bp, Homo sapiens
attttggttacctcagaagaaaactctaataaatgaggtgaaattcttctaagattaaattttacatttttttctatcatggatccaaaattttctcctaacttttactcattaatgggaagagataagactggtaaatataaaaatataaccatttaaatatgtaagccatgttgttcacaggaaattatatttatctattaaaattacatacttcttagcatattaaatatgttcatgtaagctgaaaatggttacatgagccttgtttttgattgttatggacacatgttgtgtggattttgtttcccctatactacttagaaagttctaaactctgggcgtattttccattttgcaaatttgaaaaatacaagtcagaaaaattactcttcatggattaatgttcaaacacaacttgaaaccttgttcttccatattttttcttctatggcagtaargagctaaccgaagacaggcagatgtttcttcagtgtgatatgttaaaagaaatcatctttttattcctccaactaacagtatgtagcgtactctatatgccaggaaacatagtctccataattcctaca

SEQ ID NO: 287332 - DNA, 590 bp, Homo sapiens
attttggttacctcagaagaaaactctaataaatgaggtgaaattcttctaagattaaattttacatttttttctatcatggatccaaaattttctcctaacttttactcattaatgggaagagataagactggtaaatataaaaatataaccatttaaatatgtaagccatgttgttcacaggaaattatatttatctattaaaattacatacttcttagcatattaaatatgttcatgtaagctgaaaatggttacatgagccttgtttttgattgttatggacacatgttgtgtggattttgtttcccctatactacttagaaagttctaaactctgggcgtattttccattttgcaaatttgaaaaatacaagtcagaaaaattactcttcatggattaatgttcaaacacaacttgaaaccttgttcttccatattttttcttctatggcagtaaagagctaaccgaagacagrcagatgtttcttcagtgtgatatgttaaaagaaatcatctttttattcctccaactaacagtatgtagcgtactctatatgccaggaaacatagtctccataattcctaca

SEQ ID NO: 287333 - DNA, 584 bp, Homo sapiens
ggagtctgagttcagggtgtatcaccccaaagattttttggggtatctcagggataataacagctctgaaataaaaatgtggggactatgtttctgcttgttagttgctagattacatgggtaatcgaaatttgaacttcaagttaatgtgaagggaaactgctggttaggaatcctggagtcttcttttttcttccactcagaaattgtgtaagtgatctgaatagcattttaacacactggaccaaaggaagaaggttttgatcctctcgtttctattgatggtatagttgtttcgtgatcaaaactttatgtgttgctctagtcctaattcccacagtgtgaagcacagcgtctcatatctttttccgactgtggattggattaagctactaaatgaaacttgcaccctccctrgggtagccacagtgccagtttaactatttgctgcatggccctctaagttttaattatttccttgtaacttataatactgcttttattttatataaaaaagtatatgtatctaaaagcatattttccagtctattctatatttgtcatttttatagatagaaggcttt

SEQ ID NO: 287334 - DNA, 539 bp, Homo sapiens
cgattacaatagtcacatcagagaccactgatcacagatcaccattacagatataacaataatgaaaaagttkgaaatgttgtgagaatttccagaattaccagagacacgaagtgagcacatactgttggaaaagtagaaatattagacttgcttgatgcagggttgccacaaacctttaatttgtgaaaaatgcaaaatttgtgaagtgcaataaagcaaaacacaataaaataaggtatgtttgtagttacgtttgtgttattttaaccttctgtttattttctttactttttctgaaattatactagttagcttaaactattttttcttcttttgtttatgtagtctttgtcccttttcccctctaatatccaaaatgctctctcaattttatatgccagtatttttactgatattatgactattgtatttttttatttctagatatcattcttgttctatgagtttttcctttccaaagatttttttcccttggaaaaatgctctaatttttaaaaaattgacaattgtaattt

SEQ ID NO: 287335 - DNA, 539 bp, Homo sapiens
cgattacaatagtcacatcagagaccactgatcacagatcaccattacagatataacaataatgaaaaagtttgaaatgttgtgagaatttccagaattaccagagacacgaagtgagcacatactgttggaaaagtagaaatattagacttgcttgatgcagggttgccacaaacctttaatttgtgaaaaatgcaaaatttgtgaagtgcaataaagcaaaacacaataaaataaggtatgtttgtagttacgtttgtgttattttaaccttctgtttattttctttactttttctgaaattatactagttagcttaaactattttttcttcttttgtttatgtagtctttgtcccttttcccctctaatatccaaaatgctctctcaattttatatgccagtatttttactgatattatgactattgtatttttttatttctagatatcattcttgttctatgagtttttcctttccaaagatttytttcccttggaaaaatgctctaatttttaaaaaattgacaattgtaattt

SEQ ID NO: 287336 - DNA, 478 bp, Homo sapiens
ttgaaggccgtgggatcttgagattgtggttgttggttaataggaagtcataactacttcttaatgtgcttctggtaatgacccaataaagaatgaaaaattatgaggcagtagagctactagtgaagagtttgtatatgagtcaaagtcttttcaamgagctgaaaagggtgggttgtaatgaaaaaatgaatgacttcagatagcagcatgaaaactgaatgtgtcatttaggtggatacatacaacatatgagtcagatgctggtaggtgggttgctatgataatgggggtccgtctcaaagttctattctgattgcttcaatttttagagtaaaacaggaagcaaagtcatcaaccaagagtgagaacaggacagaaggtttggggtgtacggtgagaaaagggaacttatttaatagtcaactaagaatggaaaagtatatgaattctagaaggtattaagggctcacttgaa

SEQ ID NO: 287337 - DNA, 259 bp, Homo sapiens
aagggcccaaatctatattttaaaataatattttcaaccaataggccaagcctccttgattccaacatagctgattctagtgttgtgatagcttttgccagaagcaaaaagctactcaaagtgtaatagaggcctatcaaaaggataaaaggatcagtttgaggatatttttgttgccccayatttgggacaatataaccaaaaatgtaataatgactaattaattgctatgtatatagagagagcaatataattaatc

SEQ ID NO: 287338 - DNA, 522 bp, Homo sapiens
gaattaaatctgcatgtattgaacataaatatggccacataacatgatatgttatttaatgaatacatgggtatgcatgaaatgcagactatacaatatgtgcatatgtccatgcatgcatgagcatgtggaacatgcaygtatggttattagtagaaattatcttggtggcaaatgacagaaattgaagtaaatgagacaagcaaattcaaaatgattttctcatataactttgaaatccgcaataggattgaatcagggctcagtaaatttatcagggtctttatcgctcaaatttacttctctgtgtgtgttgaactcattaactcttacagcaaatagccttctttaatacattcaaaataaagagtagcatcaatttccaatatacatattagcagtttatcaaacccagaaaaaagggagtaatttttctcttagaatttgtggccagacatggtagctcatgactgtaatcccagaactttgggaggcccaggtggtcagatgacttgaggtcag

SEQ ID NO: 287339 - DNA, 522 bp, Homo sapiens
gaattaaatctgcatgtattgaacataaatatggccacataacatgatatgttatttaatgaatacatgggtatgcatgaaatgcagactatacaatatgtgcatatgtccatgcatgcatgagcatgtggaacatgcatgtatggttattagtagaaattatcttggtggcaaatgacagaaattgaagtaaatgagacaagcaaattcaaaatgattttctcatataactttgaaatccgcaataggattgaatcagggctcagtaaatttatcagggtctttatcgctcaaatttrcttctctgtgtgtgttgaactcattaactcttacagcaaatagccttctttaatacattcaaaataaagagtagcatcaatttccaatatacatattagcagtttatcaaacccagaaaaaagggagtaatttttctcttagaatttgtggccagacatggtagctcatgactgtaatcccagaactttgggaggcccaggtggtcagatgacttgaggtcag

SEQ ID NO: 287340 - DNA, 579 bp, Homo sapiens
tacaacatatagcatatagcatatctgcttatatgcttcaaatagagagacaggtaaaaagtccattactagaaaagctgagaggtatcatacttgagaaggaggagctgattcacatattgcatatttctgtttgcagagccttgcccataatatgatcacagtccatagctgataaatggcagaaatgagatatgaccctttgtctacataatttttctttccctctcctattctttctttagtaatgattatattcttgcttgcctttttactttcttttttcttttccttttgtttttctttgatgagttttcagattagttcacaaattttcttataattctgtcttcccttatgtaagttatcctttcataatctctttctgtgaaccataaagggtaaataaaatttcctatttaccttaattgataaattagggactctaattgataaattaatcaaagcactgaaatgttaagatggcaaaaggagcatccayatacaggacagagccatggagaaaaacagtggcagataaactcagattttcaatgaatcgttatgggaccaggatgt

SEQ ID NO: 287341 - DNA, 564 bp, Homo sapiens
gatgtaggttgatgagggaattttgtcaggtgtcaaaggatgtcaggtttttggaaagagaaattaagaaaaattacttgaaaatcacaatctgcacaaaaagactatctcttctatttcctggccccrcattatttgagaggcatgcaagcaggaagttttcttaagaagcagtcagatttaagttagagctagaagtgactagaaactcaacagaagaaaatgacccactaggaaacatacgcactaggattcaggcaaagaagtagcagaaaggaatatttgtccgcttttgacttatttaaaggttgggaaattcaaaagctgaggctgagggaaaacaagttgtggaaaggattacatgatggctggagcaggcattttagattattaacaactgcagcactgttgcagatttctatgaataattcaaatgaagtgacaggggaaaactttagcagcaggcattatttaagggtttaagcagcaattgccatccagatacaggactgaaaaaaaaacaaggacctcggttttagaaattctggaagaaatcaggatata

SEQ ID NO: 287342 - DNA, 564 bp, Homo sapiens
gatgtaggttgatgagggaattttgtcaggtgtcaaaggatgtcaggtttttggaaagagaaattaagaaaaattacttgaaaatcacaatctgcacaaaaagactatctcttctatttcctggccccgcattatttgagaggcatgcaagcaggaagttttcttaagaagcagtcagatttaagttagagctagaagtgactagaaactcaacagaagaaaatgacccactaggaaacatacgcactakgattcaggcaaagaagtagcagaaaggaatatttgtccgcttttgacttatttaaaggttgggaaattcaaaagctgaggctgagggaaaacaagttgtggaaaggattacatgatggctggagcaggcattttagattattaacaactgcagcactgttgcagatttctatgaataattcaaatgaagtgacaggggaaaactttagcagcaggcattatttaagggtttaagcagcaattgccatccagatacaggactgaaaaaaaaacaaggacctcggttttagaaattctggaagaaatcaggatata

SEQ ID NO: 287343 - DNA, 580 bp, Homo sapiens
ttcatccctgttgtcacaatatatacaacaaattttgactgccattgttaattaacaaaattcatggaatgtaatcaaactggacttcatttttttccccacacattctttaaatattctcacgaaaagtagtctgtctcttgccaatcttgcagtcccttgacattggcaatcactctcatgaaaaaaaaaataaaacttttaaaaactctcatgttgagttgcaaacagtctgaattcagcaasgaattagcactttgaacatgacttacacttttgtctcacaacgatgaggtttgatgtgtgtgaagcaatttctgactttctgtttctgtacatatttctacctgcagtactagataccattttttacattcctggtaaaagcaggggaagagcatggtagttaagaacagtagaaagttctttactgacttctattttcacacattatttgtgatctctgggcctgaacaaaattgaaatctttctgtctccacaaagcatctatttgcatggtcttcagagaccccaacaatgctgtttttctttcactattatttctgttgaagtgagtggg

SEQ ID NO: 287344 - DNA, 575 bp, Homo sapiens
aataccataattttactgtaccttttctatgtttagatatatttatatatgctattacgttacaattgcctatagtattcagtatagaaacatactgtacaggtttgtagtcaaggagcaaaaagctacaccacatagcttaggtatgtagtaacctgtaccatgtcggtttgcgtaagtgacctgattgatgttcacacaatgatgaaattacctaacaacacatttctcagaatatatcccatttttatgcaaggcacaactgtaataaatcaaaagtaatactgtatacttgggggattgcagagcataatgccaacatcaaagacttgggagatactaaggggatgattcctatcattttccccacttactttacctgctaggcccgtgctgaagacatcctggaggatgatagctgattattgtgaatgcattcaaaggctagctgtaatagtgcctcttcttagttagtgtgagctgctacacaaagtaatagacttgatrgattaaacaacagaaatgtatatctcacagttctggaggctggaagtccaagatcagcatgccaacat

SEQ ID NO: 287345 - DNA, 603 bp, Homo sapiens
atgcacaattagaatagacaatattcagcacctggcagaatcctcatattaattctttgatacttggagtaaggttattattgtgagaaaggccaagtgtaagccactaraactgcctctacctaggaaaataatcaaccaacagcaataccacgtttctggaagaattgtggagataagtgccaacatcaaggacttaaaagataaaggggtagtgattccttccacatccccattcaattctcctatttggcctgtgtagaagacagattaattttggagaatgtcagtgggttattgtaagcttaactaggtgggactttaactgcagctgctgtaccaggtgtggttttattgcttgagcaaattaacacatcccctggtatttggaatgtggctatttatttggcaaatatataataatagaagaatgactactttccaaggcttctctgtaactggaagaatggatgagggcagacattgatatctcatttatttgtagctccctggagatagatgggacactaaagatgatggttttgctgataaccataaatgaactgttaactctcccttggaaatactagaaaagttccaatg

SEQ ID NO: 287346 - DNA, 603 bp, Homo sapiens
atgcacaattagaatagacaatattcagcacctggcagaatcctcatattaattctttgatacttggagtaaggttattattgtgagaaaggccaagtgtaagccactagaactgcctctacctaggaaaataatcraccaacagcaataccacgtttctggaagaattgtggagataagtgccaacatcaaggacttaaaagataaaggggtagtgattccttccacatccccattcaattctcctatttggcctgtgtagaagacagattaattttggagaatgtcagtgggttattgtaagcttaactaggtgggactttaactgcagctgctgtaccaggtgtggttttattgcttgagcaaattaacacatcccctggtatttggaatgtggctatttatttggcaaatatataataatagaagaatgactactttccaaggcttctctgtaactggaagaatggatgagggcagacattgatatctcatttatttgtagctccctggagatagatgggacactaaagatgatggttttgctgataaccataaatgaactgttaactctcccttggaaatactagaaaagttccaatg

SEQ ID NO: 287347 - DNA, 1207 bp, Homo sapiens
atgcacaattagaatagacaatattcagcacctggcagaatcctcatattaattctttgatacttggagtaaggttattattgtgagaaaggccaagtgtaagccactagaactgcctctacctaggaaaataatcaaccaacagcaataccacrtttctggaagaattgtggagataagtgccaacatcaaggacttaaaagataaaggggtagtgattccttccacatccccattcaattctcctatttggcctgtgtagaagacagattaattttggagaatgtcagtgggttattgtaagcttaactaggtgggactttaactgcagctgctgtaccaggtgtggttttattgcttgagcaaattaacacatcccctggtatttggaatgtggctatttatttggcaaatatataataatagaagaatgactactttccaaggcttctctgtaactggaagaatggatgagggcagacattgatatctcatttatttgtagctccctggagatagatgggacactaaagatgatggttttgctgataaccataaatgaactgttaactctcccttggaaatactagaaaagttccaatgwatgcacaattagaatagacaatattcagcacctggcagaatcctcatattaattctttgatacttggagtaaggttattattgtgagaaaggccaagtgtaagccactagaactgcctctacctaggaaaataatcaaccaacagcaataccacgtttctggaagaattgtggagataagtgccaacatcaaggacttaaaagataaaggggtagtgattccttccacatccccattcaattctcctatttggcctgtgtagaagacagattaattttggagaatgtcagtgggttattgtaagcttaactaggtgggactttaactgcagctgctgtaccaggtgtggttttattgcttgagcaaattaacacatcccctggtatttggaatgtggctatttatttggcaaatatataataatagaagaatgwctactttccaaggcttctctgtaactggaagaatggatgagggcagacattgatatctcatttatttgtagctccctggagatagatgggacactaaagatgatggttttgctgataaccataaatgaactgttaactctcccttggaaatactagaaaagttccaatg

SEQ ID NO: 287348 - DNA, 494 bp, Homo sapiens
tacctgtaaatggcctcaggccaaaagtgacataggtgcctggcrctgtatttacttgactagatttagacctattccaacactgggtcccagagttctccacaatcttgtcagctcttcgttgtgattaatttgatatttaatgaaaatatgtttttctcagcatttggttttcagggaagggattagtctaagtaactcaacctaccattattaaaaatataattccatcatttgtttttatatttcatttggtgatactagggctatttaatatatctttataaaataaataatatcattcaaatcaatgaataaataagagagtgcatagatatataagcctttaaagttaacttttccctaaatcttgccatttcaattatagttaagaaatggtattttaacaatatcagtaaatacttcctacccaaagagacgctagtgctgagtcatctatctgttttttattgaaactcttatttgagcagagc

SEQ ID NO: 287349 - DNA, 584 bp, Homo sapiens
tttcataattaaataacacaactactttaatttttattagaaaatcataaaaggttaccttatataaaatctaagagcataaattcctttgttgacctattattctaaaaagctcctgaaaaaaattttaagaggtcttgattacaattagataaaagctgggagggtgcaggtattcaaccttatcaaagtaatgactaaaattagcaagtgagatgaactgtaagtgctgtgtcaagctcctcttttgatactgttcttgacttgtgcgaggtgggatgttaatagtgcagaagccctaggctggtagacagaagacttgagtcccaagctctgtgatttacttgcagtgaaaccttggctaaaatgtctgacctcacttagcttccttattctatcaacaaacttatttttccttcaaattcagcagacagaaagttaacatttcataaatatatatggttgaatgcttctttcctaaaagcatttamcatattcagtgatgaatattaaagttctcattactttaaagacacattttaccataggcaatttttatccaaaccaaattaacaacaaaataa

SEQ ID NO: 287350 - DNA, 1531 bp, Homo sapiens
atatgatgcctaaatgtttatgtattcctaaaatctaaattaaataggtctgactgaccacaacagagtagaaataggcttttcaaaatttaaaatacaaaggatttttcacacataaactgtggtagattttgttttcagcagcttcatatcctatttctcccaaggaaaatgaatagtgagtgtttcatgatgtttatgcagaactctttcatttccaagttaattttgcctaattaattcagaaataaatgattatattaagaatacagacaacctggaaaatcaatggcaatgtttaaataataacctrcaaagattatgcaggaagtaaaagatgttttgggggtttttagatcattagtgtatttctactctaaatttttttctgattttatatataattaatattaatgagataaacatactagagtcattttgaaaggtagatcctttaaaatttttaacaattaattgtcattattaataaataagatagattcttctgggttaaaataatgctttaggttcaagttctaatatctcaatacactcagcgttttgttaaaatwccggtgtggtggtgcgtggttatggtcccagctacttgggaggctgaggtgggaggatcccttgatcctgggaggtagaatttgcagtgagcagagatggtgcctccacactctgggtgacagagtgacatcctgtctgaaagaaaaaaaaatagtaagggaaaaacagaaacccaaggtttgagatcaggactggcctggcactctcaagtaggtctccatgtagctggaagctgctctggcaatcagagttaggccttggtgtcttgttgaatataaaaaatcccacataaccccactacctagaaaggtcactcttggatgattatgataaggtgggaaattaaagaaagaaagaaaaaattttwaaaaaaaagacagaaataagctttcctgtattaacctgactttttccagagacagcaacaggcacagcccagacccagggaaagtcttgatawcttattctgactaacatgagtctcacctttgccaatcacaaccattagtcttactctattctttttgccttttagacaagaataatttagatacccaatcataaaattacccacactgcttgacaattcagagcaaacttcaacttccttgaatcctcccacaatcacctaacataagcccagatactacataagtcctttctaaagccttgttacwtgagacaacccatgattccccttgtgtgaggcctactttgttgcactgagtgaataaacccaaatactttccactgcaggtgcatttctggtggtctttatgtgaagactattgttgaaacaaggaataccgatacatacatttcatctgggttcaaattacacagttacctaaggcttccaagctttcattgaactaatctctgttttacctgctactattttcaatatttttaatcgttatgcctagttattcttcaaatcttgaagacattaagatga

SEQ ID NO: 287351 - DNA, 498 bp, Homo sapiens
cttattctgactaacatgagtctcacctttgccaatcacaaccattagtcttactctattctttttgccttttagacaagaataatttagatacccaatcataaaattacccacactgcttgacaattcagagcaaacttcaacttccttgaatcctcccacaatcacctaacataagcccagatactacataagtcctttctaaagccttgttacttgagacaacccatgattccccttgtgtgaggcctactttgttgcactgagtgaataaacccaaatactttccactgcaggtgcatttctggtggtctttaygtgaagactattgttgaaacaaggaataccgatacatacatttcatctgggttcaaattacacagttacctaaggcttccaagctttcattgaactaatctctgttttacctgctactattttcaatatttttaatcgttatgcctagttattcttcaaatcttgaagacattaagatga

SEQ ID NO: 287352 - DNA, 580 bp, Homo sapiens
cagcctaagtgtccaacagcagatgagtggataaagaaaatgtagtatatatacacaattgaaaactattcagccattaaaagaataaaatcccrtctttgtgacagcaaagatgaacctggaggacatcgtgttaagtcaaacaagccagagacagaaagacaaatactgcatgatctcatttatgtgtgaaactttttttaaaagttgatatcatgtaagcagagactagaaaatgattaccagagactggggagggaggagaaagggaggatggaaaaaggttggtcattgggtacaaaactaaaattagatatgaagaatacattcttgtgttctattgctcagtaggatgactatagttaacagaaaaatattgtatattacaaacagaagagaggattttgaatgttctcaccagaaagaaatgatacatgcatgaagtgatgaatattctaaaaatgcagattgaaccagcatgcaatatatatgcactaaaacatcaaattgtaccccataacatgcacacttacaatgtgtcaattctttaaaaagtgtattttctaatgtaaatattagc

SEQ ID NO: 287353 - DNA, 306 bp, Homo sapiens
ttatagttgctgcaaccattatgtagttrccctgtttcaaagcacttaccagtatgtgacacatcatagatgtacttgttcaccatagtggctggatgcccatgttctccactggaatgagagcttctagagggagagaacttttcttctttgtttgtttctttgtttttgcactgtttgtttttgcagtgttgtatccccagcactcagaacagtgcctggaataaattaggcatccaaataatttttatagaatgaatggatttttaaatgaattaatggatttgtattcttgttctgtctcac

SEQ ID NO: 287354 - DNA, 573 bp, Homo sapiens
tctcattaaaaacactttgtctaaaacagtaaagatttcttctgtggttaacatagagaagctccattactttaaaaatctgataagtaagcatattaaaactcaactctgtccatagtttgtccttggttaaaacctttcaatggaaccccattgtccatccatcragtctaaacttcttacacccaatcagagcattttgtcagtttatgtcactcccctgatgttcattgaccatacaccccaactaaactgcaatgtccctctccccatacacactcaaaaacttccctgttctgtctttttgcccctaccctctcttttgtctggtaacctcgactctcagtctccatatagccagaaggaaactaggtaaaatatgaggctttgaagtaaaagatctgggatcaaccccctctctgtcacttatttactttgtgaccgtcgacgagttttatctcatctaatttttaaaaatgtttaagtagatggcacaatatctattctatagttagtacaagaatgaataatacagaaaaggtaggtggttcaattactaacttatattactga

SEQ ID NO: 287355 - DNA, 606 bp, Homo sapiens
aaaatgttgagtgtggagattatattgggttatcttggtgggtccagtgtaatcatagggatcctcataagagcaagggtgcagtcagagaaggtgatgggaagatgacaacagacgtatggtcaaagcagcagactccgaaggtggttgcagatatcagaataatgtcaagaatgggccattagccaaggaatataaacagcctctagaggataggaaacgcaagaaaatgaatcatctcctagaacctatagatgcttaaattttagtcygttgagacttctcacttccagaagtatgtaataataaatattggttgtttaagccattaagtctttgatcatttgttatagcagaaatagaaaaccgatacagaaatgaaatttaaaccttgcatatattgtgcccttggagtagataacacactgctgcaactttttgagacctttcttggccattgattgatgtcagaaaatggctggagaaggagtggttggtattgcaggaatggcttaatgaaggtgagtgtatgattgccatttaaaatatctttaaaggattataccatggtttgacattacatgaaaattgtatatgcaggatggt

SEQ ID NO: 287356 - DNA, 1109 bp, Homo sapiens
ttgaggttaaacatttattatcatgactgcttctctgccagtttgtcataggttgattatttccctctgctaaagggcacagctcctacaggaagcctcttcctgcgattacagcttctccatcctttggaagtttggccatcccttgctttccctcaattctctctaaaacataaatattctctttattaaactccccttaatttgttgtgtaaaatgcatgtgcgatgtcttctgctaggactgtgacaaattaaacaagtggtagaaaartggacctggaaaacaaactctttttattggattcttgggtaggcaactcaaatgttcaatgactgtgtgggtctcatctttgccagtgaaaatgtgtccctggcaatccatgggatgcatgccatcatacttattcaaataacctagtagaagcaggaataaaggacaataaaggtatgtagtttaaagggaaataattacagtaattatagtgattatgggatcagctggttgctttttctggttccccaaagagtacacattgaaaatgacaaattgacwttgaggttaaacatttattatcatgactgcttctctgccagtttgtcataggttgattatttccctctgctaaagggcacagctcctacaggaagcctcttcctgcgattacagcttctccatcctttggaagtttggccatcccttgctttccctcaattctctctaaaacataaatattctctttattaaactccccttaatttgttgtgtaaaatgcatgtgcgatgtcttctgctaggactgtgacaaattaaacaagtggtagaaaaatggacctggaaaacaaactctttttattggattcttgggtaggcwactcaaatgttcaatgactgtgtgggtctcatctttgccagtgaaaatgtgtccctggcaatccatgggatgcatgccatcatacttattcaaataacctagtagaagcaggaataaaggacaataaaggtatgtagtttaaagggaaataattacagtaattatagtgattatgggatcagctggttgctttttctggttccccaaagagtacacattgaaaatgacaaattgac

SEQ ID NO: 287357 - DNA, 554 bp, Homo sapiens
ttgaggttaaacatttattatcatgactgcttctctgccagtttgtcataggttgattatttccctctgctaaagggcacagctcctacaggaagcctcttcctgcgattacagcttctccatcctttggaagtttggccatcccttgctttccctcaattctctctaaaacataaatattctctttattaaactccccttaatttgttgtgtaaaatgcatgtgcgatgtcttctgctaggactgtgacaaattaaacaagtggtagaaaaatggacctggaaaacaaactctttttattggattcttgggtaggcaactcaaatgttcaatgactgtgtgggtctcatctttgccagtgaaaatgtgtccctggcaatccatgggatgcatgccatcatacttattcaaataacctagtagaagcaggaataaaggacaataaaggtatgtagtttaaagggaaataattacagtaattatagtgattatgggatcagctggttgctttttctggtyccccaaagagtacacattgaaaatgacaaattgac

SEQ ID NO: 287358 - DNA, 565 bp, Homo sapiens
ggtctggtagacagaaatagccaccatatggattctcaatctctttcttagctcacagcactaagcaatctcacagaactagtttattgattgagaaagaggctcattccctatgaggaaatgctctgcacacacagccacaggtgtgcattcaaaatccccttagatccttctccagaggtaccagtgccatttgtatcagtgatggcagcagccactctagatggcctgccactgtcatcatgctggctgcagcayggaagtgctgacctggctgcacactccatggagcaggtggtagccccaccctcctgggtgcagctgcacctacccaaatcgtggctataagacccaggctgctgctccatggaacaggcaggagccctgttatcctgtgtgcagctgcagctgcccaattgtcgttgcagacccaggcatccctgcactcttgcagcttgggaaggccctccctgtccttgcaggcttggaagtgtctattcccactgcctggcttctccctgctgccaggcccactacaatcttggagcaaagctggggagagccc

SEQ ID NO: 287359 - DNA, 565 bp, Homo sapiens
ggtctggtagacagaaatagccaccatatggattctcaatctctttcttagctcacagcactaagcaatctcacagaactagtttattgattgagaaagaggctcattccctatgaggaaatgctctgcacacacagccacaggtgtgcattcaaaatccccttagatccttctccagaggtaccagtgccatttgtatcagtgatggcagcagccactctagatggcctgccactgtcatcatgctggctgcagcatggaagtgctgacctggctgcacactccatggagcaggtggtagccccaccctcctgggtgcagctgcacctacccaaatcrtggctataagacccaggctgctgctccatggaacaggcaggagccctgttatcctgtgtgcagctgcagctgcccaattgtcgttgcagacccaggcatccctgcactcttgcagcttgggaaggccctccctgtccttgcaggcttggaagtgtctattcccactgcctggcttctccctgctgccaggcccactacaatcttggagcaaagctggggagagccc

SEQ ID NO: 287360 - DNA, 577 bp, Homo sapiens
gaatcagcatgcacttcttccactctgaggtctataaaagccctgggctcagccagagctgagcagatgatggataaccagctgcagagaggagatagcttctctgccaatagctggaaaacrtcaggacaaccagtagtagagaggagcttcccactccagggatgacctgctacagagaggagcaacccactccaggtcctcctctctgctaagagcttcagagacaatgggatgatctgccaacagagaggagccacccaccccagggctgcctcctctctattgagggctgaacattcacagggacacactggtgcagaaaggagctacccacagcagttctctgggctgttctattgctcaataaagctcctctttgtcttgctcacactccacttgtctgtgtgctcattcttcctggtcgcaggacagtaacttggggcctaccagatggtaaggctagaagagctataacacaaatggctgaaacatgccctttgctcatcacattgcaggcaaagagagggagagaagagctgtgcccctggggggatcccaggcctaggggccccaa

SEQ ID NO: 287361 - DNA, 1023 bp, Homo sapiens
tggatgttgtaggtaatggtccctgggaaccacatacttttatctgaagaattgaccctgcttttacaaacstttgctgtgaattgtggctatatctgatgtttccatgtatttaacaagacaaatatgtgtatactcatgatcgcttagtctttgccacatgagtatttcttggatgcttttaactcaggcattatgtctttgaatttattgagccaaaagcaatacaaacaaattacgttcaatttatccctctaaataatgtagaaactaaaaattattatgcaacatgctcatctatgaatgttgaaatatttattttatatttaacacgttgaattaatttttgcccatctatattatcgtgatatatatcttacagagttttgttttaaaccatgcataaacaaactcataagagtttatcaaaatgagtggaagatttggtttggctatttcagtattcagccagtwattgatgttattcagaattggagacagacaccgagcaaccaaatgaaaaaaaaaagtgcacatttcatttgagaattaaaatcattctacagtggcacaaattcttaaaagacgacttcacagcattattaatgtctgtaattagttttagtactcagaaaaaacatatatatttcttctcttatgttaaggccaawttgggttcaatgaaacatatttagattacacagaaagacatagttctggagaattaataagtgcaattgattatggtgtgggaagactatgaattgatttctctggtgctaaagtagactaacttgtcacctggcaggagtagtttgatgtagcatagggatatagaacaaagaacctcttaaaagtcttaaagttctatattcaaagattctcccaaaatatatgattatttttgtagtatgtgttttaaaagaatcaattctgaaataatttgtaacaaaagaatttgatgctttatctaagctctttgatataagtaaaggtaagaatcccccagattgtcatttataa

SEQ ID NO: 287362 - DNA, 549 bp, Homo sapiens
attgatgttattcagaattggagacagacaccgagcaaccaaatgaaaaaaaaaagtgcacatttcatttgagaattaaaatcattctacagtggcacaaattcttaaaagacgacttcacagcattattaatgtctgtaattagttttagtactcagaaaaaacatatatatttcttctcttatgttaaggccaatttgggttcaatgaaacatatttagattacacagaaagacatagttctggagaattaataagtgcaattgattatggtgtgggaagaytatgaattgatttctctggtgctaaagtagactaacttgtcacctggcaggagtagtttgatgtagcatagggatatagaacaaagaacctcttaaaagtcttaaagttctatattcaaagattctcccaaaatatatgattatttttgtagtatgtgttttaaaagaatcaattctgaaataatttgtaacaaaagaatttgatgctttatctaagctctttgatataagtaaaggtaagaatcccccagattgtcatttataa

SEQ ID NO: 287363 - DNA, 1207 bp, Homo sapiens
acatatgtgcttgaaagtatgtatatagatctagatatatagtatatacatgttacatctatatatacacacacttatatatagaatgtatttaggtcgtgcttatattccattattttataacaactaagtaccttcattcctttaattactaatatgtattagtacccactatgggccaggacatagttgttatatcacataagtgatttgatcatcgatacattatttaagcatgtcttacaaaaataggctcagatctataatgcctagatgtatttctacttgtatttgtgttacaataacttatctgttggaacatattgtatgaatggaccattasgttgttgcttctaacatcctatttctttttttgtgtgaatatttctgagggaactattagaaacatatataaatagatgctaaagaattactagagtaattcaacacactcctgcttcagcaactctatttgaatctttttatatttgttgtttacaacaactctgggtaaaatgtaaattttcccacaggttcttaaaatagatgtgttttaaaaaattctcaggaggaacataggagttgaataacaagwgctgttttggtaaataagaggtgttttttatacataataagatcaatattatatcatcaactaatatttgtgccaggtattgttttgtatactgccatactgcccttgagagactcacttttwttgggaaattggatcaataaacagaagtgacctttgtgatcagtaaatttgataataaacaagtaactttggaactatggaaacaaaatatcaggtacctatgtttcagtaattaggaaaatttgcaagcatccttgatttgttctttctattattctcttcatccataatgatcactatgtatgcccattttagtcatctaaatatatttgtcattcgtccactcgtttccacactcagtctattttcactatttatctgtgttactacagtgtcctctaaaccagtctctctttcttcaaattgtctccacatgatcaaatctccggagaggtgccaaaataatatttctaaaacaaatctaattgtatcacatacttaattaaaattattcagtagttctttataggctttagactaagtaccaaaacacacaaagctttttatcaccctgtcttgcttgcttcatgcaatcatggaaatctgatc

SEQ ID NO: 287364 - DNA, 563 bp, Homo sapiens
aagtcaggtggagaaacagatacccaggaaagaatagagataattgattttccatcattccatcttcagcttgagaatccacctaaaatgaaagagaaactcaattgcaacagaatggtgtatgaattcagtctaattaaatgttttgtaagacagaagtcatcagaaaagcatttgatatgtggttaaaaatcaaaggctcatggctaattgttcaaaggcttagggaatctgaggaagctaaatattgccattctaagtatgctttctctagatgtctcttcattttacttaaaacgtaaaaaggaaatcaggaactgatacacggtagtgattccttgaagaaaatcaattaaaaatamatttgttaaagtaaattttaaaataaatgtattaaattctaacaggcttaagtactctggtagcatggtagcattttgataaataactgacttcccattttccttattcagagggacaaaaatcctgagactttgctgaagttgcttatcagcttaaggaggttttgggctgagacaatggggttttctaaatatacaatc

SEQ ID NO: 287365 - DNA, 303 bp, Homo sapiens
tatcaaatgcttttttctgcatctactaagattatcatattacattttgtccttaattctcttgaagtgatgtatcatgtttattaatttgcccatgttaaagcattcttgctttcttgagttaaatctcacttggtcatgatgtgttatttttgatctattgttttattcagtttactagtattttgttagggatatttgcatctatgttcatcagggatattggcctgtagtttcatttttatgttagttccttgycttgttttggtatcaaggtttgctagcctcgtagataagttagga

SEQ ID NO: 287366 - DNA, 567 bp, Homo sapiens
tagtttcatttttatgttagttccttgtcttgttttggtatcaaggtttgctagcctcgtagataagttaggaagagctccctctacttcaaattttttgaataatttgagaagaatttgtattaagtactttttaatgattcagtagaatccagcagtaaagccatccagtcctgcaattttccttcttttcttttattcttcaccttttattttaagttcaggggtacatgtgcagaatgtgtaggtttgttacatacgcaaatgtgtgccatggtggtttgctgcacagrtcatcccattatccatgtattaagcccagcatccattagctattcttccttatgctctccctcccccagcccctaacagaccccagtgtgtgttgttccccccatgtgtccacgtgttctctttattcagctcccacttataaatgagactatgaggtgtttggttttctgttcttgtgttagttttctcaggataatggcatccaactccatccatgtccctgcgaaggacatgatctcattaccttcacagtgtttatgtaccacattttct

SEQ ID NO: 287367 - DNA, 604 bp, Homo sapiens
ttcaccatgttggcaaggctggtctcgarctcctgaccttaggtgatcagcccgcctctacctcccaaagtgctgggattataggcatgagccaccatgcctggcctgtttctctatctttttaggatcatcatcttattctaattgagtgggaaggaaatgaactggagaatctaataaaggggtttgtaacacatactaaattgataagagaaatttccttaagatccagtgtttaattaaattgaaaaattcagccaaattgacaattttttgattctttttttcttgtgtagaacaatgtattttcctttggatatatgcccagtaatggaattgcttggtcgaatggtagttctattttcagatttttgagaaatctccaaactgctttccatagaggctgaactaatttacattcctatcaaaagtgtgtaagtgttcaggaaggtaaattttttcacttttattttatgttcagggatacatgaaagtcgcaggtttgtgatatagatgaattgtgtgtcacaggggtttggtgtaaagattatttcacccaagtaataagcatagtttgcatgcagaagctctttagttttttgtt

SEQ ID NO: 287368 - DNA, 613 bp, Homo sapiens
taagatggagaacttaataaaaaatgctatgtgtgttccaagtggttcaccaatgactggtcccccatctctgtccctttccttgggcttccctgttccctaagctatagcaatatcaaaattaggtaaattaacactacaatgacctctacatattcaagtgacaggaagaatcacacatctctcactttatactaaaagctagaaattattaatcttagtgaggaaggcatgtcaaaagctgagataagactaaagctaggcctcttgcatcagttagccaagctgtaaatgcaaaagaaatgttcttcaataaaattaaaagcactgctccagtgaacacatgaatgataagaaagcaaaatagccttaktgctgatgcggagcaagttgtagtggcctggataaaggatcaaaccaagcacaacttttttataggccaaagactaatctacaataaggccccttcagttctatgaaggctgaaaggggtaatagatgcacaaaagtttgaaactaataagggttgtttcataaggtttaagaaaagaaaccatctccataaaataaaagtgcaatatgaagcagcaagtgttgatgtagaagcttcagc

SEQ ID NO: 287369 - DNA, 595 bp, Homo sapiens
attagatgtattgattcagtgaaaatccaatgaaaattttagcatgttatttagtggatacctaaaatgtattacaaaattcatatggaggggaagaaaaacaaagttggaagacttagatacagtaattcaaaaattactattaaactatgttaatcaagactgtgttattgttaaaagatatatggaacaakaaagggcccacacaatatacctgtcacctttctcaaaattaacttgatatacaacacagacctacatgtacaattcaaaacaataaaactcctagaagacaacataagagaaagtctaagtgatgttgtgtttcacaatgcctttttagatacagcaccaaaagcaagatctatgaaaagaaaaataaattggtaggttttacttaatattaaaagcttgtgctgtgcaaaagacactgtaaagagaattttttaaaagctgcagactgggataaaatatttgcaaaacacatatctgaaaaatgcttcacatccaaaacacaggaagaaatcttaaaactcaacaagaattctgatgaaaaaatgggtaaaagattttagacagatggctcacaaaaaaa

SEQ ID NO: 287370 - DNA, 604 bp, Homo sapiens
caggctaattgaagagctcttgggccttaagggaacaacagtggtagactgacaattactccccatgggcctgtggtggtgatggcccagagtgagactcctctgcctttggaattggaaggaagaggaggaacaacatcttgtggtttgagtgccagttcagctgttgtgcaatagaayaccaggtagacctctaaggtttttcactctggttcctggctcccagatcatacctctcgctctgcctagggcccggtggatctcaccaacctgtagggaaggacacaagcctggctgccttggtcacctgttgattgtagggctgcagggccctgagtgaacataggcagtagccagggagtggttacaacaggtcataggtgagatgtagtgctatgatggcttcagatctgacacagcacagtcatagtgatggtggacacagggaagcttctgtcactccactcccagctccatgtggctcagaacagagagactccagttgtttgggagaaagtaaaagaagagaagaagagtctctgcctggtgatccagagaattcttctggttattgtccaagaccatcaaggcggtacctcaatga

SEQ ID NO: 287371 - DNA, 604 bp, Homo sapiens
caggctaattgaagagctcttgggccttaagggaacaacagtggtagactgacaattactccccatgggcctgtggtggtgatggcccagagtgagactcctctgcctttggaattggaaggaagaggaggaacaacatcttgtggtttgagtgccagttcagctgttgtgcaatagaataccaggtagacctctaaggtttttcactctggttcctggctcccagatcatacctctcgctctgcctagggccyggtggatctcaccaacctgtagggaaggacacaagcctggctgccttggtcacctgttgattgtagggctgcagggccctgagtgaacataggcagtagccagggagtggttacaacaggtcataggtgagatgtagtgctatgatggcttcagatctgacacagcacagtcatagtgatggtggacacagggaagcttctgtcactccactcccagctccatgtggctcagaacagagagactccagttgtttgggagaaagtaaaagaagagaagaagagtctctgcctggtgatccagagaattcttctggttattgtccaagaccatcaaggcggtacctcaatga

SEQ ID NO: 287372 - DNA, 604 bp, Homo sapiens
caggctaattgaagagctcttgggccttaagggaacaacagtggtagactgacaattactccccatgggcctgtggtggtgatggcccagagtgagactcctctgcctttggaattggaaggaagaggaggaacaacatcttgtggtttgagtgccagttcagctgttgtgcaatagaataccaggtagacctctaaggtttttcactctggttcctggctcccagatcatacctctcgctctgcctagggcccggtggatctcaccaacctgtagggaaggacacaagcctggctgccttggtcacctgttgattgtagggctgcagggccctgagtgaacataggcagtagccagggagtggttacaacaggtcataggtgagatstagtgctatgatggcttcagatctgacacagcacagtcatagtgatggtggacacagggaagcttctgtcactccactcccagctccatgtggctcagaacagagagactccagttgtttgggagaaagtaaaagaagagaagaagagtctctgcctggtgatccagagaattcttctggttattgtccaagaccatcaaggcggtacctcaatga

SEQ ID NO: 287373 - DNA, 604 bp, Homo sapiens
caggctaattgaagagctcttgggccttaagggaacaacagtggtagactgacaattactccccatgggcctgtggtggtgatggcccagagtgagactcctctgcctttggaattggaaggaagaggaggaacaacatcttgtggtttgagtgccagttcagctgttgtgcaatagaataccaggtagacctctaaggtttttcactctggttcctggctcccagatcatacctctcgctctgcctagggcccggtggatctcaccaacctgtagggaaggacacaagcctggctgccttggtcacctgttgattgtagggctgcagggccctgagtgaacataggcagtagccagggagtggttacaacaggtcataggtgagatgtagtgctatgatggcttcagatctgacacagcacagtcatagygatggtggacacagggaagcttctgtcactccactcccagctccatgtggctcagaacagagagactccagttgtttgggagaaagtaaaagaagagaagaagagtctctgcctggtgatccagagaattcttctggttattgtccaagaccatcaaggcggtacctcaatga

SEQ ID NO: 287374 - DNA, 596 bp, Homo sapiens
gaagtcttttgtgtctgtgattgctttactttagtctcctaaattcccatgttatatctgataaaggtattattgtcttttctagtagtgtatttcttattaaccacctctcctatgtggtccacttgatccttctctcagtggttgcgaaatctcatagataagttttattttcctaaatgtttgctcactggaaatcagatttcactgttattgtaccttacttctgggccgtttggcaaacagtgtctctgcccatgtatgttaacagtgctccaggtggtgagttgtctctttcatttatgcacctggaggaaggctctctctctttccccaacttctcctctgcaagtgcttcacaggctatgtatcaaagtccacctagagaaacagaaatcatactagctatttcaaaataagagatgcaaaacacagaacgtattcactgctcttagaaggctgaaagacctgagagagagtgatatagttcagagtyggaactttggaaatgtatggagttgccacagctgggatgggggaacagggagactttagctagtactgaatcctttggtgtttgctgctaacatggaaaa

SEQ ID NO: 287375 - DNA, 452 bp, Homo sapiens
agtacaatgtacactactcaggtggcaagtgcactaaaatctcagacttcaccactatacaattcatccatgtagccaaaaccacttgtaccccaaaaactattggaattaagcaattttttttaaaagaaagtttgtcacaattttagccacccatggggacaatctggttgtttgccatcaccatcattcttggctcttaatttatatgctaccaataggcaatctttttttacacttattcatataaaagtacttaacagtaaaaaaaatacaattaatacagtgaaaacgtgttcagggtaactaaagtagtagcatcaccagaatacttgtgtctgctgttaaacaactgcaaaaacaaacaagagcaggctttcagtcaccacctacaacgttgtgtaytgatttaaaagttgctgtatgctgtatttttcttttaggtgaggaga

SEQ ID NO: 287376 - DNA, 534 bp, Homo sapiens
atgtcaatagttttaatttttgtattgcatattttgatttacatagggaaatttgacctcaatcaatcagtgaatctaccagtttccactgattcaacatttaccaagttcagcctattatccttgttatgaaatcatgccagtgtggtcgcaagcaattaattagctacagttatgagcactcttagtagcattaataaattcacttctacatgtatasttctaatgcatttataggtgacatcatatagtggttttctggagcaatgtatgtctttaaattagcattatctataacaaataatatttttaagaaatcattttggaagggccgttacagattttagtaagtaatgtgtattctttatttctttatctgtatgagttttatataagtttacaattttccagactcagacttatgatatactatcaaaatatttccagggatatagaaaatttataatttagaaagaaataaaaagatgtcattttacaagtctggcatgtgatccagtagctaagagactcaag

SEQ ID NO: 287377 - DNA, 534 bp, Homo sapiens
atgtcaatagttttaatttttgtattgcatattttgatttacatagggaaatttgacctcaatcaatcagtgaatctaccagtttccactgattcaacatttaccaagttcagcctattatccttgttatgaaatcatgccagtgtggtcgcaagcaattaattagctacagttatgagcactcttagtagcattaataaattcacttctacatgtatacttctaatgcatttataggtgacatcatatagtggttttctggagcaatgtatgtctttaaattagcattatctataacaaataatatttttaagaaatcattttggaagggccgttacagattttagtaagtaatgtgtattctttatttctttatctgtatgagttttatataagtttacaattttccagactcagacttatgatatactatcaaaatatttccagggatatagaaaatttataatttasaaagaaataaaaagatgtcattttacaagtctggcatgtgatccagtagctaagagactcaag

SEQ ID NO: 287378 - DNA, 605 bp, Homo sapiens
aggatgtagaatgaccatgtaatattaatatcatggaaaaatgtgatcaactttttagatatagctacttatttattaggctgttgtaatacatatacygtgagaagaaaaatgtaaagttgacctcataattccccatggagaggaagaaaaccaactgacaaaatattttcatggatcattttaactgtggaaagatttttcttaggttagagttcaaacaaatcaaagaataactttatctgaaaaaaaaataaaaatttaaaggctgggtatgtacaaacgggaagagaggagtttaaaggaggtggaaggtactcaacaatataacaagatgcttgagtcagggtagaagatgtgacaaatgaaatttctctgacaaggaatcaaagacggatgaaataatagaaacaagatacaaatatgtttaaatttaattttgcattctatgctaggattggatgaattacaattgttatcttgatgcctagggtaactaagtaaaatgggactatatttctctcacatttgtgttgcaaataaggaaattactataggaagcaagaaatgagaacgttcttaaaggtaggagaagctgcaaatgt

SEQ ID NO: 287379 - DNA, 1090 bp, Homo sapiens
tcagtacatactatgacattgacatggaaactggaccaaacaaaatcatctcagaaagttggtccttcacaggccaactacaccagttatcagtaagaaatggcataaaggaactttgtatgctgggatcaccatagttgtggaattcttcataggttagtaattgctgagctagaagtagaaatgtttcacaagctgatctttggtttaagttctcagaagagacacatagaaacaagaagttggatagtgagcagcaacaaggtgaattcacacaattttgaggacgctattagctaggactcaaatataagtaaccaaacacattcgcaaatataagcacatycacattcacaaaatgtagctgtacaaacttgcaatacacaaaataaggaaagtaatactcgttggagagaaaaatatgtaataactaaaaccagaataagattatgcaattaatctaatttctattttattaaaattcaatawgaggttattgtaaatggacttgctttcataatttcatttggcagattgttgcatattgatattgtatcctacacctttcctgaatttattagtagctctggaagatttcttgtggattatttgatgctgtctatgtagaatgatgtcatttataaacagaagtaacttcctwgctaatttggatttttttaaaatttcttttaattgtcttattgttccatttagcacttccagtacaaagttgaataagagtggtcgaaagcaggcacccttgtgttcctgatcataaggagaaacattttggtctttcaccatcaagtataatgttagctatgagttttacataaatagcctttaataggttaagaaaattcccttcttttctttgatttttgaatattttagcatgaaaggatgttgattttttgtccattgtattttctacatcaagtaagttgattacgtgttgtttttcttaagtctattaacatagtgcattatatttatttattttcttatgtttaaccacacttgaattcctaggataaatctcatttggtcatgttaaataatccttttaatatgctgtttgattagtaag

SEQ ID NO: 287380 - DNA, 601 bp, Homo sapiens
gaggttattgtaaatggacttgctttcataatttcatttggcagattgttgcatattgatattgtatcctacacctttcctgaatttattagtagctctggaagatttcttgtggattatttgatgctgtctatgtagaatgatgtcatttataaacagaagtaacttccttgctaatttggatttttttaaaatttcttttaattgtcttattgttccatttagcacttccagtacaaagttgaataagagtggtcgaaagcaggcacccttgtgttcctgatcataaggagaaacattttggtctttcaccatcaagtataatgttagctatgagttttacataaatagcctttaataggttaagaaaattsccttcttttctttgatttttgaatattttagcatgaaaggatgttgattttttgtccattgtattttctacatcaagtaagttgattacgtgttgtttttcttaagtctattaacatagtgcattatatttatttattttcttatgtttaaccacacttgaattcctaggataaatctcatttggtcatgttaaataatccttttaatatgctgtttgattagtaag

SEQ ID NO: 287381 - DNA, 601 bp, Homo sapiens
gaggttattgtaaatggacttgctttcataatttcatttggcagattgttgcatattgatattgtatcctacacctttcctgaatttattagtagctctggaagatttcttgtggattatttgatgctgtctatgtagaatgatgtcatttataaacagaagtaacttccttgctaatttggatttttttaaaatttcttttaattgtcttattgttccatttagcacttccagtacaaagttgaataagagtggtcgaaagcaggcacccttgtgttcctgatcataaggagaaacattttggtctttcaccatcaagtataatgttagctatgagttttacataaatagcctttaataggttaagaaaattcccttcttttctttgatttttgaatattttagcatgaaaggatgttgattttttgtccattgtattttctacatcaagtaagttgattacgtgttgtttttcttaagtctattaacatagtgcattatatttatttattttcttatgtttaaccacmcttgaattcctaggataaatctcatttggtcatgttaaataatccttttaatatgctgtttgattagtaag

SEQ ID NO: 287382 - DNA, 353 bp, Homo sapiens
caatataatttgataatttattttcctttctagttttattctccctttgtctgtttttggtctttcagctcccttcccattcccaggtactccttaaacttccccaaattattcacagtgattttcaagtttgatgagaattcacatttttacatattgtgatatggttttcccactctgttgacaatagtctaatatttgtagcaatatcttctttatttgcagtgtgtgcacatgcacatatgtacgtatggatacatcagcactgaaaaaggctgtgtctgtgttgtaactgtcctatcgtcctataatgacatacaaatagctctsttcatggtgtttctgttgaactg

SEQ ID NO: 287383 - DNA, 561 bp, Homo sapiens
tagtttactgctattcatgtagaaacctaggaaataaaaaatggatggcaggcagccaattaaagaaaaggaaataaattagaacatcagtgaattgctagagtctactatatggatgtaagtataagtaagagagattaatcactctaaatcttaacattcttttttttaaccttcatacaatacctaaaagtgccatgtaattatatcactaggtgtatcacatgcaatatgttttcttttgtaatgaactctgttaaataaactatggaagtaacatttcaatccttattaaaaacatgtgatatgtatacttgcaattttattttttcatatcaatakcctttatttttcaaacagctttaggtttatagaaacatttagcagaaagtacagagaattctcataaaggcagagagcagattagtggtttctaggcacattgggtatggaggagtgggaagtgactgctaatgtacatgaggtttctttttgaggtgatgaaaatattgaaaaattagatagttccacaactctatgaatatacaaaaaacagtgtac

SEQ ID NO: 287384 - DNA, 646 bp, Homo sapiens
tgactgaaaatataattttaaaatgtcttcaggagagtagttccatggaatatgacatactggagacacaacaaggcatgacccatttcagcataggtggaggggaactggaacctaatctacttagtagtagggggcaaacaccaaggtggctgacccatctccagctattttcttggggaaaatctatactggcagacataacttaataactcaaatatacaacacatgataggtaataattgcagacatgtcattggtttccaagaacagtataaaataatagatcacataaatcaatgttgactgactttaatatcaacatatattctttattcattgactaactaccgattgaaggcctgccatgtgtctctaataaaaaagagtttgtatrttgatattcaatattatgtaaatcattcagtgtaggagagagtattaaacaacacttacacttaagtaggaaacagtaagcaaaaacagaaaaaagagggagagcaatcttcatgaaattggaatattacccagaccattaagtggactcaagttagaaacaataaagacgcagttacagaaactataattcagtgcaggattttatatcaggaacaatgtaaaagtctagtcttcattaaggcaccaa

SEQ ID NO: 287385 - DNA, 627 bp, Homo sapiens
tcaactaatactggccaaatttgtgaattgccattaataacacatcttagatatatacaatacacattggattattctatcaacaaatgtttgtgagcaccatctctgttargcactatggtaggcatttgggatgcaatgagcttcttgtcttggcaagtagatgttcaacatcacaattataagtgtccagttagaggaattgcaaatgtgtttgcctatctaagaacaaaatagatagggagggacaataacgtacagtaaggaactgtaagacatgaagcatgaagtagaaacaagctcactgccttatcattgtgagttaaggtcctgtgagtacacaagggtctacctatttcctttcttcaacagatacttcttgatgtatagtatgcgtcattgttttaaaaataagggctacatgagtgaatgaacaagtttcacccatagggaacttgcattatagttgaagaaatccttagctgtgccaaaattgtaagaatccacattctatttcttattcattgggcctatactggactcagccagcatccactgcagaggactaagaaatattccaaagaatggaataatgattgctaaagatttcatagtattatgacttgg

SEQ ID NO: 287386 - DNA, 601 bp, Homo sapiens
tggccatttcccaaagaaactaaggttttgctttgactgttccctcccattggaatgcctgttcactcttttcttccacattgaatcccatccctttttacattaagtcccatttccagtgcatgaaatattctgtagacttcacttccttccaaactattgcttccccacagatctatcatcaaataattcctacttctctaaattgacatttcatttcatctgtacctcccttagggttcttcactgtgtagttgaaactttatttgcataaattacttcctctatgtgatggccatgaaaatgtgtcactcagatcttctactgcagggagaatatttgaaggctccacctgctgccctcctagatttatcaatgtgcccatgcaatgactatgcttcccaccttctgctcccaaccattgactgggcagagctactaaaagacgtttgttcctgaaagatggggaactcttctgataggaaacaagctggagaactacattctgccctcctctgaaactttctcagaactgtgctgcagactgagattcttcctacacaatcctccttcayctcaccttgtcttcaaagctatcagc

SEQ ID NO: 287387 - DNA, 520 bp, Homo sapiens
ttaagtctctacaccttggttaagagagtagaaactaatctatcttttaactcaaattttaaattaaagyggcttggagtctattttcttcctctgccattttttttcatcaattgattactatttaagccttgtcctagctctgttgccactttcctttaattagttggcatatactatgtgacaggtattataaagatatgttcttattttatttttatttaatgttcatgcaattttgaaagtgtgttataaatccccatttttagatgtaggagaaaactgaagctcagaaaatgctaagtgcactttatgcaaattaataagtaatggatctataattcaaatttgtatttctaaaggtcctagattcccccacgggattgtgccacagttgaaaatatcatgttattaataaccatttgctattcaaactctgccatactaaaatcttcttcatatcacagccaataatttgcatactcagcagagaacagtggctattaattaatcacatgtt

SEQ ID NO: 287388 - DNA, 883 bp, Homo sapiens
cagaaattttcagttgccacatggaaaggatattgttttgtgtcaaaataaaaaaataacaggagctcaatactcacagaaaacatagaggctatagtaattggccactgataggcaatcaatttgcaatgaccgctgttacacaattaattagctcaactggaaaacatgaagtcaaatgtttattttcctctctaaaaggtaaaaaatatcctggcacaaaagcacatttttaataaatccacccttatgagcaaagtaggtaaaaaacatcacgtcaatatcaaaacttactctaaaagttatcggagttctattatatagaaattcataattttctttgtacttgataattttctggcaactgcctgtaatgattatcttttcagaaatgagcttttatataaagtatttcataagattgataattacatgttaattcaagacakggactacaaatattttctaaagccaaaatgtttagtcttaattcttccccagagcacccttctgtttattattgtattatcatatttactgtaattattaaaatgaaaaatttgaaaataagattagttttagtattaaaacttgaggttttaaccataaatgtttaaaacaccagtttatwtccaggttcatttttctacatgtggctatctagttttcccagcaccatttattgattctattgttaaatcaaaaatatttcagaaacaagttgtttaatttgcatgtatttctgtagttttgatgattccttttgcaattgatttctggttttatttcactatgatctgagaagatatgtgacatgattttgatttttttwaaatgtattgagactcgttttgtggcctatcatatggcctatcttaaacaa

SEQ ID NO: 287389 - DNA, 498 bp, Homo sapiens
ttctcaaaacttaccacaaaattgaaagtgaagggattcttccaagctcattctatgaggacagcattgccctaatacacacagtagataaggatgtaataacaacaacaaactacagccaatatgctgatgaacataggtgaaaaaattaacaaaatactagcaaaccacttccaacagcacatcaaaattattataaaccataatcaagtgggatttatcccagggatacaaggatggtttaacataygcagagcaataaacatgatgcagcatatcaatagaatgaaggaaaaacatatgatcatttcaatagacgcagaaaaagcatttgacaaaattcaacatccttttataaatacaatttttggttaagagtatataaaagaaacatacctcaacacaataaaaaccatagatgacaaacccacagctaacatcatactggatagcgaaaagctaaaatcttttactaagaactagaagaacacaagtatg

SEQ ID NO: 287390 - DNA, 613 bp, Homo sapiens
actaacctgaaaaaataagaagatgcaatcataaaaaaatcataatttcttaccaaaaggagaacttacaatacaaaaataattattttttaattaaaagttaaaatacttccattttaaacattgagtttcaaaaatcgtagtcatgcatgagtataaacaatgtactactctacagatccaactagaagatgaatgctgtacgccacgggaagaggaaaagctaatacagaaaaaaattagcagccttttatattccattaaaagctctkctatgtgataatttatgatagcttttttctttgaaaatcattattttataacagtgaaatggaagcacttgtcatatctagctaagtctcttaaaaacatcccagtcatatagggagaagccaaactggaatgcttaattagaattcaactttttgtgacttttaagtgtgcttttcagcaggttgctattacaaggttcagttcagctgtctagttagagaccactgcgctgacatacaaggacacctgtcttcctaaatctcaatctttgcagctcatcctttctagtaggtcagaagatatttaatttatgatatatctcctcaactctctgtttttt

SEQ ID NO: 287391 - DNA, 487 bp, Homo sapiens
ttactctacactttaagacatcaacttaatcaacttaatctcccattgcttggttcttggaaagtccagtgaccgctgaggaatttctataaatttccatgagttcacattttcagagttaccactggtctgaatatttagctctctcttgatcagttcatcctatggatagtcattctctgtatcaggtatggatgtgttcagctgcaaatattttaaaatccaacaaataatgtcttaacattaaaaaaaaaaatgtttaactctctttatgagaaaatcaagsgtaaggattttagcccagtaaagaagtgcagtcatgacatagggaagcaaacaaaagcaccctagactttagctttatcatgcaggtatttgttctccagacttttacctcataatcacaaaatgactgctgtgcctccagagccagatattacgcagacaggagaaagcagaggaaaaaaaggaaaacatgagcctgtca

SEQ ID NO: 287392 - DNA, 526 bp, Homo sapiens
cttgaactcctggcctcacatgatctgcctgcctcagcctcccaaagtgctgggattataggcgtgagccactgcacctggcctagaatttatttttaatgaygacttctgatataatggctcccttgaccaaaaccttatatttgcaactccaaaacaaatagacatacgtatatacacataaatatgaatattcctgtatacacaacacagacatacatgcacacacacacatgcacacatacacacacacgcacacacctctatgtgacatctagaataaaattaatgtcgttattgttgttttagacatagggattatgtagttgaacacacttggaagtatattgaaattaaccaggctaattattttgcataacattcaatacaattgttatacaaataaactcattttagtatactgatactgtttggctctgtgtccccacttaaatctcatctcgaattgtaatccccacatgccaagtgagggacccagtgggatgtgattagatcatggggatgg

SEQ ID NO: 287393 - DNA, 526 bp, Homo sapiens
cttgaactcctggcctcacatgatctgcctgcctcagcctcccaaagtgctgggattataggcgtgagccactgcacctggcctagaatttatttttaatgatgacttctgatataatggctcccttgaccaaaaccttatatttgcaactccaaaacaaatagacatacgtatatacacataaatatgaatattcctgtatacacaacacagacatacatgcacacacacacaygcacacatacacacacacgcacacacctctatgtgacatctagaataaaattaatgtcgttattgttgttttagacatagggattatgtagttgaacacacttggaagtatattgaaattaaccaggctaattattttgcataacattcaatacaattgttatacaaataaactcattttagtatactgatactgtttggctctgtgtccccacttaaatctcatctcgaattgtaatccccacatgccaagtgagggacccagtgggatgtgattagatcatggggatgg

SEQ ID NO: 287394 - DNA, 1145 bp, Homo sapiens
acattacttttgagtatctcatctctttcctgatagaggtcagagtaattcagattttgagtatctgtgtgtctgtgtgtatatagtgcatagcttttcctttatattatgcccatctaaatgttctaacataaccacaagaagtagtcccagagagaaaaaaataaaaataaaaatacaaacaacagttcaaacacgatagagcaagaaagataacagtgcatgtaatcagttatataactcttgtaatgcaagtctcaattatctttgttctgttaacatgtaagcattggcaatattttttcaagttagaaaactaaagttaaacacaaactatgaatatccgcttgtggtaaaattcagcrctgctatatcatattgcccttttgtcctatcatatacttgacatatgtctcttccagtcctttcacagcctgcatctggaatagaagtagccttctaaatcatgacccaatcttcaacatttccatactatcatattcagcagtaagttgctattctaaaatatctagtggattatttatcttccctgataaaaatattgtatttcawacattacttttgagtatctcatctctttcctgatagaggtcagagtaattcagattttgagtatctgtgtgtctgtgtgtatatagtgcatagcttttcctttatattatgcccatctaaatgttctaacataaccacaagaagtagtcccagagagaaaaaaataaaaataaaaatacaaacaacagttcaaacacgatagagcaagaaagataacagtgcatgtaatcagttatataactcttgtaatgcaagtctcaattatctttgttctgttaacatgtaagcattggcaatattttttcaagttagaaaactaaagttaaacacaaactatgaatatccgcttgtggtaaaattcagcactgctatatcatattgcccttttgtcctatcatatacttgacatatgtctcttccagtcctttcacagcctgcatctggaatagaagtagccttctaawtcatgacccaatcttcaacatttccatactatcatattcagcagtaagttgctattctaaaatatctagtggattatttatcttccctgataaaaatattgtatttca

SEQ ID NO: 287395 - DNA, 584 bp, Homo sapiens
gacaaacacagtttatagcaccttgagaaatatccactgaacattcaattctttttttttttttgagagggagtcttgctctgttgcccaggctggggtgcagtggcgtgatcttggttcactgcaatatctgcctcctaggttcaagcaattctcctggctcagcctcccgagtagctgagactataggcgcatgtcaccatgccctgttaaattyttgtatttttagtagagacagggtttcctcatgttagccaggctggtctcgatctgctgacctcgtgatccacccgcctcggcctcccaaagtcctggggttacagatgtgagccatcgtgcccagccacattcaattcttgataaccatagttatctgttaacggttctttcaagtaaaaatgttgtgaatttttcgcaaggaaatgcggctagtccaactggatgtgtttccatcatagccggatttgtaatataagtgttttatacatactttctgttttaatacacaagtgtatataaaagagtcaagaattaataagattaatatttttactacttcttaagcaaagcataagtgaagtata

SEQ ID NO: 287396 - DNA, 584 bp, Homo sapiens
gacaaacacagtttatagcaccttgagaaatatccactgaacattcaattctttttttttttttgagagggagtcttgctctgttgcccaggctggggtgcagtggcgtgatcttggttcactgcaatatctgcctcctaggttcaagcaattctcctggctcagcctcccgagtagctgagactataggcgcatgtcaccatgccctgttaaatttttgtatttttagtagagacagggtttcctcatgttagccaggctggtctcgatctgctgacctcgtgatccacccgcctcggcctcmcaaagtcctggggttacagatgtgagccatcgtgcccagccacattcaattcttgataaccatagttatctgttaacggttctttcaagtaaaaatgttgtgaatttttcgcaaggaaatgcggctagtccaactggatgtgtttccatcatagccggatttgtaatataagtgttttatacatactttctgttttaatacacaagtgtatataaaagagtcaagaattaataagattaatatttttactacttcttaagcaaagcataagtgaagtata

SEQ ID NO: 287397 - DNA, 541 bp, Homo sapiens
actgcatgtttcttcccaaacccacattcactcatgtcacattggtagttgaaattagtcctggttgctgcatttacactgcaggcatttgtgagtactataaaccagaatttggtggtggtggtggttgcttcaaagatgaatttttaatctctttagaacacattctatgtgactccaaaaattaggttccatgacaacctacatatctctcctaaacccactatggaccccaacctctgttccaataccagcagagttcccataaacatgatgataatgaggctagagataggtaaaacaagtgtaaaataaaataaaataaaataaaattcccttaaacaatcatttgtagtgatgagaaacgcagcctcagattctgtaggaaccagcataaactcccaagtcttccccagttcagtcatttggaaaaacttacttcttccagcaacaaatcacgacaacacttgataaatgttttctactargaaatttcatggtagttgtttttaggcttttaggtacatagcactaaaacagt

SEQ ID NO: 287398 - DNA, 542 bp, Homo sapiens
cttctgcagcccctgggattaagggtcctcttgtaaaagggaaaggggaaatatgtgagaagtactcaaatcagagygactccagtttgaataagggctaaggaaaatgaagctggatcaccaactggtaatgaagggctgcacagcctgcaatcaccttgcttagttaaaaggccaccttttatgctagtaataatattagctagtaataatgataccttctcttttacaaaaaagagaagagggggcatgttgggaaaaagctgagtgttgggagaagctgaggcagggcttgcatgtctgacataatgtaaaaaagtgttggaacatgtccggggtccaggatctaaaaccccttgtggcctttggaacaccaagctttgtgctaaagggtggaaggctcccctgatgcatcatcatctaagcccagggcataaaatccctcgtggcttggataaaatccagggctcgtggctctggaatagttctagacttgctggctccttgctccttgctctcccaggatccattatatctggatt

SEQ ID NO: 287399 - DNA, 542 bp, Homo sapiens
cttctgcagcccctgggattaagggtcctcttgtaaaagggaaaggggaaatatgtgagaagtactcaaatcagagtgactccagtttgaataagggctaaggaaaatgaagcyggatcaccaactggtaatgaagggctgcacagcctgcaatcaccttgcttagttaaaaggccaccttttatgctagtaataatattagctagtaataatgataccttctcttttacaaaaaagagaagagggggcatgttgggaaaaagctgagtgttgggagaagctgaggcagggcttgcatgtctgacataatgtaaaaaagtgttggaacatgtccggggtccaggatctaaaaccccttgtggcctttggaacaccaagctttgtgctaaagggtggaaggctcccctgatgcatcatcatctaagcccagggcataaaatccctcgtggcttggataaaatccagggctcgtggctctggaatagttctagacttgctggctccttgctccttgctctcccaggatccattatatctggatt

SEQ ID NO: 287400 - DNA, 542 bp, Homo sapiens
cttctgcagcccctgggattaagggtcctcttgtaaaagggaaaggggaaatatgtgagaagtactcaaatcagagtgactccagtttgaataagggctaaggaaaatgaagctggatcaccaactggtaatgaagggctgcacagcctgcaatcaccttgcttagttaaaaggccaccttttatgctagtaataatattagctagtaataatgataccttctcttttacaaaaaagagaagagggggcatgttgggaaaaagctgagtgttgggagaagctgaggcagggcttgcatgtctgacataatgtaaaaaagtgttggaacatgtccggggtccaggatctaaaaccccttgtggcctttggaacaccaagctttgtgctaaagggtggaagkctcccctgatgcatcatcatctaagcccagggcataaaatccctcgtggcttggataaaatccagggctcgtggctctggaatagttctagacttgctggctccttgctccttgctctcccaggatccattatatctggatt

SEQ ID NO: 287401 - DNA, 600 bp, Homo sapiens
accaataaatagcgtgggctcccagagctcggggcctttgcagcctccatactctagcgatggccccctgatcccactttacctctcaaactgtctttttctcaatcctttgactccgccggacttcgtcacccccatgacctggtgttgggtctgatcaccccaataactcccaagaataattctccaggtcttttaaccttccacatctataggcaaagcaggctctagtggcaagataaacacctccagcaaagagataaagctgctggcagatagaagttgagtgacctgaatagaaagggtgcggccacaaagatatataggttgttggcagaatcatttatgataataagcactatctcatttgtcctcccagcagctctacaggtattctatattatttatacttgtcttggtaaagaaaacagatttagaaatcctaagcatattttccaaagtcacagagttgataagtggaaaagttgcgttattaaactcaggtgtgaatgattttaaagtctatgcatttaatgcactatrggagctgtcaaataatatattcggattcttcaattcagtgtggcagcagctgtagtt

SEQ ID NO: 287402 - DNA, 558 bp, Homo sapiens
aattcttttttttgtctgactatgttgcattgaaaaattggtctttgagctctgcgattcttttctcagcttgttctattctgttgttaatatttctgattgtattatgaaatttttgtagtgaatattttacctcaaaagttcaatttgagtctttcttaaaatgagtgttttgtctttcagctttsaataactgtacagaattgcttggcttacttagattgagtttcaactttctccttcatctcaatgggctttttgccatccagattctgaattacatgtctgtcattttcagacaattcagactagttaaaaaagcattgtttggggagctactgagctccgtcagaggtaaagggacgttctggctttttgagttgccagagtttttgtgctgattctttcttatctgggatggcttgtgtaccttagattgtggtataaattgagtatagtcagttggcttcatttctagaagttttcagagaccaaaggctctgttcagagtctttgttgttgaattcttgctcctggtttctcagaggggcaaattag

SEQ ID NO: 287403 - DNA, 1121 bp, Homo sapiens
acatgctcgtaaggcaggatccctaagaggggctgcaatgagagagccaatgatgtactgtgtacatgctcctaaggggaggccaggcaggatccctaagaggggctggtgggcaggcagtcctgcaggacagatgcccagtcccatggggaaacaggytagctttttccctatggttagctgggcccagagactctcagaatgagaggagaagtactggggtgtggacacttacggctgtgtttcactagagctgacctgcactcaaaggtccctggctctgtgcctgctgcagctccacctctgtctaatctcttgggaattccctctgccagctcatacatccatgggactatgaggccccctgcagctaggatcccagaggccctacagtgagagtgagcagtcccccaaacccttcactcaccccttctccaagtgctttctggagccaagaactggctgtaggattcaggcaccgattctaaattttatatgtgcatacagattttccagaagacctgaaacagtgaaaaagagcaaaattgwcattctgcctgacagtaccctgtagctatggcagtacagattttgcagcattaaaacctctgctataaagagcagctgagcatgtcatttcactaataattaatttttttccttcattttcagaatcttttaggttgaagaaacatttgctaataaattcatgacaccataggtagaaatatttttggatgtttagttatcatactgacatccttttacactttatctaaataactccatgtataatgtcttatgtctctaggagatctacgttttaaaaacataatttttctcagagtaagaaagtcaattcttgatttttataatttttttaagtagtactgattaccttctaaactattcactacttttaaagaawtaatttctgaattttctcctaacttcttccaatagtttaaatgtgagaactgtcaatatttaattaattcattcaccttataactttttcgtttactgttctcctgtgtcatctcacaatttataatgataatagaaataattacacacgttacaataattacacatattttaactttatatccatgtttttg

SEQ ID NO: 287404 - DNA, 596 bp, Homo sapiens
tataaatatataaataaagacatgtattaatgttctttacagttttatttacaatarcccaaagctagaaattactcagatgtccatcaaaaggtgaatggtaaattcaacttggtttgttcatacaattgtctactactcaacaatagaacggaaagacaatactgatacaaaaacacagatgaacctcaaaataatgatgcaatatgaaagaagtcacacctaaaagaatatatactatatattttcacttacataaattttaaaaaatgaaaaatattataatttatggtgacaaaatgcagattagtggtttcttgaggctgtaatggggaaacaactggatttcaaagtggaatgaggaatcttttgtagatgatgcaattgtagtgtatcttgattgtagtggtagtttcatgagtatatacaaatgtcaaaattcatcatgtcatgtaccttaagtggatgtaattccttatatgtaatttttataaaaaaacttgtttaactctcaatgaaattttttattttcaattcagccaaattatttttgtaataacaaagatattttggaagtgtctactttgaaatgataa

SEQ ID NO: 287405 - DNA, 579 bp, Homo sapiens
tgcatcatgggggtggtttcccccatgctgttcttgtggtagtgagggaattctcacaagatctgaaggttttaaaagtggcaatttatcctgtgcgctcttcctcctggcaccttatgaagaagttgcttgctcctccttcaccttttgcgatgattgtaagtttccttctctccagccatgtagttctgtgagtcaattaaaccacctttgytataaattatccagtcccaggtagtatctttagagcagtgtaaaaatgaactaatacagagaattggtacctggagtaaggtactgctatgaagacaaaccaaaaatatggaatcaattttggaactgtgtaacaggcagaggttggaacagtttggagggcttgtaagagcatagaaagatgtgggaaagtttggaacttcctagagttttgctaaatggttttcaacaaaatgctgatggtgatatggacaatgaagtctaggctgaggtggcctcagatggaaatgagggaccttattgggcactggagcgaaggtcactcttgctatgctttggcaaagagactgatggcattttgccact

SEQ ID NO: 287406 - DNA, 341 bp, Homo sapiens
atgaataggtatctgatctcttaaaccaccctgctttgaatggcttcaattgacaccaagrcaaatatggtagatttaaagattttattctagattcatttcaaattctatttgtaaaattatcttcagtataagattattattgtattattagtgtatgttgtatcacaacatagtaattgaattgttccactgtgtagcaatgggagatagattatgaaatggagaaaatgaaattaagaagtaggcatagaaagagttgaaaaggaaacagatcaggtttttggtttgaaggaagaacaaaccattgaagcttggttattatatcgttcacctgtttg

SEQ ID NO: 287407 - DNA, 608 bp, Homo sapiens
tatactccaggtcaaaaaaaaaaaattgcatgccaaaggccctcaagtaagtaaaacaaaacttggtttatttgagtatctgaaaaaagaaaaattttcctggggtatgctgaactggagaaagcatggcactaattaatgtatcctgttattatgcaattcccttctctccctctgtatgcaaatccmcacaatcgctgaagctgagtttaaattatttcactttcaatcagctgtctctgtcctctttggcccaacatgatcagtctatctttaaatttttctaacaatgtttctgtgttcttctcgttctgaagtgtttgcataaaaagcctcatatttttacttacctgtttgtcttaattatatctagttccccactcatgctgtcaccagaggattttgatcatttcctgcattttaatgtactatctttggcttatggcacatgtagttctttgcaaacactgggttttcaactaatactggccaaatttgtgaattgccattaataacacatcttagatatatacaatacacattggattattctatcaacaaatgtttgtgagcaccatctctgttaggcactatggtaggcatttggg

SEQ ID NO: 287408 - DNA, 549 bp, Homo sapiens
tctatttcttattcattgggcctatactggactcagccagcatccactgcagaggactaagaaatattccaaagaatggaataatgattgctaaagatttcatagtattatgacttggcatactgtttccttctcaatagctgcaaacactgagatagtttaacactgacctacagagaagcagagtgcagaatagaaggaagaagcaatcactgagttgctttctctttagggaaagctctcaaatgtcattccccacatgtcacagtggctggagtgtttttttcaagcttgccctttggggctgttctttgtgacctgagaataactactgttctgtgttcctggagctatttcccccyttaagagaactatgactcaaaggcttctgtaatctttctgtaccagaaacaaaggttttatctcagaaaggttaagatggcaggtagttagtactgtatttgcttaacctactcaactccagaaatgccacggaagatgtgtgagcctttaagtaaacctgagctttttccagtgtatgtgagatgc

SEQ ID NO: 287409 - DNA, 582 bp, Homo sapiens
ttccagaagaaagatattcaagagttatgtgctctatctattcatttataaatggacatttaggctactttcacatcttaactcttctgaataatgtcacagtaaacatggtgttgtacagctatctctacaagattctgattcaaatagtcagatggagtagtggttatgagaagctggagaaaggggaaaatgagttgttttcaatggtataaaattttattatgcaaagtgaataaattctagagttctgctatacaacataatgcctataggtaacagtactgtattgaaaacttaaaaatttgttaaaagggtagatttttatgttaattgtttttaccrtaaacaaacaaaaacaaaagggcatgaagaaacttttggagatgatgaatatgtttattaactttattgtggtgttagctttaggaatatatgcacatgcccaatctcataaaattatatacattaaatatatgtagttattgtatattaactatacatcaataaggctatttttggcctggtacagtggctcacacctgtaatcccagcactttgggaggtcaaggcggttgaatc

SEQ ID NO: 287410 - DNA, 467 bp, Homo sapiens
tgaaagtaatttacatctgcaatattcagactgaattaaatttcatgttcaatctacaccccccagaaatgttgaagttatgaaggcattatgaacttataataccaggcaaattccaggcagccctgtgacctcatttcaggtggaattcttaagttaatgaagctaagagtacttgctctctaccatgttgcaaataactagatccaagccctggactctactatggcttcatctgtagctctgccacttatcttcgaaaatcagcaagagataaaattccttttttaacayttaataagcagcaagcatacattcaaaagaactgtcttctatacattatcctggaaagtcttcatatcttttaaaagaaaagtgatttcacagatgcgcttgaataaataaaggaaattttcagttgcctgaaaacaacatctctttagtcaatgaaccagaaacaatgactg

SEQ ID NO: 287411 - DNA, 1093 bp, Homo sapiens
tctttctttttgccataatgagtctctccagtttgacacatcagatatgtaattttaaaatttcatatttactatatcaatttttttttagtgagacatggtctcgccctcccaggctggagtgcagtgggacaatcataactcactgmagcctcaaactcctgggctcaagtgatcctcccacctgagcctcccaaagtgctaggattacagatatgtgccactgtgcccagccctttatcaataattaatggaaagttacagagattctaatcaaataaaatattttttgttacacatcttgacaaggaagaaaacatatgaaagctaacaggagtattttaagacagtgtttcaaaaatcgaagctcacaaaccaactacatcagatttattcaaagtgtttctgaaaacaatagatatataacaataataggggttacctaaaacatatcacaaaagattctctgagttagggcctgagaattagcatttttaaaaactctcagctgagtcttaggcatttgagaactactgctgtaagagawtctttctttttgccataatgagtctctccagtttgacacatcagatatgtaattttaaaatttcatatttactatatcaatttttttttagtgagacatggtctcgccctcccaggctggagtgcagtgggacaatcataactcactgcagcctcaaactcctgggctcaagtgatcctcccacctgagcctcccaaagtgctaggattacagatatgtgccactgtgcccagccctwtatcaataattaatggaaagttacagagattctaatcaaataaaatattttttgttacacatcttgacaaggaagaaaacatatgaaagctaacaggagtattttaagacagtgtttcaaaaatcgaagctcacaaaccaactacatcagatttattcaaagtgtttctgaaaacaatagatatataacaataataggggttacctaaaacatatcacaaaagattctctgagttagggcctgagaattagcatttttaaaaactctcagctgagtcttaggcatttgagaactactgctgtaagaga

SEQ ID NO: 287412 - DNA, 621 bp, Homo sapiens
taggggttacctaaaacatatcacaaaagattctctgagttagggcctgagaattagcatttttaaaaactctcagctgagtcttargcatttgagaactactgctgtaagagatattttccagtagcttgtcaaacccaaagcaagtaaccatccatctttcctcattaaaagtcaatatgactttcctgtttttcttctcaagtgccagataattcaaaataaactgtccaatataattggttatctaaatcaccagtcccagcctttgtttattatattacattttctaaaatacatcaaaatctgttttctcaaagactcatagtttgcacgggtagtgcaattggctttacacagagttgtttaagtgctcagatccaagcctgactacctcttgaactggtatctgagtggagagatatattaacttaaggcctttgaatatgaattgaagaagacatatctaacaataaaatagctataaaattggaaataagttttctaaaattagattacccattacaggctctgaattttataattatttaattataaatgatcattattttaattgcatagtatcccaaaaatataatcaatgatttctgaaaacaacat

SEQ ID NO: 287413 - DNA, 1128 bp, Homo sapiens
tatctaaatcaccagtcccagcctttgtttattatattacattttctaaaatacatcaaaatctgttttctcaaagactcatagtttgcacgggtagtgcaattggctttacacagagttgtttaagtgctcagatccaagcctgactacctcttgaactggtatctgagtggagagatatattaacttaaggcctttgaatatgarttgaagaagacatatctaacaataaaatagctataaaattggaaataagttttctaaaattagattacccattacaggctctgaattttataattatttaattataaatgatcattattttaattgcatagtatcccaaaaatataatcaatgatttctgaaaacaacattaactgtccatatatatgagaacaaaaaattaagatatattaataaaatgtttaataacaatgacatagtggaggatacaagatgcatggaatagataactctttgacaaatattcttcatttcatatgaaccctgagcagttacaaagatcctcattccaaatacaatgtatcaaagaaaggwaatattcttcatttcatatgaaccctgagcagttacaaagatcctcattccaaatacaatgtatcaaagaaaggaaatacacggcattatttttaattatcttaaatttgtgttaagtcactattaataatcaacagtttacacacaaaaaacgatgactattttaatagagaatagaatggaagaataggaccaaagaaactgaatacatcttgctgagatttttattaattctggaggagaaaaaaattggaatttaaagccagagcttctctgcttaaattaattttaatttgtgtcatttcatwccccagtgtggcttcaatcattcccaacttattagattggtgcaaaagtaattgcagtttttgccataatcataataattctgatgtaggtggtttgtgagcttcactttctaaaacactgtcttataatactcctgttagctttcatattctttcttccttgtaaaaatgtgtaatataattctctttagagtcagatatatttctaaagttctgaattaatatcctctaaatattatattccataggtaaaaattgc

SEQ ID NO: 287414 - DNA, 575 bp, Homo sapiens
cagctctactttcaccaaattacaaactatatcaaatactatcacaagtgcattagactctatcaagcttggtactaaaattgtgcactcttccaaagtatcagagtggttataaarcagaaaaacttgctttaaatgggaagattaataaccaatttaggttgcaaacaagatataggcagaaaaggttctgtaaccacaatcaatttgacactctccaataatgacatattaggaaaaaggggccagatcttatgcagataaatgcaggtgcaccacacatgccaaaacccaacaggctgaaaagtcttaactatagtaatttagagctatgttaatatgaagaggaaagtgattggactggaacagtgacagccctaagatttttatatacaatgggcttaaaataatccagaatattgaagtggagtgtatataacaaatactctgtacttagatgatatgtttatatgagttggcttgttgggcaagggctaatagaattcagaagaattaaagcccttttcctagcaccatttgatacaaccacaaaactaaaactagtattagcagaa

SEQ ID NO: 287415 - DNA, 621 bp, Homo sapiens
tattgacagtaaatacagcaaagtctttctcagatagttttgagaatttgctgccagttccaatgggaatgtaaaaaaatgtgttactgctaatgttacttacatctatgatgtgtcacattaaattcgcaatagctaatgcgtttggttcccaaatgttcacataaaaagtaatggtttaaaaacatataagcaaaattgaaatgaaaagcctaataatttaaaaagtgatggtatcttgacagattattgcaaccagatcttacaaagtttatggaggcacccaggaattcaagagaaaagtatagttttcaacyaaaatgactcaagtcattgaatctttacagaccaggctacccatgctacactgacttcatgaaactaaaaccaacttttccgctgaagtaccttttcaataatagaaataaaagcacttaaaacagaaatttggtgagacagtgtttttcatccaaaacaaatgttccagttttatatttgtttcaattagcttttacttgtataccaaatagtcccaaaacttaatgacttaaaataacaatcatgtttatctcctataagtctgtgaattgactgagcagatcttctggtcctcaccaactt

SEQ ID NO: 287416 - DNA, 588 bp, Homo sapiens
aatccctacaatttccctacaatgaaatccctacaaaagtccccatggcattttttacagaaatagaaagaatagaaatagaaaaaaccatcctaaatgtatatgaaaccacaaaagaaatagaaaaaacaatcctaaaatatatatgaaaccacaaaagaccccaartagccaaagtaatcttgagaaagaagaataaagttggaggcatagcattccctgattttaaaatatatcaaaaagctactaatcaaaacagtatgttactatcttaaagacagacatacagacaaatagaacagaatatagaacccagaaataaactgcagaatacatggtgaactgatcttccacaaggtgacaagaatacacaataaggaaagaatagtctcaacaaacggtgttgggaaaactggatatacacatgcaaaacaatgaaaatggaacactgtcttacaacatacacaaaaatcaacttaaaatgaattaaacaaataaatataaaaactgagactgtaaaacttttagaagaaaacataggggaaaagctttacgacattggccttggtaatgatttaatggatatga

SEQ ID NO: 287417 - DNA, 588 bp, Homo sapiens
aatccctacaatttccctacaatgaaatccctacaaaagtccccatggcattttttacagaaatagaaagaatagaaatagaaaaaaccatcctaaatgtatatgaaaccacaaaagaaatagaaaaaacaatcctaaaatatatatgaaaccacaaaagaccccaagtagccaaagtaatcttgagaaagaagaataaagttggaggcatagcattccctgattttaaaatatatcaaaaagctactaatcaaaacagtatgttactatcttaaagacagacatacagacaaatagaacagaatatagaacccagaaataaactgcagaatacatggtgaactgatcttccacaaggtgacaagaatacacaataaggaaagaatagtctcaacaaacggtgttgggaaaactggatatacacatgcaaaacaatgaaaatggaacaytgtcttacaacatacacaaaaatcaacttaaaatgaattaaacaaataaatataaaaactgagactgtaaaacttttagaagaaaacataggggaaaagctttacgacattggccttggtaatgatttaatggatatga

SEQ ID NO: 287418 - DNA, 290 bp, Homo sapiens
ctttacgacattggccttggtaatgatttaatggatatgacatcaaaagcagagacaaaatcaaaaataactcagtgggactacatcaaactaaaaagtgtttacacagcaataaaaacaatcagtgaagtgaaaaggaaaactatrgaatgcaagaaaatatttgcaaaccatatatctgataaggtgggggtgataatgtctaaaatatatagtgcaggaaatatatagagaagtcctataatttatagcaaaacaaaatcaaacaacctcattaatatatgggtaaa

SEQ ID NO: 287419 - DNA, 638 bp, Homo sapiens
cataagggaagtaaagatgaagaagaataagatagtggaaagaaaacacactatttcaaaggagtttccaagcataaaaaaatgtgtcttcaactgctagaaactagcattaatgtttttaagaacaaaaattctcatatgatttctagagccttakaatttagggaaattacagcacaatgttctgttacaacataaaaatccctaatagctgaaaagaaagggatgctctttcttttaaaggtgaatttcttctaactttttatgttctattaaagagcctatagctacaaatgaggtgagggaaccataaattatagatgttgaaacactgaaagctgtgaacataaatgtttcaataaataccgagtggtatcaaattttgctgtgaaattccaaagtgaaatataattctttggtgtgaggaaaaaagtctctgagtgagcaacagttaaaggtggtcagcttggctttttatattttgaagagagagcaaaaccttaaagccgttgtgtgtcagtccagaaacagccaggcaacggctgtttcacgccaatgggttgtttgtcctattttccactttatgcctttcttcttgttccgtatatatacactatgtacctattacatatacagag

SEQ ID NO: 287420 - DNA, 587 bp, Homo sapiens
taaggggctacatcatagccttctgagccagacatctctgaatgcaaagctatttcagtggctgtttattactttctggaaaatttagccatagacagatgtatgaagagatattgaccaaactaaatggtttacgcttcatttagtttgaaataacacatttattcttctgagctccaatttttccgctctagggcatcaattttttgtttattggcagtctaattaagacaggttagatatgttgaattttctctgcaggcagatgagaatgattaaacaatgatttatttgtgtgttctgtatgtattaacagctacagtggtctggaaatcccattggcaatttctttttgcttctgttctgtatctttacctgtaaccagtgatagcttcaggggaaagaagagagagaacrtaggaagtgtcttctgtttgttggcagtattcttgtcctttggaaaaggcatggggtctttgggaagagtgtcaactgcttggaaaaggaaccaatggtaccatttgcatttattcagtatactttttctcacacatttctgggattactattttctccaggaaaaagca

SEQ ID NO: 287421 - DNA, 533 bp, Homo sapiens
ggtcttttatccctcaccccctcccacctttccccccgagttctcaaagtccattgtgtcattcttatgcctttccatcctcatagcttagttctcacttatgagtgagaacatgcgatgtttggttttccattcctgagttactttacttagaataatgagttactttacttagatggagtctccaactccatccaggttgctgtgaatgccattattttgttcttttttatggctgaatagtattctatggtatatatacaccacgttttctttattcactcattgattgatgggcatttggacttgttctgtatttttgcgtttgtgaattgtgctgctatcaatatgcctgtggatgtrtctttttcatgtaatgactttttttcctttgggtggagatacccaggacttgaattgctggatcaaatggtaattctacttttagttccttaaggaatctccacactgttttccatagtggttgtactagtttatattaccaccagcagtgtaaaagtgttccctttgtc

SEQ ID NO: 287422 - DNA, 548 bp, Homo sapiens
atctcagcttcactgaacaatggaacctgagggaggctgataacttgccatatgttattcattgtgccagaaagagaacaagaaaatgatataaggagcaaccctgtggtccagaaaggaagggggaagaagtaatggacaatgtcctggaaatgggtattttacagcgaatgctgcctatcacagttcagtgcatgtttatgacttttcaaggtgtcacctaaaaagtccaaagtgtcattgtcctgatttgatcatcacacaatgtatacatgaaytgaaacatcacactgcacctcataaatatgtagttattgtgttaattaaaaacaaaaaaattaaaggcatcattgtcttaattttacaagtaaagccattatctataattcttgccagtatgttataggaaccaacagaagaacactacagacttttgattgtaaatgctaatgaatgtattcttataacctttattaactcatccattcttaaaagctgcattgattctgaactgacagtttacttcacatttagccagggacatagga

SEQ ID NO: 287423 - DNA, 548 bp, Homo sapiens
tttctaatctcccacattttataggtatgcaatgttacattaagcaataggcaactgaaataataacaagctgtgagcagagaaatctaaatttactctcaattcctacattcccagtaaaattattgggcagatcttaaaccatcttacacttgaatttaatttgacccatctccataacattcagattctatctgtccaaacatcactgctgcataagacagaggtacaacattacacaactgaattcctgtttgtttgtttgttttgttttgagacaaggtctctatcactcaggctggagtgcagtggggcaatcacggctcactgcagccttgacatcccaggctcaaatgatcctcccacctctacctctcaagcagctgggactacaggcagktgccaccacacctggctaatttttgtttactttttatagagatggggtctctgtctgttgctcaggctggtctcaaactcctgtgctccagcaatcctcccaccttggcctcccaaagtgctgggatcacaggcatgagccactgccc

SEQ ID NO: 287424 - DNA, 415 bp, Homo sapiens
accttctgttgattaggaattgaccaacctgggagattacacagaggatctaggttgcttcctttgcatctagcagaagtcatccattttataaaagtttgaaaaaaacaattggaacccaatgtagctatagccctgcaagsacttaggtaaatcctggtggcatgaaaggagagaggcttcccagccactggtcagtgcaaatccattttatgtagcataggccctcaccaaaagcagaggggtatgcttaagcatgtgcacaaatgaaatcagtgcccattcttggatatcaaggaatcagtcccaagtcctcctgggacaacaaactcatgtttgcatagtgaaggttttgaaaattgtgtgcctaatccatctcttctaaagaacgccagggtcagctaaagaaaagaaa

SEQ ID NO: 287425 - DNA, 415 bp, Homo sapiens
accttctgttgattaggaattgaccaacctgggagattacacagaggatctaggttgcttcctttgcatctagcagaagtcatccattttataaaagtttgaaaaaaacaattggaacccaatgtagctatagccctgcaagcacttaggtaaatcctggtggcatgaaaggagagaggcttcccagccactggtcagtgcaaatccattttatgtagcataggccctcaccaaaagcagaggggtatgcttaagcatgtgcacaaatgaaatcagtgcccattcttggatatcaaggaatcagtcccaagtcctcctgggacaacaaactcatgtttgcatagtgaaggttttgaaaattgtgtgcctaatccatctcttctaaagaacsccagggtcagctaaagaaaagaaa

SEQ ID NO: 287426 - DNA, 566 bp, Homo sapiens
atagtatatgccatgataggagaaaaaaacaatttggaaccaatactgacagtgatattaattagcagaaaaaaatacttaaaaagttataactgcatttcatttgtgcaaaaagttaagtggagacatggaagatgttttttaaaagatagaaattcaatttctagagatgtcaacaacaatgtctgagatgaaaagtacactgaatggattttttttctttttttttttttgttgttgttttactttaagttctgggatacatgtgcagaatgtgcaggtttgttacataggtatacatgtgccatggtggtttgctgcatctatcaaccagtcatctargttttaagtcctgcatgtattagttatttggcctaatgttctccctccccttgcctcacaccccctgacaggccccagtgtatgatgttcccctccctgtgtccaagtgttctcattgttcaactcccacttatgagtgagaacatgcggtgtttggttttctgttcctgtgttagtttgctgagaatgatggcttccagcttcatccatgtccctgcaaagga

SEQ ID NO: 287427 - DNA, 641 bp, Homo sapiens
aaacgatccaaaatgaaacaggaaaaaatgaatcaaataaataaagcacaacatcagtaaactgcaggacaacttcaaggagcataaaggaagtgtcactagagtctctgtaaagagaggggacagaaaaaaaatatttaaagaaacaatggttgaaatttttctaaattggatggaaaaaaaaaatcttgggccttgaagctgcaaatataccatcctgccctaaaagctcacagtctaagagaaacagacattcacaacaaataagcaagctggctcaggaaaatggcagataggagtcaggattcacttgcagctcacactcagacagagaagcatgtggagactaacatcatgaacttttgctccaagaactactgcaggaacataccaggaaagctaagataatccacagaccctttgaaagactcagtttgccactgcagggtccatgagacagctgaaaaactgtaagtgccctaggtgtgaaggggaaacacgtgcycccaaacacacattctcactggggaacctgaaggttcagatcacaagagaaagatctgaccatacttagagcagagacaaattcagattgctgagcaaaatacaagggtagaggaagcagtgggaaaagccctgtg

SEQ ID NO: 287428 - DNA, 607 bp, Homo sapiens
aattggggaaagaccacaggaagaaggaaacttccagctgaactctgtaacaatttcacccaaatgtgaagcttgctcacagtaactggaggagggagtgaacagggtgtgcaaaaagcacataagctgcagcaggcagggaggtgcaaaacctgaaagccctgcttgccttctcagcaaggaggctggtatcccrggacaagttctcagccccactcactggctgctgttggggaggcatggttggactgagactggcctgttgagctggataggaggtgggtgaggcctgccactgcttgctttcccccacttcccaggcaacctgtatgatgcagcagaggcagccaacatccccctgggaacacaaatgcatcagcctgagagtcacacccccactccccaaagcagctgtagcaagccccacccaaaaagagtctgagctcaaatatgcctaacccttcccccaactgatggtctttcactacccaacctggtagctgaaaacaaaaggatataatctcttgggagctctatgttgcttcccaccacctgagaaatcagaataactatccaggcaccccttgggcaaggttgtaactcccca

SEQ ID NO: 287429 - DNA, 573 bp, Homo sapiens
acagaaaaaatctccagagaaatagatagcataaataaaaataatcacaacttctgcaaatgaaggacacacttagataaatgcaaaacacactagaaagggggttttgattcaataaaagaaacaagaagaagaaagaacttcagaactcaaagacaaggcttttgaattaacccaatccaacaaagacaaagaagaaaaagcattaaaaaaatgaacaaagcctccaagaggtttgggattatgttaaataaccaaaccaaagaatagttagtgttctaaggaagaggagaaatataaaagtttgaaaaacatattagacagaataattgaggaaaacttccctggcatggccagagatgtagacattcaaatacaagaagctcaaagaacacctgggaaatttattgcaaaaacatcatcrcctaggcacatagtcgtcaggttatctaaagtcaagatgaaggaaagaattttaagagctgtgaggcaaaagcatcaggtaacctacaaagaaaaacctatcagattaacagatttgtcagcagaaactttacaagctagaaacaaaac

SEQ ID NO: 287430 - DNA, 493 bp, Homo sapiens
tgtgaggacataaagagtctcatatccttcaaatagaaatgtaaatcagtaaaatcattttggagaacaatctggcaatttctaataaagttgacaatggaaatactctatggctcagcagttctaatcattgatacataccttggagaaactcctatacatgtgtcccagacaagagtcttttccaaacaagtaaataatgttccctgcagccttatttgtttgtacaraattctggaaacattctaaatattcatcagtaagggaacagatgaataagcaattcataaaaatgaataccatatatccaatacaacaaataaactaaatgctgaggccagctcggtcatggagaccctaacccagcggtgctagaggaattaaagacacacacatagaaatacagagtgtggagtgggaaatcagggggctgacagccttcagaactcagagcaacaaacagagttttacctacatgtttattgatagcaag

SEQ ID NO: 287431 - DNA, 493 bp, Homo sapiens
tgtgaggacataaagagtctcatatccttcaaatagaaatgtaaatcagtaaaatcattttggagaacaatctggcaatttctaataaagttgacaatggaaatactctatggctcagcagttctaatcattgatacataccttggagaaactcctatacatgtgtcccagacaagagtcttttccaaacaagtaaataatgttccctgcagccttatttgtttgtacaaaattctggaaacattctaaatattcatcagtaagggaacagatgaataagcaattcataaaaatgaataccatatatccaatacaacaaataaactaaatgctgaggccagctcggtcatggagaccctaacccagcggtgctagaggaattaaagacacacacatagaaatacagagtgtggagtgggaaatcagggggctgacrgccttcagaactcagagcaacaaacagagttttacctacatgtttattgatagcaag

SEQ ID NO: 287432 - DNA, 600 bp, Homo sapiens
cgcatcactggaaaacactgcaaaaggtgacgtttaacacggacacaagactctcctgatggcatgtagcccagacaaagtgggaaaatgtatctacacatacatgtacataagctartctcccagatgagggaacatgtgtgacatccatttgccagagagaattaggttccaatccttgaggattaactcctcctgtaaaagatgaggaatgcaccatttggcaagttgggcatcgctagataatagctttagcttccttctaggtaatgctgtatctgcttttgagaccagaggcattaacatgggttaaattgtgaaagtgtctggcattagacattgcagtagcaactaggccatcagccatttgattccctgcactcaaaggtcctgggagaggtgtatgagccctaatatgagtaatgtaaaaagggtgcactctactcctaactgttgcttgcaattggataaataaaaacatcagttattcatctgtatgaaattgtaactgagcattttcaactaactgtgtagaatgaaccatgtatgaagaatcagaaatcacattaataggcatatcaaaaacagtcaatacctcaa

SEQ ID NO: 287433 - DNA, 556 bp, Homo sapiens
agatgtttggattatattagtgtakgcagttgtgaatactcatggaaatttactcttaacatatgtacctttcactttaggtaaatcatgcatacattgttaaaaaatgttgtcactgagtattatttgctagactatgttaagtgcagtaaaactataaatttctgaaaagagagataggaattgtttaatagattcatcctcctccacaaagcatattagaatattgactttttaaagataaactcttaaaagaataataattctttcaaaaataaacatggaagcaacaattcactttaacgagattgaaatgttgttattgagtacagataagtaatcatcttgccaaaatgcaaagtttcatatttctgtttcagtgtccctggaggccctcctcattttaaatgtttaattgaggtcataaggaaaataacatctttcaatgtaatttgcagaggtgttccaataaaaaccacaaactctctcaacatcagtaaacttaaaggctaatttctgatttctcatcaatagcttatgtatcaacaatgctgcc

SEQ ID NO: 287434 - DNA, 556 bp, Homo sapiens
agatgtttggattatattagtgtaggcagttgtgaatactcatggaamtttactcttaacatatgtacctttcactttaggtaaatcatgcatacattgttaaaaaatgttgtcactgagtattatttgctagactatgttaagtgcagtaaaactataaatttctgaaaagagagataggaattgtttaatagattcatcctcctccacaaagcatattagaatattgactttttaaagataaactcttaaaagaataataattctttcaaaaataaacatggaagcaacaattcactttaacgagattgaaatgttgttattgagtacagataagtaatcatcttgccaaaatgcaaagtttcatatttctgtttcagtgtccctggaggccctcctcattttaaatgtttaattgaggtcataaggaaaataacatctttcaatgtaatttgcagaggtgttccaataaaaaccacaaactctctcaacatcagtaaacttaaaggctaatttctgatttctcatcaatagcttatgtatcaacaatgctgcc

SEQ ID NO: 287435 - DNA, 606 bp, Homo sapiens
agttgtccattgctgcgttgcaactcactacaaatttagaagcttaaaacaacacaaatgtgttaatatttcacaatttctgtgtcagtaatctggcatagcatggttgctctgattatggtttcacaagtttgaaatcaaggtgtcagccagagctgatatctcatctgagacttcattgtcttaaagctcattcaggtcatggcagaattcagttccttgaggttatagaactaatgtcactattttcttgtatattgactcyaggcggttctgaactcctaaagccttcctcttgttgctttgaatcactgattttctctctgatgtgtagacccagatttaaaaggctcatgtgattaagtcagctcacccagataatcttcttttcttaaaaccgactgtgccatataacataatctaatcatcagagtgaaatctcattatattcactggtcttgtccagtttaaaagaaaagggattatacagggcatgaacaccaggggtgggaaatttttagtacatcttcaaattttcttaccgtaggtgttcaatccaatttttactttagttttatatgtctggacaactcccaggaaattgca

SEQ ID NO: 287436 - DNA, 606 bp, Homo sapiens
agttgtccattgctgcgttgcaactcactacaaatttagaagcttaaaacaacacaaatgtgttaatatttcacaatttctgtgtcagtaatctggcatagcatggttgctctgattatggtttcacaagtttgaaatcaaggtgtcagccagagctgatatctcatctgagacttcattgtcttaaagctcattcaggtcatggcagaattcagttccttgaggttatagaactaatgtcactattttcttgtatattgactctaggcggttctgaactcctaaagccttcctcttgttgctttgaatcactgattttctctctgatgtgtagacccagatttaaaaggctcatgtgattaagtcagctcacccagataatcttcttttcttaaaaccgactgtgccatataacataatctaatcatcagagtgaaatctcattatattcactggtcttgtccagtttaaaagaaaagggattatacagggcatgaacaccaggggtgggaaatttttagtacatcttcaaattttcttaccrtaggtgttcaatccaatttttactttagttttatatgtctggacaactcccaggaaattgca

SEQ ID NO: 287437 - DNA, 580 bp, Homo sapiens
tgcagaaaatggtcatctgggtccgagattttccaacactcaaactagaaacagaaggcattccaggcaggcccatttctctctctcaggcaaagtgggaactgtacataaaacaccatgttagccctggcatatttagcaagggaaattgattgggagcaccactaacaataagtagtcasagtgaatactctctttccttactagtcctgtgaattccctactggacctagagatgctggagaagctgatgggatcacaggggaggagagagaaacctccagggagatgtagtgaattattatagttttatgttgcctcaggatccattttgaatataggtttaattttctcatgccaaaagcaggacttagtcacccttgacagtttccaggtctctgccttctcccagttcctcaatattgacaatccagatatctaccttatacaaccacatcctggtgatcagtttcctatgagacagctagatcaaacttacttgatttgtctcactcacttccatatcctgtgtggactgtgcagatgtgcctcagggatcacctctcagtcacagtgtgtc

SEQ ID NO: 287438 - DNA, 580 bp, Homo sapiens
tgcagaaaatggtcatctgggtccgagattttccaacactcaaactagaaacagaaggcattccaggcaggcccatttctctctctcaggcaaagtgggaactgtacataaaacaccatgttagccctggcatatttagcaagggaaattgattgggagcaccactaacaataagtagtcacagtgaatactctctttccttactagtcctgtgaattccctactggacctagagatgctggagaagctgatgggatcacmggggaggagagagaaacctccagggagatgtagtgaattattatagttttatgttgcctcaggatccattttgaatataggtttaattttctcatgccaaaagcaggacttagtcacccttgacagtttccaggtctctgccttctcccagttcctcaatattgacaatccagatatctaccttatacaaccacatcctggtgatcagtttcctatgagacagctagatcaaacttacttgatttgtctcactcacttccatatcctgtgtggactgtgcagatgtgcctcagggatcacctctcagtcacagtgtgtc

SEQ ID NO: 287439 - DNA, 535 bp, Homo sapiens
agcctatgctgagggttgaactctaggaacatgcagcaccccagggtcccaccagccctttgcagttgtcacagtctaaaataattctgggaaatatttgtggaagatatagtgatgcaaagacataagggctgagaattcctgggcaggatagaggcacacaattgatgcacaaccagtatggtgccctctacctcagctcaggtgttgggggaaagtgagtgaamttatgccagctggccacccagcattctgccctcaagaagttcccaaattgccacccacaacaatacttgggctagcaaagaaagaggtgctatcaaatagtttggcagtcagcagtctcctgaaggagttaggagagcaaaatacacccccacctgccctttctactggactctgagttccacaggggtcaatcactgctaaactcttgcttccttctttttctgcaccccagattcttcccatgcattctcggataggttctggcactgttccttcagtatttcactcagaccatgattattcactt

SEQ ID NO: 287440 - DNA, 612 bp, Homo sapiens
tttaatcactagccactgtttgtgtaagagtggtaaaacaaaatatatatttatatttgctttgatataaaggcactctaggaaaatacctaagacattagcaayaatagtatctatagttgagcatggaggggaatctaggtaactaagcaaattaagtttatggtagaagagagatttttattgttaagtggttttttgtttgtttgtttttgtttttttaagatggagtctcactctgttgcccaggctggagtccagtggcaccatctcagctcaccacaacctccgcctcccaggttcaagcaattctcctgcctcggcctcccgagtagctgcgataacaggtgcctgccatcacgcccagctaatttttgtatttttagtagagacggtgtttcaccatgtttgccaggctggtctcaaactcctgaccttgtgatccgcctgctttggcctcccaaagtgctgggattacaggagtgagccactgtgcgaggtctattgttaagtgtttttatatttactccatgggaacatcttacctattaaaataatctatattttatatatatagtgaatggttacttcaaatgagagtcatgaattggc

SEQ ID NO: 287441 - DNA, 612 bp, Homo sapiens
tttaatcactagccactgtttgtgtaagagtggtaaaacaaaatatatatttatatttgctttgatataaaggcactctaggaaaatacctaagacattagcaataatagtatctatagttgagcatggaggggaatctaggtaactaagcaaattaagtttatggtagaagagagatttttattgttaagtggttttttgtttgtttgtttttgtttttttaagatggagtctcactctgttgcccaggctggagtccagtggcaccatctcagctcaccacaacctccgcctcccaggttcaagcaattctcctgcctcggcctcccgagtagctgcgrtaacaggtgcctgccatcacgcccagctaatttttgtatttttagtagagacggtgtttcaccatgtttgccaggctggtctcaaactcctgaccttgtgatccgcctgctttggcctcccaaagtgctgggattacaggagtgagccactgtgcgaggtctattgttaagtgtttttatatttactccatgggaacatcttacctattaaaataatctatattttatatatatagtgaatggttacttcaaatgagagtcatgaattggc

SEQ ID NO: 287442 - DNA, 548 bp, Homo sapiens
tgagaatacataaagtagtgatgagagaaaaatgaatttacctgtcaggagcctgtgtattgataaaattcagtattttttattyatatgtaatttttcataatttatgttgctctctttgttctatcagctatttttgttttttctctattttatttcattggcctaatgaattaggtaatattgcgggctggtgataactcattgattcctcatctacccttgggtgtgttcaacatgcagtaacattcattctcccccataatgagttttaaaaggcagtgattctggaataatttcatttacatcctgaaaatgcaaccgagggtatgtaacaataagagttctaataagatgagaagtttagtgtgctgttcacatttgccccctttgctacttaaatccagaattcttcagaccagtgaatcagaacaaggaaacaaactgagaagtaaacagatgcctgtcagaactgtcatgttgttttcatgagtatgatcttgttagaaagtttgaatgaaatacacagaaaaaaatgataaatctga

SEQ ID NO: 287443 - DNA, 621 bp, Homo sapiens
taatcaggggaaatgtacacccccttctgcctacttctgactatttctgctgccaaatgctaaaagatccatattcttaaagaaagttgaaaaactctggcatttatctctataaacttccattcataaataattctagggacaaaatgaaactgaaaaatgatgacaatagcaatatgctggttatgtgttaaatattcactcaacacgtatttatggaaaatgtaccccgtgccagctatggagctcaaaagctgacttccttttagtcctcatagatttaacagtctacagagcacagagctattgacaaataataattaatctggagattgagtgagggcttctctgaggaagaagtagcattaaacagaatgcaagatgaggagtcaagctaaaaaaatatgtcctgcagagaaaagaatgtgtgtgaattgtctagctggaagaaaataggtgaggctgtgcaataggaaaaggggctagggatamccctaagtcctaatagcagtaatattgccacaaataatttagattaagcctttattcatttctgtttggcatggtagtattgatatccaattgtctaaagactttgaaggcttctttacttgttctgca

SEQ ID NO: 287444 - DNA, 514 bp, Homo sapiens
tgtgtgaattgtctagctggaagaaaataggtgaggctgtgcaataggaaaaggggctagggatacccctaagtcctaatagcagtaatattgccacaaataatttagattaagcctttattcatttctgtttggcatggtagtattgatatccaattgtctaaagactttgaaggcttctttacttgttctgcaaatttttcttaaagtaatgaagattcttacatgacattactgtaactattgatgcctcacaagattacactgaaatttatttgtgaaaagtttttttttaatatctcaatttaatgagtctgaaagctgagattctatacttatttcagtgttattacaacttgaagaaagtactgatactcttatagatatgaactttgaacttcaaaatatatattatttaaatgtctaataaaaagacataatttcttacagtactctatattaagyaatgcctatgttctcagaatgcttttctacaaaatcagtgtttctgtag

SEQ ID NO: 287445 - DNA, 628 bp, Homo sapiens
acaaattcagaaatgaaaaaaaggagacattacagctaataccacaaaaatactaaagctcatcaagactattatgaacaactgtatgctaacaaactgggaaatcaagagaaaatcagtaaattcctggaaacatacaacctcccaagactgaatcagagagaaatagaaaacctgaatagatyaattgcaagtagtgagattgaatcagtagcaaaaagtcttccaaaaaggaaaagtccatgactggggggaatcacagccaaaatctattaaacatatgaggaagagcttataccaatgctcctgaagctgttccaaaaaaattaaagaggagggaactctccctaactcattttacaagactggctttaacctgatgccaaaaccaaacaaaaacaaaataaaaatgctatgggccaatatctctgaagaatgtagaaacaaaaattttaaacaaaatactagcaaaccgaattcaacagaacattaaaaagataatacaccatgacgaagtggaatttatatcaggagtgcaagggtaactcaacatatacaaattaataaacatcatatatcacatgaatgaaagacaaaagccatacgatcatattaaaagatgaagaaa

SEQ ID NO: 287446 - DNA, 525 bp, Homo sapiens
aagggtaactcaacatatacaaattaataaacatcatatatcacatgaatgaaagacaaaagccatacgatcatattaaaagatgaagaaaaacatttggtaagattcaatcttcctttctgattaaaaaaactcccaagaaactagaaaaagaaggaatatatctcaaaataataaaagtcatatataacaaacccaatgctaacatcatacggaatgagaaaaagcttaaagcattctctctaagatatggaacaagactaggatggctatcttcaccactcttattcaacatagcactggaagtcctggctagagcagtcaatgcaagagaaaataaattaatgaaatgtatcaaattaaaaaagagaaaggcatattatccttctttgctgatattattttatatgtagataaacctaagaaataaaaattyttagatttgataaataaattctacaaagttgcaagacacaaaaccaacatacaaaaatcagtagtatttctatgcaccaataatgaagt

SEQ ID NO: 287447 - DNA, 385 bp, Homo sapiens
tatattttcagaccatggaattacaccagaaaccaataccaagaggaactttggaaactctacaaatgcatggaaagtaaacaatatgctccttaatgatcatatggttttgctgtccccactcccaagtctcatcttgaattgtaatagccataatccccacgtgtggtggaaaggactcagtgggagataattaaaccatgggactggtttccctcatgctattcttgtgatagtgagtaagttctcatgaaatctgatggttttacaagcggcttcctgctttactcagctctcattcttctctctcctgccaccatgtgaagmaagacatgtttgcttccccttctgccatgattgtaaatccccttagacctccacagcc

SEQ ID NO: 287448 - DNA, 593 bp, Homo sapiens
ttcaagcctcacgtttatctaaaagtaaaatcaagcttttagatctaaggagccctacctaaatgatgttgtaggctgaactcccctgtgcccagactcccccaaacctatctaagccagatcaagtgctgcaaggactaaactctatccttgtgccctcaagcatttgttttattcttcagtctaaggaactttcagaataaatctgggtctttgttaaggagcaccttgatctgtatcagacatttagttatttgtatattatttattttcatggtgagttttactatccaactacagtatttctttgttctagtaagtccattctttcaaaatgtctttatgttgtgtagcagattgtgttttccaaagatagccacaattctgtaatgtgaccttgtcgctctccctccaccccataaagagctggagaatatttctccactatcttgaatcckggaaggccatgtgactgctctgacaatagaataagcagaagtggtgctgtgcctgtttctgctccctacctcttggaagccatctattctgtaagaattacggcttctgttagagccccacattgtgaaaaaaaa

SEQ ID NO: 287449 - DNA, 584 bp, Homo sapiens
catgtccacatttcctgcatgttaagcctctggtgctctttctcaggaggttctgccatggatatgtgcgtagtcaccctgagatgagatggtttttgtagagctttctttgtgtctttctctgatttctcttcagattatctgccttatttggtattattctcagtccagtctcagctaatttgtgactgattgctctcttaatttccaaagtggcctcggacacaaattacatcttagtctgatccaatgacatttagatccctttgcagagataggtttagaagccagtctttgaggtctattctgacccctggagtggtctatttagctatcttttttttttcttgaactctaataaactggttggcttatgatttagttgctccttctcaatgatccaccagcctcctcttaattactgtttcaatcactcccttaggttgaaattttctacactctgtttyaaataaagtttttaaggggcactttggagctgtctatttttatgaattaccacatcccctgattgtaatctttatgctagtgctccagagttgcagggggtggacagcaggctgtta

SEQ ID NO: 287450 - DNA, 532 bp, Homo sapiens
tctaatattaactaagagtaacataatagtaaacaataataaagatttatagcaatctaatatggaagtactaaatgccttttaactatcacctttctctagtgtatttttctgatgatttattctgatgatgttaaagttgaactgaaagtaaaattcttacttatgttgtgcagtgtttaaaaatgtgattttcaaaaactaatgggggccagtcacagtcactcactcgtgtaatstcagccctttgggaggctgaggcaggaggattgcttgggcccaggagtttgagatcagcctgagccacataataagatcctatctttataaaaacaaaataaagtgagctgggcatgatggcatatgcctgtagtctcaactacttaggaagctgagtcaggaggattgtttgagcctaaaaatttgaggctatggagagctatgatggggccactgcactgcagcctgggcaacagacagagattctgtctccaaaataaaaacaacaacaacaaaaacaaatgggtatgcc

SEQ ID NO: 287451 - DNA, 556 bp, Homo sapiens
gtctggctgttttcaagtaaaatattctaaagttgtttataaaatacgctttcagacttttcaagacagcgcatttcttatcaataactttttggggagcggggagatggcaggtgaaaatgaaaatgaaggctatataagraatatgaaacaacacaaggaaaatagtagatataaaaagttctaagtatctgttgataaatgattgtatgatagcttccccattagtgaacaagattaagaggtactagccacttaaatttaacctaaaatcagatctgtttaaaagaaagatggttagaccatacttacacaggtataaggttagaggagtaaattatttgacagctaaaaccattcctgcacacttctacaaaatatcccagatttctcaagtattcatcacctcatgggtagatgagaattgtgcattcttctgcagcactgtgataggattcacacaattggacctggattccagctgtaagccaggaaggtcaaatttaatttcaagaattcagaataaaaccaatgtccagcctgtgtttaataaatg

SEQ ID NO: 287452 - DNA, 584 bp, Homo sapiens
acttgaagcagacagagaaaatgcattttaggtcaatatgtccatttggtaaacatttttctgaaggaaaatgagaagtcaactatatatttctaattacctttatttaaggtagatattctggtgagaatttacaatactatttttatttgttttaattacaaaggccttttaacgttcaatttatggtaatattgtgatttaatcttttaaaaatttgaaagaatctttactgacagattctagtgtaaggaagcaaaacactgcttcaacaaaagcagtattctcttgagaattctcttgtttagggaacacactttattagacactgtggttacacaaaggtacgatcttactttcctttctgaaaaggaaagtttgggccaaattagggaaatgagtctgtataatatgtaaaagtttttcarcttcctaggcaaaaattataatgccaaatgaattttcttttctgatggggtttccacatatgaggacgacttctgtgtaagaagtcaggtaaggaaaaaagtagctaataaggacacttttgtggaaagctagggttcctcattataaagaaatga

SEQ ID NO: 287453 - DNA, 580 bp, Homo sapiens
acataatttaaggcaagtcattacactccttggcacctctccttaaaatgaagaatggtacacatgcctagttaaatgaatgatttatttgaaatcactgtatacagtctaaagtaatgaatagattttgattacaatattgacaaatttatataatgaatatgacttggggaccctgtyccaactgaatatgaaaataaatatttttgtactctgtgaaatttcatggcgaagcctatagagaaaaattttaaagaaggaataaatattacagaacatgaagacctacatggctttagagtgtacccccgccccacccaccccatcactggatatactctggcatgctcataaacgagaaagaaaaaaactgatttttgaatacttaagaatgttggcaaggtataagagatgtattggaaataaaatcttgtataaagactttaagatgaaaatgcctctattttaagtagttaaaaatgtcaggacatgtgaaggacaagaatagactgaatagattaacatgttaacagctttgtggagtatgaaaaagtgtctgaaatgtattgattggtggcac

SEQ ID NO: 287454 - DNA, 1122 bp, Homo sapiens
acataatttaaggcaagtcattacactccttggcacctctccttaaaatgaagaatggtacacatgcctagttaaatgaatgatttatttgaaatcactgtatacagtctaaagtaatgaatagattttgattacaatattgacaaatttatataatgaatatgacttggggaccctgttccaactgaatatgaaaataaatatttttgtactctgtgaaatttcatggcgaagcctatagagaaaaattttaaagaaggaataaatattacagaacrtgaagacctacatggctttagagtgtacccccgccccacccaccccatcactggatatactctggcatgctcataaacgagaaagaaaaaaactgatttttgaatacttaagaatgttggcaaggtataagagatgtattggaaataaaatcttgtataaagactttaagatgaaaatgcctctattttaagtagttaaaaatgtcaggacatgtgaaggacaagaatagactgaatagattaacatgttaacagctttgtggagtatgaaaaagtgtctgaaatgtattgattggtggcacwcaacaaaatctttagccaaaaatgtgaaagttgttcagcttttttaactctaaagctttgtgtaatgttccacaatgcttcacttcatatgataataccccacatcattatgaattcaaacagagaataagaaggtttatgaaaagaaaagaagaataacaatttaagtawaattgttccctatttaaaggagattcaagaaaatcatctttaaataaacatttgactatttaattgtgcatttccctaatccttgttttatttggaataaagcttacacatgataaatctctaattgctaaatatattgagcaaaaatggttgggaaaatatttgataatttgattcattgtttattacaattctgtgctttaaaagaggattctaaaatcatcatatttgctctctaactatactaggtgacctacagatcatttcaaagtgatactttttataattcaatatattaaaaaagaaaacttcactgcaccttagaactggttaatatgcagtcctgaaatattatggacaaaaatacaca

SEQ ID NO: 287455 - DNA, 541 bp, Homo sapiens
caacaaaatctttagccaaaaatgtgaaagttgttcagcttttttaactctaaagctttgtgtaatgttccacaatgcttcacttcatatgataataccccacatcattatgaattcaaacagagaataagaaggtttatgaaaagaaaagaagaataacaatttaagtataattgttccctatttaaaggagattcaagaaaatcatctttaaataaacatttgactatttaattgtgcatttccctaatccttgttttatttggaataaagcttacacatgataaatctctaattgctaaatatattgagcaaaaatggttgggaaaatatttgataatttgattcattgtttattacaattctgtgctttaaaaraggattctaaaatcatcatatttgctctctaactatactaggtgacctacagatcatttcaaagtgatactttttataattcaatatattaaaaaagaaaacttcactgcaccttagaactggttaatatgcagtcctgaaatattatggacaaaaatacaca

SEQ ID NO: 287456 - DNA, 627 bp, Homo sapiens
tatgaattcaaacagagaataagaaggtttatgaaaagaaaagaagaataacaatttaagtataattgttccctatttaaaggagattcaagaaaatcatctttaaataaacatttgactatttaattgtgcatttccctaatccttgttttatttggaataaagcttacacatgataaatctctaattgctaaatatattgagcaaaaatggttgggaaaatatttgataatttgattcattgtttattacaattctgtgctttaaaagaggattctaaaatcatcatatttgctctctaactatactaggtgacctacagatcatttcaaagtgatactttttataattcaatatattaaaaaagaaaacttcactgcaccttagaactggttaatatgcagtcctgaaatattatggacaaaaatrcacacccaattatatctttatttgtgggtctcaaagaacccaaacatatatagtgttttgattctcccagtttttaagattttgatgtttagaagtatatcttaagaaatatactttgctttcaaatcattatctaaaatatctacatgttcagtgtcatttctttaaaatttcccatttatttttagaaattttcca

SEQ ID NO: 287457 - DNA, 627 bp, Homo sapiens
tatgaattcaaacagagaataagaaggtttatgaaaagaaaagaagaataacaatttaagtataattgttccctatttaaaggagattcaagaaaatcatctttaaataaacatttgactatttaattgtgcatttccctaatccttgttttatttggaataaagcttacacatgataaatctctaattgctaaatatattgagcaaaaatggttgggaaaatatttgataatttgattcattgtttattacaattctgtgctttaaaagaggattctaaaatcatcatatttgctctctaactatactaggtgacctacagatcatttcaaagtgatactttttataattcaatatattaaaaaagaaaacttcactgcaccttagaactggttaatatgcagtcctgaaatattatggacaaaaatacacacccaattatatctttatttgtgggtctcaaagaacccaaacatatatagtgttttgattctcccagtttttaagattttgatgtttagaagtatatcttaagaaatatactttgctttcaaatcattatctaaaatatctacatgttcagtgtcatttmtttaaaatttcccatttatttttagaaattttcca

SEQ ID NO: 287458 - DNA, 565 bp, Homo sapiens
aacatgaccttccgacttaacattttttttggtgggaagactagcttaatatttcaaaataagcaaggaaattaatttatgaaaaaagaataaatgagaactagaaaaaaaatttttaaattatgtcagtaaggaacttctgaactctctcagagttgagaaatgatttagaaataaatttcaaaagtgaagacaaaactaaatagaaaatgaaaattaatacatattctaaataatatggtaaaagaaataggcagtagaaaatagaaaaaatgaaattaaaatcaagcaaaaataaagaaagacgtaaatgagggaggaattgaaagaaaaaaagatagggaaagtagttctaatacatgtattaaaagacaaaatgaaaacaaaagcgagagctaagaataaatattaaaaactgcaattcaataaatttttttccgaaataagataagaatyatgtcttcctattgaaaaggaataccatgcctctgaaaaacttttcccaggcatccaaagccaacacatattatggtaaaatgatttgacttaagcttcaaatgatttc

SEQ ID NO: 287459 - DNA, 392 bp, Homo sapiens
gtgaataaatatgtactttataataagtggtattgggataatggcatagttatatgaagaaaacagaattattttcttactgcatatacaaatattagaagaaacatgtatggattcatctataaatctaaaagtaggtaaaatagtcttacctgtgamtcacaatatagaagcaataaaagagttaattttagttaggtaacttgtcaaaaatatctatgacaaataaatattatgatcaacaatgacaaatgacaaaatagtgaaacatatttgtaacaaaaatgtttaaagtccatcaagaatcattaaataggattttataatacagtaattttgtaatacagacaatttagatacatcctaaggacaaaaagaaatgcaaggtgttg

SEQ ID NO: 287460 - DNA, 590 bp, Homo sapiens
aatttgttctgtctctcaaaagagtataaactctatactaaaataactgtcccatgactcttatgctaatataaaacctgataatagttggtgtaagttcttggaataagaatgagacrtattcattccaagtacacacagtcagtattgacctgctattggccaaaaatagaatcagtacaacaaaacatggacattttagcacatataattttcacatattcctaatatgctatatacacacagacttccttctgatatggcaaaatactccagagccccagatactgtatttgctcaagtattgacatatcctctcttttttcacaatctatgtccatttccaagaagaaaggaacatgctgcacttcaaagaagagatattgtttgtgttggattcaggctattgctgcccagtcaatggaccattcatggaaagaaatctggaaaaaaatctagaagttagtggtgttggggcaggaggaaaagattcaggagcaaaaagtgaaagttgttgctcaggggagataaagactgtgatgtgtgggaggatttggtcatcaggtcattaatgagggacagaaaccaaa

SEQ ID NO: 287461 - DNA, 599 bp, Homo sapiens
tgagaagcatttagcacagacatataaaaagtttggataattgacccacttactgagtactggctattaattcataatatctcttcagtttctttaagtgcggattaatttgcatctattggtggatgtcagaatccatctgtgtagtttgaagtgtttgttaggaaaacacaaagtaactcttctacaaaatgttcctgccatataaaagaaattttttatactattccaagaaggcttggtagaagatttccaacaattcaacatgtacatgacttaagtctcaaaatcaagaacacatagatgcrtatgaatattttgattcccctcttcctttgcctcctgtctgatagacatctgattagttcagaaatgaaccataacaggcaaaacaaaagacacttagccctaggtaaacaaacaaaaagattgtttttaaaattcagaaattcagtgaacgttcttattcactagaatcatgactgcttatcctttcagaaattttagacatcaacatattaaggggaaagataaaactatcctcagaaaattttggtctaatgaaagaatgaaaggaaatccaccctatatgcatgggt

SEQ ID NO: 287462 - DNA, 611 bp, Homo sapiens
actatagttggataaagaaatgtaaggtgatgatattaagggtcaaacaccttaagtctgtttacacatcactgctaaccatataattgcatgactgctctggtttctaaagagccccaattccaaatcaccaagttgatgagttctttttaatatatatctagactctagagaaaacgtttgttttattatttttagtctccctgattttctctgctatcagtcaaactcattttgcaacaaaattatctaaatgtcaatatgacttctaggtcctagtcagtgagacattttgtataatattaaacaagtcatttaatttcatggacctccatgagggggtcagaattggagatacctacattttatttaaataaaattcaatgtcaatgaagtaatttgaactgtctctgctttttaaatctggtaagacrtacattttctgaagtcatttgaccactgtaatagaactaaaattttcacagggcacttggaatattgtttaacagaaagacttggattccaaagatttctacaacataatttgaaagaaaggtacaaatatctcaatgttagcatactttctatttccatagtcctgtttcaaagtc

SEQ ID NO: 287463 - DNA, 562 bp, Homo sapiens
tgttttataaattgtacagaaaaatagttaaaaatgcaataggttgaagttttggagatatgtttctctctgaaattactgtgaatatttaacaaacacttacttgatctatgttatgaaataagtagcaaattgccagcaaaatgtcttgtaccttttctaaagtgtattttctgatgtgaacttccttccccttacttgctaggtttcataatttaaaagactggtatttaaaagagtcaaacactataaaatgagtaagttgacgatgttttaagattgcacctggcagtgtgcctttttgcacaaatatttacttttgcacttggagctgcttttaattttagcaaaatgttttatgcaaggcacaataggaagtcagttctcctgcacttcctcctcatgtagtctggagtactttctaaagggcttagttggatttaaaaaaaaaaaaaaaagattgtctrcttttcaaagaagtaaccatttgccaggggaaaacattctgcttttaggtagtttcaaaattcaggggagggagcctgaaatttttgccatgatt

SEQ ID NO: 287464 - DNA, 532 bp, Homo sapiens
tcctatgtgaactcttttttcccaccccctctctgccaaggagaatatgtagtaaaaatacataaaagtgcttaacattcataaacaatgatttagagaaatatataattgcaaagccagaacctaataaaaactataagtcaatatcctgctttagtggaagatggtctactattaagggttaactattatagtaagcctcaaaacatgaaattggtagacatactaagtttgtgggaataggccattgaattatacttaatctggactactgtcaaatatagaagagaggggtagtggtgtcctgaagttttcctgctgcaaatgccagtactaattgcatttagtgtyacagttatcacataggctagcattttcaagcataaattaataccaattttatttttcatatttcttcttttggtttcaattgtgctttaattttcttaaacaggagaaactcctgcataccactatgggacccactattcatctgcaatgattgtggcctcataccttgtaaggatggagc

SEQ ID NO: 287465 - DNA, 831 bp, Homo sapiens
aagcctctatagacataatattttaagctaagtgtaacaaaaaagaaagtaagtgccaggatttttggctagagtacagagagcaaagaaataaaaaagtcgaatttctgaaagagtttattaaaaactttggccaaaatccttagcttggaattcaatctctcacaatctggccagaatctgcctttgccgcacactccctgctgtgctgcagctagatggtgtcactccagctctctccctgcagacctgctcctccaaaggtgagcttcttcacatgctgctggtgccgcctagacccatctttccaatctctgtgggttccgatgtcacctagctttcaagggacagcttaaacattcttgtctctgaatcacccaattccttcagctcaaagtattctcccccttttctggactcctttaacagttctgtgcctcctgagttcttgaaattatcattctaaatgattacttttggatattcttcatatatatatatatatatatayacacacacawcacgcatacgctgcctaataaaattatgtaagtttaatataaacagaacttaaaacgtcatataaaatgttacttaatttgatcagaaaactgagttagattttataaaggcattawatataattttaataggaaactatgaaatttatgtgcacttggtgtataaatgaccgaattttgggcgagtcagtaaaggtcacatatgactgtgagacattgttgatgaaatgctcccacaggtcgcatattgcacatgcattttgatttgttattttatctgaggtcgattttccttttttgaaatggagtt

SEQ ID NO: 287466 - DNA, 556 bp, Homo sapiens
tgtagcatttttttccccagaatgaattatcttgtgcacagtaagggttgagaacctattgaaggctttgccacattctttacatgtgtagggtttctctctggtataaattctcttatgtttaacaaagtttgaggatgtggtaaagactgtgccacattcttcgcatgtgaagcattttgctccagcatgaattcacttacgttcattaagggttgaggaccatttaaaggctttgccacacggttcacatgtgaagtttctctccagcatgaattatatttattaagcattgaggaccaattaaatgctttgccacattctgccacatgtgtagggcttccctccagcatgatttttcttatgtttattcaccrgtgagggctgtttaaaggttttgttacactctttacatttgcagggtttatctccagtaataattttcttctgctcattcaggtttgtggaccattcacaggctttgccatattcttcacatttgtacagtttctctccggtatgaattctcttatgtttatcaaggtttgagaatgag

SEQ ID NO: 287467 - DNA, 556 bp, Homo sapiens
tgtagcatttttttccccagaatgaattatcttgtgcacagtaagggttgagaacctattgaaggctttgccacattctttacatgtgtagggtttctctctggtataaattctcttatgtttaacaaagtttgaggatgtggtaaagactgtgccacattcttcgcatgtgaagcattttgctccagcatgaattcacttacgttcattaagggttgaggaccatttaaaggctttgccacacggttcacatgtgaagtttctctccagcatgaattatatttattaagcattgaggaccaattaaatgctttgccacattctgccacatgtgtagggcttccctccagcatgatttttcttatgtttattcaccggtgagggctgtttaaaggttttgttacaytctttacatttgcagggtttatctccagtaataattttcttctgctcattcaggtttgtggaccattcacaggctttgccatattcttcacatttgtacagtttctctccggtatgaattctcttatgtttatcaaggtttgagaatgag

SEQ ID NO: 287468 - DNA, 579 bp, Homo sapiens
agcaactcattgttgtactcaacaagcagaagagttgcagatacacaacaatagtaaaacaaactaaatgtgcttttgacatcagaatgtctgcaggaaataaagagcaactcattaacagaaaaggaaagacttcattcttctattaggagacgaaaagactttagagcccatccaattcatctggatgccacaagctcttcaaactctgtatgtccagagtcaactccaaatcttccctcttaaacaattccttccccagttttccctatctcactaaaaggtgcttrccatctacttcattattcaaactggaataatggcatgattccggacaccttcctttatttacttcatcccaacatccaatctatcagcaagaactgtgaactgtcaactctacctccaaaatacctgctaatccagctaactccttctatctctctgccatcctccaattcaagccaccagcatctctagcctatgctactgcagtaatctccacaacaatttccctgcatctccctctcttactttttatgatccagtagtcacagagcagcccagagtgatctttaa

SEQ ID NO: 287469 - DNA, 596 bp, Homo sapiens
ggccatgagctgttattactgcaatttctcctggtcataccacatctattctcttcttcctgtccctccatcaggcaaagaaaacataaagaactgcatgtaaacttctgccgtatacattatttaaaaagttactggaaagaaaaaagaaattgcacagaatttcctttagtgcagctgttttaggtccttcatgcctggcctttgagcttgccatccagtagagatatgtaatgctcttttagtgagtgaagtatagttaaaattttcattcaattagtcatacatacttcactttgaacttcctgtgtatmttattctgtgctcaattaaactattccttcccccaaattccattcccagacttcttattcatacataaaatcttgtaaaagtttttattcctctccctaatagttttttgtttaagatgtaagtttatatacacacattttgatggtttagataacttgatcagatgattatgtcagtggagtctgagtgctgagcttagcctaattttcaactttcttacttagtatgccattattttcatgcagtggtttaagtatttactacaaataaatgaatgattc

SEQ ID NO: 287470 - DNA, 585 bp, Homo sapiens
actctttgggacttttcatctctgaatttctcactcatttcctttccttctcttggcttatctgtctttttcttatctatctgaagtggttagttttatattctggatactagttgttgatattatgttacaagtatcttttcccaggcattgagtagttgtgtttcagatatctgaatcctaaactagtagtactaggaacatgtgccatccccagctacagccattatggcttaatgacctattactttattcaataacaagcagtcgaacatacaaaaaacagcagtgccctatggggagcttaccctgtttcccctcaactccaaatggaatgtcaaggaygctgcacttccacaatacactcccatttaactcaacatgtacaacccatatctcaaagagaacaaaagatgagagtgcctgctatttctgctcttctaatcttgtcactactgttgtgatctttataaaaacctggcaaaacaggcattaatatatctcccctttttactggaaaattaaacagcactccattccatgagatgaagaaaacctgtcccaggtcactgtgctagtaaaagg

SEQ ID NO: 287471 - DNA, 495 bp, Homo sapiens
tcatttcaaaactcatcctgagcatcacttcacttaacaggcctttcatgccttcatcttcacctgaggtagctcagatgcccctcctttgccactgtacaacacactagaacataccacactattataaaacgatctttttagtcacttcctgtacttggactgtgagacccctgaaggcacagacaatgtggccctggcacttggcatgctrtctagcacatcacagaccctcaatgaatactataggtggaattaaatgtaggacctaagggagtaaaaagaacagtgtcctccagcatttatgcagctggaggccaggaatcttccctctggctttgcactacagtaaagatatttacttatttttttaacaaagttttattttaggctcaggagaatacatgtgcatgtttcttctataggtaaactcgtgtcatggcggtttgttgtacagattattttgtcacccaggtactaagcctagtacccaat

SEQ ID NO: 287472 - DNA, 495 bp, Homo sapiens
tcatttcaaaactcatcctgagcatcacttcacttaacaggcctttcatgccttcatcttcacctgaggtagctcagatgcccctcctttgccactgtacaacacactagaacataccacactattataaaacgatctttttagtcacttcctgtacttggactgtgagacccctgaaggcacagacaatgtggccctggcacttggcatgctatctagcacatcacagaccctcaatgaatactataggtkgaattaaatgtaggacctaagggagtaaaaagaacagtgtcctccagcatttatgcagctggaggccaggaatcttccctctggctttgcactacagtaaagatatttacttatttttttaacaaagttttattttaggctcaggagaatacatgtgcatgtttcttctataggtaaactcgtgtcatggcggtttgttgtacagattattttgtcacccaggtactaagcctagtacccaat

SEQ ID NO: 287473 - DNA, 488 bp, Homo sapiens
cctattaggtcctagagatgcaaaaagagataattaagacagggtccagtccctcaagaagctggagactactgaggaaaacagagagaaatagacaattacaaattagtgtgtgatatggtttggctgtgaccccacccaaatctcatcttgaattgtagctctcataattcccacatgtcatgggagggacccagtgggaggtaattgaatcgtggtggtgggtctttccagtgctrttttcatcatagtgaataggtctcacgagatctgacagttttataaaggggagttcccctgcacatgctctctttcctgccaccatgtaagatgtgattttgctcctccttcaccttctgccataatggtgaggcctccccagccatgtggaactgggagtccattaaacctctttttcttcacaaattacccagtcttgggtatgtctttatcagcagcatgaagatggactaatacaatgtgcttac

SEQ ID NO: 287474 - DNA, 1188 bp, Homo sapiens
gggtctcactttgtcatccaggctagagtgcagtggtgccatcaaaactcactagagcctccaactcctgagcgcatgcaatcctcctgcttcaggctccttagtagctgggactacaagcagacaccaccacayctggctaattctaaaaaatttttttagaaatggaggtttcactatgttgcccaggctgatctccaactcctggactcaagcaatcttcctaccttaggctcccaagtccctaggattacaggcatgagccactgtattcagccttagacatcacttgttggcttctcaatggctgtctacatgttcacatggcattctccttgtgtatgtatctgtgcccaaattttcccttttcataaagacaccagtcatattgcattagtggctcttttgcgccagtataaccacatctcagctagttacatctgtactgaccctatttcctgataagatcatattctgggattctgggatgccaagtgttgggacatcaacatatgaactggtgggggtggggtaccttatttawtgtgatgggtggtggttacacaaatctatgtgctaaaattgcacagaactatacacacaggtatacacacaaatgagtgtatgtaaaagtaatgacatttgaacaagctctgtggattttatcaatgtcaactttctggttttgatattgtactgtagctgtgcaagatggtaccattagagaaaatgggtcttccttgtacatttttttcctttctttcttttttttctttttttgcaattttctgtgaatctataataattaatcaaaaaacagatttttaaaaattctaaattcttawgttaaaaatactcttatttctaatcacatttatttattattatcaaggtataatttggatccagctatagaattttcttccctagaatctaataattttttttgcttttattttagtttcaggggtacatgttcaggttggttatataggtaaactacatgttgtgggggtttggtgcatgataattctgtcacccagataataagcatagtatctgatagacgtaatcttattccttctatgtctttgagcaccctggtctctccaggtaaattatatgaagggccttgaagccaggaggtaagtgttgttaatgtatttagctgtgcttcttccttctgta

SEQ ID NO: 287475 - DNA, 582 bp, Homo sapiens
caacaacctcagccattggcaaatgacaacatagaaatcagaacagccaagtacagctgaaccttttggagattctctacagttttttttagatgaaatgccttctgtaggactagattggtgccgtaatacactgattttttttttttttgagacagagtctcrctctgtcacccaggctggagtacaatggcacaatctcggctcagtgcaacctccgcctcccaggttcatgtgattctcccgcctcagcctctcaagtagctgggactacaggcacacaccaccgcacccggctaatttttgtatttttagtagagacggggtttcaccatattggccaggctggtcttgaactcctgacctcaggtgatccacctcagcctcccaaagtgctgggattataggtgtgagccaccatggctggccactgattcatttttttgaaagaatttgtttaagtacctgtatttctatgactatacaagttttttcttctctatttctagtggtttaaaatatactcacacaaaacattttgcaacattaatgtcaaaggataaatagccttaagaattaaag

SEQ ID NO: 287476 - DNA, 618 bp, Homo sapiens
taaagaaataagtcatctcgatgacataaaagtgcaagacgaagcagcaagtgctgatgtagagactgtagcaagttatcctgaaaatctagctaagatcattgatgaaggtggctacactaagactgtcagtgtagacaaaacagccttctattggaagaagatgtcatccatgactttcatagttagagagaattcgatgcctgccttcaaagctttagtggacaggacaggctaactctcttgttaggggctcaggaagctggtgactttaagctaaagccaatgctcatttaccattccaaaagtcctagtgcccttaagaattatgctaagtcagcagagtgtggtggctcatgcttgtaatcacagcactttgggaarccaaggtaggaggattgcttgagcccaggagttcaagaccagcctgtgcaacatggtgaaaccccatctctacaaaaaatacaacaacaaaaaattttcaggcatggtggtatgtgtctgtcatcccagctagttaggaagctgaagtggcaggatcacttaaacctgggaggtcaaggctgcagtgagccatgattgagccagtgcactccagcctgtgcaacagagcaagat

SEQ ID NO: 287477 - DNA, 518 bp, Homo sapiens
ggtggttatggctgcacagcaatatgaatatacctaatgtcactgaactgtacatttaaaaatggttaagatagtaaactttgttatgtgtgtaccacatattttaaaaccacaactttaaaacaacaaccaagaacaatttatattcaatgaggatgggattctcacgctgacagaaatacctcactctaggaaaggaggtttaattgactaacggttctgcmgcctgtacaggaagcatggtactggcatctgcttggcttctgagaaggcctcaggaaacctataatcatggcagaaggcaaaggggagcccccacacagacagaaccacgaggaagagagagagcggggaagtgccagacacttttaaacaaccagatttcaagaacactcactcattatcacgaggacagtagcaagagggatggtgctaagccattcaggacaaatccacccccataatccaatcacttcccaccaggcctcatctccaacattggggattacaattccaca

SEQ ID NO: 287478 - DNA, 534 bp, Homo sapiens
atgctccaagaccccttcacggtaaagagctgctgccttctatagatttatgactctgggctcctggggacactgagggcacaggaaaagccatcacatcatgtttggccttgggctctgattcaaaggctgcagcttccaaggcccttgcccttcccattctgaaagacaaggtgctgactccgaaagcttgcaatgttcattttgatttcctcagatgctggcattatttctcagagcaggtcttcccccaactgcttctctagatgrgagtgagccataaactatttcggctgctaaactcataactagatcaaggagagaaactaggaatggcaggttggttttataccctcatgctgtctctccagtctatcaacatgtggacccatatgtattagcacccctctcatacatcagaagctgtagcctataaacaggggaaacagaatcagagggacatctcaatttcactctgcagatggaaggccactctcacagagagagaaaacttaaccctgtaactacatagct

SEQ ID NO: 287479 - DNA, 487 bp, Homo sapiens
ttttcttataaaaggttctttatggcagggcgaggtgtctcacacctgtaatcccagcactttaggaggatgaagtgggaggacggcttgaggtcaggagttcaagaccaacctgggcaacacaacaagaccatgtctcaaaaaaaaataatttaaaaattagccaagcatggtgatgcatgcctatagtcccaactactcaggaggatgagacargaggatcacttgagctcaggagttgaggctgcagtgagctatgagcccaccattgcactccaacctgggtgacagagtaagaccctgtctctaagaaaatatgttttttaggtgctgaaagactacctaggccccatctaactttcagaccaagttttccttttagttcccataataaatggttctttccttttgcaaagtatttaatagctttcctttacaatttccactgtgtttgatccttgacaaatgctcgcccctgccccccgcc

SEQ ID NO: 287480 - DNA, 594 bp, Homo sapiens
taacatttaaaaaagcattacactgggcaggtaacagacacctgggcaaataaaatgcttcccagctttgtctatgcctcattccctaccagccttacaggtttttcttgggttgcctcaggtgaacccaggggctgcagtcacagtaggcctaggagcttatgtcaaactggagctcttttcccaatcctctgcaactgctcttcacccaccccagcccaacaactcacagccaagagctaacgtatgaaactccaaaacaacaaataagtagcattcatttcccccagctgaagatctcattccttatcttactyttggtcccacatctctgcctggctctgatttttttgccttcccctcttttatatgtaccatccaaaaaagctgaaattgagcatttattcctagtatccattctctgaaatattattttcctgtctgtcatcaaaaccttccttttccatagccaacgtagcaaaatctcactttctccattcccaggccatttccagccataatagccccttctcttgacttaattcctgtaatcatggttattcattttgtaataatgtatcttgcattgtcatc

SEQ ID NO: 287481 - DNA, 577 bp, Homo sapiens
tccatcaatactggtttggttatataaacgacagcacttctatgtaatggaatactatgttacaattataaaaaagatacagctcttaatgtactgataggataaggctgccaaaatatatacagaacagcaagtatagtatgccacgatttgtgtaagaagaaaagcaatgtattagcccatatgattgtagatgcatagaagatttctaagaagatacacaagaactcttaargtggctgagtcagcacagggcagtgggggctgggggacagctgaagaaagaagactcacttttcaaactgtaccttctttgactttttgaactttgtaccatatttatgtactacttagcaaaaacattttttatttaacaaaataaaagcaaaagaacaacttaaataaaaggaaaaggacttgctatgtctaccataagtatagcaatgacaacatatttgaagtctcttctgagtctcaatatgaaaggaaagtacctgcacgatgagtatagcctgatgggtatgagtagggataaaagagtagcttaatacaatatgctatttgactccatcataat

SEQ ID NO: 287482 - DNA, 534 bp, Homo sapiens
ctgtgccaggcaccacactaaattgtctattcaattcttacaaccacccactgaggtagggcgtcatccccatttacagatgaagaaactgaagcctagagaaaagtgactggtcacatgggtagtaagaagaaaagtcagaggactgggaggactggatgggagccaagagtcaatgggcagctgtgatcataagaggggtataggaatggctttaccaggaaggagctcctgcataaataccttgcttgcataggaatagatccgagggtgatacaaagaagcaattcacytaagcaaataaaaagagtgctgataaaaacatgatgtgatttcctgcagttcagtctctaatgaaacctctacatttgttttttgtttgtttgtttgtttgcttggacataaggtcaacagaacagtgtcttggaattttcacctatcacatatccaactttcagagagattaaaagattggaaataggcaaaacaatgacttgaagaagctgtaacaactggtttactagtcattgctac

SEQ ID NO: 287483 - DNA, 534 bp, Homo sapiens
ctgtgccaggcaccacactaaattgtctattcaattcttacaaccacccactgaggtagggcgtcatccccatttacagatgaagaaactgaagcctagagaaaagtgactggtcacatgggtagtaagaagaaaagtcagaggactgggaggactggatgggagccaagagtcaatgggcagctgtgatcataagaggggtataggaatggctttaccaggaaggagctcctgcataaataccttgcttgcataggaatagatccgagggtgatacaaagaagcaattcacctaagcaaataaaaagagtgctgataaaaacatgatgtgatttcctgcagttcagtctctaatgaaacctctacatttgttttttgtttgtttgtttgtttgcttggacataaggtcaacagaacagtgtcttggaattttcayctatcacatatccaactttcagagagattaaaagattggaaataggcaaaacaatgacttgaagaagctgtaacaactggtttactagtcattgctac

SEQ ID NO: 287484 - DNA, 546 bp, Homo sapiens
gataatggcctgtatgtccacttagcctttggtggggatggcaagggggtgttgacagaggctcatctgggaagggtatactcagaattttcatcctcacatagtcaacctgttataatttagagtctcatcacatattaatcctttaaaatgcagtcactctctagaatagttcatttcactgattactcattttgtgtacatcctgctgtttaactcagagggcttacaatacagattttttatgtaaacagtgtggacagggggttagtagaggagaggggaaaatataatttggggattactttggccataagtcacacctggtgtcatggtttggtgtggagtttggacacccagaaaaggaaagtttagattattgggaagttgggaagaggagatgccagaatgggtgacaggagggtggtagggacccaactacaatttagaatttcctgtgcagggttctctgttargattgcccgtgtgttgccatgagtttgtcttggtgtcccttctgtcatttgccatcagttggcagtgtct

SEQ ID NO: 287485 - DNA, 616 bp, Homo sapiens
gtttcacttcatggaacttcttaaagttatcctatacttattgtaamtggggtgttctaccctccacctgccctctggttgcttcctctggtagcctgtctctgtgagaggcatcttgagcccttctcagttagatgggtcatgtcatttctccctcccggtcttttcagtgaagtccaacaaagcagcttggtaaatggctttctgcctcctcatggcctctttcacaggtgggtgtaggctccccacctactttatctctggttgcaaagaatagagataccctcctgtgacctcaggtagtgggaagcttactgttagatcctaggaaaaaggaatagctaggcttcaggaagggcaagggctgaggagagctagtcacctaagaggctggaatcaaaaggctgagggattgtggactgtcattctgggagtccgccgttattgtagcctgctactctctgagttgcccttgtgtctcagatttacctgctttgctgcctgctgccatctagctttacctcctagttcaaatccccaggataatttgaaaggctgagctaattcatgattatctctgacattagagcacatcataggttaaaggccagcctag

SEQ ID NO: 287486 - DNA, 416 bp, Homo sapiens
aaccttatctcaaggagaaaaccagcaacatttggctttgtttcagtcttaagaagtgttagaataatattttcccccccttcagctgaggctacaaattgtggcaaaagtatgagagcttctggactttatttggtgtttcacttcatggaacttcttaaagttatcctatacttattgtaactggggtgttctaccctccacctgccctctgrttgcttcctctggtagcctgtctctgtgagaggcatcttgagcccttctcagttagatgggtcatgtcatttctccctcccggtcttttcagtgaagtccaacaaagcagcttggtaaatggctttctgcctcctcatggcctctttcacaggtgggtgtaggctccccacctactttatctctggttgcaaagaatagag

SEQ ID NO: 287487 - DNA, 616 bp, Homo sapiens
gtttcacttcatggaacttcttaaagttatcctatacttattgtaactggggtgttctaccctccacctgccctctggttgcttcctctggtagcctgtctctgtgagaggcatcttgagcccttctcagttagatgggtcatgtcatttctccctcccggtcttttcagtgaagtccaacaaagcagcttggtaaatggctttctgcctcctcatggcctctttcacaggtgggtgtaggctccccacctrctttatctctggttgcaaagaatagagataccctcctgtgacctcaggtagtgggaagcttactgttagatcctaggaaaaaggaatagctaggcttcaggaagggcaagggctgaggagagctagtcacctaagaggctggaatcaaaaggctgagggattgtggactgtcattctgggagtccgccgttattgtagcctgctactctctgagttgcccttgtgtctcagatttacctgctttgctgcctgctgccatctagctttacctcctagttcaaatccccaggataatttgaaaggctgagctaattcatgattatctctgacattagagcacatcataggttaaaggccagcctag

SEQ ID NO: 287488 - DNA, 1064 bp, Homo sapiens
acagatttgccatttctttttgttcaaattttaccagtcttggaagagaaggcaagttttctgtaacctgtttagggaatctttggaattctgtttgggcttctctagtggttcaacattcaacttctgtggttttgaccatttttaatcttgtaaatgaactctgggaaaacgtttgcaattgtcaactccttctcyttcctgcctcctcccctcttttgacatggcctctttggtggcgttgtagtgactaacaaacagtatagattttggagcagccagacagacctgaatttaattctctgctctgaaacattctggctgggtgacctttggcaagttactcagtctctctgagcttggggcaggtacaaaaacacttagcatagtgcatggcatatggtaatgtctcaagaaaagttacgtggtgctaatattattataataataatcaggataatwgaatctctcacagggctcggtggtgcaagtattccccaaatcttgtcctggtaggccccgctttggatagggacatacaattcccaacacatgcaaggaaatactgccacatctcatctctacactcggcctcatttcactcctcccagaatcagagcaattttttttttttgcttctattagtctgcttcaaatcagctcccagcttcccagagcctcatctgtagcacagcggacaccaagaacaggacaactgctcagggaactagggagcacggacttctttacattatgtagacccagtctatccactgctgagtggatcagctcaaagaaaggatttacaaagaatactaggaaactagaacaaaataaatgcaagtacacacacacacacacacacacacacacacwtgtacatgcacaccccccataaagttattgggtttcatccatcaagatgcctttgaacagagctcataaacatttaaaaaaatgtttacgatggtgaacaatgcactttagtatctcctgaataatttgtgttgtcttgagcagccattgcaatattttcttatttttgtcctctccgctgctgctga

SEQ ID NO: 287489 - DNA, 602 bp, Homo sapiens
gaatctctcacagggctcggtggtgcaagtattccccaaatcttgtcctggtaggccccgctttggatagggacatacaattcccaacacatgcaaggaaatactgccacatctcatctctacactcggcctcatttcactcctcccagaatcagagcaattttttttttttgcttctattagtctgcttcaaatcagctcccagcttcccagagcctcatctgtagcacagcggacaccaagaacaggacaactgctcagggaactagggagcacggacttctttacattatgtagacccagtctatccactgctgagtggatcagctcaaagaaaggatttacaaagaatactaggaaactagaacaaaataaatgcaagtacacacacacacacacacacacacacacactygtacatgcacaccccccataaagttattgggtttcatccatcaagatgcctttgaacagagctcataaacatttaaaaaaatgtttacgatggtgaacaatgcactttagtatctcctgaataatttgtgttgtcttgagcagccattgcaatattttcttatttttgtcctctccgctgctgctga

SEQ ID NO: 287490 - DNA, 594 bp, Homo sapiens
ctgcacccacatcccactgggaacctgaaaatcctgaaaatscagctcacaggagaaggatttaacctcacctagagctgaaacggatttagggagctgagtgaaatataaaagtagaagaagtagtgggaagagcactgtaggcactccaggtccccagctagagtccagggaagccattcctggccttatatcacaggggtctttggggaagggaaggcagccagcagaattggggaggggccacagagtgaaggaaactcctagctgaactttgtaataattttgactgagcacgaattttcctgagtagaatgtagggttgaggagtgaacaggaagcgcggataggagtgcagaagctacagccaaaggtgcaggcaggtggggaggggcaaggcctgagagccctgcttgctttctcagcagggaggcttgtagcctggggcaagatctcagccctgcttgccagctgctggatataaactcagtgctgttatcgaggcatggtgggagtgagactggccttgctgggagctgggtgagacctgtcattgccgactttccccgcttccctgatgacctgtagggtgca

SEQ ID NO: 287491 - DNA, 602 bp, Homo sapiens
gaatctctcacagggctcggtggtgcaagtattccccaaatcttgtcctggtaggccccgctttggatagggacatacaattcccaacacatgcaaggaaatactgccacatctcatctctacactcggcctcatttcactcctcccagaatcagagcaattttttttttttgcttctattagtctgcttcaaatcagctcccagcttcccagagcctcatctgtagcacagcggacaccaagaacaggacaactgctcagggaactagggagcacggacttctttacattatgtagacccagtctatccactgctgagtggatcagctcaaagaaaggatttacaaagaatactaggaaactagaacaaaataaatgcaagtacacacacacacacacacacacacacacacttgtacatgcacaccccccataaagttattgggtttcatccatcaagatgcctttgaacagagctcataaacatttaaaaaaatgtttacgatggtgaacaatgcactttartatctcctgaataatttgtgttgtcttgagcagccattgcaatattttcttatttttgtcctctccgctgctgctga

SEQ ID NO: 287492 - DNA, 594 bp, Homo sapiens
ctgcacccacatcccactgggaacctgaaaatcctgaaaatccagctcacaggagaaggatttaacctcacctagagctgaaacggatttagggagctgagtgaaatataaaagtagaagaagtagtgggaagagcactgtaggcactccaggtccccagctagagtccagggaagccattcctggccttatatcacaggggtctttggggaagggaaggcagccagcagaattggggaggggccacagagtkaaggaaactcctagctgaactttgtaataattttgactgagcacgaattttcctgagtagaatgtagggttgaggagtgaacaggaagcgcggataggagtgcagaagctacagccaaaggtgcaggcaggtggggaggggcaaggcctgagagccctgcttgctttctcagcagggaggcttgtagcctggggcaagatctcagccctgcttgccagctgctggatataaactcagtgctgttatcgaggcatggtgggagtgagactggccttgctgggagctgggtgagacctgtcattgccgactttccccgcttccctgatgacctgtagggtgca

SEQ ID NO: 287493 - DNA, 594 bp, Homo sapiens
ctgcacccacatcccactgggaacctgaaaatcctgaaaatccagctcacaggagaaggatttaacctcacctagagctgaaacggatttagggagctgagtgaaatataaaagtagaagaagtagtgggaagagcactgtaggcactccaggtccccagctagagtccagggaagccattcctggccttatatcacaggggtctttggggaagggaaggcagccagcagaattggggaggggccacagagtgaaggaaactcctagctgaactttgtaataattttgactgagcacgaattttcctgagtagaatgtagggttgaggagtgaacaggaagcgyggataggagtgcagaagctacagccaaaggtgcaggcaggtggggaggggcaaggcctgagagccctgcttgctttctcagcagggaggcttgtagcctggggcaagatctcagccctgcttgccagctgctggatataaactcagtgctgttatcgaggcatggtgggagtgagactggccttgctgggagctgggtgagacctgtcattgccgactttccccgcttccctgatgacctgtagggtgca

SEQ ID NO: 287494 - DNA, 566 bp, Homo sapiens
atagcaactcataacagaaccctgctccaaagaaggagaaaacaacagctaattccactacctgcaacaccctggctaaccagaggtcgtgagtctgtctgtgtgacagcttcacagctagcataaccagcatttgagaaaaccagtgcactaaacaaaactaaaaccaaggactcccgcagagtccactttactcccctcccacttccaccagagcaggtgctggtatccatggctaggatacytgaagatggatcacatcacgggactctttgcagacattccccagcaccagcccagagcctggtaggcctactgggtggctagacccagaaaggcaataacaatcactgcagtctgtttctcaggaagccgcatgtctaggggaagggggagagcaccacatcaagggatcaccctgtgggacaaaaaaatctgaacagcagctcttgagttccagatctttccactgaaacagtctccccaaataagagggaaccagaaaaggaattctggtaatatgacagaatgtgatccccaaaagatcacaagctacccagcaatga

SEQ ID NO: 287495 - DNA, 447 bp, Homo sapiens
tatatacaggactgcaggatacaaaacaatgaaggctttagcttttctatgcctattacatgcattaggagttcagaaagccatccctatgggctggtggtgaggggctaagcatacagttttggagggggttcactttacagcatgtttatcatacaaggagaatttaggtttacagtacagtgcttaagagcacagactctagagctggatttcctaggttcaaatcttarccctgccacatctgctggatgaggttaagcaagtcactccacctctgtgcctcagttttctcatctataaaatggggtaccagttctttcttcatggagttattgtaagagctaaacaaattcacataggaaagagtttcagaacagtgtctatctgacacatagtagcaatacataagtgctaacataattattagaagggcattttaggcaa

SEQ ID NO: 287496 - DNA, 582 bp, Homo sapiens
ctgtgcctcagttttctcatctataaaatggggtaccagttctttcttcatggagttattgtaagagctaaacaaattcacataggaaagagtttcagaacagtgtctatctgacacatagtagcaatacataagtgctaacataattattagaagggcattttaggcaacataataacaatagtagttcacccttttgctaaattcttactgtgtcagatacataacacaactcacacctcagaagtatatgaaggatgggctagcattatgcccaatttatagatgagaaatmtaaggcacagagaggttgccttcctgaggtaagtggctgaaccagcatttgatctcaagcaaatctgctcccccatgctcttaaccatggtgccatgctgtagggagcggaaaacaagcttatttcccccagggaagacaactgacttttgaggagcaggaactgccactgacagagttcatggaaccgagtaatgacagccaggcaagggagtcaggggccagttcatgaggcaactgggagctcataaagaattctgagcatagttattgtaggacaaaagaggg

SEQ ID NO: 287497 - DNA, 541 bp, Homo sapiens
tttggaaccttgagcacacatgggaaatagcctaccagacagggcactcagcagggagtgggcatgagagtcaatgtactttccagagagaatggaaagcactggtaaaccagggaaccacatagattggttaagagaacgtcccctgtaatttttttttttttttttttttttagacagagtctccctctgccacccaggctggagtgcaatggtgagatctcagctcactgcaacctccgcytcccagtttcaagctattctcccgccccagccttcctaatagctgggattagaggcacccaccatcatgcccggctaattttttattttcaccacgttggccaggctagtcttgaactcctgacctcagatgatccacctgcctcagcctcccaaagcgctgggattacaggtgtgagccactgtgcctggccacgtctactgtactataaaaagaagtcagttgtattctcaaaagctagtctctaacttaaaacagtaactttaatcatggttattcttgcttaaaaaagtatca

SEQ ID NO: 287498 - DNA, 462 bp, Homo sapiens
cttttatacttaaagactagaaacaactaaatgtggtacatacacactatgaagttctacctagtcatcaaaataatcttttggaattaaacagtgaacctggaatgatagtcaagatacattcagttgttccacaaatatttattcaattccttctacaggccaggcactattcttgcactgggagttttaacaaatgccaaataaggtatgatcccaatgtttcattaaactgtacagtctgaatgattgttagtaagtaaataggtgagaaagactaaacacacatttctgtgtgtgtagttacaaatacacatataartatggacatacatacacatatgcacatagatatacacatagatatgtatatatagtgtaaattccagaaggacataactggaaatgtcaataatggttccttctggaaagtgggattgtgtatgtttagttttgtttatc

SEQ ID NO: 287499 - DNA, 602 bp, Homo sapiens
ctcacaattacactaatcagagcaatctacaatttgagatttaagtctacatgctcaaaatatacttcatttacagatatctgcctggttaataataattctctaaagcagatattttaagttgcaggctaaaagcaaatgggtttatatctgcctcagaagatgatgaatgattgattacaaatctctactctgatacagggtttctgattgcattagacacaggcatgaagactaattaaaaatgctcatatattcatcacggttgattgtgcataatccactgctgaaagtacaagtgcagcaccttctctaaaatgacagaggaaacagatgaatttccactcagaactcccggaggctacctgtcttgaattcagggtaaatgggctttccctaataacctaaatcacaaacagaatgatagttaaaaaaccctacaccaaattttactattctatctgaacaggggctggctaggcctggtcacatgktatgtgatcaataaataattacagatggattggtaaacagttctataggcatactctacaaattttcaaaactaatttttctagatgcctacaaaattggaagtcaca

SEQ ID NO: 287500 - DNA, 576 bp, Homo sapiens
gccatgtagccacaggcccctctctagctatcactgctgggccccactaggcatttgcgtttgagaactctgggatagatgattgtttaggtcccttccaagtctaacatttcacttattcatttgatcatttattcatttagtgaactttctgcatgctattacattagacactggagacacaaaaatgaatatgacagagtccttgccctcaatgagttcaaattcttcttatagaagagtgcttaaaaatatttacaacaccgtgaaatatttgccaaacaaggctcatatcatgtgcagtagggtctcagagaatgggtcatttcaaggaagagatatcaggaatcttcttagaagctgctaatatttgagctggttttgkaatgcatcaggtggacaagaggacagcctaggcctgtgctcaaaacagtccatggactagcccaccactgctagtgatgtataacattttacataaaaacctcagagacactagaacccctgagaagaaagctcgggataaagtataacgtaatggtatgtcaatgtgttcctgccacagaccaccaggaa

SEQ ID NO: 287501 - DNA, 576 bp, Homo sapiens
gccatgtagccacaggcccctctctagctatcactgctgggccccactaggcatttgcgtttgagaactctgggatagatgattgtttaggtcccttccaagtctaacatttcacttattcatttgatcatttattcatttagtgaactttctgcatgctattacattagacactggagacacaaaaatgaatatgacagagtccttgccctcaatgagttcaaattcttcttatagaagagtgcttaaaaatatttacaacaccgtgaaatatttgccaaacaaggctcatatcatgtgcagtagggtctcagagaatgggtcatttcaaggaagagatatcaggaatcttcttagaagctgctaatatttgagctggttttggaatgcatcaggtggacaagaggacagcctaggcctgtgctcaaaacagtccatggactagcccaccactgctagtgatgtataacattttacataaaaacctcagagacactagaacccctgagaagaaagctcgggataaagtataaygtaatggtatgtcaatgtgttcctgccacagaccaccaggaa

SEQ ID NO: 287502 - DNA, 477 bp, Homo sapiens
ttttgaggcatagaaaaaacaataagttcttaaccatgtgttctttatttgaatctggtaacttcccctctagattctttaaaatcatacatagccactctagcactttgatatggtttggctctgtgcccccacccaaatctcatctcatattgtaatctccacatatcaatggaggaacatataatccccatgtgtcaaggaaggaagatgattagatcatgggggtggtttcccccatgctgttctcatgrtagtgagttctcaggagatccaatggttttataagtgtttggaagttcttccttcactcttctctttcttgctgccttgtgaagaagatgcctgtttccccttctaccatgattgtaagtttcctgaggcctccccagccaggcagaactatgagtcaattagacccccttttcttcataaattacccagtctcgggcagttatttatagcagtgtgaaaatg

SEQ ID NO: 287503 - DNA, 534 bp, Homo sapiens
cacacagtattagcaaaacatattttcatacagaatatataaatgtaaggatttaataaatataatacatttaagaaaatcacttaatttttaaagttttataaaaataaaagatcagcaaaagttaaaccatctacttctctataaacagaatcaattttatcatattttaaggcacacatacgattatattcaaagcatttgattacagcatagaaataaatggaatgatgaatctcagaaatacacgggctaacaagagttcttcagctgcttctgtaatcatgtttttaaaatgattaggcattccctagcccaggtaagattttcattttatgatataaaacttttcacagtagcttgacttaaaaatagccctttcttttcccatcccagtgaaagtaaataagatatatattccttagagtattaaggttgacttgtgctgttttaaagtaaaacagcttataagaaaatatgtccacataytaaatagcagtttaggtaatcgtttaaccaacattaagttgccct

SEQ ID NO: 287504 - DNA, 596 bp, Homo sapiens
attttgccccaccctagagatctgtgtaacttttaacttcagagagataatttagggcatctggcagaagaaacttctaagcagcaaagcrttcaagaggtgacttgggtactgttaaaagcattaagttttattcattcacaaagatatgatatggaattggaacttatgtttcaagaagaagcggagcattaaagttcagaaaatttgcagcctgacaatgtgataaaaaagaaaaacacattctctgagaagaacctcaagctggctgcagaaatttgtataagtaaggaggagccaaatgttaatcaccaagacaatgaggaaaatgtctccagggcatgtcagaggtcttcacggcagcttctctcatcacaggcctggaggcctaggaagaaaaaatggtttcattggctgtacccaaggccttgctgctttgtgcagtctcaggacttggtgccctgcatcccagccatggctataaggggccaatgttgaactcaagcttttatttcagagggtgcaagcctcaagccttggcagcttccacatggtgtttgagcctgcaggtgcacagaagtcaagaagttaaggta

SEQ ID NO: 287505 - DNA, 618 bp, Homo sapiens
agtaaaatattatcaaacagcattgcatgttatagataaatattacatgaaaggaagaaccaattgatgtagtaaacttcactgctgcctaattttaagaaattgccacagccaccttaactttcagcatatgatcagtcaatagccatgaacatcgaggcacaactctccagcagctaaaagattacaactcactgaaggctcagctgattgttagcattttttagcaattcttttttagttaaggtacatatatttttttagacataatgctactgcacacctaacagactacagtatagtataaayacaacttctatattcactaggaagacaaaaataatctaagtgacttgctttattgcaatatgcacttcattgcgatgtactttattgcagtggtcccaaactaaacccacaatatctctgaggtatgcatgtactagtaaattaatttattatttgtgatattctttatgtgattttctaatggtacagagctgattttaagtatttatcttctttttatatcctgtcttccccaaactgaatattgcttacaggtagaaaattacaattggcatcttagttgttttgtatcttgttacaatgaattga

SEQ ID NO: 287506 - DNA, 995 bp, Homo sapiens
ccacctaaaaaaaaaaaattattattgcctaaacattccaggaaacgtgtcaggctcaaaaacacaaaaataagtaagatgcagtctctgcytccaaataaactttccagtctattggaaacctctcaattgagaaatgggggcatgtcagcagttcactgtaatatattttgacagatgtgagctcaggtacctggcagcacagagtagggatatccattagggtactaaagtaaagctttcaaagtggcaacactggatagagcatgggtgactgcctatccaagcagtgaatgcaacatacgaaaacaaagacaatgaggagtaaaaaatgagacacacattgggaaatatgaacagtattgagttgtttctttgcagatgagttaagtataccgaaatgataagtagaaaaaaagaagccagcgaaaaagtttctaaagcttgtgatgtttaatgtgattttagactttaacctagaattaatattcatgcaaacacttcaagcgaaagactggaatgattagctctgctttttagacagctcactggtcccctaagaacaataggataggttwggcatataactcctttgactaggaatttgagtggatacagtgttttaattggatgtaatcatatatgatgtggtaaacttgtatcccacttttacatcttctgtggaaacttgaaacattttctaactcagtagatgttttataatttccatttgataattttgatagttttgcttatgtggaaacatttcatgggagacatttaagttttgwttgataatgtatagattcccatagattttgatagctctcataatgctgactattcacaatgaggtcactcattctgtgtattcttgcctgcattttaagtgtccaagtgaattttgttcactgtcctaaatgcaaccctaagacaaaatttattggtttctatgctgatatagcatatccttaattggatattactgttatcct

SEQ ID NO: 287507 - DNA, 587 bp, Homo sapiens
aagaaagttgatgaatgatgtctttcaagtggcagagttgttatttagttaaagaaagctcctttggcagtttcttacaaaactaaattaaagtttgtttataaaacagacaagctacagtgataatcctatagcctcaagagtgcttggaatctagcccaagaagagtcttgtttttcagtgatttaacaaagaagtggagtttccaagaatccaaacagattagcattcagtgctaattgggtagggtgtaaaatagtattcatgtctgattgttttgatgtgaagtacttcataaccattccgttttctaaatcttttaaaaatattaatcttttgtctcttcagatttattgtttgagcatgagtttttgtttgaggatatatgtatrcatcaatggttcatagatgtgctgtaaacagcaagacacatgagatcattacaaaaagtgccctttatagattaaaataataaagagagattgaggctctgttgttcagtggaaacattgaagaacaaattaaactgaaagataatttagatgttctattgaaatgtattactttgaacatctgatcatgtgatt

SEQ ID NO: 287508 - DNA, 548 bp, Homo sapiens
aattgattctgggtttaaaaactcagaaattcagtgggatttttaattctcactttaaaatgacattttgctcaagaaagaacaatgtgaatgaaattgattctgggtttaaaaactcagaaattcagagagatttttaattctcactttaagacgtcattacatatagtatgtgttgaattaatgcataaatgaatacacttctgtacatactcatgtaaataccttgtaacaaacttaaccgtatttaccactgaaatgaaacctctggacgaggaatacaatcctcaatgggaagctgtctatattctcaaatattcataaaactccacttcaaaacaaaaatagaagtggtaactatktatatgggtttgtgacctaatactaaaacctcaaaaaaaaaaaaaaaacagaaattgtgtgagatccctatctgttacagcaagtggatattctttttaaaggtcacaaagatatgatgagtcataaccccccagtaagctttgccaaatagctggctgaaaaccaactcaaagaacacagacatg

SEQ ID NO: 287509 - DNA, 613 bp, Homo sapiens
tttacaaataaactttatttttcaaacacaacctactcgattttaacaagaaactgtaggtctaaggagctcagccctgagtccagaaaggtcaaaggaagttttatacaacgttctcttgggacatttcatgacatcacctacaaagacagttcaagaaggtgagaaaacattttaaccacagtggaacagaagcttctagggaacctctataccacatttctagaccagaatatttaacatatataatttgccacaattctttttaagttacagtctttcttcttcctaaatacaaaaaaaaaaaaattcattaacaatcaattttgtttttttaatcccctgtcctcccrtgtaatgaatgctgatgagatcctgaaatattccccaaagtaatgaaaaaaaattaaaaatgcccagttcatatagctcctaaaatatgcctccttttaggaaatacaagttacttttctaatctggttttgtagcttatgaaaaaaataaacattcttgaatacacaggtaaaataaacgtaacgaatactgtttgtctttccataaagatgttttgtcacagtaaaggcaagaagatcaactctcacacacaaaactg

SEQ ID NO: 287510 - DNA, 620 bp, Homo sapiens
gtaaaatgttttcttgtgattcagatattgtttaaaaactgaagattaaaacatatgggacccttgagatacagagaaaacaattttgtgaaaatcttagcacaattaagaaaaacatcttttaaaaatcttacaaaacacaagcctttaccttatcctacacatgtaaacccctacacatgctacctcaaaagtatccctataatttgtccttcaacgtcagactgtacatgaaaccagcacacacacaggactgattttctgaaagacagcccttgaaatttatagataactttaaggtcatgaatgtaaacatgtgcctctccaccaaaagtacaacaagccacaactgcaaaaagggaaatcatttgatatatttatcttgcagcatcttcaaaagattatcatgcaaaggtcatctttaggacaatgtcacygtaagttacatgaccagttaaagatagttttatcatataagaaacagcagtattcttactgcctcaagagaacaaataatgacagttgggtataatgttaatatctagaaataagtagatacattgcaagtttttagtcatattttaatatattttggtgaattattttgctcagataattaa

SEQ ID NO: 287511 - DNA, 607 bp, Homo sapiens
aaaggtatagatcaatgaattgaatgagtatgcttttcgtagcttttgacttttatttacatggttaatctgatgattgayttgtaattttaatgttagaaaatagcagagaaaaaaggaatctgttgtgtttacataattctaaatgatattctaataatgtgtgatcttaaaaccaggttaactggtaatacaggaaaatcaaacactactaaatatattgtgcttccaacaaattttagacaacagagcatgttaccaaataaaattaatttttaaaatcttatacttatcaaattcgaggaaaaaatccacacagtaaaataaactgtaggtttaactgtagagtaaaaattatgtctttaatattaaacagtaatataattactctgcaaatattgcaattcattgtaattaatttctccaggtttaaaaactacatataattccctcttctgagtcgccttgaaacaagggtgataatttgtcataccttaagccctttgcaaatatactcccatcacatttttcttgtcatggcactataaaaatgagcgtaaaatatcatttgataacagcatgcaaattattttaatgcatataatga

SEQ ID NO: 287512 - DNA, 607 bp, Homo sapiens
aaaggtatagatcaatgaattgaatgagtatgcttttcgtagcttttgacttttatttacatggttaatctgatgattgatttgtaattttaatgttagaaaatagcagagaaaaaaggaatctgttgtgtttacataattctaaatgatattctaataatgtgtgatcttaaaaccaggttaactggtaatacaggaaaatmaaacactactaaatatattgtgcttccaacaaattttagacaacagagcatgttaccaaataaaattaatttttaaaatcttatacttatcaaattcgaggaaaaaatccacacagtaaaataaactgtaggtttaactgtagagtaaaaattatgtctttaatattaaacagtaatataattactctgcaaatattgcaattcattgtaattaatttctccaggtttaaaaactacatataattccctcttctgagtcgccttgaaacaagggtgataatttgtcataccttaagccctttgcaaatatactcccatcacatttttcttgtcatggcactataaaaatgagcgtaaaatatcatttgataacagcatgcaaattattttaatgcatataatga

SEQ ID NO: 287513 - DNA, 607 bp, Homo sapiens
aaaggtatagatcaatgaattgaatgagtatgcttttcgtagcttttgacttttatttacatggttaatctgatgattgatttgtaattttaatgttagaaaatagcagagaaaaaaggaatctgttgtgtttacataattctaaatgatattctaataatgtgtgatcttaaaaccaggttaactggtaatacaggaaaatcaaacactactaaatatattgtgcttccaacaaattttagacaacagagcatgttaccaaataaaattaatttttaaaatcttatacttatcaaattcgaggaaaaaatccacacagtaaaataaactgtaggtttaactgtagagtaaraattatgtctttaatattaaacagtaatataattactctgcaaatattgcaattcattgtaattaatttctccaggtttaaaaactacatataattccctcttctgagtcgccttgaaacaagggtgataatttgtcataccttaagccctttgcaaatatactcccatcacatttttcttgtcatggcactataaaaatgagcgtaaaatatcatttgataacagcatgcaaattattttaatgcatataatga

SEQ ID NO: 287514 - DNA, 607 bp, Homo sapiens
aaaggtatagatcaatgaattgaatgagtatgcttttcgtagcttttgacttttatttacatggttaatctgatgattgatttgtaattttaatgttagaaaatagcagagaaaaaaggaatctgttgtgtttacataattctaaatgatattctaataatgtgtgatcttaaaaccaggttaactggtaatacaggaaaatcaaacactactaaatatattgtgcttccaacaaattttagacaacagagcatgttaccaaataaaattaatttttaaaatcttatacttatcaaattcgaggaaaaaatccacacagtaaaataaactgtaggtttaactgtagagtaaaaattatgtctttaatattaaacagtaatataattactctgcaaatattgcaattcattgtaattaatttctccaggtttaaaaactacatataattccctcttctgagtygccttgaaacaagggtgataatttgtcataccttaagccctttgcaaatatactcccatcacatttttcttgtcatggcactataaaaatgagcgtaaaatatcatttgataacagcatgcaaattattttaatgcatataatga

SEQ ID NO: 287515 - DNA, 646 bp, Homo sapiens
ctggttcaacaaacaagttatgagtcattttctcatggcatcaagacttgaagcattattagcactagtcttctcatttcccctgttttttgtttttatttttgattttttgatctcacctctccccttaaagagaaaataacttataacagaaactatgcacatgttagaagaagaaaatgcagataaacaaaaactgaaaatgaccaactatgcatgcccgcactcagagatcaccactttgctcaccaatcctgatctctctccatgcacgagcctgcatatgtatttttagtaaaatgaggtcatattatacatgcttttctacaacctgttttttttcagtcagtgatcttcacttaaggaggagaagcaggcagggtcagagcagtgtggttagacacaggaggaacagatcctgtcctgtcctgtcctagttgtgatacagcatttctgttagagggaaatgttaatctggagttagaagagcaaagtaaaacagraattcagaatttctaaacatttccccaataacaggtttgcagtaagcacgggaagttcctcctagcagcctcacagggattatttttctatttcagcacatttgttgggattaaacagggcaggccgtcttctgagctccctg

SEQ ID NO: 287516 - DNA, 553 bp, Homo sapiens
atggtttatgttccccttcattctattaatatggtatattatattgtgtgacttttttctatgtcaactacccctgaattcttggaataaatcccatttggtgatgatatataatctttaaatatgctgctgcattcctaaaatattttcttgaggaatactgcayctatattcataagggacattggtctgaagattttatttcttgtgttgtctttatgtggcattagtagcagtgttatgctgattttgtaaaatgagttagggcaggtctactagtgacaaacaattcagttactgtttatcagggaatgtagtaatttctccttcttttgtgaaggaaagctttgccaaatatagaattcttggttaacagggctgaaaaaaattctttcagcacactgagtgtgtcatctcattgccaagtggcctccatcatctccagtgagaaatcagcagttaaccatactaaggatcccttatatgtgaagctttacttctcttttgctttcacaaagcccttattccctagagatctctatttctggccttt

SEQ ID NO: 287517 - DNA, 553 bp, Homo sapiens
atggtttatgttccccttcattctattaatatggtatattatattgtgtgacttttttctatgtcaactacccctgaattcttggaataaatcccatttggtgatgatatataatctttaaatatgctgctgcattcctaaaatattttcttgaggaatactgcacctatattcataarggacattggtctgaagattttatttcttgtgttgtctttatgtggcattagtagcagtgttatgctgattttgtaaaatgagttagggcaggtctactagtgacaaacaattcagttactgtttatcagggaatgtagtaatttctccttcttttgtgaaggaaagctttgccaaatatagaattcttggttaacagggctgaaaaaaattctttcagcacactgagtgtgtcatctcattgccaagtggcctccatcatctccagtgagaaatcagcagttaaccatactaaggatcccttatatgtgaagctttacttctcttttgctttcacaaagcccttattccctagagatctctatttctggccttt

SEQ ID NO: 287518 - DNA, 553 bp, Homo sapiens
atggtttatgttccccttcattctattaatatggtatattatattgtgtgacttttttctatgtcaactacccctgaattcttggaataaatcccatttggtgatgatatataatctttaaatatgctgctgcattcctaaaatattttcttgaggaatactgcacctatattcataagggacattggtctgaagattttatttcttgtgttgtctttatgtggcattagtagcagtgttatgctgattttgtaaaatgagttagggcaggtctactagtgacaaacaattcagttactgtttatcagggaatgtagtaatttctccttcttttgtgaaggaaagctttgccaaatatagaattcttggttaacagggctgaaaaaaattctttcagcacactgagtgtgtcatctcattgccaagtggcctccatcatctccagtgagaaatcagcagttaaccatactaargatcccttatatgtgaagctttacttctcttttgctttcacaaagcccttattccctagagatctctatttctggccttt

SEQ ID NO: 287519 - DNA, 576 bp, Homo sapiens
atagaaaatgcctgtcttgtttttaaaaacagaaaggaagaataaataggagaaaaacagggttcttttgccagaaagagacactttatatgctggaataaagaggctgatcacatactgaaatttcacttttaacagaattgagtcaaacctatacctataattaatatggaaggactgtgttagttcagaaggaactgtgttatttaattcttctcactacgccattgttgattgggctcytaaaggtcatattactaatgattgctctcagggtcacagagattgtcaacattttctctacgatattacttatcaaaaaagtagtgacaaccctcccctattatatcatagatttaactccttttttcctcttcagtggaaaggcgcagggattgcccctccaaagccaaggcttgttgctccccactgaagacctgaacattcagaattatggagattaactatagctatgactggtatgagagttggggctggagagagtgttataagtaaatctacttgtcaccttgaaaactaagacaacagattgatttacactactatttacacaca

SEQ ID NO: 287520 - DNA, 576 bp, Homo sapiens
atagaaaatgcctgtcttgtttttaaaaacagaaaggaagaataaataggagaaaaacagggttcttttgccagaaagagacactttatatgctggaataaagaggctgatcacatactgaaatttcacttttaacagaattgagtcaaacctatacctataattaatatggaaggactgtgttagttcagaaggaactgtgttatttaattcttctcactacgccattgttgattgggctcctaaaggtcatattactaatgattgctctcagggtcacagagattgtcaacattttctctacgatattacttatcaraaaagtagtgacaaccctcccctattatatcatagatttaactccttttttcctcttcagtggaaaggcgcagggattgcccctccaaagccaaggcttgttgctccccactgaagacctgaacattcagaattatggagattaactatagctatgactggtatgagagttggggctggagagagtgttataagtaaatctacttgtcaccttgaaaactaagacaacagattgatttacactactatttacacaca

SEQ ID NO: 287521 - DNA, 576 bp, Homo sapiens
atagaaaatgcctgtcttgtttttaaaaacagaaaggaagaataaataggagaaaaacagggttcttttgccagaaagagacactttatatgctggaataaagaggctgatcacatactgaaatttcacttttaacagaattgagtcaaacctatacctataattaatatggaaggactgtgttagttcagaaggaactgtgttatttaattcttctcactacgccattgttgattgggctcctaaaggtcatattactaatgattgctctcagggtcacagagattgtcaacattttctctacgatattacttatcaaaaaagtagtgacaaccctcccctattatatcatagatttaactccttttttcctcttcagtggaaaggcgcagggattgcccctccaaagccaaggcttgttgctccccactgaagacytgaacattcagaattatggagattaactatagctatgactggtatgagagttggggctggagagagtgttataagtaaatctacttgtcaccttgaaaactaagacaacagattgatttacactactatttacacaca

SEQ ID NO: 287522 - DNA, 576 bp, Homo sapiens
atagaaaatgcctgtcttgtttttaaaaacagaaaggaagaataaataggagaaaaacagggttcttttgccagaaagagacactttatatgctggaataaagaggctgatcacatactgaaatttcacttttaacagaattgagtcaaacctatacctataattaatatggaaggactgtgttagttcagaaggaactgtgttatttaattcttctcactacgccattgttgattgggctcctaaaggtcatattactaatgattgctctcagggtcacagagattgtcaacattttctctacgatattacttatcaaaaaagtagtgacaaccctcccctattatatcatagatttaactccttttttcctcttcagtggaaaggcgcagggattgcccctccaaagccaaggcttgttgctccccactgaagacctgaacattcagaattatggagattaactatagctatgactggtatgagagttkgggctggagagagtgttataagtaaatctacttgtcaccttgaaaactaagacaacagattgatttacactactatttacacaca

SEQ ID NO: 287523 - DNA, 453 bp, Homo sapiens
ttgataccttgattatccacgttttctttatcttctaatctatcctaaattttcctacactttattttttgactgttaataatgattattttaaaagcttattgatgctgcttgttccatatacttcaaggcagctacattacacataatatttagcaactgggaaggattactcagtagtttaaaactagtagaaagttaaaagtacaatttttatttttattcttcaatttaatttttgaataatcaatatatcatccaaatattaatattacattaaaatgtatcttgattactttttcctcataatttcatctacagtacactgtaatataagcttttatcacttcatacctggatcagtaaaataacctgctattcaccatgttctcaaccttmtaatattaccagcaacgcacagatggcaaattttcccaaatgacccatttcctg

SEQ ID NO: 287524 - DNA, 453 bp, Homo sapiens
ttgataccttgattatccacgttttctttatcttctaatctatcctaaattttcctacactttattttttgactgttaataatgattattttaaaagcttattgatgctgcttgttccatatacttcaaggcagctacattacacataatatttagcaactgggaaggattactcagtagtttaaaactagtagaaagttaaaagtacaatttttatttttattcttcaatttaatttttgaataatcaatatatcatccaaatattaatattacattaaaatgtatcttgattactttttcctcataatttcatctacagtacactgtaatataagcttttatcacttcatacctggatcagtaaaataacctgctattcaccatgttctcaaccttctaatattaccarcaacgcacagatggcaaattttcccaaatgacccatttcctg

SEQ ID NO: 287525 - DNA, 539 bp, Homo sapiens
tcccagctactcgggaggctgaggcaggagaatcacttagagcggggaggcagaggtttcagtgagccaagatcgtaccattgcactccagcctgggcgacagagggagattctgtctcaaaaaataataataatgataatagtaagagctatctacgataaacccacagccaacatcatactgaaggtgcaaaagctagaaccattctgcttggatctggaacaagacaaggactcccactctcaccactcctatccaacacagaactagaagtcctagccagggcaatcaggaaagagaaagaaataaaaggtatctaaataggaaaagaaatcaaactacctctctttgctgacaatatgattctacacctaggaaatcataaagactctgacaaagggctcctagaattgataaatgacattagtaaagtttyggaatacaaaatcaatgaacagaaatcagtagcattgctaacaacatctaggctgagcgtaaaatcaagaacacaatctcattcataatagccacacgaaaa

SEQ ID NO: 287526 - DNA, 533 bp, Homo sapiens
cggtcatgaacactgatgcaaaaattcctaaaattttagcaaatcaaattcaccaatacacaaaaatgataatatactatgaatacataaggtttatctcagaaatgcacggttggtttaatatttgaaaatcaagcagtgaaattcatcattaaaaaaaaaatttaatggtatcttaattgacaaaacaccatgtgaacaattttaaagtccaatcatggtaaagattttcagtaaactaagactagaaagaaatttcctcaatttgataacaaacatctatgaaatgtctatagctaatattgtacttaatggtgaagagtaaatgcttttcccctgagactgggaacaagaaaagatgtcagctctcttcacaactactcaacactgcagtagtcccagctaytgcaataaaaggagataaaaaataaaaaacatacagactggaaagaaagaaataacaatagacctaataagtgagtttactagcaaggttgtaaaacacaaggtacatatacagaaatcaactgcat

SEQ ID NO: 287527 - DNA, 634 bp, Homo sapiens
ttcctagaaaatgaaaatttacccaaacacacacagtaaatcatagaaaatttaaatacactgaaagaaatgaattgctaatttaaagtaagaccaacctatttggatggctgctattaaaaaattgaaaataacaagtgttggcaaggatgtggagaaattggaatccttgtacattgctggtaggaatgtaaacacctcattagctgtggaaaattgtagggcattcctcaaaaaattaaacacagaatcatcatatgatccagaaatccacttctgggtatatactaagaaaactgaaagcaaggactcaaacaaatatttgtataacccatgttcatagcatcattatctgcaataaccaaaaggtgaaagaggcccatgtgtctaccaacagatgaatggctatacaaaatatagtatacacaattgaatatgattaaatataatggaatattattcagccctttaaaaaaagaaattctgatrtatacaacacgaatgaatcttgagaacattacactaagtgaaataagccagtcacaaacatgacaaatactgtatgattccacttatatggggttcatagagacagaaattagaatagtgatcaccagggtctggagggaggagg

SEQ ID NO: 287528 - DNA, 512 bp, Homo sapiens
atatattcatttccgtagtcaaaactgttcataatgaggaaaggtgataaaattggtcctaatctttttcattctaatctttaaaacatggcaattagatcaacttgtcaccctacctaaacctttcaggacttgatttcctttcagagtttaaaaatcccagctctcttctatgacctgcaacctggtctcccaccctctggccagctgtgttgcagcaacagtggtctgctttctttttctcaaacacatccaaatcattcctacctcaggacctttgcacgtgatagtcccactcccyggagcactgtttccccctagacttgcccatggtctcatgtctaatggcacctcttcagggagacttctgactcctaatgttgaaacttctcgttcccacactctcttccactccattactgttgtctcatcgtcattgttttgcctactgagttaacttagctaacctgtattcttgtttcttttctgccttgtcccactagactacaaat

SEQ ID NO: 287529 - DNA, 568 bp, Homo sapiens
ttttttgaactccttctgtgaacagagaaatcatagtagaagggaaaaattcaaggcacttgatggacttacgaatgatcttttaaataatgacaaagttctagttttaacatcttctggagtgcagaccagccatctggttttggctccctgtatttcatctctttagaagaaaacaatggtgccctcaggccttccctgttcacctaataaaggaagatcctaatgcctctcttgtctatgtgctctgattcttctagagaaagacaggaatcaaggtgtgtgttgaatsgcactgtggaccctagagaaggattatctaaattcaggctcctatgtatgacagggaggaggacctcctggtttctcacccagctctgccattgacattgacctgtgtaatcttggtcaaaaatctgacttccttacctcactttctgtatcacgtaatacttgctaaaaccaacaccatccaaagaattgagtgccatgctggcacagagcagacatctacacaatgatgttgactgaatgaatgcttgaaataatcctataactcagggcttct

SEQ ID NO: 287530 - DNA, 576 bp, Homo sapiens
gcctcgtggatgtattgcgtctctgagtgggactgtaggaattcctcagttaataactctgatgtgctggacctgttcccagtcaggcacggccacactgcttccagagttcgcagaagcagttgtcgtgtggtcagtcctaatcccagaagattccccagccctggggtacggaccctcatccatggggataagatcagggctggctgacatgtggaatatgctttgctggggggygggggtttgctgggagtaggaagatgcaaattcccattcagaggagcacatgatttcctcctggtagagagttcttgtgctggctggtaggtggcagggcatactcgtcctagtttctgggagtgcttgaactcctgggacaggcctgtgtcccccagcagagcaccagcagggacttttacagaggtgtgtttggcagcaagtggcagcagggcctcttgggtatgcagactctgcaggcctgcttcatcctgcctggctggtagtgacccctggctactcagccatctacccattggcctgacttctgcctcatttgttctccccatctgtcccatc

SEQ ID NO: 287531 - DNA, 576 bp, Homo sapiens
gcctcgtggatgtattgcgtctctgagtgggactgtaggaattcctcagttaataactctgatgtgctggacctgttcccagtcaggcacggccacactgcttccagagttcgcagaagcagttgtcgtgtggtcagtcctaatcccagaagattccccagccctggggtacggaccctcatccatggggataagatcagggctggctgacatgtggaatatgctttgctggggggcgggggtttgctgggagtaggaagatgcaaattcccattcagaggagcacatgatttcstcctggtagagagttcttgtgctggctggtaggtggcagggcatactcgtcctagtttctgggagtgcttgaactcctgggacaggcctgtgtcccccagcagagcaccagcagggacttttacagaggtgtgtttggcagcaagtggcagcagggcctcttgggtatgcagactctgcaggcctgcttcatcctgcctggctggtagtgacccctggctactcagccatctacccattggcctgacttctgcctcatttgttctccccatctgtcccatc

SEQ ID NO: 287532 - DNA, 536 bp, Homo sapiens
gaatcacttgaatccaggaggcagaggttgcagtgagctgggattgtgccactgcactccagcctggaygacaaagtgagactctgtctcaaaacgaacaaaactagatgcaaaaatctatatacagatgctcctcaacttactgtagggttatgtcctgataaacccaccataagttgaaaataaatgcatttaatacatctaacctactgaacatcatagctcagcctaacctaccttaaatgtgctcagaacacttacattagcctatagttgggcaaaatcatccaacacacagcctgtgttataataaggtgttgaatattatatgtaatttattgaataccataccaaaagtgaaaaacagaatggctgtatgggtacttgaagtacagtttctactgaatgcctattgcttgcacaccatagtgaaggtgaaaaattgtaagtaaaaccatcacaagttggggaccatctgtattgcatgattctatttatgcgaaatatccagaaaaggcaaatctgtagaaacagaa

SEQ ID NO: 287533 - DNA, 622 bp, Homo sapiens
aagcttttttatccgtcagaaataatgtgaggggagttaggaacaagaggtttttcaccctttgaaaaagtcaggaatgtggattggctcattgaagatcttggctacatataaggagtggacagcattgctctaggagttgtgatgatgtaacttttgccataaaaggatatggattttttttttttttttactatacacagtactgagtttttaggatggagaaaaatagtgaatagtcccatgggggtsctgcccagaatgtagtaaaacaaacctttgcttgtttcagcctctatctcttgagacattggagaaactaaggtagtttcaaagattattcaaaaagaggcagagccttccttcattccttctaggcaaagtagtctagacatctttaggaaatatgtccaggtctcctggaagcatttcctacctggtggtgtagaagattcctagggctgtctacgtggtgtttctctatttccctgacgtccaggaaagctgccccctcactccctaaagtgccccagggacatgggcagccctcctactgtgaatgagctgggaaccgccgccattttctcctctaactcagagtcacttgatgcagtggaactga

SEQ ID NO: 287534 - DNA, 556 bp, Homo sapiens
ccaccattccctattgtcttatacctaacccgttttactcatttgttacctgcctatccccctgcacacatttgacrtttttgatccctaaatgatgatattctcataagtttcctgagcttcctcaggaatcctaagcactggcatgtggtagcttgagaggcctataaatgtttatattgacttaaattattcttgctcctgaagatttagaacctaaatatcttccctaagaaacttacttcttcctctgtgaagtgtcctttttaaaatgtaaaggttagatttggtttgcatggactgattacttattgccttgttgtactgctgaaatcagagggcaggaaaaatgaccaggcaaggtggtcatgtttctccccagctctggcaaagcacttgctgtttggttgttaatgccccatgtttgtatagggcttcatagcttacagaacacttcctattgtgttcaaattctaactctgatgtttaatagctgcggcttaggaaggctcttaaacactctgtgcctccatttccccatctgaaaaatgataat

SEQ ID NO: 287535 - DNA, 472 bp, Homo sapiens
gacttttcttcattccttcttggttctgcaacatgtgtgtgcccttagagctgtgtaaaaataggsccagggcccagggaagaggcaactcagctgcccaaggatctcagacactccccaggcatgtggccggctttctggcagctgttgggagggctcaaggtcactgggcctggaaatctgatcccactgcagatggccttttcctggcccaggaggctctggagagaatgtagccagagaggtacctggcgccagggctcttcgaggccaattcaaggagctgcctttcacaaggggccacctgcccctgtttcagctttcatgttgccatcagcaggtcaactcaggccctttccagaaatgttccatctcctccctttttgctaactctcagctaaacctaactggttctgctgtagctgcagatgaaaactaaggagaacacggcttggtgaggtggagactattt

SEQ ID NO: 287536 - DNA, 472 bp, Homo sapiens
gacttttcttcattccttcttggttctgcaacatgtgtgtgcccttagagctgtgtaaaaataggcccagggcccagggaagaggcaactcagctgcccaaggatctcagacactccccaggcatgtggccggctttctggcagctgttgggagggctcaaggtcactgggcctggaaatctgatcccactgcagatggccttttcctggcccaggaggctctggagagaatgtagccagagaggtacctggcgccagggctcttcgaggccaattcaaggagctgcctttcacaaggggccacctgcccctgtttcagctttcatgttgccatcagcaggtcaactcrggccctttccagaaatgttccatctcctccctttttgctaactctcagctaaacctaactggttctgctgtagctgcagatgaaaactaaggagaacacggcttggtgaggtggagactattt

SEQ ID NO: 287537 - DNA, 561 bp, Homo sapiens
ctcttccacatttctcacagaaggaagtgaagtgctaaggccaagtggattatccagggccacttatgatgggactgagcgagactgaccacagtgttctgtgacatgagatctctcaggggtttcctttgagtccagtgctatcattcagagagatgtaggcatacaaatgaattcaaaccccactaaacaagcccccacccaaaagcagagttggctgttcccgargcatgtctgttttttaacaaatacttaagtcccttgaaaaatcatcaaaagagctaacatctactgaggccagcaactctgtggccagcaacgtgccagcacttcatgtagattgtctcatggaagccttaaaacaaccccatgaggcaaatactgttactacctctgttataggaactggctcccttagagactaagggacacacctgggttacaagcagttggccttcccagcccttgctctcagctgtgatgccttgcagaggtcagaggtaagacctaatccgacttcacagaaaagagactgaggaggaccagagaaaggagggctgg

SEQ ID NO: 287538 - DNA, 558 bp, Homo sapiens
atctgctttgttttctacagtcaccccagagcttagcacagtgtctggcacacaggagccacacaataaatacttgttgagtggaactaagaaataagtcttctgaatatctcaatgaatcaagaaatcttgattcttgaacattgagatgaatcaagaatagctgcctattttcaggcagctatccttccatttataatacagatgtatatactaaagtccaaaaaaaccaaacacttgacagatggcactcttccatacctgggaaattatggcaggcatgagctctgaccttggattttgacactcaacattggagagaataaatatgcagcttttgagaatcaaggccagtcaaggtgtcttccaaatggatactcatgatggccaaagtcataagtcattggattctgatcaatacccagttcagcattaggtcattagtgctcattacagtgaaagayggataactgtgatcctaataagtcatttgggacactttaaagattctttatatgccacctgaataatgaaaccaaagggcttggtctaatttct

SEQ ID NO: 287539 - DNA, 1103 bp, Homo sapiens
cgtgttctatctcgtagccatgcacgtgggtgagaagctccttgagtccttgttcaacaaggttcatatgaagagctctttgagccttaaggaaacagagtagatgttgccaagagtgactgagtcaccactccagacagtgagaactgtgtgtttactgggctgcttccagtcagcctggtgaagttgacggggcacacaggccaatgcctgtagggcacagggccctggctcagagtgggaatatggcagaggtcagcttgggcagggccgtgggagccacgtatgaaactatggcactggaaggacagttctccctttctccatagagttgggttagagacctggtcccatctkgcttatgaaagagaataacgccaccaaaatttggtgtagctacaccttgctttaagaaagcccaatattagtagagaagaataagaattaatctcaggattttgcagtttgcagtgtgctttcacatcattgcccttttgctgctcatgagggaggaagaaagctttagtcaccatcwtgaaattctgaaacatgttacaacatgaatgaaccttgaaaacgtaattctaagtgaaataagccagatacaaaaggacaatattgcatgtttccacttacagaggtacctacaagaatcaaattcatagagacgaagtagaataggggttaaaagggtctgggcagagggaggaaagggaagttttatgggtacagagttttggtttgggatgttgaaaaagttctggagataaataatggtgatggttatataccatttgttacatgaatgtacwtaatgccactaaattgtatatgtgaaaaatggttaaaatggtaaattttatatctattttataccatcccccccttaaaaaattgtttttaagagtcaaggtctcactctgtctcccaggctggggtgcagtggggtaatcaaagctcactgcagcttcgaactcagccagcttccctgactcaaatgatcatcctgcttcagcctcccgagtagctgggactacagatggtgccatcacgcccagctcattgttgattccctccccaccctccccttcctccccttggta

SEQ ID NO: 287540 - DNA, 442 bp, Homo sapiens
agccccagtgattaatttcagaggattctggttccactgcctgggcacggtgatggtgcagagattcttcaagccatttgtaagcagtccatcttagaatgatttgggccccacatttgggattgattttgtttccttctcttcaaggtttgtakctttctttcatatgagtacatggatagcacgggaaaaggaccagcaatgagaagggtgtggagttcagatggctgctcgagtctccatgcacattccagattgtgttctgatgtgcagacatcaaaagagcgaggccaacgcttcagatcccagcatggttcagatgtgtggcccgtggagcagtgtggattcctgtcagatgctgagtctcagcaaaatccacatttgaaaagcaaaagcaggagccggagaatattccaaatattacttagatttcagagtgaca

SEQ ID NO: 287541 - DNA, 607 bp, Homo sapiens
gctgtagtgcaggaaaaaaaatgagccacctctttttcagggtttgcagatcaaattggtcccaatggcttaggatgcatttcaagggtgagcctgttgatgtctgagtgtttcccatctgaaagacaaaaccacccaccgttttggtttgtttgtttctccccctgcccaagaacctgtgatggtccctggaccctgctgatcggaatagttgcactcaccaacacagcaacagaaacactagttttcctcctacaccacaaggaggactgaggaaggtcagagttagtggcccttactgatgcattctcaaaaagctggacccttgcctgtcctcctagacmccaaagaggaccaagaaaaatcggatttagtggcccttactgacacattctcaaaaacctgttagagccctaagctttctcctgttagtattgggagtttgcccctgtactataaagatgttatgccccaaaaatgaaatggagggccattccctgattgagggaagggatctccaggattgggagagtgacaccttttgtcctcacttatatgaataggaaggatataatttctgaggctcctcatatcctagcttcaggaa

SEQ ID NO: 287542 - DNA, 573 bp, Homo sapiens
ttggacttttttctaattaaaactgctgctctttgaaagacattgataagaaaataaaaaaagacaagccatagactgggagaaaatattcaccacacatatatctaacaaaggacttgtatccagaatataaagaactcttacaatttgataacaagaaaaacaacccaacttaaaatgggcaaaaaccttctgaacaaatacctygcaaaagaattaataggatttgcgagtaagcacttgaaaagatactcaccattataactaactcatcaaggaattcaaaccacaaaaatatatactactatacattcatttgaatggctaaaatgtaaaagactgacaatatgaagtgttggaaatgatgtgaggcaactgttaagaatgtgaaatggtacactcacttgagaaggtattccagcagtctcctataaagttaaatatacagttaatatatattacgtgacccagaatgacacagtcaagagaaatgaaatgctatccttaaaaagatttgcacacgattgttgtcatggctttactagtaatagtccaaactagaaacaacccaac

SEQ ID NO: 287543 - DNA, 573 bp, Homo sapiens
ttggacttttttctaattaaaactgctgctctttgaaagacattgataagaaaataaaaaaagacaagccatagactgggagaaaatattcaccacacatatatctaacaaaggacttgtatccagaatataaagaactcttacaatttgataacaagaaaaacaacccaacttaaaatgggcaaaaaccttctgaacaaataccttgcaaaagaattaataggatttgcgagtaagcacttgaaaagatactcaccattataactaactcatcaaggaattcaaaycacaaaaatatatactactatacattcatttgaatggctaaaatgtaaaagactgacaatatgaagtgttggaaatgatgtgaggcaactgttaagaatgtgaaatggtacactcacttgagaaggtattccagcagtctcctataaagttaaatatacagttaatatatattacgtgacccagaatgacacagtcaagagaaatgaaatgctatccttaaaaagatttgcacacgattgttgtcatggctttactagtaatagtccaaactagaaacaacccaac

SEQ ID NO: 287544 - DNA, 590 bp, Homo sapiens
aagatagggtgagaatggaataattccactttgtttttacttttaagtattgcacaaatggtctctggagtccgctgkcagctggtagactttgatttaaaagcaatgaattgtatcctccagttgtgagtaaaattacaaatatcttcaagatgcgcagtgctctgagaaagggagctcactcatccaggctctgcggatgcctcctgtccagagaaggacacagcacctctctctccagaggggaagtgggaaatgcggagaagactgtggggagcatgtcccacaacacagggactagagaagagtatgatttagggacatagcctggatcagatatggggtaggcaggaatgggaaggccaagtgaagcaacatgggcccctttcaggctctgcaggtaaaatcctctcaaattcgtgtctggagagcagctgtgtagtagaatacctggtatcatcaggtagaatggatgctacttgatgaaggcttcttcacctcagcagcaaatatatatatttgatacaaagcctcactctgttgcccaggctggagtgcagtggtatgattttggctcactgcagcctgga

SEQ ID NO: 287545 - DNA, 599 bp, Homo sapiens
attggtttctttcctcttgctgaggctagtgaagcataaatggaagagggtaggagtgggaagtggtaggatggggagggcagggaggaggatgaataagagttgtattcacagccgatgtggggaacaacaccatgggagagaggaactccatragtgagagaccgcacttaaggagaaggcaacgagtgaaacagctggaagcattagggaaaaacaacccaatgcagcaagtaacccaatccagtgaaatgagctgggaatcatggcagaccagagaccaggagaagaaaatatatttacactcgtggaaggaaatgcaaatggaaagacaaatccccagactggagcaagcaggctggccctgcatccctcctctccctgggggcttcgcagtccccgagtctgccttttgcaggttacttctttcttaacccttttcaactttactcagattctgtcaggaatccagatggaataggctgggctacacttctcttgaaacaatcttcgaccaccttaccctgtgctttcaggaatgctatggtttgaatgatggtgttgcctccaaaattcaggtgtagaggcttaatggctag

SEQ ID NO: 287546 - DNA, 599 bp, Homo sapiens
attggtttctttcctcttgctgaggctagtgaagcataaatggaagagggtaggagtgggaagtggtaggatggggagggcagggaggaggatgaataagagttgtattcacagccgatgtggggaacaacaccatgggagagaggaactccataagtgagagaccgcacttaaggagaaggcaacgagtgaaacagctggaagcattagggaaaaacaacccaatgcagcaagtaacccaatccagtgraatgagctgggaatcatggcagaccagagaccaggagaagaaaatatatttacactcgtggaaggaaatgcaaatggaaagacaaatccccagactggagcaagcaggctggccctgcatccctcctctccctgggggcttcgcagtccccgagtctgccttttgcaggttacttctttcttaacccttttcaactttactcagattctgtcaggaatccagatggaataggctgggctacacttctcttgaaacaatcttcgaccaccttaccctgtgctttcaggaatgctatggtttgaatgatggtgttgcctccaaaattcaggtgtagaggcttaatggctag

SEQ ID NO: 287547 - DNA, 610 bp, Homo sapiens
agctggacgtaagtattcagttcaattttacttaagaaactattgagattggagtccagattgccaactagatgcaaccaggaaaagcttcttccactgagagacaagaccatcaagcagagcagcacactccaagatcttcaggaggaaggcactgagagcagcagatgggggacagacagagggaggatgcaggccctgggctgaagtggggaggtcagtggggactctgcatggggttgctgagcaccaggactcattcctggccacaggaagttcctggagaaggagtgagttaaataggtgtggagcggcccactctcaccatggacctctggaatcctagctgcatgagaccccatgaccccatgggcatttgagctggtagygagagctgcttggggagttggtggggacaggtctctagccatgcagagcccagagggtttggtgcaggaatggctgcagtggagtatattcaggaacccccatcctccaaggctcaccatgctcctctaggtgcctgtgacctttgttgactgtcagacctaaacagagcagggctatgttgcctgtgggatgggcaacccccatgtctgagcacccccat

SEQ ID NO: 287548 - DNA, 512 bp, Homo sapiens
gttagtatttaccataaaaggttgttatgagaacttatcagataaaggagggcagatgcttattgagtgcccagctcaatgcatcttagttattgttgttaggagctccrattcttgattggcccaaacctttgttcagaggtgccccaccccctgtctggctgggctgctgtttccctgcaggctctggaggggccgtgttgtcacggggtgatctggatcagcgtgcccacttatggcgcatggacaggctctgtggtcaccactcctgccaagttccaacacagtaggggcagagacacctgctgtcatgaagccacactcatcatccctgccttttctcttggggcacccctgaaggagcccccataagttcctagcaaagacttccatttgggcaaacacacttcatcccaacaagtatactgatcccctcttgtcagcaggaacagaaaacatgattttacatctgttacccataatctatctctttacacacaaaagacttgccc

SEQ ID NO: 287549 - DNA, 610 bp, Homo sapiens
ctatgtggtaaggaatgatacccttacactctttccagcccttcccagtcttacaaggagtgacacacttggtggccttcaagcctgtcactgcaattcatgcagtgggtggtaagaggacaaagcacgctaggtccctgatccgacctcccagggatgacaggtctggctactcctcaaactgaacctgaaagaatgcaaatggttcaagttttcaccctgattctggcacaccccgaggcaaaaatagccatttgccttcatacgagcttctgtgtaggctgtgaataaggaggtttctatctcagctttctttttgctcatttaaagacaactgagagtacgacagggtaattgttttgttttaaagcactgtaatttagttcctttctggaccttctatgtatgagtcattttctgtagcagtactaagagatgcaaatagaaaaacattatttctgaaagcttgagatttcaagctgggccttttattcacattstcttgctagttttagttttacttgtgacattcatgttattagaagaatgacacaatttcaatcacatttttgtcccatgtactaatgtagcaaacaatttcacaaccttc

SEQ ID NO: 287550 - DNA, 555 bp, Homo sapiens
tgagaagtccaagatcaaggtgccagcagatctggtgtctggtgagagccagctttctcatagagcatgacttcttgctgtgtcctcacttggtggaaggggcagaggcccttttaaaagggcacttagttgattcataggactctgccctcatgccctaggcctccaaaggcctgctttctaaataccatcctcaccttgggggttagaatttcaacatacgaattagcgggggacacaaacattcagaccacagcaattatacttaattctgccttttcaaggtctctgctctattcctggacacaaagagtttaaatgttttttggtcctacctcctggatacattttcttttctttttttgagacaagttctcactctgttggccaggctggtgtgcaatggtgtgatctygacttactgtgacctctgcctcccaggctcaagtgatcctcccacttcagcctcccagtagctgcaactactgccaccatgcctggataatttttatatttttttttctagagatagggcttagcaatgttgcccaggct

SEQ ID NO: 287551 - DNA, 556 bp, Homo sapiens
agaaatctaaaatttaaataaaaagtaattttatttatgttctaatatttaattcatagttcagacacgccttataaataagaaagttttatatttggcaatttcgtttgtctgcagcttcaagggtaagaagcagaaaataagccagaaaagcctctttccagctaaaatagttcacgaagtttgacaacacaagtctcttaaattgtaattcacattccacatactcttaaatatcagcaaactactttatcatcttaggatcattcctcctttcacgtatttgccctaatccatcatctatcactaagccctacagatactacagtcaaatgctttttatctccaactctatcttcccattccaacttctactaacttattttaggckttataggttccaacctgggtaacttcctctcttaactggcatctctgccttcacattacttttctctagcacagaatggaaagttaatgtttttaaaaaaaaagagcaggtgaagttcatgtcccaaacaagcctcagtgtaagagaatgatactaaccccattc

SEQ ID NO: 287552 - DNA, 510 bp, Homo sapiens
tagctaaggaaataacttaaaattgttgatttccagcaaagccaggactagagtccaggcttccctattataaattctgtactttgagatggatgtaattgaatgatattataaatatatttatgtaatattcacagagctctgttttcttttataccacccaggtctctgttaatccaaatagtccctttgtgtgaatagcaaaaataagtaagtaaagcagtgccatgccagagtggttggttttgtcagccgacctcaggttggactgcagcccctctttacccaagcctggcagccctagttattacatttgctttgtgctttgcaatatactgaattactgtatttcataatattttggtggctctaaggagcaatcttgtgagacattcaaggtagagaaagtattcctgccccctatttgattgattaggaagtgacgatttagagatgatatgacttttycatgctcacttccatcactgggggaatggatcttgatcccag

SEQ ID NO: 287553 - DNA, 608 bp, Homo sapiens
gctgctataacaaaatactacaaactgggtaatttattcatagcagaaatttgtttctcacattactggagactgggaagtccaaaatcaagatgctgacaagtttagtgtctggtaaaggacaaatctctactctaagatggcacctagaatactctgtcytcacctggcagaaggtggtggagcaaaaagaggcctagctagttccattcaacacttttaataagactatccatgaagttggagccctcaatgcccaatcaccttctaatggacccacctcttgctactgttgcataggaagttaagttccaatatgaattttggagggcacataaacattaaaaccatagcaagatcttagctgcttctttctcagtccccaaacctattgaagtaattacatatttttcacttccttggatagcacctgtctctaatgccaccttctcttacccagctaccacttcctaaggtttaggaaagcagaggattaagttgtctggattttctagaaaataacaggtaattagaatgtgaatgggcctctttggattctcccctggttgtgtagtacagcttacaacaataaatttagtcatgttcat

SEQ ID NO: 287554 - DNA, 507 bp, Homo sapiens
catatataaatcaataaatgtgatatatcacataaacagaattaaggacaaaaactatattatcacctcaatagatgcagaaaaagtaactgacagaattcagcatattttatgatggaaaattctcaactatgaatagaaggaacatacctcaacataataaaggccatatatgacaaataygacaaacccacagccaacattatagttaacagagaaaagttgaaagcgttccctctaagaactggaacaaggcaaggatgaccactttcaccactcttattcaacatagtactagaagtccttatcagagcaatcaggcaagtgaaaataaaaattaaaggcatccagattggagaagagaaagtcaaattatgcctgttggccaatgatataatcttacgtctagaaagctctaatgatgccaccacaaacctcttatatttgataaatgaattcaataacatttcaggatacaaaattaatgtactgaaatcagtagtgatt

SEQ ID NO: 287555 - DNA, 566 bp, Homo sapiens
tgaaaactttggagagtttatcttacttttgcagccttttataccctggataatttgtagattatatttaccaaggcaggacgctgagaatccaggtttatactagtaaaggacggctggtgggggtccaaraaaacagtagaacatttagcagacttcggtggtctcattaagcttagtatgtgttttctaatttcacctggatttttattcatatcatacaacctaacagctcacatgtcagcttaccatatggagactctcagttctgcatgcgtaagtcataaaggatctcagtaaagtctcattgcctttacagtggtattttgataagtgcacttactttgttgtcatgtctttgtctttctactccagtgcctatctaattacctgtcacatagtcagagctcaataatgcttcccaaagcattcatctgcatcattgctcggtaccttaatctcttccttcacggtctcttgcaaatattatgtcataatctacccacaagccaccaagaagtaggtggaaaatgttattctcatttcactgatggcaaatatcagat

SEQ ID NO: 287556 - DNA, 566 bp, Homo sapiens
tgaaaactttggagagtttatcttacttttgcagccttttataccctggataatttgtagattatatttaccaaggcaggacgctgagaatccaggtttatactagtaaaggacggctggtgggggtccaagaaaacagtagaacatttagcagacttcggtggtctcattaagcttagtatgtgttttctaatttcacctggatttttattcatatcatacaacctaacagctcacatgtcagcttaccatatggagactctcagttctgcatgcgtaagtcataaaggatctcagtaaagtctcattgcctttacagtggtattttgataagtgcacttactttgttgtcatgtctttgtctttctactccagtgcctatctaattacctgtcacatagtcagagctcaataatgcttcccaaagcattcatctgcatcattgctcggtaccttaatctcttccttcacggtctcttgcaaataktatgtcataatctacccacaagccaccaagaagtaggtggaaaatgttattctcatttcactgatggcaaatatcagat

SEQ ID NO: 287557 - DNA, 326 bp, Homo sapiens
catagcactgtatacatctttttgacttamaacatggtatcatggatagtgagtcacattgttcaatgcttccaggaaatgctgaaatcctcaagggcacccgggcaaagttcaacaaatatttgttgaattgaatgaactgaatcacatctacagagaataaagatttttttctcaaaagatggatctcattttatttatgtgtatatattctaaaatttccaatcctgtatgtcttttaaaaattgtttccattttacttaacaataatgtattgtccttgagtgatgaacaccctgaataccctgacttgatcactacataat

SEQ ID NO: 287558 - DNA, 616 bp, Homo sapiens
ggtcatggtggtagccaggttccaagaaagccctcaacaattctcatgcccttgtgcagtcccctccaacaatgaaaagtgttgacccatgtaaccagtaagatattgtgacaataagatattgtgacaataagatattgtgaaatgagggtgtttggctttgtcataatacaccttgcagcttttgccctgctctgtcatggatcactcaatcggcgggagccaggtcatgcagacacacagccctgtggagagatccatgtggcagggaactgaggattcttgccaacagccagcaccaacttgtcggctatgcgtcagccatcttggaggctgatcttccttcagacgactgcagcctccscatgtgacctcatgagagaccctgtgccagaaccacccacctaagctgctctggctctgaccctcaaaaattgttcattgtttctgaggtgctaggttttggagtattctgttatacaccaatagaaaagtaataaagccactgtctccttgacctctttaatgttaaaatagggcaatgcctttatttcagaattacagccacagtccaagttccaagggaccgcagtcaaatttgcatagcacggggaat

SEQ ID NO: 287559 - DNA, 497 bp, Homo sapiens
aatgggggagataagttagaagtgcttgctattttttaaagtttttttctagctctaaattatatatattttgtcataatgcattacattgttaacaatttagttttgctcaatgaacattgtttgagctgaagtcaatcaagaagtatattgcatttctgtgggcaaagaaatggtgtaggttattccattagtttcctattgctgctgtaacaagttaccacaaacttggaggcttaaataacaccagtttactgtcttacagttatgtaggttagaaatgctttataggtttcactggaataaagtcaaggcatttgcagggctttgctggttctggaggctctaggggagaatccatctccttgtcttttccaccttctggaagctgcctcattccttggctcatgtcccctttcttctatcctcaaagccagcaacatgrcatctctgtttgtgactctttttctcctcacattttcctgactgattcttct

SEQ ID NO: 287560 - DNA, 622 bp, Homo sapiens
aattttatgaagagtcccgccccctccatacgggaggaaacgtgtgtccctggggccctcagccaagcctccactatctttttggcccagacggatttcccaggtcacaagtggctggagacttcctcttgaaaaacatttgccgtcgtttttccctggcagagcccctttgaccctggctaacaaggacagcctgacttggatcccactatgcaggaaggaaggcgactcttccccgcacctcttgctacgattaggacttgcgacttggtgaaaacaggaatcaaaacttgggcctatttctcctgaggtctgcttgcctagaacaattcgtaacgatgaatcttattaaaaagagaaagtcctccccgactttatctttttccgcccagaatccgataaggaagacttgttctggccccctcagctctctgacctcayctaccagaggagagagtgggatcctctaacactcgagccgtcatcccagcactaggggacagtgaccagtgtggctcccgtggccagaacccttctgaagtttgggttgccctgtggtcttcgccttcaaagcaggccgccacttgaatccttctggaacggacagtgttgctgtaaacgc

SEQ ID NO: 287561 - DNA, 536 bp, Homo sapiens
ttcccctcagcttgaaggcagcattcttttgcttctctttgagtcaggtaattgttttgtcttccttccactcagtcagcaggtattaaacagcaaccgcattgccaagcactgtggtgggggctgtggcttatgctttccggagcagaacatagttgttgctaccttggggatgggggcgggaggaatagaaaaaatgcggagttagcggagtatcagggaacaagggtggaacagatataataattgcagtacagttagttagggcctattgaaggagcacaaacgaagcgtaaacttgtctgggaactagtggaaggtgtcccccaggggatgttaaagagctaattctagaattaattcastggggaaagaaaaggagagggagatgccaggcagagggagcagcatgcctgattgtctggaggtgatcagagggcctggctgattgaagatgaacaggaattgtgtagtctgtgttcattcattcatttattcattccacaactatggatttaaaaacggttagtcaacca

SEQ ID NO: 287562 - DNA, 585 bp, Homo sapiens
aaggggctgggaaagcagattggctatctgtttggaccctgtaattttaccaaggacatagagtggaaggagttgcataagagtacaaagctgtagtccagctttgaccaactagtccatttattcatattgctgaattaaatakttaatgcttattgaatggccatttcattcttgattctagaaggagtccccttattgaaactgagggacagggtaggagcttgagcacaagaaatagagaaaaaaatccaggtagtaactaggaccctcactcattcttatatcccacagagcttttattggtcacgtcaggtgcatggtctaggcagagccaatagcaaaactggtgatgctaggtcacctgggctattgactctgctgataaacagggatgggattcagcaccagcagttgcaaaaatagaggggcagaatatggcaggtcactcttgtgtatagtcaagaaatacttctgactcatccttaatgaaatcaaatccatgggtaaaacatctccaaccttttcccaaagtgagacatagccagaaaacctcctctggaaagattaccagatataatatag

SEQ ID NO: 287563 - DNA, 542 bp, Homo sapiens
aaataatctccacatctcaaaaatcttcaacttaatcacatatgcaaagttccttttgccatgtaaggtaacaaattcaccagtttgggggattaggttgtggacatcgggaggccattgttctgcctgccacaccaccatgttgcaatgttctagaaatttgaaagagctcagagacttgtcctcaagtcagccttgagttggttctcttgccttttatttaataactagattctagtatccataatcatgtctttattctctgctcccaatctccttaacaacattgcctagctttcaaggttctacagtgataatcttgatccrtagtgcagggttgaggtcacactggttaacgggatctcagaattcaaactcttagtactaaatttgtctacactgcctggattacctccagaacctgtcttctcctccctctactaaataaatctctatcctaggaattgtagcttcgtatttttgcattctgaagtcagttactctcatcttcaaagctttgaaattacgaatattttgtgaag

SEQ ID NO: 287564 - DNA, 511 bp, Homo sapiens
aaggtggaggggaagcaaggcaccttattcacaaggcagcaggaagaagtgccgagcaaagggggaagagcctcttttaaaaccatcagatctcttgagaactcactcactatcaggagaacaccatgggggatacagccccattattcaattacctccacctggtatctctcttgacacgtgggaattatgaggattatagggactacaattaagatgagattttggatggagacacagccaaaccatatcaacacctgagttccatgtacattasacaagaatttctgtcccttttgttaaggcccaaagttgacatctgaaggaaaacatgaagaaaaaaattcttgttaactcttaaatattctccaaaagccatctctacatatcagtaaaagaggccagtatatacacagttacaaaagcacgtaacctggaagtcttcattaactgtctctagagccctcatttaaggatccacaaagacctgtcagttatattttgaaaatat

SEQ ID NO: 287565 - DNA, 590 bp, Homo sapiens
agtcaaagcacttacaagaatattgagagtcagagctgagtgaaaattacaaaagaatcaagtctaaaacaaggcatgaggtcaagtggagactagtcaggaagagtaaggggagtcctggaaatgccaaaagtatctatctctcaagcatccttggcttcccttcagtgactggcatgtgtatggcctattggcacatcaaataaggtgaaatatagatgcagggtacatgtgttacatctgaatacccagactgcagagtaacatgcaaaattaattttgttttgttttgctgcaaaaacctgctccactcagggaaagaatgtactatcgaaaggtattgacagcatagagctacagtgggggaaaatgccccatcagtatgaagtgagtcaaaggggcctgaaatggttcagttaagactttgtatttaattaartagaaagttatcatgtccctatattgacagaggtgcttcctagagccaaatgagtggaaacctttaggttttctcagaatattttcagacgaatcaggagaatgaaagttcttgaaactgtggcatctgagaaatgctgaagtcccagaag

SEQ ID NO: 287566 - DNA, 545 bp, Homo sapiens
cctaaattgggcttgataattttatctgggaaataatcttgggcatagtcactagaacatggaactgattagtaagtagattaaaagcctaccaaggagcccaacaagtatttgagggaaaggtattgtcaaagacattttctttgttagagcattagtattgcctcgatgagtaattacttagtgtgaagggttyaagaaagtgtctgtggaaattgcatttaaactgagtcctcaaaaatggaataatcagcaaggtaaaggagtaaaacattgtgtagttcctgaagttaggaactgaatgagagccaatatatttgagatacagtaaattgaagggagcctaatgagagataaggatttaggtaaggagaagaacatacagggcttaaaggttatgtgtccagaattggtgggttattggtctcactgacttcaagaatgaagccgcggaccctcgcagtgagtgttacagttcttaaaggcggtgtgtccggagtttgttccttctgatgttcggatgtgtttggagtttcttccttctg

SEQ ID NO: 287567 - DNA, 660 bp, Homo sapiens
gcaaaccatgtacatatactatttttttcctatttcctatttttttcatagatatatacatatctatgttaaagtttaatttataaattaggcacagtaagagatgaataacagtaactaaatgaagttattgttgctaaagcattattaagtaaaatgagagtaaattgaacacaagctctgcaatataacaaccagttgatctgataacccagacacctatgaaragactcaagtgcagggggcatatatagcatggatatgctggacaaaaagggggttcgcatcctgagcaggctgaagtggggtggtgtgagatttcatcatgctatgccgaacagtgggcaaatggggagcttatgaattgtttatttctggaatttttttcatttaatattttcaaactgtggttggccgtggataactgagactgcagaaagtgaaaccgcagataagtggggaatgctgtaattacaaattgataacagagctctaaaggagtaacaaggtactgagaaaacacattaaaataaactgacgcaggctgtgagataaaggctgaatcatgcaggtccctaaatgaaaatggggtgggcggaggcaaaagcattcgatcaaagggaacacaaaagctctgaagcagtagggaacatggtgtgt

SEQ ID NO: 287568 - DNA, 660 bp, Homo sapiens
gcaaaccatgtacatatactatttttttcctatttcctatttttttcatagatatatacatatctatgttaaagtttaatttataaattaggcacagtaagagatgaataacagtaactaaatgaagttattgttgctaaagcattattaagtaaaatgagagtaaattgaacacaagctctgcaatataacaaccagttgatctgataacccagacacctatgaaaagactcaagtgcagggggcatatatagcatggatatgctggacaaaaagggggttcgcatcctgagcaggctgaagtggggtggtgtgagatttcatcatgctatgccgaacagtgggcaaatgggragcttatgaattgtttatttctggaatttttttcatttaatattttcaaactgtggttggccgtggataactgagactgcagaaagtgaaaccgcagataagtggggaatgctgtaattacaaattgataacagagctctaaaggagtaacaaggtactgagaaaacacattaaaataaactgacgcaggctgtgagataaaggctgaatcatgcaggtccctaaatgaaaatggggtgggcggaggcaaaagcattcgatcaaagggaacacaaaagctctgaagcagtagggaacatggtgtgt

SEQ ID NO: 287569 - DNA, 584 bp, Homo sapiens
aagccctgccagaaaaatttcactggagggggatggaatttattaatccctttgataaatacatttctatccttgttctaggtactgagtgcttcagtcaacgaaacaaagttcttgatgtcacagattttacttacattttagtgaggaaggacagtcactagaccaataaacatataaatacataacatgtcatttgccatgcagggtaaatgctatttaaaaattaaacaaagtaagatctcactattatttgacatttaagtagacaaccaaatgaagcaacagggtaagaaaagaagagaaaaggatgatggagagcactttgtctgttcaaggaagagccaggtagttgatgtgattaaagtaatatgaaaaagtagaaaagattggaaatgaggtcaaggattcaagcagagccagatgstatgccaagggaaggacattaaaagttattctgggtaagatgggaagctgctggcatatataaagaaaggagtgatatgatgtgacttgggtttcacatttaaaatgaaatcactctggctggtgtgtggataatagacagtagcagggtaagagtg

SEQ ID NO: 287570 - DNA, 1609 bp, Homo sapiens
gtgtgcctaaatgtctgtcaataatatctatacaatttagagagtgacaccaaacacccccatctagtttctgatctactctcatgactttgagctgggctggkcattgaaagccacctgtctatgctcacagccctcaggtctgagtaaattggccactcactgtccacagcattgaagtaagaaaggcaattcttctattaacacccttttttctctaaagcaacctacacagctgaagtgattttcccttggagagcaactgagcccctgaagggttgaaattgccttaaggttactttctgagtttgatcctgggatcaagaataaaacacggctgttttctctaatttacagtgagctttcatttccaaggagacttcatctaagctgtctatacaatgccaaataccctgtgaatatagtggaaatactagggaaatagaaggttggttttgacatcaggtaaatctgtgttatctacctggtgaccgatgacctgggatgwatactactttcagtaatggaaaaaatacttccatgttttatattttcaataatttatttttttctttttttgagacggagtctcactgtcgcccaggctggggtgcaggggcgccttctcggctcattgcaacctccgcctcccagcttcaagtgattaccctgatttagcttcctgagtagctgggattacaggcgtatgccaccacgcctggctaatttttgtatttttagtaaagatggggtttcaccacattggccaggctggtctcaaattcctgacctcaggtaatcggcccgcctcggcctcacaaagtgctgggattacaggcgtgagccaccatgcccggcctcaagaatttgtatgtatgttcagagaggcawgttttgcagtgccaaatattcactattgatcttacttaccttgagggaaggagcaattgctctgactctgacagaaggagaggaacwacgtgccctagttaacagtcccagttcattttagcttttcagtcatccctcccaagtgaacagaaatgatgaagccatctgggatgctccagatcaacctaatcaccaactagatatcactgataaccttagctgataccatatagagcagaagaatcacccagctgagccctgtccaaattcctaactcaaaattgtgagatataatacaatggtggttgtctttaactgctaagatttgcagatattttgttagcagcagtaaataactggagcctgcatatcctgttatactaacagtcttgtaaagttggttgcttggatttcattagaattagtatgaaactctattttaaccagtttctgttaaagaatgtcattactgttttattttttgttttgctttgtttgtttgcttgcttttgtttagcatccaacctctctttccaaatgcagctcacwctttcttttgcagaaatctcccacaaatgcaaccttgatgaaaggtagttcccttcaactgccaaaggggtagattcttctacctacttattctgagtagctaggaaatagcaattaagccttcaattcctctggagctttgaatcttcagctagcaataaaagatgtg

SEQ ID NO: 287571 - DNA, 584 bp, Homo sapiens
tgggtccttttttttcccatgtgtttgctccrtgtagcctgcttgggcttcctcagggtaactgggctttttatatggagtctggcttcctccagatctagtgttccaagaaatatagatgaaagtggtgaggcttttcatgacctagacttaagaattctgggaattacttttgccgtattctgctggccaagcaagtcaagctagcccagattcaggcagaggagcatacactccatctcagtgtgaggagcagcatgcatgtgcagagagggaaggaactgatggtggccatttttggaaattacctatcacatgtgaaacagaagaggatttcaatgctgaaaggaacctgaaagatcatcttatacgttttctcattttaatggagaaaaatccaattactaaaagtatgaatgctatttcataaatgctattcaagtatgaatagtattcatatttctagtatgggaaataatcatctctccagtatatgcatgttcttcgcctgttttaaaattgtattatttggtgttgttttgcaattgagttgtaggaactctttgtgtatttagagtactaac

SEQ ID NO: 287572 - DNA, 546 bp, Homo sapiens
atgcaattctcatcaaaataccaccgtcattcctcacagaacttgtaaaaacaatcctaaaattcatatggaaccaaaaaagagccagcatagccaaagcaagactaagcacaaagaaaaaatctggagrcactacattaccctacttcaaattatactataaggtcatagtcagcaaaacagcatggcactggtataaaaataagcacatagaccaatggaacagaatagtgaacccagaaataaacccaaatacttacagccaactgatctttgacaaggcaaacaaaaacataaagtgggaaaaggatacttttcaacaaatggtgctgggataattggctagcctcatgtaggagaatgaaactggatcctcatctctcaccttatacaaaaatcaactcaagatggatcaaggacttaaatctaagacctgaaaccataaaaattctggaagataacatcggaaaaaccttactagacattggcttaggcaaagacttcgtgaccaagaacccaaaaacaaatgcaacaaaaacaaaaata

SEQ ID NO: 287573 - DNA, 546 bp, Homo sapiens
atgcaattctcatcaaaataccaccgtcattcctcacagaacttgtaaaaacaatcctaaaattcatatggaaccaaaaaagagccagcatagccaaagcaagactaagcacaaagaaaaaatctggagacactacattaccctacttcaaattatactataaggtcatagtcagcaaaacagcatggcactggtataaaaataagcacatagaccaatggaacagaatagtgaacccagaaataaacccaaatacttacagccaactgatctttgacaaggcaaacaaaaacataaagtgggaaaaggatacytttcaacaaatggtgctgggataattggctagcctcatgtaggagaatgaaactggatcctcatctctcaccttatacaaaaatcaactcaagatggatcaaggacttaaatctaagacctgaaaccataaaaattctggaagataacatcggaaaaaccttactagacattggcttaggcaaagacttcgtgaccaagaacccaaaaacaaatgcaacaaaaacaaaaata

SEQ ID NO: 287574 - DNA, 592 bp, Homo sapiens
gtccaaagtccatgtgaggggtgtctcctgttattcagacatccattacctggatagtgtagccaagtagttctggaaaaccatcctaccctcagtactgtatttatgtctgttctttccagagtagatcaatgcacaacaaatggcaagtggtttaataacagaatgcaattctaaaaataataaacagcttacctgctcaaaactctcttaccaactgacatgaaaaggatctgaaacttatgtccacttctaaatgaaggcattgactttagaaatctgaaaagatgcatgtgttatttatgagtgtaacacaatcacccataagtactttggcaggatgaaaccctaaaataatgggatctcggacaggttagttttgttcagagagattgaagcaggggatgtctagggtgtgatgaactattcagggactctgggatggaatcacagtgmactacaatctctcagaaagaagaagtcctatgaaaccatttggatgggaaaacaatgttcattgtagcagtattcacaataattaagacatggattcaacctaaatgcccattaatgacaaattgaataaagaaaa

SEQ ID NO: 287575 - DNA, 332 bp, Homo sapiens
tgtgtctttacagcaaaaactggtcctctgtcactcaccatcatacctataatgccttaatatgatgcctggcaaataagagactcagtgtaaatatttgttatattatttttttgcattcagaattagagagccttatttaaacaagaggtgacatcaattctattgtatgttttattgttgtatttctttccatttaattatcatttcatctgggtttgagataygtgatatgtaatataaacctatttattgatatgtaaaccaaaaataaaattttaagctctccaaccaattgaacagatccctccacttgaccaaccacattccca

SEQ ID NO: 287576 - DNA, 297 bp, Homo sapiens
agttgaacccactgggtggctgtgctaattttttgggccagagcttctctgcagttctgggacaagcaggcatcagcccccctccggagcacaggtgggccaggcaagccgcaggtcctggccgcagtggtcgcgccgcgggagtgggtcgtaggtgcaacaggcggcccggagcgcggtgtccctgttgggagggscaccgcttccctaagattgcgggagacacacctgggggaagagggagggacgagcagaggcagcacaacagaggtgcaggcaggaggcttcgtgcctcgg

SEQ ID NO: 287577 - DNA, 546 bp, Homo sapiens
aaggttgcagtgaactgagatcatgctactgctctccagcctggacaacagagcgagactctgtctcaaaaaaacaaacaaaaaaagaattggatctgatttgactatgcaaattatcacttgggaccttgggcaacttattcaacccctgaaggtttcagtcttcttatatataaaatgaagataacagagacttcttcatagactgtttgttataagattagcaaaaacaatgtacttgaaatgcttagaagataatacatgctctataaatgatggctatccttttgtgcctgaatccttgggttcttttgtaatttcctgcctgatgtggtttggctttgtgtccccactcaaatcccatctcaaattgtaatccccacctgtcaakggagagaccttgttgaaaccccctttgcaaaattataactgaggaaattatgtcagtgaaggagatcagacctaaccgaccccaccttccttctaacccctaaactgtctttgttcattcctgggtgtaagtgaaactagccttgggaaggaaga

SEQ ID NO: 287578 - DNA, 581 bp, Homo sapiens
agtaagaagtaaaacaaatggagtgacatatgtgatgacccttgttttcagaaaatatgtatatttgtacccctaaattatccagggaacaaatagaaagtcttaatcaaattaaataaagtcattacctgaaagataaatctaaaaacctcaataacttaacatttgcttttaactatttagaaagtattagaaatatgtgcaatttccatctgggtaccacggcttacaccagtaatcccaggagtttggaaggccgaggcaggaatttgagttgagcctaggcaacacagcaagacaccatctctacaaaaattttaaaaattagccaggtatggtggtgcatgcctgtrgtcccagctgcttgggaggctgaggcaggaagactgcttgagcctaagaggttaaggctgcagtgagctttgatcacgccactgcactctagcctaggtgacagagtgagaccctgtctcaaaataaataagtaaataagacatataccatttccaatagcatcacaaatataaaatacttgcaaataagcgttagaaaaaaagtgtgtattgcaggggcagtgacag

SEQ ID NO: 287579 - DNA, 593 bp, Homo sapiens
ctggccagtaggcccacaccacaccatgaaaatgatgcttctggttttcactcagaaccaaacctgcactgggaaaccagggcaaatcatgtctgctgagggtgggtsggcaggctcaaagcaatcaagaactctcatatcctccctcatatccttggctcttttacttcaccttctttatctggagcctaacaaggactctaatatattattcacactgtttactcagtctggaaagctgctcattccatttgtcctatgtggggcacacccctgtcttgtgaccacagttctctcactctagcagctccagtggcctcggttgggcccggccatgatgaggttcacagtgctccatgcatacttgtggacagaatcaatgaacaagcaatggaatcaacggacgaaggccaaagttatcctttgtcttctctggaaagttacacctaatgctctgcagacccagcaaacagcttactagaaaaacttcattccagtggaagcaaacaaacagagtaatgtatttgaaaagcatgaactaatggtgaacatcagaaaaccatgagcaacatctgcttctctactaattatag

SEQ ID NO: 287580 - DNA, 567 bp, Homo sapiens
gattaaaaaaaaaaaaatcccaaacaaacaaccctaaaacctgatgaacagtaactctgtctcttgtggttttaaaggctctcaggttaaaacactctttttttttttttgagacagagtctcaactgtgtcacccaggctggagtgcagtggcaygatctcagctcactgcaacctccacttcccaggttcaagcaattctcctgcctcagccttctgagtagctgggactacaggcatgcaccaccatgcctgggtagtatttttttttttttgtatttttaggagagatggggtttcaccatgttggccaggctggtcttgaattcctgacctcgtgattcgcccacctcggcctcccaaagtgctgggattacaggcgtgagccaccgtgcccggacaaaacactcttaagggtaaacaatcattttggatttcttacctcttcaatgcttttaggatggtatctagggacatgcaatctcgtgagaagaagtaaaagacagctatgatccacaatttgtcctctgccagccctgctgactctgactgatgaataaaagggag

SEQ ID NO: 287581 - DNA, 402 bp, Homo sapiens
taaaaaattcacataaacacattacaaaaatcatctcaactgcatcaaatccattgatgcagacaaaatgcactatagttaaagtgaaayatagttctaccaaaacaataaagctatattgaacagaaaaaatattttacactgcttaagtttttaaatttaagttacttaaaatcaaatcaaataaaaaattcagtttctcagtctctacaattcctcagtcatatttttaagtgctcaatagttgcttatggctaatggctcaaacccagaagaagataaaaaatgcatattgttatctgtattttatgtgtgatgggggaggggcataattctcactcccctctctccacttcctgctgcctgcctaccaaattgttgaggtgttttttgtttttgttt

SEQ ID NO: 287582 - DNA, 524 bp, Homo sapiens
agtggtgtcagagaagattcagtagatatccaggacttttacatccacagggaaagaacaagcccacacatgcaaggatgttaaatgagaaaactggacttccattcttacattgcagtagaaacaccctgtcccactaccagagtggtgtcaaaggagagctaatagagagtcagaactttcactatactcagcagtaataaagaccatactacctcatggtgtcagtggaagacccttgagaagtagtaacaaggcatccctgaccctcctagccaggctggtatcagcagaggttaactgggatgccagaagttccacctccatccagcagtaaccaagaggccctcctgcaaatgaaggctgagtgagaaatttggatttccatcccacctggcagtgaaaggcgatgtctacctttctcttgccagaatratatcagaggaaacctgctgaaacagaacattgaaaaaagacactgagtcttataataacttaattgtctagatttcaatagaaaaatc

SEQ ID NO: 287583 - DNA, 547 bp, Homo sapiens
taacctatgacaaatataggacatcatggccaagtgacatttatgcagaattacaagttcatacttcagtgtgtaactttgaaatgcacaatggaataattaaatcaggaagacatagttgagtcagttcaatacatttgaaacattaattcacaaatttcatcacctatttattttatttaaaaatcccagcaaatttgaaatagaggggaattttctccaygtgataagttacatcaatgaagaaaattaacctaatataatgtgtgagacgtggaaatcatttctccctgtgattgcgaacaaggcaaagatatcagctctcatcattctcttcaattttagatagaatatttagcaaatgcggcaaacaaaagagaaaacaggcagaatgttgcaaagaaaacagtaggacttccttatttaccaaagacatgaattgatacgaaaacatttaaatgaatgtatttttagacccatggaactaatgaatgtgattagcatggttttacatttaagggtaatgtacacattcatttttatttct

SEQ ID NO: 287584 - DNA, 536 bp, Homo sapiens
caagtaatttaacttccctttgcctccatttctaccaaaatgttgtgagaatttcatgaggtaagaatatgagaaatgcctagcagggtacagaaaattatatgcattcaacaaatatttgttgcattctatttttcccaaacttcaagctgcctggagagtaagagaaaaagcttacactttttgatacgtgccatttctgtttgcagagcttttctttctgaggcagccaggctactatcaccatctagaaaattagaacaaagtaaagaagcattgttgagaaggagcctcagaactgtgcatatacaagggagtggagtatctttttcaaactgaaaaaaaaagcttattttacattgatgtttacactttgaaggaaaataaaaaatactgaaaagcccaaagaatgaaaaatcgctatttccrtccaaccccaaatgtccctctttgtctgtttactgtatcccaaagtacgcatacatatcacatgcacacatatactccctgattacctagcaatccatatgccaggt

SEQ ID NO: 287585 - DNA, 536 bp, Homo sapiens
caagtaatttaacttccctttgcctccatttctaccaaaatgttgtgagaatttcatgaggtaagaatatgagaaatgcctagcagggtacagaaaattatatgcattcaacaaatatttgttgcattctatttttcccaaacttcaagctgcctggagagtaagagaaaaagcttacactttttgatacgtgccatttctgtttgcagagcttttctttctgaggcagccaggctactatcaccatctagaaaattagaacaaagtaaagaagcattgttgagaaggagcctcagaactgtgcatatacaagggagtggagtatctttttcaaactgaaaaaaaaagcttattttacattgatgtttacactttgaaggaaaataaaaaatactgaaaagcccaaagaatgaaaaatcgctatttccatccaaccccaaatgtccctctttgtctgtttactgtatcccaaagtacgcatacatatcacatgcacrcatatactccctgattacctagcaatccatatgccaggt

SEQ ID NO: 287586 - DNA, 539 bp, Homo sapiens
aatccccatggcttgtgtcttaaaatgcaagtcagttaaggatcgaatccatcctcccacggcgtttctctagttctggggctcagaccacgagggctcaaccccgcgggatggcggtgactcaagggctttcataaaacacacagaactttccggcttcactccagcctcggcagatggtaacaagtgtcagaagcattcaattagcccctgcatttgctcatgatttaacaagctccgtctagtggcatacctgtgatatgtggagctgcagagacgtaagcttctgaaggactctataaaaagctttttgagaatgatgggtttgagtatttcaagttcccagactgccgtaaaaggcaaaggccaggctcccccattcctcttgactgtgtgctcacacagcaaattgagcttccaaaggcaattaattccacaatcctcaattccacaggggatcatgggctgtgcacacagcttcatagmaccactgagccagggggactttgccctatatagaaacccttgtgtttatacac

SEQ ID NO: 287587 - DNA, 605 bp, Homo sapiens
gagggtttgcaaaggggggcccagagcctcctgatcccagggctgggcctggagggggctgactccccaggggttacccccactcygaagatctctatcctgggctccctttgggggcctcttcaccctcttccctgccccacactccccatccaggccgcttggtgcccccaatggtcaaggcatgattctgctcctcagccacgtttcattaaatggacaatcaaatgtgaattggtgtgtgcacttttttgtaacgctttttatataagtaaatggctaaatcgggaaaacatctttgggcagaccatctgtctcaatttgagctttgaaaaatgtggtcacctcgcaatgttcccgtgtcagactctaaaaacaagaaactgggcaggcaagcgaacatcactcacactccgaactcgactgtctgctttgcttcgggaatcactgaagctttccttccggccacagctgctggggctggggctgcccggaagaggggccagctgggggaggcgctggggcctttgcaggggttgggggcagatgagaagtggcccacctgcccctggagcctcagtggatccatagtgcgcacacacagt

SEQ ID NO: 287588 - DNA, 611 bp, Homo sapiens
cttttttggattccactgtatgaattgctgccatttaattaactgatcccctgaatatttatgggttttttttttttcgagctggagttttgctcttgttgcccaggctggggtgcaatggcacaatatcagctcaccgcaacctctgcctcccaggttcaagtgattctcctgcctcagcctcccaagtagctgggattacagacactcaccaccacgcccggctaatttttgtatttttagtagagacaaggtttcaccatgttggccaggctggtctcraactcctgacctcaggtggtccacctgccctctgcctcccaaagtgctgggattacaggcttgagccatggcgcatggcgaagtttatattctttgcaatattttgccattgcacataatgatgcaacaaatattcatctactggtatcattcctcgtgtgtgctagtatatttgcagggtaagtacctgctgtgaaattgctgggtcaaaggctgtaagtctttaacagatgctgtcagatggtgaagttggtctcttgaaggtttttccagtttacactcttgtgaacatggtgcagacagcctgtccctgcagtctcactgacagc

SEQ ID NO: 287589 - DNA, 611 bp, Homo sapiens
cttttttggattccactgtatgaattgctgccatttaattaactgatcccctgaatatttatgggttttttttttttcgagctggagttttgctcttgttgcccaggctggggtgcaatggcacaatatcagctcaccgcaacctctgcctcccaggttcaagtgattctcctgcctcagcctcccaagtagctgggattacagacactcaccaccacgcccggctaatttttgtatttttagtagagacaaggtttcaccatgttggccaggctggtctcgaactcctgacctcaggtggtccacctgccctctgcctcccaaagtgctgggattacaggcttgagccatggygcatggcgaagtttatattctttgcaatattttgccattgcacataatgatgcaacaaatattcatctactggtatcattcctcgtgtgtgctagtatatttgcagggtaagtacctgctgtgaaattgctgggtcaaaggctgtaagtctttaacagatgctgtcagatggtgaagttggtctcttgaaggtttttccagtttacactcttgtgaacatggtgcagacagcctgtccctgcagtctcactgacagc

SEQ ID NO: 287590 - DNA, 611 bp, Homo sapiens
cttttttggattccactgtatgaattgctgccatttaattaactgatcccctgaatatttatgggttttttttttttcgagctggagttttgctcttgttgcccaggctggggtgcaatggcacaatatcagctcaccgcaacctctgcctcccaggttcaagtgattctcctgcctcagcctcccaagtagctgggattacagacactcaccaccacgcccggctaatttttgtatttttagtagagacaaggtttcaccatgttggccaggctggtctcgaactcctgacctcaggtggtccacctgccctctgcctcccaaagtgctgggattacaggcttgagccatggcgcatggcgaagtttatrttctttgcaatattttgccattgcacataatgatgcaacaaatattcatctactggtatcattcctcgtgtgtgctagtatatttgcagggtaagtacctgctgtgaaattgctgggtcaaaggctgtaagtctttaacagatgctgtcagatggtgaagttggtctcttgaaggtttttccagtttacactcttgtgaacatggtgcagacagcctgtccctgcagtctcactgacagc

SEQ ID NO: 287591 - DNA, 611 bp, Homo sapiens
cttttttggattccactgtatgaattgctgccatttaattaactgatcccctgaatatttatgggttttttttttttcgagctggagttttgctcttgttgcccaggctggggtgcaatggcacaatatcagctcaccgcaacctctgcctcccaggttcaagtgattctcctgcctcagcctcccaagtagctgggattacagacactcaccaccacgcccggctaatttttgtatttttagtagagacaaggtttcaccatgttggccaggctggtctcgaactcctgacctcaggtggtccacctgccctctgcctcccaaagtgctgggattacaggcttgagccatggcgcatggcgaagtttatattctttscaatattttgccattgcacataatgatgcaacaaatattcatctactggtatcattcctcgtgtgtgctagtatatttgcagggtaagtacctgctgtgaaattgctgggtcaaaggctgtaagtctttaacagatgctgtcagatggtgaagttggtctcttgaaggtttttccagtttacactcttgtgaacatggtgcagacagcctgtccctgcagtctcactgacagc

SEQ ID NO: 287592 - DNA, 567 bp, Homo sapiens
aattggcaccggagagcatgtgagaagaaactgtcacctgggaccagagctggcttcaaagggcaggtgtgctctgctggagtgcggatgcgcggagtgtctgggagctgggctgggcagaatggctggagcaggggtctgtgtgggcaccaaggtgatgaaaggcggtcagatcaacagggccaggacaggtaagggtgatttgttgagttttgttttttcctaatgaagcagaaatggaaaaagagggggaaagcaatcgtgtggactctatcctgcaggtcagacaggcagccccggagaagacctgctaggtgcacggctggcttgtttctaacatcacctgtggtcagcagcgccaccaagagccaccaccagggggcagaggtagggccatgkagtagacgcctgtagttttcgcctgtccaggacgccttcacccctgcttcctttgagaaaagtccctctcccactccaagtggtactgacggggatcacccacacaaaagaaacctggaggctcccctcctggggcacccggcttctgctccaaccaggtgagcccaa

SEQ ID NO: 287593 - DNA, 566 bp, Homo sapiens
ttgaaaggcagtaccttattggtaaggtacttcctgacttcaaggaaaacacgtcagtggacccaatccagaaaaggggttatcactaaattttattgttgtccaacccaaagactggcagctggtgtttatcttttccttttgaggctcagaggttagcagctttatagataagggcagccctgatcataaacctaactgcactggcacaaaataatagggttagcctagcccttcctgtcttaaatcctggtgctcacttctcttccttactaataagtgtcctctgtggcattttttttttccagaatgagtcaattccacctgcattaaaaacctgttcaaggcatggcactggtacaaaaatagacacatagaccaatgaaacagaatagagagcccagaaataaggccacacacctacaaccatctgatctttaacaatgctgayaaaaaaaaaaaacaatggggaaaggactccctattcaataagtggtgctgagataactggctagccatatgcagaagattcagactggatcccttctttatatgatatgtaaaaa

SEQ ID NO: 287594 - DNA, 478 bp, Homo sapiens
ccatttttagtgcagtgaaatattatttattatcataaattagtcactatctgtgaccttgggcaaactgtcttcatatggcaaatgaagtctttatatgacatactgcatatggaatagccgaagatcagaatattaaactaacytgcccaaagttaaaaagctagcaacagaaacattaagtatttcagttaaggcctgtttcttcattaagtgccatattcttttcacatacatatccaagaagcaggaggtttacagttactccaacatacatgagattaatagataacacacagttgaaaggttagctaatatgaaaacaggtttctttctattgcttgaagatgcccagacaatttccctggaatgatttaacagtgttctgatatatcaagttactctgtaattaatatgaatcatcttttaaacagtagttgaatttttttgtttgttctgacatatcttttaggtagat

SEQ ID NO: 287595 - DNA, 478 bp, Homo sapiens
ccatttttagtgcagtgaaatattatttattatcataaattagtcactatctgtgaccttgggcaaactgtcttcatatggcaaatgaagtctttatatgacatactgcatatggaatagccgaagatcagaatattaaactaacctgcccaaagttaaaaagctagcaacagaaacattaagtatttcagttaaggcctgtttcttcattaagtgccatattcttttcacayacatatccaagaagcaggaggtttacagttactccaacatacatgagattaatagataacacacagttgaaaggttagctaatatgaaaacaggtttctttctattgcttgaagatgcccagacaatttccctggaatgatttaacagtgttctgatatatcaagttactctgtaattaatatgaatcatcttttaaacagtagttgaatttttttgtttgttctgacatatcttttaggtagat

SEQ ID NO: 287596 - DNA, 726 bp, Homo sapiens
atataatgagcgtattataaggtacacttcagatgtcagatagaactatattggtgccatattgaactgcactgcactgctgctgactcatatgtgtaatcatgtttcttacacagcaagtgaagtttaatgccgtggtaaaagttcttatgttccaacctgtccacctaagatacggaatttaagataaggatatcgacaacaataaagtttcaactgaatgtgttatcattgtgagtaattttaatagtgaactttctcttggtgtagttataaaattacacttttgtcatctatttctgattttctgccctaaaattacattgagtttatttcatcctagcatcttttatccagtgccactgctattaatacctctatatttatcaaagtatgtcagaaaagttgaagctagagaaggagtcccagcatttgtagccactgttatcacaattgccctgaaggccaagttgcaggattttatcttagcttacccattagctcaccatattccagaaaaagcaggtgtctaacacttccaccatctgaaaacaggactcgagtgtaagcygaaatatgtaaaactgagtggcagtgggaatcaattcagccatttttttctttccataaatacttattgagcatctgcttatgtttcaggttcagaaaagaaaatggatagttttgtctgagatctcagtaaaattacatgtaggaaatttacca

SEQ ID NO: 287597 - DNA, 629 bp, Homo sapiens
tgccttcttgattttttcaactcttttattatttatttatggaaatgctagtgatttgttatgctgattttatatgcagtaactttcctgaatttgattatgaattctaaaagttttgtggcagagtattttggcttttctaaatatagaattatgttatttgccaaaagggagaatctgacttcctcttttccaatttggatgccttttattattttctattgcataattgccctgtctaaaacttcaatgctatactaaataggcatggtgacagtagacattcttgtcttgtttcagttattagagaaaagacttttaacttttccrcattaagtatgatgttagctgtgggcttgttatatatggccttttatttttttgagttatgttcctttttctgcctagcttgctgagagttttactgtaaaaggaatgttgaattttatcaagtgttttttatgcatgtattgagataattacatgttttttgtccttcattctctcgacataatgtatcatatttattgatttgcatattttgaatcatccttgcatccatggtataaatcggacttgatcatactatgtgactttgttgacatgctgttggattctgtttcctagta

SEQ ID NO: 287598 - DNA, 539 bp, Homo sapiens
aattccttctcctggctcatcctggctcaaaagctcccctactgagcaccttgtgacccccactcctgcctgccagagaacaacccccctttgactgtaattttcctttacctacccaaatcctataaaacggccccacccctatctcccttcgctgactctcttttcagactcagccygcctgtacgcaggtgattaaaagctttattgctcacacaaagcctgtttggtggtctcttcacacggacacgcatgaaactattatatctcttaagggaagaatcttttttttttctgcctccacatttgccttcacaacttcctgccaacattattacatttgcatttctcaaatttatcccctccctctttttcagctaccatgtcacttgccaaaatgacactattgctcacttagaatatggcaatagtcttctaatgactctcccctgtctccagcttttttgccctcccttttaactacttgcggaatctttctaaaattcgaatctggtaagtgtttccttttcttagacact

SEQ ID NO: 287599 - DNA, 551 bp, Homo sapiens
tcaacagattacatcctctgaaattgtacttagtatgtcaaaatgttgattcaaccattcttgaagatggtcagtaaactatttttactttactcctacttggatatagctcataatgatattttaatcagaatcaaattcttaatataaccagataagtaataaacattgccaaaatgcaacattgataccaagtgttttaaatgtttattttctttaatttggtattgggcattacaagaaggtgttaaaatgtcaagagttccttctcttttttcatactttgtttggtcattcatgcatccattcattcaccaagtaatctagttataaatcctgctactcattcactcatccattcatcctttatctttccactcagttactcacatatcaatccatttttcatgcatccatccatttgcccgctcacccatctaccaattaataatttgtccattcatacatctatcttattatgctttcccgcatmaaatgatccatccatccatgcagccacctaattttatgaaagataattgtttggcatc

SEQ ID NO: 287600 - DNA, 553 bp, Homo sapiens
tctctcaggcagctgctcttgcagagatctggatgatgtcatgacagtgcagactagaatgggagaggtacggatgtagaaaagtagtagggagaagaaagttactttgacttttctctgtagtcataaattaatcacccaattattacagatacattttaccccatcttacttattgtaggcttctacatctcagaattagataagtgagatactgtgctttattactttcaggtttttcaaataagaaaatggtaatgttgggtaagggaatacatgagaatgatgcattttgacatctaactacattgctaatctctcagtggcaagtagctatgttttaggagaaatgtgcctcttgccactggcatctggtttacaatttgcaagacttaaagttttttattttacmtttataaagagaaggcactgtccccctacttttttctacaaattcactttcacaaaactgttttatagatttaactatgcatcaagagtgtatctatcctttttaatgtttaactgaagtcaatgaagccttagtaactag

SEQ ID NO: 287601 - DNA, 1068 bp, Homo sapiens
tctctcaggcagctgctcttgcagagatctggatgatgtcatgacagtgcagactagaatgggagaggtacggatgtagaaaagtagtagggagaagaaagttactttgacttttctctgtagtcataaattaatcacccaattattacagatacattttaccccatcttacttattgtaggcttctacatctcagaattagataagtgagatactgtgctttattactttcaggtttttcaaataagaaaatggtaatgttgggtaagggaatacatgagaatgatgcattttgacatctaactacattgctaatctctcagtggcaagtagctatgttttaggagaaatgtgcctcttgccactggcatctggtttacaatttgcaagacttaaagttttttattttacctttataaagagaaggcactgtccccctactttttkctacaaattcactttcacaaaactgttttatagatttaactatgcatcaagagtgtatctatcctttttaatgtttaactgaagtcaatgaagccttagtaactagwcccccctttgactgtaattttcctttatctaccaaatcctataaaacggccccacccttatctccctttgctgactctcttttcggactcagcccgcctgcacccacgtgaaataaacagttttattgctcacacaaagcctatttggtggtctcttcacacggacgcgagtgaatgtttagcgatccaaaggagaccttgccaagtacaaggttgaggagttagatttaagttagcccaataatgcagaagactgatwaaaaaaacaaacaaacaacaacaacaaaaaaaaaacctatagtgacagcagaaacatacatttgaggacagaattaagaaatattgcaaagattatcttgatgaagcttaatgatggcaaataatggggaaagaagtgtatgaggccaaggatgagtatgaaatcccttattagtgtgaaatagaaagtaatccaagattgcaactggagggtaattgttcaattgtctcttccataacacttgagatttttatt

SEQ ID NO: 287602 - DNA, 593 bp, Homo sapiens
tcctactacgttgcccaggctggtctcaaactcctgggcgcatacaatcttcctgctttggcctcccaaagtgctgggattacaggcgtgagccgctgtgctcagccttatttgtgactttttgactaaatttgttaacagatgaataaaactagaaaacaatagctgaatgtgttcaactattgttttctagttttattcaactgttgtaggaaaagatacttgatataatctcagtattttaaaatttgttaaggcagtgtgctgccaacacttgatccattctggagaatgtcaaaggtacacttgagaagaacatgcatcctactatcatctgggggaggtgcactgtatatgtctattagggccaattgattaatagtgtttttaagttctgtgtttcactattgattttctatctgattattacattcatttttgaaaggttggcatatagtctcctactattattgtgttactgtctgtttctcctttcaattctgtcartgtttgctttatataattgaggactctgatgtcaggtacatatacacttataatggctacatcttcacggtaatttgtctcttcta

SEQ ID NO: 287603 - DNA, 587 bp, Homo sapiens
tgctatcgtttttcctctgagctcgtggtggttcatctctctctctctcgctctctctctctctcattttatatgattcacagcaagaaaaaaatgtcttcactcaagtaccttgccctcttggatcctttaaaaggtgtattttcttattttttaaaatttatttataactatgttttaatttcagaacaaatcattttgttttttttaataaaaaagatgaagtggttattcaatttgttatcacaaagccatttgaatttgcttctctctgtccattgctcttatcttgtttttgtatttattgctttgttctacattataaaagagacaagtttaatttcttatgccacctctcaaacacatttaaatacctcaagatagttaagtcagatgtataattaagcaaccagtagttctagtacacagaaaatatatataacaaggaaaaacaaaatgaaatkaaaaaatccagccactccaatccccccatctcatttaattaagagatgagaaaggttgaagaccagaaacaaacatcctatttagaatattccaaagggacataaccataatcaagaaccagc

SEQ ID NO: 287604 - DNA, 554 bp, Homo sapiens
attagcacttgtaccaaatggaattttcacattaaaatgatttaattcagtgttactattcagaaaaagccagaaattggcaataaataaaaagattaaaattcacaagatggaatactacatgcttacctaaacaatgactaaacccagttgtagaactgtatgagtgttatacgcagagacagtacaagccatgtggattctgatataaattaactactaggccgggtgcattggctcatgcctgtaatcctagcactttgggaggccaaggcgggtggattgtctgagcgcaagagtttgagaccagcctcggcaacacagtgaaaccccatctctagtaaaataygaaagaaattagctgggtgtggtggcaggcgcctgtaatcccaggtactcaggaggctgaggcatgagaattgcttgaacctaggaagtggaggttgcagtgagccgagatcacgccactgcattcaggtaaacataggcaaattggattcctctttgaatagtaattcctcatctcaagtgaaagagttaactgtattacaatc

SEQ ID NO: 287605 - DNA, 655 bp, Homo sapiens
agtttaattaaattcaaaaggagagcaaaatcacctgcagaagcatccartttaaaactagaatgtgtcattgttgtgtaaagaatttcctattttaaaggtactaaactgattatacagcagccactttatatgactgcttgagcttcacatttagttaaatttaaatatttcataaaatatagacataattaaaaagtaaaaaaaaaatagatgtgggcctggatgtggtgaaaaagggaatatttttacactgctggtgggaatttaaatttttaaaaccactatgaaaaacagcatgaagatttcttaaagaactaaaggtagaactaccattcactccagcaatcccactactgggtatgtacctgatatggtttggttctgtgtccccacccaaatttcatctcaaattgcaatctccacctgttgaaggagatgctttccccccatgcttttctcatgatagtgagtgaactctcatgagacctgatggttttataaaatgtttcctgcacttgcacccacattctgtttcctgccaccatgtaatatgtgcctgtttcctcttccaaaatgattgtaagtttcctgagtcctacccagccatgcagaactgtgagttaattacatctcttttctttataaattaccc

SEQ ID NO: 287606 - DNA, 566 bp, Homo sapiens
aatacaggtagacataatgcaagaacaaagatcaaagcagaattttttcagtgattaatctatgaagcttaggcagaatagaaatgtatatttgtaattcatgttcttctgctaaattttaaagacatattcattctatttcatattttttctcttatccttattttaaagcataaaaatatcaaaattcccctgcacaatacatgccagtccaggaaatgctaacatctaacatctctgtaaataaaaccccaacacactcacatatatttttacttctcattaataatttttcttgaacattgcttctttaaacaagactaagtaaaaatctacacatcattctttttataggttaatatcactttagaagtatatttttgagatcaaaggagatgttttccatcaaacagttcagaattgtacctggagatcaccagttgttacactgtgatgaagcatactttttgctgtgatttaattacatgacagaacagatttgaaatcagaaaaaaaatgaaaaaagacctattgctakaacaatgagattcttgtatgtttaaaat

SEQ ID NO: 287607 - DNA, 537 bp, Homo sapiens
actctcagtgaaagcagtgggaaatttaatttmttttcttaacataccaaaaatctgtcattagctctattcacagtaattttatactagatctcatcagtacatttcacaattttttgacctgccaacattagctgtatgttacacaaatgtcaacattgtccccattagaccagaattcatttctaaggtttgagatttcattgttacattttatgtgctaagatttttaaaggaaatatgtgaatcgatatttgtactttttatctcttttctctttataacatcaagcttcctcttaccttatttatcaaaaaatcttaatcatatctcttagaatctatgcaattcttgtgccaagcacatcttatttaacttagtttatattatataaatttttatcattttatttagtatattttataattctgatatgtacattttaagtaaaaaaataaaaatgtattgattcaaaatgattacttcaagatcctagcccctgcatgtatcaaaattatgactgtggaacaattattt

SEQ ID NO: 287608 - DNA, 537 bp, Homo sapiens
actctcagtgaaagcagtgggaaatttaatttcttttcttaacataccaaaaatctgtcattagctctattcacagtaattttatactagatctcatcagtacatttcacaattttttgacctgccaacattagctgtatgttacacaaatgtcaacattgtccccattagaccagaattcatttctaaggtttgagatttcattgttacattttatgtgctaagatttttaaaggaaatatgtgaatcgatatttgtactttttatctcttttctctttataacatcaagcttcctcttaccttatttatcaaaaaatcttaatcatatctcttagaatctatgcaattcttgtgccaagcacatcttatttaacttagtttatattatataaatttttatcattttatttagtatattttataattctgatatgtacattttaagtaaaaaaataaaaatgtattgattsaaaatgattacttcaagatcctagcccctgcatgtatcaaaattatgactgtggaacaattattt

SEQ ID NO: 287609 - DNA, 508 bp, Homo sapiens
caattgaatcagaatttaaaaacctactaaccgaagaaagcccagaccagatagattcatagctaaattataccagaygtacaaacgatagcttgtaccaatcctactgaaactattctgaaattgagaacgagggtcacctccctaattcattctgcaaaatcagcatcattctgacattaaaatctagtaatgacaaagtgaaaaaacgaaaactactggccaatatccctgatgaacaaggatgaaaaactgcttaagaaaatgtgagcaaaccagatttaggagcacatcaagaagttaattcactatgatcaagtgagttttattcctgggaggcaagttttgttcaatatatacaaatcaataaatgtaattcacaatataaacaaaattaaaaacaaaaatcatatgatcatctcaatagatgtagataaagctttcaataatatcccaaatcccttcatgatgaaaaccctccacggattaagcattcaaggaacatacc

SEQ ID NO: 287610 - DNA, 508 bp, Homo sapiens
caattgaatcagaatttaaaaacctactaaccgaagaaagcccagaccagatagattcatagctaaattataccagacgtacaaacgatagcttgtaccaatcctactgaaactattctgaaattgagaacgagggtcacctccctaattcattctgcaaaatcagcatcattctgacattaaaatctagtaatgacaaagtgaaaaaacgaaaactactggccaatatccctgatgaacaaggatgaaaaactgcttaagaaaatgygagcaaaccagatttaggagcacatcaagaagttaattcactatgatcaagtgagttttattcctgggaggcaagttttgttcaatatatacaaatcaataaatgtaattcacaatataaacaaaattaaaaacaaaaatcatatgatcatctcaatagatgtagataaagctttcaataatatcccaaatcccttcatgatgaaaaccctccacggattaagcattcaaggaacatacc

SEQ ID NO: 287611 - DNA, 510 bp, Homo sapiens
cgaaaagctgactctaaatccaaaactatcataagaacaaagaaggtcactgcataaagataaatagggtaattcaacaggacgacatagcaattataaatatataagcacccaacataaaagcatttaaacatataaggcaaacattgacacttcagaagagaaaagcacacagcaatacaataacaacaagatatttcaaagtctctcttctaaatatattttgtttcctactccttttatttttcagtcagtggatatggaggcctactggtcaagctaggaacatttccactaagaaacacagtggtggttctaccaaattctaggtaaaagcttttatagggtggctcattttttaaaattgctttatgctctctccaagctcattaaacttcagtaattattagttcctctcgttcctttctatctaaatgtggtaacaacttcttgatgtcgccagaccctagrggcttcatattacttgttagatattttagctgctgcaac

SEQ ID NO: 287612 - DNA, 578 bp, Homo sapiens
ttctattaaagtgttataaagaaaattagagataattgtgatcattcttactattcccaataaatattttacatgcgaatgtacaataaatggttgattatacaactaaatcctagttggggatgtagaaaggtgtttgacataaaaggaagtaaataaattagtaacttttatatakagagagtgttagagagaatgctgtttaggtgctaactttctgctaaaatttagtttcttaatataccacttaatctaaaaaaaggtaaaacagatgtttcctagaggaatttttggctaaaactctcctaaatttcagctttacatgaaactgcagtaactaattggaactaaaatagattgatcagtataaattcatgaaggagaaccattttgggctattttagatacaagattgctaagatacagtacaagagacaactagtgtaatgaaagtaatataagaattagaagatccaaaggatggtataaaattagcactagaaaaagttggagaagatctgcatgacatcaccttatattattacaatttaatataaaacaacctaaggtattcatct

SEQ ID NO: 287613 - DNA, 610 bp, Homo sapiens
gagagactgatttcagtcattgtggtttgttctagaactgcgcaaaacttaccttctccattctgcctctttgaggtccagtcacctcacctattatctgtggggtagggggaaaggaataggtactttcagatgtcagtgtctatgtgatgcttcagattaaacaagtttctgagacccactcctccattccccatctaacagtattctagttttaggtttatttaaataagttgggtaaaatggagggatttggggtattttyctcctttaagggttagggttagggttagggttcagttattaaaaatcattaaacataggcaactctttatcatgggaaatagaaacttctgcctctctgaggatgtttttttctcatgtatgaattcttctttgaaggaatctgcttattcttaacagtaccaatgtagggttgtgttaaacacataggctttagaacttggaatttcttgagaccttgaaagagctaggacttcctttttttcggtcttggatcatctgtcaatttgtgataataatcatatttttgtgggattgtcattaggattaaatgaaatgacatgcatgaatttctcagcatatggat

SEQ ID NO: 287614 - DNA, 610 bp, Homo sapiens
gagagactgatttcagtcattgtggtttgttctagaactgcgcaaaacttaccttctccattctgcctctttgaggtccagtcacctcacctattatctgtggggtagggggaaaggaataggtactttcagatgtcagtgtctatgtgatgcttcagattaaacaagtttctgagacccactcctccattccccatctaacagtattctagttttaggtttatttaaataagttgggtaaaatggagggatttggggtatttttytcctttaagggttagggttagggttagggttcagttattaaaaatcattaaacataggcaactctttatcatgggaaatagaaacttctgcctctctgaggatgtttttttctcatgtatgaattcttctttgaaggaatctgcttattcttaacagtaccaatgtagggttgtgttaaacacataggctttagaacttggaatttcttgagaccttgaaagagctaggacttcctttttttcggtcttggatcatctgtcaatttgtgataataatcatatttttgtgggattgtcattaggattaaatgaaatgacatgcatgaatttctcagcatatggat

SEQ ID NO: 287615 - DNA, 494 bp, Homo sapiens
aagctaggttaacatcaatgccatcttgtatatacaagatacagataaattctctggtgatatttmaaccttaaagatgtagtagtcaaatgtaaaacaatttatcatttggcttagcttattttcagtaggaagtacttacttatacaacacaaaattaataaaaaataaaattgacttcggtaaaaataaatgatattatccagatttatgcagagaaaaaaagctaattaaatgaatgactttctaaataacacttagcatcaataaaatgaaaagaatcaaagtagtaacttctatttcatgtctattttaaattaacattaaaattttaggctgggtgcagtggctcacgcctgtaatcccagcactttggaaggccgaggctggcagatcacgaggccaggagatcgaaacacggtgaaaccccatctctactaaagataacaaaaaattagccagtcgtggtggctcgcgcctgtagtcccagctac

SEQ ID NO: 287616 - DNA, 443 bp, Homo sapiens
tattgataatttttttatactccaatctctggtaaagattccttcttgtggcaacattcctatgtttggtcaatgtgctgtaatttgagtcttattctctgagttgaaaatcagaaacgcatattctcagtttccttgaaggtggagtggaagcgtgtgacccagttctatcaatmagaggtaccagtgtgaggcttttatgtgaggaaacaatgtgagaaagcagatgtctcaagaaatgtattttttcagtgaggacagtatcaaggacagccagttttgggagtagaacagcagagattttagtgtccagtgccccttgtcaacagtgtgagctaatgtgtccacacactgggtatgtggggtctttgcagaaagaccactgggttgtaactagactttttaaatttttttttttggactacagagtctcaaagtcccaa

SEQ ID NO: 287617 - DNA, 512 bp, Homo sapiens
ccacacctgtgagtatttctagttgggtggggtgaaagactgagaaaagaaataagacacagagacaaagtatagagaaacaacagtgggtccaggggaccggcactcagcacaccaaggacctgcaccagcaccggcctctgagttccctcagtttttattgattattattctcattatttcagcaaaaaggaatgtagtaggagagcagggtgataataagkaggtcaacaaaaaacatatgagcaaaagaatctatatcataattaagttcaagggaaggtaccatgcctggatgtgcacgtaggccagatttatgtttctctccacccaaacatctcagtggagtaaagaataacaaggcagcattactgcaaacatgtctcgcctcccgccacagggcagcttttctcctatctcagagttgaacaaatgtacaatcgggttttactccgagacattcagttcccaggggcaagcaggagacaatggccttcctccatctcaactgc

SEQ ID NO: 287618 - DNA, 512 bp, Homo sapiens
ccacacctgtgagtatttctagttgggtggggtgaaagactgagaaaagaaataagacacagagacaaagtatagagaaacaacagtgggtccaggggaccggcactcagcacaccaaggacctgcaccagcaccggcctctgagttccctcagtttttattgattattattctcattatttcagcaaaaaggaatgtagtaggagagcagggtgataataagtaggtcaacaaaaaacatatgagcaaaagaatctatatcataattaagttcaagggaaggtaccatgcctggatgtgcacgtaggccagatttatgtttctctccacccaaacatctcagtggagtaaagaataacaaggcagcattactgcaaacatgtctcgcctcycgccacagggcagcttttctcctatctcagagttgaacaaatgtacaatcgggttttactccgagacattcagttcccaggggcaagcaggagacaatggccttcctccatctcaactgc

SEQ ID NO: 287619 - DNA, 1025 bp, Homo sapiens
ccacacctgtgagtatttctagttgggtggggtgaaagactgagaaaagaaataagacacagagacaaagtatagagaaacaacagtgggtccaggggaccggcactcagcacaccaaggacctgcaccagcaccggcctctgagttccctcagtttttattgattattattctcattatttcagcaaaaaggaatgtagtaggagagcagggtgataataagtaggtcaacaaaaaacatatgagcaaaagaatctatatcataattaagttcaagggaaggtaccatgcctggatgtgcacgtaggccagatttatgtttctctccacccaaacatctcagtggagtaaagaataacaaggcagcattactgcaaacatgtctcgcctcccgccacagggcagcttttctcctatctcagagttgaacaaatgtacaatcrggttttactccgagacattcagttcccaggggcaagcaggagacaatggccttcctccatctcaactgcwccacacctgtgagtatttctagttgggtggggtgaaagactgagaaaagaaataagacacagagacaaagtatagagaaacaacagtgggtccaggggaccggcactcagcacaccaaggacctgcaccagcaccggcctctgagttccctcagtttttattgattattattctcattatttcagcaaaaaggaatgtagtaggagagcagggtgataataagtaggtcaacaaaaaacatatgagcaaaagaatctatatcataattaagttcaagggaaggtaccatgcctggatgtgcacgtaggccagatttatgtttctctccacccaaacatctcagtggagtaaagaataacaaggcagcattactgcaaacatgtctcgcctcccgccacagggcagcttttctcctatctcagagttgaacaaatgtacaatcgggttttacwccgagacattcagttcccaggggcaagcaggagacaatggccttcctccatctcaactgc

SEQ ID NO: 287620 - DNA, 506 bp, Homo sapiens
tccatgatgcctacaaagtggccagacctatgctaggcacattgggagaagtaaaaaatatgcaacgtaatttctcttcttaagtattatctgaattttggggacaaagcaagaaatctcatactgtttccactttacagttcaggacatgaaaggtcacgtaaacaaggtagaaargagtaataactttatttccatttttcaaaatagcattagtgggggcctccacaactgccatcctatggaccttttcaaagaaaacatcataagatggtgaccatgttttggcccaaataatttactcaaatttcatttacatcattatttgtggaatcacttatttaatacctgaaatacagaaataccatctgcttaaactttgtcaatttaggattttgaagtctttctaatcatggtatcttcaatgtctagaaaatgtccacacctctcttaaacagatctgcacattgatatgtgggctttgcaaagtaatatcacttatgagt

SEQ ID NO: 287621 - DNA, 588 bp, Homo sapiens
gtagtaatatctcttattttgcttctaattgagcttatttggatctactctcttcttttcttggttaatctcactgatattctattatatttatcttttcaaagaatcagctcttcgtttaatttatcttttgtatttatttctttcaatttaatttagttctgctctaatctctattactttttattacttctgctgttttaggtttggtttgtttttattccgctggttgtgtcattattatcattcacttaaaagaatttttcatttccatcttgatttcattgttgacccaaggatcattcaggaacaggctatttaatttccatgtatttgcatggttttgagggttccttttagagttgatttccaattttattcttctgtagtaggagaagacacttgataaaattyggattttcttaaatttgttgagacttgatttatggcgtatcatatggtctatcttggagaaagtttcatgtgctgatggataagaatgtatgttctgcaattgttaggtagaatgttctgtaaatatctgttagatccatttgttccaaggtatagtttaagtctattgtttct

SEQ ID NO: 287622 - DNA, 622 bp, Homo sapiens
tggttactgacttcttattcactgcaccattctgcatcttttaagtggagcgtttaggccatttatctccaatgtaagtattcagatgtgagtactaatctattcatygtggtatttgttgcctgaatacactgttttatgtttttcattgtgttatagttttataggaccagtgagatttatactttaaggagattctattttggggtgttttgaggattttttttcaagacttagagctcctttcagcaatttttgtagtgctggcttggtagtggttacttttctcagcatttgtttgcctaaaaaggccgtatctttccttcaattatgcacctcagtttgagtgaatacaaaattttgggctgataattgtttgtcttaggaggctaaagacaggaccctaaatgcttctagcttgtagcatatccactgagaaatctgctattaatctgatagtttttcctttataggttagctgatgctttggccttacagcttttaagattctttcctttgtcttggctttagataacctgacaacttttcgtgatcaatttcccaggtgttcttacaacttctgatatttcaatgtctagaactctagcaaggctgaggaagt

SEQ ID NO: 287623 - DNA, 1742 bp, Homo sapiens
aatttttgtagtgctggcttggtagtggttacttttctcagcatttgtttgcctaaaaaggccgtatctttccttcaattatgcacctcagtttgagtgaatacaaaattttgggctgataattgtttgtcttaggaggctaaagacaggaccctaaaygcttctagcttgtagcatatccactgagaaatctgctattaatctgatagtttttcctttataggttagctgatgctttggccttacagcttttaagattctttcctttgtcttggctttagataacctgacaacttttcgtgatcaatttcccaggtgttcttacaacttctgatatttcaatgtctagaactctagcaaggctgaggaagttttcatcaattattccctcaagtatgttttccaaacttttagatttctcttcttccttgaaaaactagttattcataggtttggtcatttaacataatcccaaacttcttggaggctttgtttatttttctttattcttttttttctgcctttgtcagattgggtgtattagttcattttcacactgctgatacagacatacctgatgwaatttttgtagtgctggcttggtagtggttacttttctcagcatttgtttgcctaaaaaggccgtatctttccttcaattatgcacctcagtttgagtgaatacaaaattttgggctgataattgtttgtcttaggaggctaaagacaggaccctaaatgcttctagcttgtagcatwtccactgagaaatctgctattaatctgatagtttttcctttataggttagctgatgctttggccttacagcttttaagattctttcctttgtcttggctttagataacctgacaacttttcgtgatcaatttcccaggtgttcttacaacttctgatatttcaatgtctagaactctagcaaggctgaggaagttttcatcaattattccctcaagtatgttttccaaacttttagatttctcttcttccttgaaaaactagttattcataggtttggtcatttaacataatcccaaacttcttggaggctttgtttatttttctttattcttttttttctgcctttgtcagattgggtgtattagttcattttcacactgctgatacagacatacctgatgwaatttttgtagtgctggcttggtagtggttacttttctcagcatttgtttgcctaaaaaggccgtatctttccttcaattatgcacctcagtttgagtgaatacaaaattttgggctgataattgtttgtcttaggaggctaaagacaggaccctaaatgcttctagcttgtagcatatccactgagaaatctgctattaatctgatagtttttcctttataggttagctgatgctttggccttacagcttttaagattctttcctttgtcttggctttagataacctgacaacttttcgtgatcaatttcccaggtgttcttacaacttctgatatttcaatgtctagawctctagcaaggctgaggaagttttcatcaattattccctcaagtatgttttccaaacttttagatttctcttcttccttgaaaaactagttattcataggtttggtcatttaacataatcccaaacttcttggaggctttgtttatttttctttattcttttttttctgcctttgtcagattgggtgtattagttcattttcacactgctgatacagacatacctgatg

SEQ ID NO: 287624 - DNA, 607 bp, Homo sapiens
agaatgtaggggaaagctggcagccacaggcctcaccaaggtacagtgcagcatgcagcccaaaatgctgatctctcattgtgcccctgcaacagcaccaagtttattgcsaggcagccagtgaacagggctgagaacttgttccaggctacaagcttcctagcagagaaagcagctgactcacagttctttggctgtcccagggtgcctgcagtggcaactcaccaccttcaaagtgtctttggattctctcggctttcctgatatgttcctgtggtagtttttggagataaagttcatgatgtcggtctccatgccctgctctatccctccaagttggagctgaaagacagtcctgtcccctatcttgcattttttcccttttatatatagaaaatttaaccaagaaatggtttaggatgttggcttatgtacaaatgtagtttttgtccagcagagcccaaaaccataactttgaaggttatctgttgtaccagaaagaaattatttgcatctctacttgacaaaaattagcaagtatatatttatttttgcagaattttaaaatagtccaatcaatataaattatatcaaaattgcaagcctg

SEQ ID NO: 287625 - DNA, 574 bp, Homo sapiens
ctgcatacatatgagatatgctgggaatgggactcaagtctaaactagaaattcatttatgtttcatatataccttaagatatgtagcctaaaggtaattttatacactatttttacacgtagtcattrgagactaggacacattaggtctgtgccttagcctttcagtctgttcctccatctcaaatacttttagatttgggaacatttcgaattttcgcattagggatgtgcaacctgtattactaaacatcattaaaataaaaccacacgttttaaaagagcaaatctcttaccagttgaaattctcgacgccggtcataggcattctgtatgccgctgtctgcccataatgctcttatagcaggaagatattgtaagaaaacccttgtttccaccattccttgggctgccatgggggcccgggtatcaaacgacatcatcttatctccatgttgttggtttgagttgtctccccagggaatatgaagcttctctcgagcatcaaccagcaccctcatacctttgtttaaaaagaagaaaaaaaatgtatggagaggagtcattacatatt

SEQ ID NO: 287626 - DNA, 557 bp, Homo sapiens
atgctgggaatgggactcaagtctaaactagaaattcatttatgtttcatatataccttaagatatgtagcctaaaggtaattttatacactatttttacacgtagtcattagagactaggacacattaggtctgtgccttarcctttcagtctgttcctccatctcaaatacttttagatttgggaacatttcgaattttcgcattagggatgtgcaacctgtattactaaacatcattaaaataaaaccacacgttttaaaagagcaaatctcttaccagttgaaattctcgacgccggtcataggcattctgtatgccgctgtctgcccataatgctcttatagcaggaagatattgtaagaaaacccttgtttccaccattccttgggctgccatgggggcccgggtatcaaacgacatcatcttatctccatgttgttggtttgagttgtctccccagggaatatgaagcttctctcgagcatcaaccagcaccctcatacctttgtttaaaaagaagaaaaaaaatgtatggagaggagtcattacatatt

SEQ ID NO: 287627 - DNA, 467 bp, Homo sapiens
aggcgggcatggtggcacgcgcctgtaatcccagctcctcaggaggctgagacaggagaattgtttgaacctgggaggcggaggttgcagtgagccgagatcacgccattgcactctagcctgggcagcaagagcgaaactccgtctcaaaaaccaaaacaaaacgaaacaaaacaaaaaacatatcgcatactatacttattacctgagtgactaaataatctgtacaccaaactcgagatgagcagtttacctgtataacaaacctgcatatgtactcctaaacctaaaataaaagttaaaaaaacccacaacaacaaaaaaggaatagccaaaaggtgtccaaatgtccatcgatgaacgaatggataaaccaaatgtcgcatatctatacattgcaattattcagccrtaaaaaggaatgaggtgctgacacatgctgcaacatgaatgaactttgaaaatac

SEQ ID NO: 287628 - DNA, 608 bp, Homo sapiens
aacagttcaatgaagacagagcagtatggatggatggctctggatttggttgataggagccaaagagttgattgcrtttgaggggccctccaggtgcagatgtgtagcaggcagcgggaaataactctgaggagggcggcaagggcagagtaaatgggtgaggaatgaccttcattcttactgtaggtctcctgtataccctgatatttcctgtctccattcctttgcttctgttgtaccttcatcctgggatgcctctcctcaccccagagcttgaggctgttatttccagttggctgctacacatttctgtgtatatgttccagagcacggcacaaacaagtttttctctttcaaaacaggctgctttcttttgtgtttcctgttttaaatactgactaccaccattggcttggcagagaggtaggaaatcttggaatcatattctcttgccttcaccaaattgtatacattatcaactaagtttcaaacacacaaacttttgggagtcaccttcaaaccacaggaccatcctatgattgctgtcccttttgagctcctgtgcaattaggattgcagtgtctaagtacaagagactcatctatagt

SEQ ID NO: 287629 - DNA, 1217 bp, Homo sapiens
aacagttcaatgaagacagagcagtatggatggatggctctggatttggttgataggagccaaagagttgattgcgtttgaggggccctccaggtgcagatgtgtagcaggcagcgggaaataactctgaggagggcggcaagggcagagtaaatgggtgaggaatgaccttcattcttactgtaggtctcctgtataccctgatatttcctgtctccattcctttgcttctgttgtaccttcatcctgggatgcctctcctcaccccagagcttgaggctgttatttccagttgkctgctacacatttctgtgtatatgttccagagcacggcacaaacaagtttttctctttcaaaacaggctgctttcttttgtgtttcctgttttaaatactgactaccaccattggcttggcagagaggtaggaaatcttggaatcatattctcttgccttcaccaaattgtatacattatcaactaagtttcaaacacacaaacttttgggagtcaccttcaaaccacaggaccatcctatgattgctgtcccttttgagctcctgtgcaattaggattgcagtgtctaagtacaagagactcatctatagtwaacagttcaatgaagacagagcagtatggatggatggctctggatttggttgataggagccaaagagttgattgcgtttgaggggccctccaggtgcagatgtgtagcaggcagcgggaaataactctgaggagggcggcaagggcagagtaaatgggtgaggaatgaccttcattcttactgtaggtctcctgtataccctgatatttcctgtctccattcctttgcttctgttgtaccttcatcctgggatgcctctcctcaccccagagcttgaggctgttatttccagttggctgctacacatttctgtgtatatgttccagagcacggcacaaacaagtttttctctttcaaaacaggctgctttcttttgtgtttcctgttttaaatactgactaccaccattggcttggcagagaggtaggaaatcttggaatcatattctcttgccttcaccaaattgtatacattatcaactaagtttcaaacacacaaacttttgggagwcaccttcaaaccacaggaccatcctatgattgctgtcccttttgagctcctgtgcaattaggattgcagtgtctaagtacaagagactcatctatagt

SEQ ID NO: 287630 - DNA, 608 bp, Homo sapiens
aacagttcaatgaagacagagcagtatggatggatggctctggatttggttgataggagccaaagagttgattgcgtttgaggggccctccaggtgcagatgtgtagcaggcagcgggaaataactctgaggagggcggcaagggcagagtaaatgggtgaggaatgaccttcattcttactgtaggtctcctgtataccctgatatttcctgtctccattcctttgcttctgttgtaccttcatcctgggatgcctctcctcaccccagagcttgaggctgttatttccagttggctgctacacatttctgtgtatatgttccagagcacggcacaaacaagtttttctctttcaaaacaggctgctttcttttgtgtttcctgttttaaatactgactaccaccattggcttggcagagaggtaggaaatcttggaatcatattctcttgccttcaccaaattgtatacattatcaactaagtttcaaacacacaaacttttgggagtcacmttcaaaccacaggaccatcctatgattgctgtcccttttgagctcctgtgcaattaggattgcagtgtctaagtacaagagactcatctatagt

SEQ ID NO: 287631 - DNA, 622 bp, Homo sapiens
tgattagcagagaggagtgatgaggacatttgcaaggagattggagggagaaagtgagttaagatagggagctgggaatgacttaggtgtggccgtgggcccaattggggtggagggtgacatggtaaagcaataagataaaaaagaggacttgcatgaccagctaagaagtctgatgagatccaataagcagttgaatattatatgaacacaagygacattttggaaagatttttacagtatgtaaaactaatgcagcagccctatgaggaaagtattgttattatcctcattttccaggtgaaaaatagcatttggaagaggtttcaaagaaacttcacataggtatttactatgtgaatatagtaataacattaatgacaatcaaaatgaaagaaaacattaattcataatttagccattcaaatagactgttttcattttcccatattctcagttggttttgctttttttattccaagggaaggaaaaattgttatgaatattatttgagttaatttctgtcagtgctttaaacagtgcctggcacagagtaagcactcactacctgttacttattatttttgctttaatacaaactaagatgtcatagagtagaaga

SEQ ID NO: 287632 - DNA, 622 bp, Homo sapiens
tgattagcagagaggagtgatgaggacatttgcaaggagattggagggagaaagtgagttaagatagggagctgggaatgacttaggtgtggccgtgggcccaattggggtggagggtgacatggtaaagcaataagataaaaaagaggacttgcatgaccagctaagaagtctgatgagatccaataagcagttgaatattatatgaacacaagtgacattttggaaagatttttacagtatgtaaaactaatgcagcagccctatgaggaaagtattgttattatcctcattttccaggtgaaaaatagcatttggaagaggtttcaaagaaacttcacataggtatttactatgtgaatatagtaataacattaatgacaatcaaaatgaaagaaaacattaattcataatttagccattcaaatagactgttttcattttcccatattctcagttggttttgctttttttmttccaagggaaggaaaaattgttatgaatattatttgagttaatttctgtcagtgctttaaacagtgcctggcacagagtaagcactcactacctgttacttattatttttgctttaatacaaactaagatgtcatagagtagaaga

SEQ ID NO: 287633 - DNA, 622 bp, Homo sapiens
tgattagcagagaggagtgatgaggacatttgcaaggagattggagggagaaagtgagttaagatagggagctgggaatgacttaggtgtggccgtgggcccaattggggtggagggtgacatggtaaagcaataagataaaaaagaggacttgcatgaccagctaagaagtctgatgagatccaataagcagttgaatattatatgaacacaagtgacattttggaaagatttttacagtatgtaaaactaatgcagcagccctatgaggaaagtattgttattatcctcattttccaggtgaaaaatagcatttggaagaggtttcaaagaaacttcacataggtatttactatgtgaatatagtaataacattaatgacaatcaaaatgaaagaaaacattaattcataatttagccattcaaatagactgttttcattttcccatattctcagttggttttgctttttttattccaagggaaggaaaaattgttatgaatattatttragttaatttctgtcagtgctttaaacagtgcctggcacagagtaagcactcactacctgttacttattatttttgctttaatacaaactaagatgtcatagagtagaaga

SEQ ID NO: 287634 - DNA, 608 bp, Homo sapiens
ctggaaacaccccatagacacacccagaaataatgttttactagatatctggatatcccttagcccagtgaagttgatgcataaaattaaccatcacagttaacaagcacttaaaggctatgtcagacagttggttgctcaggtcatttcttaggatagtgcaaaaacagccatggagaagttggccacgtcactctgaaagcaagtattcatagtctatttaacttgagaagctattctttccrgtctgctttctacactctgtggccctggtctcaataccccaaatacagaaattcaactggttcaagttacatcatggggagtttttccattaatcattgttttcctttttactaattccttttttttttttcaaatggcctttaccctcattgcaggcagcttgagctcactattttagagaaaaaggatcagacagaacaattaaaaacaaaacagttgatgccagcttctgagtttaaaactcctggtagagatagcagttgaaagaaaggtttggaagatcagcaagaatggatgataatgtaagcgattgttttcctttccttgacttgataaagattcctcatgatgtggaaacaaag

SEQ ID NO: 287635 - DNA, 608 bp, Homo sapiens
ctggaaacaccccatagacacacccagaaataatgttttactagatatctggatatcccttagcccagtgaagttgatgcataaaattaaccatcacagttaacaagcacttaaaggctatgtcagacagttggttgctcaggtcatttcttaggatagtgcaaaaacagccatggagaagttggccacgtcactctgaaagcaagtattcatagtctatttaacttgagaagctattctttccggtctgctttctacactctgtggccctggtctcaataccccaaatacagaaattcaactggttcaagttacatcatggggagtttttccattaatcattgttttcctttttactaattccttttttttttttcaaatggcctttaccctcattgcaggcagcytgagctcactattttagagaaaaaggatcagacagaacaattaaaaacaaaacagttgatgccagcttctgagtttaaaactcctggtagagatagcagttgaaagaaaggtttggaagatcagcaagaatggatgataatgtaagcgattgttttcctttccttgacttgataaagattcctcatgatgtggaaacaaag

SEQ ID NO: 287636 - DNA, 598 bp, Homo sapiens
gataaaccttttatgattccattttaccatatttctccatggtaagaagatacagtggaattcattcagcacagagttaaaaatagaattaaaacatgcaatgtacatcaaactgacattgtaccttgacacctagaaactgtacaagtaggtggttttaatattagagtaaaaataagaacctttaattttcttctaccaacctcttcctttttctctcttcatggaatgtgcctctgaggtggatgctccattgaatttttcctaatatttgtgatttcttgcaagctattartatgtgtgagcagcagagtttgacggccatgggccttggatgactgctttggcctggggatattcctaggtcaaaggatgccctgaaattcaggtgggtggcaggactgactccagaaatctaggtctactttgaggaaaaatccaggaatactgatctgacaaaaactctgaggtcattttggaagcggccaagatgctcaatagtctcttacagattaaggccagcacaggcgtaaactggccaaccatgcctgtgtgcagttggttttggatgacagggatgaagctttctaagagtaag

SEQ ID NO: 287637 - DNA, 596 bp, Homo sapiens
tgagagcaatggaccaataaaggagtcattattctccagtgtgctacatagttgtttgtaacttacacattttcactttcagaaacagaaattggcatttataaatatttataggaaaaaactccctgaaaatgcataatattcacctaaacttttattgttctctgaaagtgaaataaaaatggttcttatcaatgggtcactagagggcactgtgactcttcaagttctcaggttgcactgtgaaaaattctycaaaaggtattttttatttcagtgagattttctctggcatccagaaaagtatagtcaaatatgaagagtttgaggggtgcatggaacctgattgtgtatgagctgatcaggaggttacactttttggttacaggaaaattcaagtcataggagttgttaaattgtgaaaatggtatgttttgatctaccttttcagctccagacagtattctgagctagcaacttctcattgcttttccactttggaatattttattttacagttgtatctctaagcatgacttaagtcaacacatgacattaatatgtatgaaatatgcattcacattatagtgactata

SEQ ID NO: 287638 - DNA, 545 bp, Homo sapiens
cttaaaggataacattctttcatatctcagtgacaaaattgtttgcttcacctaatcttctattttcattttcacactgactgtgactcccataaagatcacgttactctttgtacttaggttatcaggaagcttagagccaaacttgatatctatttccagtaattacacagactctcaaagtgtgttttctatgaaccaattttccttatgtactactcttccattcttggtttccctttgtatagatttcctcaaatatttatttgtgttttatgcattctgcaggccatctcaaattctatttgaaattatgggggaaatgcatgcacaaataagtaaatatcatctcatccatccctattactctacgttgggaagctgagctctagaatactttagtgatgggctcaaggtcatgcrgtcagagtagggcataggcaagatcagaaactcagtttcctctcacttagtgttccttttcctccaccataaaattacctccctgtgcaatgaaggaggaagaaaattcactcaaaagagaa

SEQ ID NO: 287639 - DNA, 633 bp, Homo sapiens
atgtaaatttaacagctgacatcaaaatttatcttaggaaggtgtggtaacgtgtttacaaaaatgaccacaataatttccctccctgccctatgcacttgggttgttgcctcccacactagctttggccatggccatgtgaatagtttsagccaatgagacattagcaaatgtgacacaagcagaagcttgaaaaatcactacaaattgtggctgtttaatactctgagattaccacgtgaagaagctcaggctagccacctgtaggatgagacactgcatagagcatattcaggcagtctagttgagcacctctttccccacaaaaccaacaattctgcctattcttgactctcgagtaagactataccagaccagttcattcaactacatgctaacccccattgaccgcagactcatgaaagagcacagcagagctcagccaggccagcccagacttagaaaaatccacataacccagggaataattaatgaaattaaaagatttttttgttttaagccattcaattttggggtgatttgttatgcagcaaaaaactaatcataaagaaagaagttgtctttgttgaggaaaataacttgagtatctgtaagtctggggaaaaatccaca

SEQ ID NO: 287640 - DNA, 633 bp, Homo sapiens
atgtaaatttaacagctgacatcaaaatttatcttaggaaggtgtggtaacgtgtttacaaaaatgaccacaataatttccctccctgccctatgcacttgggttgttgcctcccacactagctttggccatggccatgtgaatagtttgagccaatgagacattagcaaatgtgacacaagcagaagcttgaaaaatcactacaaattgtggctgtttaatactctgagattaccacgtgaagaagctcaggctagccacctgtaggatgagacactgcatagagcatattcaggcagtctagttgagcacctctttccccacaaaaccaacaattctgcctattcttgactctcgagtaagactataccagaccagttcattcaactacatgctaacccccattgaccgcagactcatgaaagagcacagyagagctcagccaggccagcccagacttagaaaaatccacataacccagggaataattaatgaaattaaaagatttttttgttttaagccattcaattttggggtgatttgttatgcagcaaaaaactaatcataaagaaagaagttgtctttgttgaggaaaataacttgagtatctgtaagtctggggaaaaatccaca

SEQ ID NO: 287641 - DNA, 609 bp, Homo sapiens
agatttaagccaatcatatctagttctttagaagaagctagtctccagctgacatcttaaagagatacagacataaatttagatataaatatagatagatatagatatagatagatatggtatctttgtttgagccgctataacaaaataccacacactgggtaatttataaacaatagaaatttctttgttacagtttggtggctgggaagtttaacattgaagcacctgcttgtgaggggccagtctctctgcttccaagatggtgcctcgttgctgcatcctccagagggtgcagatactgtgtcctcacatggccaaacatacaagggcaaaaaaggggtgaactccctttgtcaacccctttaaaaaggcacctaatcccattcatgaggggggaaccctcatgactcaatcacctattaatgccaccataatgaagattaagttttaatatgaattttggaggaaacacacattcatttggatatggaggtgaagatggagatggagatgaagacagagatatgaagatatctccaagtartttgccataattatcaacatgaaatggtagaaaacctcacacaagtgtctgtagacaaatca

SEQ ID NO: 287642 - DNA, 580 bp, Homo sapiens
gcttaactaaccatcattcaaggatcctcaacagaggaagtacctatgaagcatatgatcagctacttcctctccatagttcttccttgtaaataagaaaactgggatagtaggtaaggatatctcaggttggtgggatgttccagtcagatgcttgcaaatattcaagcatcccagatttaagccacccacaaaaactgatggaagaatagtccattttcattaacttaaaaatacatagaaagattatattcatggcatatgctaacctttaggggctcacaagtattcctctcttcaatccccaaagttgaagaaaaagaagagtatttcaaggatgtgaagtaaagggtggagattttaggtagaggaggaaaccaattataaatagaactgatctgggagaaagattttcttctccccraacccttctcttacctcttttctgaagttctcgcttggctcactctatctcaggcagcttgtattgtgaatcatgtctagggaagactcccacttagaaggatgtccttgtgtgaccaaccagaaacagaacacagcctaggaggggagagaaacc

SEQ ID NO: 287643 - DNA, 550 bp, Homo sapiens
aatgtacactgcttggtgatgggtttactgaaatctcaaaaatcaccactaaataacttattcatgtaactaaccaccacctgttcccctaaaaaaacctattgaaataatttttttttttgagacacagtctcactctgttgccaggctggagtgcagtgatgtgatctcagctcactgcaacctccgcctcccaggttcaagccattctcctgccccagcctcctgagtagctgggattacaggtacgcaccaccacacccagctaatttttgtattttcagtagagacggggtttcaccatgttggccaggatggtctcgatcccttgaccccaaagtgctgggattacaggtgtgagccactgcacccggcctaaaacttgtttaaaaactacatctatatcttgattatagaaatgcttaygtgactttttgtttgtcaaaacttacagaaccatatgcttaaaaggataaattatactgtatgtaaactgtactttagagaaatgaaaaaaatctaatcagttactttactctccatatataag

SEQ ID NO: 287644 - DNA, 566 bp, Homo sapiens
agtggaaatgtttaattatcaaacaggaagcagtagcaatagtgtcacactgaaataaatttacttgaaggtttcaagcgatcctcccacagcctcctgagtagctggaactacaggcgggtrccgccacaccaagctaatttttaattttttttgtacagataaagtatccctatgttatgtgcttatatgagagtaatgagaagctcaaaaaaagtttataatcttgtgtgaaattgattacaattagataaaaggcatagagctccgccattctctgccaaccaattagaaaataataatttctgcctagatacagagtttcaagtatgcagatattttactacaagtagaacatctaaaataggaaaaggggttacagtaaaataccataaaagaaatgttttaaatcagagtgctttaacattcacatttccacaaaacaaatctaccgttaaaacattgtcactaagtacaataaacaaaacttttaactctatactgttattaaacttgtactatttttattacttttcaaatattaatactataaatacatatattgc

SEQ ID NO: 287645 - DNA, 618 bp, Homo sapiens
aacaaataaattgccaattatttcaagattctgaagtgctcctgcaatttaatgctaaccagaacagcatttgcatctataaaaataacaagactttgctttgcccctcaccccaaggaatattgacatctgaaayatagggactagggaagttaaccgaacctcatacaaaactccagacatggctgcagacatcacaagaactctcctactgaaaaacagaacaaagcaagattggtttagataacagcaaggttgaaacagagcacctcaccaataatcttattcctgttttatctaaaatgtactccaagaaaagtacggaaaaaaaaacatcattgtgtcttgttgacattaattcaaaatgcaattatgccctgcattctgcatcttccaacttgagccctgatttcttgggaaatctagaactgggaaaatgcatctcaacctactagaatggcttttcaatactatgttggcagcctgtgcactaaaatagaataaagaagctcataggccttacattttcccgtaattgaataacagtatgagtctttgcatgtaatagtgtaacaacatatacagctgtatattctgtaacaggatattggctctata

SEQ ID NO: 287646 - DNA, 353 bp, Homo sapiens
tatagctaattgacattttctgcaatctggagagaaactcaccaggagaaaaaaaaatgtgtgctkcaggggtcgggggagtgggtaggtaggagaggaaactaagaaaaataagagggcaagggtacaaagggaacaggagaaccagaggccaagacagacaccagattattatttgaacgctgtcactctgctaaatgaaacctgagactctagggtctttgaaaagtatatgtgaagaaatgagaaacctttgccaataaaccaagtaaaaataagcagctacaacagtgtagcccattgtttggaaccttctttagtctacttactaaatttaaacatgacagccagtt

SEQ ID NO: 287647 - DNA, 262 bp, Homo sapiens
tgggaaaagtggaatatagttaggtacttctcactggataatttaaaaataggccaaccataataaacattttcaactttaagatccctcacctttctgtgtttttcaccaccctctccttttgctctgttaatcttgcagacatagtcaattctgactttctcattctgaggaatataarggagatctggtaaaactagataattcatatcaaggagtattaacttcaaatgttaaaaactcccagggatactttcatcgt

SEQ ID NO: 287648 - DNA, 910 bp, Homo sapiens
tgggaaaagtggaatatagttaggtacttctcactggataatttaaaaataggccaaccataataaacattttcaactttaagatccctcacctttctgtgtttttcaccaccctctccttttgctctgttaatcttgcagacatagtcaattctgactttctcattctgaggaatataaaggagatctggtaaaactagataattcatatcaaggagtattaacttmaaatgttaaaaactcccagggatactttcatcgtwatatgcagctagtttgcacatgtaagtctactgttactattctctgcaggcactgcatggaagtgtctaatattgttgtgctgtgtttccagtcttgtttccattatttggtttgctgtttgaatattacagggctgcaaaaaagtttattacattattgtataatataattatttggaggtagaaatattacagatatgtaaatgctttaagccttcttctcacttttttccctttaagtataaaccaaaagcctaggacacaaacattgtcttcctagtttggtcttcctggagacatgcaaactctagagaggtgattggtgtccatacttcccacgcagctgcagttgaacctgtataattacctccagagtattgtcttggctccagtctgttggataattgcctatttgaacaactttgccttggataatttccctttatctaaccatgggactcataaatctatgcacagggggacagatttctgaaaatgatatttggccacagatagttgcaatttcaagactttttcaaagggtgwtaatgacatatttttactggacaatgtaagttttcaaactttgaagatacattttgggatgcagattatttatgcatcagtgtagaaaatgcattgcttat

SEQ ID NO: 287649 - DNA, 633 bp, Homo sapiens
ttttgttttgtttttgctctttttctattttgggctaattggatatttttaaaatattctattttatttactttattggcttcttagctcttttaaaaaattctatagtgtttaaggttaatgctatcctattctcaacttttaaggtctatttagattcagtgttaatccacttaacacctaacccttcacagttccagctccaaacctgatgattcccatttctcagtttctacttcccatttcccaaatataataaaacattcaacagtaaaattccgttagcttgtcccttatccattgtaccttcttttgcacatctttttttatatactaaaaactctaccttgtgaaacgattattgcttttataaaaaatagcctatcttttaagaaataataaggaggaataacatcttatatttatrtctatttatttttatgactcttcccatctatggacatgacttttcatatagtttaatttttcccttttttatttaacattttttgtagtttatgtttgttgcaaataatttctgatcttttgtttataataagatgcccattttaccttatttttgaaggatatttttattagatataaaattctcaaataaattttttcagcatg

SEQ ID NO: 287650 - DNA, 639 bp, Homo sapiens
tctaatttttaaaatgttaattcctctggacacctaaatttgtatactatgttttatacatgctttagtgcgttatgcacataaactacctagtagtaaaagttccatcctctttcggctaaatcagaaatgttatgaaaatgggaaaattgttcttcatgtctcttttcaatagttattgtgaagagtaagagcaataatatatatgtgaaagaaataccaagtgattagtttgagcaaaggctcaataaaaggtgcttgtagcgtttcttaaatataatgtgttatttcagttacattgtgaatccttaaaataacgtattattttttctttcattgcttttaatccaatgacctaatgagttattggagcctcctgcattgatgctaaaatttctgtatcattgatgtcttttctaggctcttaatgttcctctttctgtctgtctttgtgggatgcgtggggtgcttctgtctttytacattttgtggtggtggtgtatgtataccagtatgttacattgataattttttgatatttcaatcgaatttactgaaatataaatctctaagagataaatatattcattttacataactctgatatggttatcacacgtcacacagttaaaattgact

SEQ ID NO: 287651 - DNA, 575 bp, Homo sapiens
aggggatgcaattgagcccataacagaatgttttcctatagtacatactttttccatgtgacttctttctttaacatggtttgtgatattcatattgttcatgtaatcagggtttcttcagtctcattaatgcatagcatttcattgtatgaatatatcttaatttattaatcagctttactgtttatggaaatttgggttatttctagttaattcttattgtgaatagtgctactgagaatattgttgtacataatattcagcaacttttatagtggaattgcacagccataaggtgagayactatcaaaggagagatactaccaaactcttttccaaaataattacatgaatttctacccctaccagcaggatatgacagtaccattcttccacatccttgctaactcttgctattatctttttttttaattcagcctcatttgtctgcttatagtgacatctcattgtaattttagcttgcattccaaaagactaataaaggtgagggatttttaggatgtttattgaaaatttgaaagccttcttttgtgaagtttatatttatgactttt

SEQ ID NO: 287652 - DNA, 605 bp, Homo sapiens
aagttctaagttatcagagtctagatagaagcctgattcttgttggccgaagacatgtgttattagtttctttgactgccataacacattaccactaattaagtagcttagaacaagagaaatttagtgtcacatttctggaggctagaaatctaaaatcaacatgtcggcagggccctgctctctccggaggctctagagaagaatctgcttgatgcctttcttttagtttctgatgttgctggcagtccttggcattccttagcttgtagatttatcactccaatctctgcctgtcttgtcatatggcactctgtctgtgtgtgtctttgtgttcacatggctttctcttctccatgtatgtccatccctgtgtctcatctcttcttataaggttgccagtcatactagtttaaggggccaccttattctagcataacctcatcttaatttacatcttaattgcataaagattctttctkaataagatcatattcagggtaggacttcaacatatctttcgggagtacataatttaacccacaacagatgttatgcagatgttggtctacttgatgcctgcacctggagttagggattgttat

SEQ ID NO: 287653 - DNA, 605 bp, Homo sapiens
aagttctaagttatcagagtctagatagaagcctgattcttgttggccgaagacatgtgttattagtttctttgactgccataacacattaccactaattaagtagcttagaacaagagaaatttagtgtcacatttctggaggctagaaatctaaaatcaacatgtcggcagggccctgctctctccggaggctctagagaagaatctgcttgatgcctttcttttagtttctgatgttgctggcagtccttggcattccttagcttgtagatttatcactccaatctctgcctgtcttgtcatatggcactctgtctgtgtgtgtctttgtgttcacatggctttctcttctccatgtatgtccatccctgtgtctcatctcttcttataaggttgccagtcatactagtttaaggggccaccttattctagcataacctcatcttaatttacatcttaattgcataaagattctttctgaataagatcatattcagggtaggacttcaacatrtctttcgggagtacataatttaacccacaacagatgttatgcagatgttggtctacttgatgcctgcacctggagttagggattgttat

SEQ ID NO: 287654 - DNA, 439 bp, Homo sapiens
tacataatgaaatatggtaaagcatagacagcaatatctgccarccatatttattaagattgaatgcacatggagcattaggatgccatacaatacaatttgtcatgttgaattttaagaaatttcaaggcagattattagaaaattaggacaagtcacctgccttattcttccactattaacattcctattattgctattttttctctttcatcgctagcaaccttcatttctttggcgtttgcaggcatccactaccttgaaaaccttttggttttcgttttctttctttctttcttcccttcctctgtcactctcccttcctcttctatcatgctctctctcactccatctcgagttatccagatgttttctttaatgccaaaattaatgccacttttaaattcgttatttgattttaagctttaaacacttgacc

SEQ ID NO: 287655 - DNA, 439 bp, Homo sapiens
tacataatgaaatatggtaaagcatagacagcaatatctgccaaccatatttattaagattgaatgcacatggagcattaggatgccatacaatacaatttgtcatgttgaattttaagaaatttcaaggcagattattagaaaattargacaagtcacctgccttattcttccactattaacattcctattattgctattttttctctttcatcgctagcaaccttcatttctttggcgtttgcaggcatccactaccttgaaaaccttttggttttcgttttctttctttctttcttcccttcctctgtcactctcccttcctcttctatcatgctctctctcactccatctcgagttatccagatgttttctttaatgccaaaattaatgccacttttaaattcgttatttgattttaagctttaaacacttgacc

SEQ ID NO: 287656 - DNA, 439 bp, Homo sapiens
tacataatgaaatatggtaaagcatagacagcaatatctgccaaccatatttattaagattgaatgcacatggagcattaggatgccatacaatacaatttgtcatgttgaattttaagaaatttcaaggcagattattagaaaattaggacaagtcacctgccttattcttcyactattaacattcctattattgctattttttctctttcatcgctagcaaccttcatttctttggcgtttgcaggcatccactaccttgaaaaccttttggttttcgttttctttctttctttcttcccttcctctgtcactctcccttcctcttctatcatgctctctctcactccatctcgagttatccagatgttttctttaatgccaaaattaatgccacttttaaattcgttatttgattttaagctttaaacacttgacc

SEQ ID NO: 287657 - DNA, 439 bp, Homo sapiens
tacataatgaaatatggtaaagcatagacagcaatatctgccaaccatatttattaagattgaatgcacatggagcattaggatgccatacaatacaatttgtcatgttgaattttaagaaatttcaaggcagattattagaaaattaggacaagtcacctgccttattcttccactattaacattcctattattgctattttttctctttcatcgctagcaaccttcatttctttggcgtttgcargcatccactaccttgaaaaccttttggttttcgttttctttctttctttcttcccttcctctgtcactctcccttcctcttctatcatgctctctctcactccatctcgagttatccagatgttttctttaatgccaaaattaatgccacttttaaattcgttatttgattttaagctttaaacacttgacc

SEQ ID NO: 287658 - DNA, 574 bp, Homo sapiens
gataaagtggggatgttgagagaaaattaagttgttttctttcctctccctaggaatgagggctggggagaagtacttatttattattaggggaaaaatcttagtgggttagttgacatttatatggtaacaartatgtctttaaaatgctatagtagtgaataaaaaggaaaacaagtacgtttgtgattggctagaattcatgagacaataatttatcaatttttttttctttcgatatacaatggtgggctattgccaggaaaataaaagaaggaaactaaactatctttaacacattttaggacaatagaaatgatcttgtgtgtgatggagtagattaaaaggaaggacccaatggcagcatgccttggacatttggattatctgttaatccaggctcatgtataggtatctgcatcttgtagggtcagccagcaggagcgcagttaagggtaggattcagatgtcctcatcttttaagacctggctattaatttcagtcaatttcatataaacacctcttatttttgcctagtggctatcttagtcaccctactgctatgacaaagtg

SEQ ID NO: 287659 - DNA, 574 bp, Homo sapiens
gataaagtggggatgttgagagaaaattaagttgttttctttcctctccctaggaatgagggctggggagaagtacttatttattattaggggaaaaatcttagtgggttagttgacatttatatggtaacaaatatgtctttaaaatgctatagtagtgaataaaaaggaaaacaagtacrtttgtgattggctagaattcatgagacaataatttatcaatttttttttctttcgatatacaatggtgggctattgccaggaaaataaaagaaggaaactaaactatctttaacacattttaggacaatagaaatgatcttgtgtgtgatggagtagattaaaaggaaggacccaatggcagcatgccttggacatttggattatctgttaatccaggctcatgtataggtatctgcatcttgtagggtcagccagcaggagcgcagttaagggtaggattcagatgtcctcatcttttaagacctggctattaatttcagtcaatttcatataaacacctcttatttttgcctagtggctatcttagtcaccctactgctatgacaaagtg

SEQ ID NO: 287660 - DNA, 592 bp, Homo sapiens
aaggctcatgctctcttctgcagaagtgccaggatttgaagagtagagtcagggagagacaccaaggaacaaaaactagagagaaataccagagtgatgggaagagaatcatttgtgttgtcacaaaagcaaagacagtgcaagttttaacaagatatgaacaatgtacaccactgcagagaattcaactatgaatgtattatatctgaaggagatacatcaaatttgacaaatagaagtaaatttgtggcattttcaagaatagttttagtggagttactaaagcaaaaacaactgattgagattgggaagtaatgaggtataggtggaggatatagattgctcattcatgaagcttggtagacacaaataagtggctttcaatatgtgaaaataatattttgttacatgaaaactactttttatatgtgcagtacactcatattttccattctcytctttattatctttttaaaaaaatgctacattttattaaattgattttataacccactctagggttttgactcatgatttcaaaaacatgatcatatgtagcaatcagggataaaagattgcttcttggaaccat

SEQ ID NO: 287661 - DNA, 569 bp, Homo sapiens
aactagtgctctcattatttaagttaaatttggtgccttcattgtaaataataaaaagtttattattacccatatccatgtattgttcaaattcctcatttattgtgacactaggttttttttctccctgttgcrgttttagaagatactacttggcatcatcagacttttgataaagtgatgagtcccaaagcttgattggaatggtttcaagaaaggattggagaagaaaatttgaaaaccatgagtataggcaaatctagtaagatgctttactatacagggagagagagaaagagggtggttgctgaataaaatttttttgttttgttcttttaagatgggagaagtaatagattgtttgtatgctgatgaaaaagaactggtggagaggggaaaactgtagaaaaaaaatgctaaaatgatgcccttgagtaggcaagaggagttgagatttagtataaattggagttagttttagacaaatgcatatagagttgactcacaatgatggagaagaggcaagatatacaagtgcagatgaggttgttaaaagggtctagatattg

SEQ ID NO: 287662 - DNA, 515 bp, Homo sapiens
ctcatgtttaagatgaagccatttgaggacaatctttctagcatttcttccagttcaaaacacagattaaaaatttaacttgtgaatggttggttgtatgatataaacagtttttctttcactaaccctttttatatsctcttacgttgagtgtcaagtctgtcttctaattagtctttcctggagcagtgtatcatagaatcatagtctttcagagccaaaataaacctaagggatacctagttccaaatctaaatttgtaaaataagtaaatgaggccaagaggtgcgaagtgattttcttaagatcacacacactcagttgtctaatgggagacacgtgctggctacagactataacaccatctaataaccccctctcaggaggggtttgaatatttgttactacttgcatattatcgggtatcatgaagtaaatatttattctagcaaaataggatttgttttgttaactggcaggaaccaggcttgttacaggactagagggctgatacg

SEQ ID NO: 287663 - DNA, 628 bp, Homo sapiens
ttattacatcttaggttatgtttacctgcaacgttagcagatattgccaaacagttttccaaaatgatactgatttatattcctatcagcagcagtaagtcagagttcttactacttcacatcttcatccaaatttgtgattcaaagcctttttaaattttagccaatctgctgagtgtctagcagtatctcattatagttttaattagcrtttccatgattattaatgagcttgagtactttttcatatgattattgacaatttggctatcttttttttttgaaaatgcttttcaaagtcccttgaccttttttctattatgttgtctattttaattgttaggaattattggttgtatgtgttgcgaatgtcttatctagctttctgacttgcctctttactgtcttaatgtgaaccttgataaataaaaatttttaatttatctctaatttctttatgtttggtgctttttaaattcttgtaaggaatttttccctttgctaaattgttgatgttatatccctgtatattatattttaggacctttgctattttaaattttatatttagatattttttatatcagtatccaactgtcctagtacaaatagtgaaaataatcattac

SEQ ID NO: 287664 - DNA, 518 bp, Homo sapiens
tgtaaatggcagaatttcattttcttttttttggctgaacaatattccattgtgtatgtgaaaacaaaggtgaccccatgtcggatgctagtctgccatgctgacttctgttagcctcagtcccatgagtgcctcctaattctacttaatttactgtccttagtgtaagaacatgtcaaaccttgttgttgtcacacaaattataggctatgacgcacatagcattcttgtctgtttgagagaatgacaagaattgtctttaactgtcttgctggagcacatataccctttccctgtggtatataacccttgggtctgggaagtaacagtgtggagatctgtctgtcttgctgcctttcacaaccatgcttctgtctgtaagttccctcaatatgtcacccaataytgacaaaatgaatttgtctgcaatttgttcaccttcattcttgaagaatattgtattttggtagagaactctaggttggcatgtatttttaagcatattaaaatattttacg

SEQ ID NO: 287665 - DNA, 511 bp, Homo sapiens
ccaaggaatttcccgcatgatatttttttctccttctccactcaggcggtctcattgtctcttcttgcattaaggctattcatttagaaggactgaagtgcaaaaagttttatttgctcttcattgtataccccaactcttttatctgcccaattccctattgctttaaccattacaagcaagtatgacatgcacactgagatgttgggagcacctgggcatcttggtacaggaccctggagagaggttaagggatggggactttttttttttaatggaagcttttactgttgattcacatcggcattataaagaaacccctgactttatcaaagggaaaatgtgatgaaaagtatcagtgttagcaatatggttttatttacatcattaaagtttgtagcccgggcccacattgagytttttgggagtccagtgagattagtttgccataaaattgcaaagctgcagttacagcagcaaccattaattcagcatctatcctgtgccaggt

SEQ ID NO: 287666 - DNA, 629 bp, Homo sapiens
tccagaggcagtgtcactcaggacagctatttttactcttgagtaagctcacctcacaggattatggtggctcccataattatactgaaaatttttatccctaagatgatctgtcttcccaaagtttttcttctgaacttaggaaaatctgtgcatatgtatttgtgtgtgtgtttgggttgggggtgcagttagagaagtgaggtgggtgtggtgatggctttctatttctccactctagtattaaccagtgtttycatgagccctgaaggctctaagatgcttacagaatttgagggagttgcagaatgagagccagggcacttaacacagacatgtagagtgtgtagagtgcatcaaaatgaaagaaacgagaaaaagcctggtgtgtgggcatttggcataacatgacagacaactctctgcctgagaagattaaggtcagtcaactccaagccatggcctcaagttatgcaacacatttttcttttacatccaattgtatcagggtttcatattgactctagaagatcagaaatgatcatttttggctaggaaccataatctggctagttcccatacctacacagctggccctgctgtattttgagaggttctaggaatggttt

SEQ ID NO: 287667 - DNA, 605 bp, Homo sapiens
gagaatgagaaagacatactatattattatttttgaccactcctccatgtacatttagaagtttaaccttgaaaaaagtaagcrtttgaaataaaattgtcactttattagagcaagatataactaattggtataagtccaaatctggttggtgtaagaacggtcttataaaactattgtgttgagtattttttaaacattacatctcagtaaaatgcttattcttactaaaaagttctgattctgtcagaataaaggctttatcatgtgtcttgaggcttggagctctcctctgcacagagctgtttctgcctaggcagggtgtgcaagaaattatttatactcttctgaaccagatctatagatcgtcactcaatgcctggctcaaagagatacttaggaagtgcttcctgggtcattgaattctagtaactctctattaatacatgctgttccttcctttgttcataggaaaaaaggaaaatttgcttttcttcaaagacctctcaggatgtacaggaaaatgtggctgataaagaagacacatctggtcttcctttgttggggaatttataggaggtagtctcagctgtcaggccgctagt

SEQ ID NO: 287668 - DNA, 420 bp, Homo sapiens
tgccacatgttcctttttggtagtaactgctatttttccttagggaatccccaaagctgtaaatggacggagttatctcagatctaaaattctgttcccttttgtattgcatttcctgatcttcttggctttggggggtaccagaaattactttatgaaaaaaattaaccttggtatgtgtcatggctaggtgagaaatacacttttaraatggctgatggcagttgcttacagtgaacagttattactacagggtgctcctctttgagtgtttggataagaaaagcatcctttaggccctgaagactgactgctttcttaggctgagttccttaaagggctccaccctaaaaccagtaatctaattaagaaataagctaagttaaaaagccattttacaactttctggcatttagctgg

SEQ ID NO: 287669 - DNA, 564 bp, Homo sapiens
aatacttggaaagtgaatgggcacatgttgtaaagaaagatggggagcaaagttgagttacagtcctcagctttagaaaagtaactgtaatttgtgctattacttcccacaaggaagattttttagaagaaataggtctttgagtgaagtatgaattctgttttaagttaattttgaggtgcctacrtgttattcaattgatgataaattatagctagatttcatattgccctccattcatgaagcacttattgatctgttgtatggtagtcactattctagaaaatgggaaaaagcgataaatctgcacacttcctgctttcaaaatatattcagtggagacagaaacataaaaacactaacattacacattgggttaaatgaactgttagagatatattttacaataaaagatctctgtgccaagtcggcctgcacatggggaagaaggaagtaaaagtccaggaagatggtaaagaagaattagcatccaaacagaaacctgagggatgaatgataggcaaaataataatgtctaaagcaacttgaatcgatgttaaagaa

SEQ ID NO: 287670 - DNA, 1073 bp, Homo sapiens
catttgcagctctaatgttttaataatctaggcttctttagttagatatgtatttaggataatttgttttagaatagataaaatgaaagaggcaacaagaagcagacctgtcttgttttargtgtttgcctgtgtgagagaaatcaaatccacattttcagggttcccagagatagattcctttgcccactataatcagtagaatataagtatgtaagtttaacaggcagcattacaagatggcccaaaaaacctgccctccactgtgtaccactcatgtaatttccctctctgtgtgtgggcagagcctgtgactatgatagggcatcactcctgtgatgagttgatttgaatgaaccaaaagagcatcctggcccaattaggtgagcccttaaaagggaagttgaagagattcaatgtgtgagaatgtgtttggaagaacatacatggcaagaaactgtgggtggcttctgggagcctaaagtgacacctagacttcagccaggaagaaaacagaggcctcagtgccacaatcataaggaactaaactctatcaaaagwttcaatacagtattaacaattcagcaatgtgcagtgactcatgtcggtaatcccagcactttgggaggccgaagtgggtggatcactaggtcaggaggtcaagaccagccagacctacatagtgaaagccggtctctactaaaaaaaaaaaaaaaaaaaaaatacaaaaattagctgggtgtggtgacgggtacctgtagtcccagctacttgggaggctgagggaggagaatcgcttgaatcttggagttggaggttgcagtgagccaagatgccactacactccagcctgggcaacacagcgagactttgtcaaaaaacagcccccaaaaaaaaaaaaaaaaaaaaacaaacaaaaaaagcaaaacctgggcaacaagataaaggagattggtwttctgtgatgaattggactaacattttcttcttaatttctatcttgcaagaaaatcaaagccaatttgaattcatgtgtgatggactccagtatttatttactgtgctttctcaag

SEQ ID NO: 287671 - DNA, 579 bp, Homo sapiens
tgatgttacaaatgcgatatacatataccccatgtatgtgttacctttccaaaagcagccattatttcctatcaccatacaacacagaactgattgacagtgtggagcaaaccatatatatgtaatggttataactcatttgttagagatctacatgaccataaattccccatttttgttcatttttattatttatcatttatcaaattctattatatcccgttaatgtcatagaaactcatttacacaacaggattttgacgtagtcaacactagcatccaatacattaaccaatatttttaccataaaggaactkatatcaaaattaattcaatttattttttctttaaatttagctagtaataacttattcatattcataataacttcttcagagtttataaacctaaaatttctatccttaacatcttttcagagcagaaatcaagtagatattgaagaataaaatgcaattatatttgcagtttcttatgtaattcaggttaatattatcctaaattatacttttatgagacaagtaattgtaccttgaactataaaaatgaagaatatgtagt

SEQ ID NO: 287672 - DNA, 576 bp, Homo sapiens
ttctaattaactgggaacttgaacaatgcattcagtgtttctcatgattagaaaagtatttataattatttatatattgcctaaatgtaaccaatatgcaacaaacatataacctatgttttattacatctgttcaattaatgcaagtggagcattactaaggccatatagttgagatatcaaaaattaagtgcacatatgtgytaaataaaaattacatcctaattttaaaaacacataagatctatcatttctgatatactcattccaataactagaatataggtatcagtatatttttatcataaaagagaagataataagtttcaaagaggataagtaaatttaccctaatcatataatcgatataacattgttgaataagcatttctttaatgtttcccatggggaagacattacactagtctttgggatcatttcattaaaagaaaaaaaatgaataattaatagttcttattctcaaaggtttcatattttgttatttgaattcatatctagtcttttccagtacactatacttcattgaagaatatcagaaactcttctctggattgt

SEQ ID NO: 287673 - DNA, 433 bp, Homo sapiens
ctttttttcttttcttttttctttttttttycccagcagtttatttatagaagttctgaattacgtttacttagtaaatggacgaaattcttatctaccaatcagagtcaaaaccttgtcggtgccaagtcaactccattaacatcctttcaaaaaaattattagtagaaagcattcttatgaatctgaataggtcatattatactagttagctattgctaatatcaatggaaaaagtaacaaaaatctctaaatttagaaaggagaccttatttcttaaaaagattatcacaacctgcagacaggaagcagagcttcctgataaaaccaaaaagcagttgcttcaaaggaggaaaaatgaaacaggagtttatactaaaagagttggctaagtattcatattcaacaggttataggaggagctatgaatatt

SEQ ID NO: 287674 - DNA, 544 bp, Homo sapiens
atgccgttaaagcacagattatccttttctctgcagcctctttcttgatctattgtaagttttcttgtttgctatttaatgtgttttaagtaaagaaaaatttatactttaaattattagaacacattttgctgttcatctttatatcatacaatgacagttttaagtggaaatatgagagcatttaacttgtgtgcagagtaagcaatgttaagcaatttgtttcttgggrcttatccaggaagatgcctctagcaggccagaaacagaaaaatcacagaccagactcaaaaagggttgaagaaggaagaaaggctccttccaggcaagaagctggctgaaagagcactccaggcatggaggtaatcttggagtgcggaccttcccaagtacatggggctaccaccctgtcgtgtggaatgttcattcctgccagccgccaaactcgcattccacactccagcctggaaggggtctggggaatttgagacagaaactttctcacaagctcactgccccaacccatggcagatagatgactctc

SEQ ID NO: 287675 - DNA, 559 bp, Homo sapiens
acgtgataggagcacaatctgtgctgttacacttacctcgattcagatgtccattcccagagatctcatgtttcggtaaccactttgtctcttgtgagctgaagcaaataactatgggcactacgtggttttatttttaatttatttatctgggacagggtcttgctctgttgcccagactagagcgcagtggcacaatcttgactcactgcagcctcaaactccttggctcaagygatcttcccgagaagctgagtctgcaagtgctcaccaccatgcctggctaatttttgtatttttttagaggcagggatttggtatgttgcccaggctggtctcaaactcttggactcaagtgatccacctgccccagcccctcaaagtgctgggattacaggtgtgagccacggtgcccggcccactaaatggttttacattggtctgggtactttggttatcttagcattgttaattttcaggaaccaatttatttgatatagagtatagagagttgggattcatttaaccagtgacttgttgccatggactgaatattagc

SEQ ID NO: 287676 - DNA, 559 bp, Homo sapiens
acgtgataggagcacaatctgtgctgttacacttacctcgattcagatgtccattcccagagatctcatgtttcggtaaccactttgtctcttgtgagctgaagcaaataactatgggcactacgtggttttatttttaatttatttatctgggacagggtcttgctctgttgcccagactagagcgcagtggcacaatcttgactcactgcagcctcaaactccttggctcaagtgatcttcccgagaagctgagtctgcaagtgctcaccaccatgcctggctaatttttgtatttttttagaggcagggatttggtatgttgcccaggctggtctcaaactcttggactcaagtgatccacctgccccagcccctcaaagtgctgggattacaggtgtgagccacggtgcycggcccactaaatggttttacattggtctgggtactttggttatcttagcattgttaattttcaggaaccaatttatttgatatagagtatagagagttgggattcatttaaccagtgacttgttgccatggactgaatattagc

SEQ ID NO: 287677 - DNA, 559 bp, Homo sapiens
acgtgataggagcacaatctgtgctgttacacttacctcgattcagatgtccattcccagagatctcatgtttcggtaaccactttgtctcttgtgagctgaagcaaataactatgggcactacgtggttttatttttaatttatttatctgggacagggtcttgctctgttgcccagactagagcgcagtggcacaatcttgactcactgcagcctcaaactccttggctcaagtgatcttcccgagaagctgagtctgcaagtgctcaccaccatgcctggctaatttttgtatttttttagaggcagggatttggtatgttgcccaggctggtctcaaactcttggactcaagtgatccacctgccccagcccctcaaagtgctgggattacaggtgtgagccacggtgccyggcccactaaatggttttacattggtctgggtactttggttatcttagcattgttaattttcaggaaccaatttatttgatatagagtatagagagttgggattcatttaaccagtgacttgttgccatggactgaatattagc

SEQ ID NO: 287678 - DNA, 1569 bp, Homo sapiens
acgtgataggagcacaatctgtgctgttacacttacctcgattcagatgtccattcccagagatctcatgtttcggtaaccactttgtctcttgtgagctgaagcaaataactatgggcactacgtggttttatttttaatttatttatctgggacagggtcttgctctgttgcccagactagagcgcagtggcacaatcttgactcactgcagcctcaaactccttggctcaagtgatcttcccgagaagctgagtctgcaagtgctcaccaccatgcctggctaatttttgtatttttttagaggcagggatttggtatgttgcccaggctggtctcaaactcttggactcaagtgatccacctgccccagcccctcaaagtgctgggattacaggtgtgagccacggtgcccggcccactaaatkgttttacattggtctgggtactttggttatcttagcattgttaattttcaggaaccaatttatttgatatagagtatagagagttgggattcatttaaccagtgacttgttgccatggactgaatattagcwgtgacccagcaggctgaagaccaagaagaccctatgttccagttcaagtcaaaaggcagtctactgtagaactaggaagagctgatgcagatgaagtctgaaaacagtctgctggagaattttctctagctctaagggtggccaaccttttcattataatcagctcaactgattgaatgaggaccacccacattgtgaaagataatctgctttactcaaggttcactgatttaaatattaatctcatccaaaatactctcacagaaacacccaaaataawgtttgatgaaatatctgggcaccacatggcacagacaagttgacaaacaaaatttgccatcacacctaccaaaaagggccttcgaaggacaccaaaaaatcatatatgataaagtgtctgggacatattgaattctcataagatgttagctatcatgatttttttcttaagttagtaatgatcatcagtgcttttgtctattttgttcacagcttatcatgaaawgtgacccagcaggctgaagaccaagaagaccctatgttccagttcaagtcaaaaggcagtctactgtagaactaggaagagctgatgcagatgaagtctgaaaacagtctgctggagaattttctctagctctaagggtggccaaccttttcattataatcagctcaactgattgaatgaggaccacccacattgtgaaagataatctgctttactcaaggttcactgatttaaatattaatctcatccaaaatactctcacagaaacacccaaaataatgtttgatgaaatatctgggcaccacatggcacagacaagttgacaaacaaaatttgccatcacacctaccaaaaagggccttcgaaggacaccaaaaaatcatatatgataaagtgtctgggacatattgaattctcawaagatgttagctatcatgatttttttcttaagttagtaatgatcatcagtgcttttgtctattttgttcacagcttatcatgaaa

SEQ ID NO: 287679 - DNA, 488 bp, Homo sapiens
atgattaattcatttatatatgtatatcctttacagtttttctgcataaccagtacctaacacagtttttaatatatagtatgcattgaataaatatttgttaaataaattcataaaatggttcattttacatctgatcaatatggctcaaatctcatatcccaagtctacactccatcatctaaagctcttaataacatctattattgtatgtttttcatagttttttttttttttcgtagttcttctaggatgaataggtgcagtaattctccaagctacagttctagttacagctcttcttttaaaccctgtgtgagcttcttaactcagaaaaagaaaggtcagagcaaagacaaagtctagggccctgtgacttttgatcacaaaatttctcatcttgtttcttaagttgagtatttgtaaatgtgccttatagtaagtccagaaagatatttayttcagtgtgtaatttgaacctgaatttt

SEQ ID NO: 287680 - DNA, 565 bp, Homo sapiens
tattaatatgtttttaaattgtaattttccttctattcatttcaaaatttaatattttatatgctgttttcaaaattatatgtaaaatcttaatatagctatttaacattatttttgaacagtttcaatgcagttgtttttggtgattaatgaatctgttcattcaaacagaatttgaagaagtaagggtgtgtaaatttctggctctatgaaatacagtacctaagaaatggagaatttggtttaggataggaaaagattagttgagttgtgaatacatgaagtcttatatatctataggtagctcagaaaactggatataaatctccagttcttgatacacctgactcccataaagtgcaaaaccatagacaggtatatctcacttaaatatgctctccaaacaatcagtttctctactatcactcctccagttataggtggaattgtggtggtatgcatatccatcagggggaatactagtgttgtatgtacattggatctcagagggaaggaaartaaaatcataataatcagttaagtaggaagcgccaaggcaactgga

SEQ ID NO: 287681 - DNA, 611 bp, Homo sapiens
gaaagcctagtaccacatgaattcaaagccaaattttaccagatgtacaaagaaaagccggtaccaaccttactaaaactattccaaaaaatcaaggagaaggaatgtcttcctaactcactctacaaatcctgtatcaccatgataccaaaatcagggaaggacaaaatgacaataaaaaaggaattataggtcaatatttctgattaacatcaatgcaaaactcctcaacaaaacactagcaaactgaatccaacaatacatcataaagataatttgccatgatcaaatgtgcttcgctcaagggatgcaaggatggctcaatatacataaatcaataaacatgatccaccacataaacagatataagaatgaaaactayatgatcatctcaatagatgcaaaaaacagtactggataaaatccaacatctcttcataataaataccctcaacaaactagcatagatggaacatacttcaaaataataagagccatgcatgacaaactacaggcaacatcagattgaacagggaaaagttgaaaccattttcactaagaactgggaaaagacaaggatggctactttaactaattctattcaatataat

SEQ ID NO: 287682 - DNA, 558 bp, Homo sapiens
tatttctgattaacatcaatgcaaaactcctcaacaaaacactagcaaactgaatccaacaatacatcataaagataatttgccatgatcaaatgtgcttcgctcaagggatgcaaggatggctcaatatacataaatcaataaacatgatccaccacataaacagatataagaatgaaaactatatgatcatctcaatagatgcaaaaaacagtactggataaaatccaacatctcttcataataaataccctcaacaaactagcatagatggaacayacttcaaaataataagagccatgcatgacaaactacaggcaacatcagattgaacagggaaaagttgaaaccattttcactaagaactgggaaaagacaaggatggctactttaactaattctattcaatataatactggaagtcccaaacagagctatcacgtaagagaaagaaataaaaggcatccaaattgggaaaaaggatgtcaaattatctctgttcactgaagatatgattgtttacctagaaaaccctaaagactcttctagaagattcct

SEQ ID NO: 287683 - DNA, 558 bp, Homo sapiens
tatttctgattaacatcaatgcaaaactcctcaacaaaacactagcaaactgaatccaacaatacatcataaagataatttgccatgatcaaatgtgcttcgctcaagggatgcaaggatggctcaatatacataaatcaataaacatgatccaccacataaacagatataagaatgaaaactatatgatcatctcaatagatgcaaaaaacagtactggataaaatccaacatctcttcataataaataccctcaacaaactagcatagatggaacatacttcaaaataataagagccatgcatgacaaactacaggcaacatcagattgaacagggaaaagttgaaaccattttcactaagaactgggaaaagacaaggatggctactttaactaattctattcaatataatactggaagtcccaaacagagctatcacgtaagaraaagaaataaaaggcatccaaattgggaaaaaggatgtcaaattatctctgttcactgaagatatgattgtttacctagaaaaccctaaagactcttctagaagattcct

SEQ ID NO: 287684 - DNA, 469 bp, Homo sapiens
gggtatgtggaattttttggttttgcttattgcaccattctgcagtggatttttgagacaagatctaatctctgcaagtagaagacctttctttacgggcgttaagtttctctatctgctttattgtgctgaaagcatgtaggtatttggatgccctgcattttttaaaaactggcaatataatttatatagtataattttaatgtcttcaaatatatataaggttcatttaatatatgtttttaaatcttggaagtgcaattctgctctatttttataaaaaatatttaatccacactctycttgcatttctttttgtaaatggaagaaaaaattggaaaaagtgctgatgtattgctatatatggacttgtgaaaaactactattttctctttgcaataatttacatatttaaaatgatattttgcaagaatttgcaaattccattcagagcaaaactttgtcattt

SEQ ID NO: 287685 - DNA, 1162 bp, Homo sapiens
ttgaactcttaggaaaaaagtcctgatggctggagggagtagaacgaggattgtcttgacctcgtgtcctgtcagggctgggaactcagattgtaaagtttctctggggtctccttgcccatagagaaaatctgttcagttgggagggggcttaggtttttattttgatttctyattatttatttctcaaaagaaataaataaaaatgaatagtattggtaacttattggaaccagttaaatgtgtcataaaaaatgaaatctgtagacctttctgtactggaggaatcaatatgatttcttaaactataggaattccaaaatacaaggtgaaataggccattcattcctctccattgtacattcttatttatctataacaaagtaaggcaatttagggaaaagggtgcggggggagaaaattgttttggcttcctttttcacaaattttttagcaagatcattggcattgaagtgcattcttgtctataaagtttcagcctgactctagtcatttgatacactgatgcacaatagaaataaattacttttgcctttgcgattawcccagtcttactaagtgttgtatccttagcatttttacagatttaacattgagagggtttgagtattaataaggaatgaattgatatacacttgaactagttgaatgtagtaactgatgataggaaggttgatataaaatggtgcgattattttacatttacaacaatttttctttggcttttttttcccgtttagatacacaaagtaaagctaatttcaaatatttcaaaaataatttcttataaaaaatttttaaaaattactaaaaacagcatgtcacttctatagttttagaaaggattacttttgataattctcacttgatatttgcccttgatgtwaatgtaggatatgatttatataattgtaaaattttgctatttgaccattttaagatctcagactatctgatgctaaagagaggctaaaatagagacaatatgcactaattaagtatatatgggcctcaaaaccataattctataattttataagacctaagtttgtgacacagtttgatcaaaattgtgtttttgtgttgttttgcataaaatttctttaaaaatgtgttgcagtccacagaaaacgattgggat

SEQ ID NO: 287686 - DNA, 494 bp, Homo sapiens
tgcgaaattataccatattctactcccagtgagtagagttaatttctattttgcctccgttgtctcaatctttggcaactcactcttttttactctttgttatactcttttcctctgtttgtcctgtcttcccactataaacacacatgcaggaatttacaagattctctaaggattcaaggcaggcttaacagaagttaacaagctaaccaaaacttgtaagaaaaatgttttaggcttgctgtttgggctrcagcatataaaaatcttggaaatcatcacttctgtacatacgataagaaaatatctaaacaaacttaaaaatcaactgttcttagacctgtcaggaaactaagattacaggcaaaccactgctcctacgattggatatataggcaagcgtgtgcagagaatcacaactcacctgaacagaatcccttgagcagaaacctctgtgggaacacacatcaaggcaggaaaacctaagtggcaat

SEQ ID NO: 287687 - DNA, 609 bp, Homo sapiens
ctattgttgcagcttttttaccttggcaagcaggagaaaatagcacccaataactttttcttccacatttcttgcaagtgggaggaagggttacagtgttacaggattcctttggtgccactttgccagctggaaatctctgtgactgatctgacctctgcctggagcttcactcaggcctgccaggctcactccacccactcaccatggcagggtgtgcttcgttcatgccttggcccagatcccttgcctgtcacaggatctgcactcagcctgtgccaggacctggtgtgccatgagcagctttcatgttgcgtgccaccatctagatgaggggaatgcagtggtgcctgaaaactcagagatgccagcaaccatggagcctaaagtggtgttacagctctcgtctcaggagtcctgaggtccaaccscccaagaaatgttacagctctctcttgtgcccaccaccttcagctcagcagatgcgggtgtgtcacagtttgtttgttcctgccacctatagcttggtgaataagagtgtggtatagcttgtttggtcctgctgcccacagctccgcaagttctgggttcttgccctgtgaccaagag

SEQ ID NO: 287688 - DNA, 609 bp, Homo sapiens
ctattgttgcagcttttttaccttggcaagcaggagaaaatagcacccaataactttttcttccacatttcttgcaagtgggaggaagggttacagtgttacaggattcctttggtgccactttgccagctggaaatctctgtgactgatctgacctctgcctggagcttcactcaggcctgccaggctcactccacccactcaccatggcagggtgtgcttcgttcatgccttggcccagatcccttgcctgtcacaggatctgcactcagcctgtgccaggacctggtgtgccatgagcagctttcatgttgcgtgccaccatctagatgaggggaatgcagtggtgcctgaaaactcagagatgccagcaaccatggagcctaaagtggtgttacagctctcgtctcaggagtcctgaggtccaaccgcccaagaaatgttamagctctctcttgtgcccaccaccttcagctcagcagatgcgggtgtgtcacagtttgtttgttcctgccacctatagcttggtgaataagagtgtggtatagcttgtttggtcctgctgcccacagctccgcaagttctgggttcttgccctgtgaccaagag

SEQ ID NO: 287689 - DNA, 609 bp, Homo sapiens
ctattgttgcagcttttttaccttggcaagcaggagaaaatagcacccaataactttttcttccacatttcttgcaagtgggaggaagggttacagtgttacaggattcctttggtgccactttgccagctggaaatctctgtgactgatctgacctctgcctggagcttcactcaggcctgccaggctcactccacccactcaccatggcagggtgtgcttcgttcatgccttggcccagatcccttgcctgtcacaggatctgcactcagcctgtgccaggacctggtgtgccatgagcagctttcatgttgcgtgccaccatctagatgaggggaatgcagtggtgcctgaaaactcagagatgccagcaaccatggagcctaaagtggtgttacagctctcgtctcaggagtcctgaggtccaaccgcccaagaaatgttacagctctctcttgtkcccaccaccttcagctcagcagatgcgggtgtgtcacagtttgtttgttcctgccacctatagcttggtgaataagagtgtggtatagcttgtttggtcctgctgcccacagctccgcaagttctgggttcttgccctgtgaccaagag

SEQ ID NO: 287690 - DNA, 1105 bp, Homo sapiens
attgaataccaataatcacaataatcaaagaaattaaaaagataggcataattatttaacatgaatcatgcaagaaatgggtattaaaattttggtacatgaataatttggtaacatttgaagttctgtgtgaggaatgtcaagatacaccttgatatatttgctcatttatacaactcaatactgtatgctagaaaatctgttatgcagtgggaagtcagaagtaaataaagcaaaaggaaagtcttgtccttaagaagcttacagtctaagcttaagagagactaaacacaataaacaaaggaagtacaaagttggattagtgtgtttgcagatcgttcataataaatgttacgggtgtaatatagacatgcagttcttaacagggttgtggtctgacaagtgcatcattaggcaattttgtcattgtgtgaacatcatagagtgttctcacacaaacatagackatagcctactacacacctaggctatgtgtgatagcctattgctcctaggctacaaawttcagtcaataatgggtttgtctacaactgttgttgaggaaatagaaaataaagcttctttatggaaataataatacataatgaatatatcgttgctagcwaaatcagccatggtgaaagaacttttggtatgtctaagtgaacactttcaacctagagttgaaatacaatgactgaatcatggaagaggggtcaggaatgtagatttaaatgtgcaagaagaaacataagaaagacttttctttatgcttaaaattaaatatttttaaattattttattcatcccaatgtcataagcactggaattcagcaaaacttctaactagacttggcaattaggtaaatgatttgtgtctccattattattattatattttggtttacttcttttaactcataggaaaaaatgaggtaatttaactttttttcctaattctattgtttaaactatattacagttcaaattatatcttcctttatattatacctttataacccttaaaatcagtatttcagactgccatatgatctgaagtagcaaacagggagacatcttttgccagatatttgttgtttacata

SEQ ID NO: 287691 - DNA, 581 bp, Homo sapiens
ttcagtcaataatgggtttgtctacaactgttgttgaggaaatagaaaataaagcttctttatggaaataataatacataatgaatatatcgttgctagctaaatcagccatrgtgaaagaacttttggtatgtctaagtgaacactttcaacctagagttgaaatacaatgactgaatcatggaagaggggtcaggaatgtagatttaaatgtgcaagaagaaacataagaaagacttttctttatgcttaaaattaaatatttttaaattattttattcatcccaatgtcataagcactggaattcagcaaaacttctaactagacttggcaattaggtaaatgatttgtgtctccattattattattatattttggtttacttcttttaactcataggaaaaaatgaggtaatttaactttttttcctaattctattgtttaaactatattacagttcaaattatatcttcctttatattatacctttataacccttaaaatcagtatttcagactgccatatgatctgaagtagcaaacagggagacatcttttgccagatatttgttgtttacata

SEQ ID NO: 287692 - DNA, 581 bp, Homo sapiens
ttcagtcaataatgggtttgtctacaactgttgttgaggaaatagaaaataaagcttctttatggaaataataatacataatgaatatatcgttgctagctaaatcagccatggtgaaagaacttttggtatgtctaagtgaacactttcaacctagagttgaaatacaatgactgaatcatggaagaggggtcaggaatgtagatttaaatgtgcaagaagaaacataagaaagacttttctttatgcttaaaattaaatatttttaaattattttattcatcccaatgtcataagcactggaattcagcaaaacttctaactagacttggcaattaggtaaatgatttgtgtctccattattattattatattttggtktacttcttttaactcataggaaaaaatgaggtaatttaactttttttcctaattctattgtttaaactatattacagttcaaattatatcttcctttatattatacctttataacccttaaaatcagtatttcagactgccatatgatctgaagtagcaaacagggagacatcttttgccagatatttgttgtttacata

SEQ ID NO: 287693 - DNA, 513 bp, Homo sapiens
aatgatattaattattctgatctataggcataggagctttttccatttgtttttgtcatctacaatttytttcttgagtattgtttagttttccttgtagatatttgtcttttcctaggctaagtatctaagtattttatatttttcgtaactattgtaaatgggattactttctttatttggtctttggttaaataattcttggtgtagagaaatgctactgatttctgtacattagttttgcatctatcctgaaactttacaacatgtatttatcaaatctgaaggtttgttggtagagtttttagagctttctagatataaagtcatatcatctatgaatgaaataatttgacatccttttttttcaatttagattccttttatttttcctctcttgcctatttgctgcagcaaggacttccagtattatgttaaagagtggcaaagtggacaccctggtttcattccagctcttagaggaaatgctttcaagcattcccaatcaagtat

SEQ ID NO: 287694 - DNA, 513 bp, Homo sapiens
aatgatattaattattctgatctataggcataggagctttttccatttgtttttgtcatctacaatttctttcttgagtattgtttagttttccttgtagatatttgtcttttcctaggctaagtatctaagtattttatatttttcgtaactattgtaaatgggattactttctttatttggtctttggttaaataattcttggtgtagagaaatgctactgatttctgtacattagttttgcatctatcctgaaactttacaacatgtatttatcaaatctgaaggtttgttggtagagtttttagagctttctagatataaagtcatatcatctatgaatgaaataatttgacatccttttttttcaatttagattccttttatttttcctctcttgcctatttgctgcagcaaggacttccagtattatgttaaagagtggyaaagtggacaccctggtttcattccagctcttagaggaaatgctttcaagcattcccaatcaagtat

SEQ ID NO: 287695 - DNA, 598 bp, Homo sapiens
gggtcagctagtcctcagtcctacaacctcctgtataagggaggtgggtattatccaaaatatgcttagaagagcttgtccctcccttggtcgtccctaatctgggtggtgacttcagcttgcatcacctcaaacttggcacaaggatgaggcatagcccagaattaaattctcaaaatgatgccagctgtgggccgtgaccaaggtggttaggaccgcctcaggctaggagcatgagcaagaagctgtgcctagtgcggtctacttgagttttgttctcatggcagcccataacaggggggtgggtattgtcccagatacgtgtcagagagccttctttccttgtccctcctcaactaagcagcagctgcagctgcatcagccagaactcagcctggaggcaggacacaacccagcattaaactctcaaaatggtgccttgggcctgggaacagagagggcagggatcctcttaggctagcagcctggggaaaaagctgtggggagtgtggtsctctcatgactcagtctcaactgcagcctgcagcagggtgatggggaccctcccagggtttcatgggtgtgcccggtgtttttt

SEQ ID NO: 287696 - DNA, 626 bp, Homo sapiens
tattgcatttatattgtattaggtagtatcagtaactaaatatgagttaaagtctgcagaatgatatgtataacttacatgcaaacactacaccattttatataagaaggatgtgcatctgctgattttatatcygtggcggggtcctagaaccaacattccctatagatactgagggacagctgtacatgtggattgtcataattttacagataaggaaatttagtctttggaaattgaatcaactaagttttcaagtttccataagctataggaacaggatttcaaagccaatcctacctaactccatagcatgctgtactatctaatttatttttatatgtattctttcagcttcaattgaggctgaaaaaaactaatgattcaattaataactgaagctaatatcataataaagggctccatggctacaaattataactgtgacatggaggacagtagcttgggaaaatatagtttgagatagtttgtttttatcgatccagctaacactttcataagccaaaggtggtgttggccaatggaacatgaaagacaattgatggttgttgaagaaaatgtcagggaaatgagaaatccataccaactgtgacttattttttctt

SEQ ID NO: 287697 - DNA, 593 bp, Homo sapiens
tacaaagtatttgaaactaagttgccaattagagacactattacctccaaatacattcctgtatttattctacaaaaaaaagaacatcctcctggcttgtcagtatccaartcaggaacttaaaattaatataattgtatttgtctgcttgggcagccataacaaattaccataggctgggtggcttaaatatcagaaatgtattttctcacagttttggagcctgagaatctgaaatcagggtatcagtatgattcagttctggtgtaggctctctgtgcagatgaccttctctctgtgtcttcatatggcagtggtggaggacagagaaaccaagctctagtgtctcttattataagggcacttattgcattgtgagggcactgcctccatggccccatctaaatctacttacctccctaaagcctcatctccaaacaccttgaagtatttccttcttcaacaatcttttgatttattctatttgattatttaagtataaaattattgttcttccttactgaatgaattataactcataattattatttattctgatactcaaattcttcctgatttgatttggccagtaa

SEQ ID NO: 287698 - DNA, 593 bp, Homo sapiens
tacaaagtatttgaaactaagttgccaattagagacactattacctccaaatacattcctgtatttattctacaaaaaaaagaacatcctcctggcttgtcagtatccaagtcaggaacttaaaattaatataattgtatttgtctgcttgggcagccataacaaattaccataggctgggtggcttaaatatcagaaatgtattttctcacagttttggagcctgagaatctgaaatcagggtatcagtatgattcagttctggtgtaggcyctctgtgcagatgaccttctctctgtgtcttcatatggcagtggtggaggacagagaaaccaagctctagtgtctcttattataagggcacttattgcattgtgagggcactgcctccatggccccatctaaatctacttacctccctaaagcctcatctccaaacaccttgaagtatttccttcttcaacaatcttttgatttattctatttgattatttaagtataaaattattgttcttccttactgaatgaattataactcataattattatttattctgatactcaaattcttcctgatttgatttggccagtaa

SEQ ID NO: 287699 - DNA, 593 bp, Homo sapiens
tacaaagtatttgaaactaagttgccaattagagacactattacctccaaatacattcctgtatttattctacaaaaaaaagaacatcctcctggcttgtcagtatccaagtcaggaacttaaaattaatataattgtatttgtctgcttgggcagccataacaaattaccataggctgggtggcttaaatatcagaaatgtattttctcacagttttggagcctgagaatctgaaatcagggtatcagtatgattcagttctggtgtaggctctctgtgcagatgaccttctctctrtgtcttcatatggcagtggtggaggacagagaaaccaagctctagtgtctcttattataagggcacttattgcattgtgagggcactgcctccatggccccatctaaatctacttacctccctaaagcctcatctccaaacaccttgaagtatttccttcttcaacaatcttttgatttattctatttgattatttaagtataaaattattgttcttccttactgaatgaattataactcataattattatttattctgatactcaaattcttcctgatttgatttggccagtaa

SEQ ID NO: 287700 - DNA, 1119 bp, Homo sapiens
tacaaagtatttgaaactaagttgccaattagagacactattacctccaaatacattcctgtatttattctacaaaaaaaagaacatcctcctggcttgtcagtatccaagtcaggaacttaaaattaatataattgtatttgtctgcttgggcagccataacaaattaccataggctgggtggcttaaatatcagaaatgtattttctcacagttttggagcctgagaatctgaaatcagggtatcagtatgattcagttctggtgtaggctctctgtgcagatgaccttctctctgtgtcttcatatggcagtggtggaggacagagaaaccaagctctagtgtctcttattataagggcacttattgcattgtgagggcactgcctccatggccccatctaaatctacttacctccctaaagcctcatctccaaacaccytgaagtatttccttcttcaacaatcttttgatttattctatttgattatttaagtataaaattattgttcttccttactgaatgaattataactcataattattatttattctgatactcaaattcttcctgatttgatttggccagtaawacttgggaggctgaggcaggagaatcgcttgaacctgggaggcagaggttgcagtgagctgagagggagggagggagactctgtctcagacaaacaaacaaataaaaaacataattttatgcccagatttagaacatcattctataactatatctaaaattaaggtgggaatacctaaaattgacccacctcaatgaagtcaaaaccaataattaacaggaacaaaatattaatacctgaattttattctagagcaagtctaatacctcacagaaaaaaaawatatatatatatatatatatatattccagttaatataagctagtaccactctagtgctactcagtatccttcggattgttcattagtcatcataatttattagacatgtgaaaaaccaggcagatttcattcaagacattatttaagacaataaaaatagccactagaagcagatacacaaatgatgcagatgttagaatgaatagacatctgctttaaaattttttttctacaaatgttaaa

SEQ ID NO: 287701 - DNA, 438 bp, Homo sapiens
tgttgggtgcacttgcagaaaggctgtcacttcacacttggaagattgcacagtggccaggcagaggtgctgcccacttcccagatggggcggccaggcagaggygctcctcacctcccagatggggtggccgggcagagacgctcctcacctcccagacggggcagccatacagagacactcctcacctcccagacggggcagccatacagagacactcctcacctcccagatggggcagccaggcagagtcacttctcacttcccagacaggctggtggggcagaggcgttcatcacttcccagacaaggtggctgggcagaggcactcctcacttcctagaaagcatggcatctggacagaggcactactcacatcccagatgattggcagccaggcagaggtgctcctcacatcccagacaatgggcagccggg

SEQ ID NO: 287702 - DNA, 439 bp, Homo sapiens
acctgtggcttttgcagttacatcagccaagtaatttaccttctttagtatcagtttttgagtgtcctgggattttcattattgcaaaagacttaagagttttggatagtttttagtaatttargacatagtagctgttttttatcttttggccagtagcagttagaaaaccactttgtttccagagtgaaccaaaataatgtgccaccccaaaggctcagcagctgtaagtgtagctaagtgcagtcctattaattgacagtataggtgttcagagagagtagcaagttctgcctgttgggcagaagtggccttgggtagggaaccactttcgttggtttcagacagcgagacaacagcatagagagcttgatatttccttgagttattttgaaggtaggatccatcagtgaaacagacaagctcagcatttggagtg

SEQ ID NO: 287703 - DNA, 592 bp, Homo sapiens
atatgagcagtgggctcaagaaggttcttcttaatattcccaaaagaggagtaggcttcttttggccattgtagaagtttggggtgatcagttttttagaaaggaatatagagttagagctatcacagagaaacttggaattcattttctacatatcctgctaatcccaggaacccacagaattttcttttggtcatgggggcaggaaaagccgttgcttctattctttggggatcaagcaaaagactgtcttaaatacttgtgagagagttggtagcttttcttatgaaactttgtgattttcttttctttttttaattaaagcagagtctcactctgttgcccaggctggagtgcagtggcatgatctccactcactgcaacctctgccgggattcttctgcctcaacttcctgagtagctgagattacaaacacgcaccaccactcccagctaatttttgtatttttagtagaaatgagttttcacaatgttggccaggctggtctcaagctactgatctcaggtgatcagcctgttttggcctcccaaagtgctgggatcacygcaccctgcccccccgcaccttgtt

SEQ ID NO: 287704 - DNA, 893 bp, Homo sapiens
tcagccaattaggtggatgggagcctaagaagctaatagaaactgatgascaccttagagttccctgagttaaaaggctatgaggagagattgtaaactgtcattggctgatttgaaaccctaacgctttgtattttgttgttactctaaggaaaaggaatagaaagcatggttggaagaaggtttagatttataaagttttggggattcatttaatgctagttgctgcatttggtagttgataacttttgcagtttggatctgaaaatctaggactttagcagcatttttttggccatttttttgtgtgtgtgtggttttggagagttgtcccaccatattcagtaggttggaggtttccatagtcacccaatttaattgcttgttttttattaagawtttttgacattaactcagatctgaagtctaatwtcatagtaaaagtaatttctaaaagcacatgaaatgtaaaataaattgtcatttaactaatttactttaggtatgaatagtcataaaaccgcaacacttcatatcccatgtgagcttcgtggctcttaaaatttcttctgtccaggcagccataggcatcaattatttagagaccacattcacacacaaatatacattttaaactgtaacatgaaaacttcaaaactaataaaaaagaattatatctgaggtcatattttcaaaacatgaagaagatactttcatagaagttattttccaaaatgatgacatcttggatatgacagattggttactaaatagacagagacttgtgaaccatctgctatgtaagatttctctatcaaaaagaattaactctatttaaaccagtcagacaatatgagcatgggctgtttgccagtcctgagaaataatcttgt

SEQ ID NO: 287705 - DNA, 627 bp, Homo sapiens
cacattcatacctgtgaatatgaccttatttggtgagatggtctggctctgtgtccccacccaaatctcatcttgaattgtaatccaaattgtaatccgaagttgggggagggacttcgtgggaggtgattagatcatcggggcagttccttcatgctgttctcgtgatagtgtgtgagttctcacaagatctcatgatttcataaggggcatcttcctgcttcactctgcacttctctctcctgctgccttgtgaagaaggacatgtttgcttccccttctgccatgattgtaagtttcatgaggcctaccccgtcatgctcatgcggaactgtgagtcaattaaaccttyttcctttataaattacccagtctcaggtatttcttcatagcagtgtgagaaggaactgacacatttggaaatagaatctttgcagatttaatcaagttaagagaggtcattagggtggatcttgattcaatatgactgatgcctttgtaagaaggtggccatatgaagacacagacacacggagagaacatcatgtaaagctggaggcaaggattggaattatacagctgcaagacaaggaatgtcaaagattgacagccaccaccagaagctgg

SEQ ID NO: 287706 - DNA, 591 bp, Homo sapiens
gctaaggcataatatgcattacttttgctgtagttaccaataagttcctcatttccatttgagaccttatcagcctggacttcactgtccttatcactatcagcattttggtcacaaccatttaacaagcctctaagaagttccaaactttccctcatttttctctctttttctgagccttttaaactcttccaaactctgtcttttatccagttccaaagctgcttccccattttcagttatctttatagcaactcttctggaaccagttttctgtattaggccatttttccattgctataagtacctgaagctgggtagtttataaatgcaagaggcttaattggctcatgcttctacggtctgtacartcatggtgctggcatctacttggtttttgcgggggacttactgagcttttactcatggtggaaggcaaaatgggagcaggcacgtcgcttgatgaaagcaggagcacgagaaagagtgaggtggggggtgctacacacttaaacaaccagatcttgtgagaactcacttagtattgtgagactagcaccaagctatgagggatctccatgatccccatga

SEQ ID NO: 287707 - DNA, 576 bp, Homo sapiens
gctgggtagtttataaatgcaagaggcttaattggctcatgcttctacggtctgtacagtcatggtgctggcatctacttggtttttgcgggggacttactgagcttttactcatggtggaaggcaaaatgggagcaggcacgtcgcttgatgaaagyaggagcacgagaaagagtgaggtggggggtgctacacacttaaacaaccagatcttgtgagaactcacttagtattgtgagactagcaccaagctatgagggatctccatgatccccatgatacaaacacttccaccaggccccacctccaacaatgaggattacaatttaacataagttttggtagggatgaatattcaaactctatcaacctccaattaactttttaaaaaataacccttttatgatatgaatattcccttccacccctttgtatgtccacactgagagtggatagagagtgggatgtcctatgtgaagttgaggagaaaaaaaaaatcctccagacacacaacaacatatgaattaaactaatgttcttaaataactaatgtccaaaatgtactattgcattttc

SEQ ID NO: 287708 - DNA, 576 bp, Homo sapiens
gctgggtagtttataaatgcaagaggcttaattggctcatgcttctacggtctgtacagtcatggtgctggcatctacttggtttttgcgggggacttactgagcttttactcatggtggaaggcaaaatgggagcaggcacgtcgcttgatgaaagcaggagcacgagaaagagtgaggtggggggtgctacacacttaaacaaccagatcttgtgagaactcactyagtattgtgagactagcaccaagctatgagggatctccatgatccccatgatacaaacacttccaccaggccccacctccaacaatgaggattacaatttaacataagttttggtagggatgaatattcaaactctatcaacctccaattaactttttaaaaaataacccttttatgatatgaatattcccttccacccctttgtatgtccacactgagagtggatagagagtgggatgtcctatgtgaagttgaggagaaaaaaaaaatcctccagacacacaacaacatatgaattaaactaatgttcttaaataactaatgtccaaaatgtactattgcattttc

SEQ ID NO: 287709 - DNA, 509 bp, Homo sapiens
caactccaatcctagactcttctaggaaataatcaattatgaaggtctcgaccaatcactctcatatgaacccagagggtcagaaactactaagtactttgtcctgtgtttaaaaatacctaaatttctgcagcttaccaaataaccagttggatgagaggatacgtttttatgtttctggaaagctgaaaagcatcccgttttctacaagtgactatcttaaatcaactacttcaaagattcttaacatgccttgtcatcggctttgtattctgggacaaaactcctagactatgggagaagtctcaccttaacatgtacttcacaataggtgagttacagtaactttaggagagcatatttaggatggtgttgktgatcccagagcttaaatgcacatacaaaaaccaaggtgtactttaatcatgaaattagtaactctgggttaaaattctccatagggcatctggtccaattctacaggcaataatttaatcaatagtaaaaga

SEQ ID NO: 287710 - DNA, 509 bp, Homo sapiens
caactccaatcctagactcttctaggaaataatcaattatgaaggtctcgaccaatcactctcatatgaacccagagggtcagaaactactaagtactttgtcctgtgtttaaaaatacctaaatttctgcagcttaccaaataaccagttggatgagaggatacgtttttatgtttctggaaagctgaaaagcatcccgttttctacaagtgactatcttaaatcaactacttcaaagattcttaacatgccttgtcatcggctttgtattctgggacaaaactcctagactatgggagaagtctcaccttaacatgtacttcacaataggtgagttacagtaactttaggagagcatatttaggatggtgttggtgmtcccagagcttaaatgcacatacaaaaaccaaggtgtactttaatcatgaaattagtaactctgggttaaaattctccatagggcatctggtccaattctacaggcaataatttaatcaatagtaaaaga

SEQ ID NO: 287711 - DNA, 1270 bp, Homo sapiens
cacttttcctgagtttgctaagctgcgaaaactcagaccttctctctgaacacaaggaccaagtacttrggagtttgtgttccttagggtttaggggtgagtgaagtcactggtgattgcctcttccatggaagtgtcagagtctagtatcggagtttcttgaaagtcagataaaagattgaatcggaaaactcacttatccatatggtagccctataggttttttgagaacaatggtcatttcccatttagactattcttctttaaactaaatttccctcaaattttttcaatttttcaatgtatgacaggttttgaagttttcttactattttggtgacccttctgttattattttccagtttttccaacattctacttatggtatgtatggtagacaggatttctttttttttttttttaatatctaagaatgttattttctttttttttctttttttttattaaagttttagggtacatgtgcacattgtgcaggttagttacatatgtatacatgtgccatgctggtgcgctgcacccaccaactcgtcatctagcattaggtatatctcccaatgctatcatggtagacaggatttctaataatgccagaaagaatgaaacagaaaaccacttctgttaaaagttaacttcaaaacaagagtaaaatcatgactcctgtawcactatgggtaacctggaaaaacatggtttcatgacttcgaataaatgttctgctctgttctcttagaaaagcagttatttgtgaaggtaaattcagattaagtttcgaggagccagatttgtgaatgggaaagtctggagtagaccaactcttggctattaaatgcagagccaaagataataataacaataataatawtaataataaaagatggagtcagtagtaaaatttaaattatgaaaaaagaagacattctacacaaaggtttggtctgaattagtgaagcaaaaaggcagaaaccaggtaagaaatcaagtgtcttggctccccagatattaccaactcagtccattgctaaggcaaagctgagtttattgcttactctgtaaggaggaataccacctccacagagctttggcagtatctcaaagcaggagaaggtgaggtcataatttattgaaaatgagaagtttggtttaagttggatcttccaatgcagggacttgattaggatcgcataatgatcacatataacagtcaaagactgctggaaacagcaacatgaggattttgaagagagga

SEQ ID NO: 287712 - DNA, 485 bp, Homo sapiens
aaggaaagtgtgaacaaaggcacaatgtgcttctctgatgaagaatttggcttatccagtctcagcacctttaaaaatatcactcagcacctgatagtcatttcagaatgttaacagatctttggcagtctgcaataagcaactgtatcagtgccattagccttatacgtgtgtcctataattcagccattctatgactattatgttatctgtctgtcagatttcataactgtagggagaagggtaaaagattcaatgcttctaaaggaattttataccagctrctcatgtcagttgtctgcttgttcattttataacaagcttaaattcataaggaggggtataactactatgaagacaaagacagggaccattacgagggttgggaccatctctcatttcttcaggggcaccatgtcatttcattcactcatcacagcagttggacctgccctgggatgccagccagaaaattctagagaggg

SEQ ID NO: 287713 - DNA, 1123 bp, Homo sapiens
catcatttaagactgaatacagcagcatttaatctcacaggcttacctattacttctctgactccacccattatgtctgttactctacgtgtcctagttttgctgcccattccttcgtttaaatgatcatgattcccaggttaggagattcttgtttacacaacatgtatcaaggtaactggcatgtggtggaccttttaaaaagttcattaaatgcatggcattgctctttagaggacagggaaccaactaaggattttgagcctggattttaggtrtgacattcaggaatttcgggaaaaagagagaattaaaactggagatggtgaattctagtaagaattcataaaattagatatttagttgatcaagattggagattgggattagttgaaagtagagatgactgggtagatgaggaggatgagactttaagtttcacatatctttgattcaagttttctgtttattactttaatatagatgaataatatttatttagagatgcaggtcatgatcttagtttataaatgaattatgataagtcagattaccagaagawcatcatttaagactgaatacagcagcatttaatctcacaggcttacctattacttctctgactccacccattatgtctgttactctacgtgtcctagttttgctgcccattccttcgtttaaatgatcatgattcccaggttaggagattcttgtttacacaacatgtatcaaggtaactggcatgtggtggaccttttaaaaagttcattaaatgcatggcattgctctttagaggacagggaaccaactaaggattttgagcctggattttaggtgtgacattcaggaatttcgggaaaaagagagaattaaaactggagatggtgaattctagtaagaattcataaaattagatatttagttgatcaagattggagattgggattagttgaaagtagagatgactgggtagawgaggaggatgagactttaagtttcacatatctttgattcaagttttctgtttattactttaatatagatgaataatatttatttagagatgcaggtcatgatcttagtttataaatgaattatgataagtcagattaccagaaga

SEQ ID NO: 287714 - DNA, 559 bp, Homo sapiens
atagagtagtgtggacacaggctcagctcaggagagtggaactgaggctgcgcagcctgcccttctaacctgttcacaacttccaaacatgcctgatgactgaaaaacattccagcaacaagtagttatctgcacacaccaaagcagaaatctgtcactgcctgcctgctgagaaaggaactgaatagaaagggttttgatggaatcttagacatgaagacttttctttttgttctgtttgttaactgtcaaccctgcaggaagtacacacagcatcagggcctttgaatgcataggtctaggacatctttccactttttctagcctctcctcactctcaacattctcgatgcttcttgtctctcrcccatgatatatgcctcttcatgcctctattcttttcttcaggctgttccctcagcctaggatccttccctctttttctccctctcagacccgcttcaaaacacatcacctcctctgtgggaacttttctccttcaacttcccttccagacaaaaccaaccacttagtaaatcaatagaggatttttgaagtg

SEQ ID NO: 287715 - DNA, 534 bp, Homo sapiens
catcctcttctctttccacttttcccactacctcatcttgagaaatacgaccttgctatctctaggttatgaagatatatatcaatactctgtttttccaaccaagaaatgagacacttttcattacattttattcttctagcatcaggtaacttttacctccccagtgtatcagctgctaatctgagaagggtttacctgctgaggctgagggtagagggttttgctaaggctctgctctagaagaagacacactttgtcagtctgactttcctggggaatggatytggaggatggggagttaagagaagtgtgacctgcagaaatggactttagttggctctctgtggccttttcctttgaagtaaagctgctatttccttattgaaatctaagattttccaaaatcttagaagtgtttgtctgactctgaactcagagggagtaactagccagaaacagccgtaaagaaagagaagccctagtaacctttgaaccaccacaacaaaagatcatttcactgggagatgggag

SEQ ID NO: 287716 - DNA, 534 bp, Homo sapiens
catcctcttctctttccacttttcccactacctcatcttgagaaatacgaccttgctatctctaggttatgaagatatatatcaatactctgtttttccaaccaagaaatgagacacttttcattacattttattcttctagcatcaggtaacttttacctccccagtgtatcagctgctaatctgagaagggtttacctgctgaggctgagggtagagggttttgctaaggctctgctctagaagaagacacactttgtcagtctgactttcctggggaatggatctggaggatggggagttaagagaagtgtgrcctgcagaaatggactttagttggctctctgtggccttttcctttgaagtaaagctgctatttccttattgaaatctaagattttccaaaatcttagaagtgtttgtctgactctgaactcagagggagtaactagccagaaacagccgtaaagaaagagaagccctagtaacctttgaaccaccacaacaaaagatcatttcactgggagatgggag

SEQ ID NO: 287717 - DNA, 1108 bp, Homo sapiens
attgccatagtttgaaaaaccaagctctaatggtaatcaaaaagaagaggggacagagtttggaaatcactggctagggcaagtatacaggaatatcatggaattcaaggaaaccaaataaatccccaggccttcaataggtgcaggtattcatattttacttttcaatatttggttgttatcatgctaacagcctcgaaagaggcaaagtgcagtcctaagcggagtgtcaaggtaaaaagaaatagctattgtacataactgagttgtaaacactaaggaaataatattgttgttagccaagaacagatggtcaaactcatactgttctattgagtcacactggtggaatgtgaaacaatctggagagcaaggggtatcccctaagaacatggacagcaacactatctttgtccatatcttagagtcaatraggtgtcatttttctctctcttgaaatcatttgtaggatatgaaggctgttgtccccattgtgacaaatcatagtaaagaggtcaagacacagctacagawagcaatttattaaaataaatgatactattatttaatattgctttagatggtttgtaaaaataaatttgcattcctaattttttctagacttcttaccaatttattaaaatacatgagactaatatttaatactgatataaatggttcataaaaataaatttgcattcctaatttgttgcaatgaaatttactatttttatgcaaaaatgtcttattttatagaatggcaataagtaaatacttttattggcatctactaacagtttgctgtctatgtagctatttttctgtgattcgcagtaacttatttttttttwaaaaaagaaaacaacagttttatagatgagagctccctaaaattagacttctaactaaaactatgcatttttttcatgtaaaaatgcctatttggagcagtgatacaaaagcttatattctcattcatggaatggaatgaactaataaaaatcagtaaataaagatctttctactgggtatttttaagttagaggataatattattccacaggcatcatggccactgaaaagtcacatatttttggttttggtggaa

SEQ ID NO: 287718 - DNA, 604 bp, Homo sapiens
acacaattctacaaagtgtaatggaacagtttaatacagcaaactccaaaactaaaaggagatctgaagctaacaggcattgttttggttttggttttttttctaatcttgtcggttgcccaatctccaacagcagccaactggtttcctccatgaatggaatctagtgcatgttacgtctaaatggtaaccctgcaagtcttatttgtaaaagtttagtcatagctaaagctgcatgcatagtgaataaaaaaatgttgaatggtccaagtgttggtttattggggggaaagctatgtggtaacttatttgattgactcattgacgattattttttaactcttttacttatttataagtaagcagctcctctgagttaatacatgctatcatccaggttaatatgtattaaatatctacaccttgttagttcaygaggttacagaaagggagggcactggtctggaacctacatgtgtcaagtgaggtgactgtatcatacgggaagggggtataaacttgaagcagtaatccatggagtggcatagaaaagcagccagggatgtaatcagaaaggaagagatgcctgagcattcatccagaa

SEQ ID NO: 287719 - DNA, 248 bp, Homo sapiens
cctctgagttaatacatgctatcatccaggttaatatgtattaaatatctacaccttgttagttcacgaggttacagaaagggagggcactggtctggaacctacatgtgtcaagtgaggtgactgtatcataygggaagggggtataaacttgaagcagtaatccatggagtggcatagaaaagcagccagggatgtaatcagaaaggaagagatgcctgagcattcatccagaaagtggcaagcag

SEQ ID NO: 287720 - DNA, 599 bp, Homo sapiens
tcggctgcccacgaataaacacttgactgtgtgctattgaaattttaacttttatatggagcgctttgcagagagcaaaaattgttagctattcgtttggccaacatattgagtggcttctctgtggattttaggctaggctgcttggctggtgtggcatattaagcagggctttaaatgaataaagaataatattttaactgatgtagcttgttagaagaggggccatttcttctcaggaatagacatcagcaattcccagtggcagtcttttttactatttccttccccaccmcacacagctgtcttcccactggtggctctgttcccccaaaccccaatatccctgtttactgcttttctgtcttctttttcagcactatgagctgcataagtgcaagaatggattttttttttccatctctttgtccccagttcgttacatgtattagtaaatgatgaatagatattttctcactgatatgatcttttgtctcttggtgtgtgagtttacctgttgcatcatcatccagttttgggaattttataggttatttttatgagcaactagtagcaaatgttggtcactctaatgatac

SEQ ID NO: 287721 - DNA, 599 bp, Homo sapiens
tcggctgcccacgaataaacacttgactgtgtgctattgaaattttaacttttatatggagcgctttgcagagagcaaaaattgttagctattcgtttggccaacatattgagtggcttctctgtggattttaggctaggctgcttggctggtgtggcatattaagcagggctttaaatgaataaagaataatattttaactgatgtagcttgttagaagaggggccatttcttctcaggaatagacatcagcaattcccagtggcagtcttttttactatttccttccccaccacacacagctgtcttcccactggtggctctgttcccccaaaccccaatatccctgtttactgcttttctgtcttctttttcagcactatgagctgcataagtgcaagaatggattttttttttccatctctttgtccccagttcgttacatgtattagtaaatgatgaatagatattttctcactgatatgatcttttgtctcttggtgtgtgartttacctgttgcatcatcatccagttttgggaattttataggttatttttatgagcaactagtagcaaatgttggtcactctaatgatac

SEQ ID NO: 287722 - DNA, 522 bp, Homo sapiens
acagtatctgatttcttggcatataagtttttatagtattcttttacaatactttatacttttactctctataaggtcagtaataatgtcttacttttatgtcttgttttaattgttttattgtctttttgcttttcagtataggtaaaggtttatcaattttgttgatcttttaaaagaatcaacatttgggttcattgattttctctattgtttttcaattctctatggagatttctcttctgccccactaaaattatgctagagtaattcttgaaatcagatagtataaatcttccaactttgttatttttcaaaattgttttggctgttctaggtcatakgaatttccacataagttttagaattcgtttattgattgctacaaaaatcttgctgggattttggttggaattgtactgagcctatagataatttataaacaatttacttcttagtaatatgtagtcttctgatccatgtccatgaaacatgtctgtattttcttacatctcatttcat

SEQ ID NO: 287723 - DNA, 598 bp, Homo sapiens
tctagcatctggtaatcactgagttctcattaatggatgaggaaatttaaaatcatagcacttaagagctttaakaaacagagaaactataattatttcttccaaacctctttttaagtggaagaataaattaaaattcacatgaaacaaagtttgaggattcttagaaatatagaaatctcttccaaagtaccatttatactcacataaatagtccttcaatagggataaaatataggtgtgaaaaactaattagaagaatgggaaatgcaatgtattatttcagagaatgtgtagattctcaatctaggcctgctattagcaaacgaggtaagcataattaattcatttaatcactgagttctgatccacttcatcaaatagaacaagtagtctattctgactatgaattatctcagaaaggtgtaattcatggagtcagaataaaaagcagcaggttgtgctgcagtaacaacctcctaaaaattataataataaaatgagaactaatgggaagcattgcaggttgtatcagatgtggtcacttagctgtttaaaaaactccaattgcttcctcttatttgtaaaggaaagtcca

SEQ ID NO: 287724 - DNA, 598 bp, Homo sapiens
tctagcatctggtaatcactgagttctcattaatggatgaggaaatttaaaatcatagcacttaagagctttaataaacagagaaactataattatttcttccaaacctctttttaagtggaagaataaattaaaattcacatgaaacaaagtttgaggattcttagaaatatagaaatctcttccaaagtaccatttatactcacataaatagtccttcaatagggataaaatataggtgtgaaaaactaattagaagaatgggaaatgcaatgtattatttcagagaatgtgtagattctcaatctaggcctgctattagcraacgaggtaagcataattaattcatttaatcactgagttctgatccacttcatcaaatagaacaagtagtctattctgactatgaattatctcagaaaggtgtaattcatggagtcagaataaaaagcagcaggttgtgctgcagtaacaacctcctaaaaattataataataaaatgagaactaatgggaagcattgcaggttgtatcagatgtggtcacttagctgtttaaaaaactccaattgcttcctcttatttgtaaaggaaagtcca

SEQ ID NO: 287725 - DNA, 621 bp, Homo sapiens
caggtggagaaagtgccaaaactgttatgccaagattcagaatcccaaatacagcaataccaattctggcaattccacaaaggcaatctccaggctggacaacccaggactgtcaatcttttggccaagaatcccctgactggataactcagggctggagaaacaaagattataaagcacgagaatggcaatttgaaatgaagcactggcaaacacaggatctattagagaaagaagccctaaagcagaaagctctataccaagaagtccaaacccagcacgcaacagcccaacataacctagaatgtcaagacactcaagataaagaccaacaagaccttcaatccagagttacacaaaaaggagatatgtacactagagacatcaaaccaggggacatgaaatgtatagggcaaacctcaggggacctgcaatcagaagacgtgaaggcagattttcattcttcttctggccaaagctcagtacaagacacatgtttagcctayttgtccaatctagattcagaacaagatgtgcaaccagacacttcagcttcctcaaattcatataaagaagatgtgaatttaacttctacttcatgtgatccaaaagatcaacagc

SEQ ID NO: 287726 - DNA, 533 bp, Homo sapiens
gtctatgaaggctctctaagggttcaagaaccaaaagagtcagcaaggaacaaaaatttctcccatttccctgtcttgctgtttccaatcctcttatttactctccctcctcatatttatgttgaggatatatggactgagtttgctcaattattaatgaggtagaatgtggcaatgaatacagaatgtgatgatggagtgggagggattaagagatatctagagacaggaaagtagaaattagggaagaacagagatgcagatgtcataatagaaaatatgacatactgtattgtattcagtgaagcttcagctcccttctttatgcctgcatttactgattataatttctcaacccttatgatacataatttcatcctctgtcatcaaaggaaattgtgttatcaaaagcyatcagttacctcaatcttccaagcctaatcgtgttttttcaatcctctttccctttatctctgatacatttggaaaggttaacaatcccttttctttcaatttttatcacccccattaac

SEQ ID NO: 287727 - DNA, 523 bp, Homo sapiens
agttgttgtggttttcttaattgaccttaatcacagatcatggtaatactaagagatgcatgaagcgatctcctatattccaagcatagtgttcccttatgtccattgtggaatagtggtctaatttccccttagtcatcagaaacaatcaccccatccagcacagtaacccctttcagttatctgaagaggatggaagggctttgctccaaaattcagcaataaacctrtaggagcctaccttcccagaagctctatatagcatccctatctgccattgacacttcaagcaccattggatctgttgatggtatggtccaagcagaagtcagcttacacggaagccgaggcctgttgtgaagcttttcttctggtcctactcaaaagcagctctgtaagtcacttggcaaattggccagagcaacacacccaagtgaggaatatgttgcctccaaaatccaaagaaactcattagatgctgtgcctcctattcattgtggaagccagatgcgacaacttatcc

SEQ ID NO: 287728 - DNA, 567 bp, Homo sapiens
aactttctctcaaaaaagaaaaagcaaagccttgcaggagcagactaatttcttccaaacatttagaaaagaaacaacaccaaactgaatactttcagttcacttcccaactcacgagtattcatgtgaggctgtcacaagtttgacatgaaaacataaggacattataaaatatttaaaaattacgggtaactctatcttgtaaactttgtgaagaaatctgaaataaaatattaacaaaatcaaattcagcataatatatgataatataccgtggccaagtcagtggatatcagaagtacacaattgatttcacattcaaacatcaatcagtgatacacctaaatgtgaaatcctaaactataaagcttgagtgggtgggctgcagggaacttaggagaatatcttcacgaccatggkagtagacaaagctttcttagataaaacataaaagggactaaatataggggaaaaataaaataaaatggactaccaaagcacagaaagggagaaaatttcctctctctatatatatctctctctcacaaaagacccacatccagaata

SEQ ID NO: 287729 - DNA, 628 bp, Homo sapiens
tagaatcttaaggctgggaactctccaaagcaaaggggagtggctcatagtgaaggggttctggggacattttgactgataaagcacattctgcctcttggcaatgccatctgcacctctccccaaatcaaatggtcaccttggtgttgtcacctctgttagtcatgcattatttcaactaaaggacagcaatgtggtgttgcaaagataggaaccaaagcccaaggcctggggtgacccagtcatctaacttctctggttgatgacatctcctgttgatttcactaagagactccacccagtggctcctactccagtggtgtgtggaaagatgagctggttggtggaatggtttggcccataaattctacattaatgctgcaagatcatcaatgttaaagagctgatcaactagaatactaacaatagtaaaaataatgarggcaaatattggtggaaccactactatattccaggcatcattctaagtattatataggtgttactcatttaatctcacaaaagtcctaggaggtgaattgtattattatacccattttacagaaaaggaaactgaagcacagagggggtaagtaatttgctcaaggtcataaagtttgcaatggca

SEQ ID NO: 287730 - DNA, 509 bp, Homo sapiens
tttaaaaatccaagaaacaacaaagaatcacgtgatgtaaggactatgtaggatttatatgagctttggcttttattctgaattagagaggaagccgttgaaggattttgcccagttattgcactatctgaataaatctctttccttgtctttatatatttaaaaccccaggggttgggccaactccgggtaaaacttgacttggagactcaaaagaattacattagggtctgatckttcacttggaacttctcagttctgcttttgtctgtgagcatctgtctgtcacggggctgctgatggcagcaaacttacgtcctcacagctccaaacccaacaggaaagaggaaagatggggagaccatttcttggtcagtgaagtgaaaatgatgagattaattttgattggaaatgtgtcagtcattcacacaattgttttttcctaggtcacaaggctaccaaagaacttcactctagctgagttgatgtaattctgccacttcccagat

SEQ ID NO: 287731 - DNA, 613 bp, Homo sapiens
ttaccattttctttggtctagcaagagtggtaccaggaagccacttgagtggtcttgaggattctaggtgtgcctgtgggcaagtgttggagggaggaagtgaggagggtgtctggctatggaagrgtggtctagctctatcatctagctctggtgtctggctatggaagggtagtctagctctatcatctagctctatcatctagggaagcgaggcagggaaagatggaagaggaaggaaaggaagctcttaagtcttgatgagattacattgtcaggctttgttctaagtgctggatatatatattttctcatcctgtcaccatggggtactattacatttaactatcttcattctgaaaagagagaggaagaccccaaaaagttaaggaagttgctcaagatatttttttgtgtgtttgaagaagtaaataggcttctgggcagagtgctcatacgtctggtctgctgggttggatatcagtgacctttctgagcctacgctgaccctgagtttcaggatctgtaagtggccctaagctccaagaccagacttgcccgcaccagcaggctctctaccttggcttttgaagctgcggcagaaacaaatgca

SEQ ID NO: 287732 - DNA, 1227 bp, Homo sapiens
ttaccattttctttggtctagcaagagtggtaccaggaagccacttgagtggtcttgaggattctaggtgtgcctgtgggcaagtgttggagggaggaagtgaggagggtgtctggctatggaagggtggtctagctctatcatctagctctggtgtctggctatggaagggtagtctagctctatcatctagctctatcatctagggaagcgaggcagggaaagatggaagaggaaggaaaggaagctyttaagtcttgatgagattacattgtcaggctttgttctaagtgctggatatatatattttctcatcctgtcaccatggggtactattacatttaactatcttcattctgaaaagagagaggaagaccccaaaaagttaaggaagttgctcaagatatttttttgtgtgtttgaagaagtaaataggcttctgggcagagtgctcatacgtctggtctgctgggttggatatcagtgacctttctgagcctacgctgaccctgagtttcaggatctgtaagtggccctaagctccaagaccagacttgcccgcaccagcaggctctctaccttggcttttgaagctgcggcagaaacaaatgcawttaccattttctttggtctagcaagagtggtaccaggaagccacttgagtggtcttgaggattctaggtgtgcctgtgggcaagtgttggagggaggaagtgaggagggtgtctggctatggaagggtggtctagctctatcatctagctctggtgtctggctatggaagggtagtctagctctatcatctagctctatcatctagggaagcgaggcagggaaagatggaagaggaaggaaaggaagctcwtaagtcttgatgagattacattgtcaggctttgttctaagtgctggatatatatattttctcatcctgtcaccatggggtactattacatttaactatcttcattctgaaaagagagaggaagaccccaaaaagttaaggaagttgctcaagatatttttttgtgtgtttgaagaagtaaataggcttctgggcagagtgctcatacgtctggtctgctgggttggatatcagtgacctttctgagcctacgctgaccctgagtttcaggatctgtaagtggccctaagctccaagaccagacttgcccgcaccagcaggctctctaccttggcttttgaagctgcggcagaaacaaatgca

SEQ ID NO: 287733 - DNA, 560 bp, Homo sapiens
tcagttacattaagctgaacatcaaactcagctacttcctcagggaagcttaacaagtgctcacaatggccaggtgcagtggctcacacctgtaatcccagcactttgggaagccgaggcaggtggatcccctgaggtcgggagctcgagaccagcctggccaacatggagaaaccttgtctccactaaaaaatgaacaaacaaacaaaacacacacacaaaaatgctcacaatgctggattaaacatttctttccaccggattctcagtgagattaagccattttatgggaaacagggaaagggaatcacttatatactggattcagaaaacagtaatggcatgattaaaattaatccttgttttccttcattagagctcccccacatctgcagcgccccctcttactcttggtttcccatgtgayagatttgaggcaggatttcatgctcaacttggtgtccacaaatcccctccagaaaatgttagcctgtaaagccacctatacttctaggtatatttacatttaatgtagacaaaagcatttacaggaagacaaa

SEQ ID NO: 287734 - DNA, 623 bp, Homo sapiens
tatatacaatatgtcattatttaccaccattactttygtaaaagaaaatatagagaagtactgtattgcaaaaatacaaagacaacaacagaaaatcaactcctcatattcagaataagggaaaaaacgtttctaagacaatctcctgtggaaaagttctgggacagttttctccaagtggcttctaccccaaagtccctccagcaaaacttaagggtctccacactcacaaggatgaccagtcccaaaacatacatcatctcttcccacttcccctaacccctctccaacatgttctgaattagatttaccccaataactttgacttttgcctgtagacgtttcttcaggctatcctgcccctggttggtgggttcgggtttctctgcttgggagaagttgatgacatttgatgggagcattatgatggtctcattggaaataggttgtgatgtcataatggtgttgccaactacggaagaaaaaatagatttagctcttaaaagtacagagctcccaagttctggctgcaaaactggtaagtcagtttctgccaattagtccagacttggcctgtgtgttagagaaagaaactgatattatggagcagtgaaagccacaca

SEQ ID NO: 287735 - DNA, 575 bp, Homo sapiens
gaatctagagacctccatttatttaaatataccatttggctttttggttgtagtaaaatatgcttaaaataattgtagccttttaaccatgtgtttttttgttgttttttgtttgtttgtttgtttgttttttaattgagaaagagttttgctcagtcacccaggctagagtgcgtgatctcggcttactgcaaccactgtcttccaggttcaagcgattctcccatctcagcctcctgagtagctgggattacaggcactcaccatcatgcctggctaatttttgtatttttttagtagagacggggtttcaccatgttggccacgctggtcttgaattcctgacctcaggtgatctgcccgcctcggcctcccaaagtgctaggattacaggcatgagccgctgcacccagccttaaccatttttaggtgtacagttcagtggcattaagcayattcacaccattgtgcaaccatcaccaccacccaactccagaactttcttgtcttcccaaactggaactccgtgcccattaaacaatagctttccattcccctctcccgccagcccctgg

SEQ ID NO: 287736 - DNA, 599 bp, Homo sapiens
tatgtattttctagagttcattttcctcgacccagtcacaagatcatatccaacaggtcaaaaagagttcttcacggtcttggatataagtaactcttggcctcagaggaaggaaaagcaactcaacactcatggtcaagtgtgattagactttcctgaaatctctgccattttagatactgtgaaacaaactaaaaaaaaaaaagcttttgttttgtatttgtttactatgagtcgttatttaatttctcttgaaaataatttcctcaaagcccaagtcaataaatgttatcagccagtcttccaaaatggtcataaactttataaactgctttgggtaaactgagcagaaggtgatacacagaagggaaaatgtgcactcatgctagtgtgaatttggtaagtygcgtgactctgcaggctgtttctgtattattttcacactcatattgcttaaatattacatattagggattgtaagaaaactttaattaaaaattaaagactatatataattaaactactctgccctggacactctctgagaaacagatctactgggccctttttcatgagccattaggtggaagacagcaaag

SEQ ID NO: 287737 - DNA, 621 bp, Homo sapiens
ttaaaaagaattttaaaattattatcactcatcctccttcttagccccagagacaactttatgagtggcactcatctagataatcatatagccataaatattattcttaatacagtgctatttctatccaatccccacagcctggattcctaattttgtgccataatatttaaggacagactcattagagcttctcctactataacatacactcctgagaagacagcagtgttactgtctgttttagttgttatattctgagaacctagaatcatgcttgaggcatagtgtgcatgaacgaacgaatgaatcaatcaatcaatcaatcaacaaataggtraaataattaataaattaggccactatctctgactattaaaaatccacagtctcttttgataaacagaaatactccatgccttttctataatgtgcatttcagaaacaaccagcagtgttttcattttcccaatataaataatgtaatattcaatatgattttcaaactatacatgccatactgtagaaaatcaaacagaccaacccctcactttctcatttcacaacagaattgtcccagtgtgactttgtgtactctgcatgtgtgaattaaaatgagat

SEQ ID NO: 287738 - DNA, 430 bp, Homo sapiens
tcagggtccccctggtgcccaccatctcctccctccctccttcccctctactacttgctccccagcagcagtgaagtttggagctgctgctggctacaatgatggggaagggcagggaggagaaaaaaagggacagcattaggagatatacgtgatgttaaatgatgagttaatgggtgcagcacaccaacatggcacaggtayacatatgtaacagacctacacattgtgcacatgtaccctaaaacttaaagtataatggaaaaaaaaaaaaaacctctcagctggacgtggtggctcacgcctgtaataccagcactttgggagggctaggcagatggatcacctgagctcaggagttcatgaccagcctggccaacatggtgaaaccccgtcactactaaaaataaaaaaaaattgccaggcatgg

SEQ ID NO: 287739 - DNA, 525 bp, Homo sapiens
gcctcccaaagtgctgggattacaggcctaaatcaccacacccagtccaatgaagacttttttacaatttgcagttcaggctgtggaaaatttgagctacaaattagcaagagtttactcttcacatgaatgttgtcagattcatcttttaataattggtgtttatattttcatttaatgtcatccacttttctacagggtatggacagtggatttgcaggtggagaagacaaaatttataatgtttacgatcaagcctggagaggtggtaaataaagatatggcccagagtatttataggtctggtaaaaacctggacaaggatatgtatggtcatgacctagaagccagaagaaagascaacaggtatcaagccatacaactctgtttcagtgtttacaccagtgaaaataaagtagttcatagtcttttctcttgttccctagatttgttcccaacaaggagtttttcagaccatagacagagaagccgagaggctgagaaggaccagttcagtttgaggaa

SEQ ID NO: 287740 - DNA, 610 bp, Homo sapiens
ggttggtggtgtagtagtacaactttactacttagagaagctaattaacactcagagtcagaggactaaaaattgaaacagaggtgtttccttctgaagagcagtactaagactaggagggggaagttaaggtttataaaccttttatttgtttgactttttttaactgtatataattattaaaatttggtgatttttttgtgtgtgtttttttgtttttgtttttktttagacagagtttcactctgtcgcccaggctggagtgcagtggcacggtctcggctcactgcaacctccacctgctgggttcaagcgattctccttacctcagcatcccgattagctgtgattacaggcgtgcaccactatacccggctaatttttgtatttttagtagagacagggtttcaccatgttggccagtctggtcttgaagtcctggcttcaagtgatctgcctgtctcagcctcccaaagtgctgggattataggggtgaacaaccacgcccggccattaaagatgttgtttaaattaacttaaaatttgaaaacagacactgttcactatgtacaatacagcagatcaaagacaaagcacaatcttctccctc

SEQ ID NO: 287741 - DNA, 610 bp, Homo sapiens
ggttggtggtgtagtagtacaactttactacttagagaagctaattaacactcagagtcagaggactaaaaattgaaacagaggtgtttccttctgaagagcagtactaagactaggagggggaagttaaggtttataaaccttttatttgtttgactttttttaactgtatataattattaaaatttggtgatttttttgtgtgtgtttttttgtttttgtttttgtttagacagagtttcactctgtcgcccaggctggagtgcagtggcacggtctcggctcactgcaacctccacctgctgggttcaagcgattctccttacctcagcatcccrattagctgtgattacaggcgtgcaccactatacccggctaatttttgtatttttagtagagacagggtttcaccatgttggccagtctggtcttgaagtcctggcttcaagtgatctgcctgtctcagcctcccaaagtgctgggattataggggtgaacaaccacgcccggccattaaagatgttgtttaaattaacttaaaatttgaaaacagacactgttcactatgtacaatacagcagatcaaagacaaagcacaatcttctccctc

SEQ ID NO: 287742 - DNA, 610 bp, Homo sapiens
ggttggtggtgtagtagtacaactttactacttagagaagctaattaacactcagagtcagaggactaaaaattgaaacagaggtgtttccttctgaagagcagtactaagactaggagggggaagttaaggtttataaaccttttatttgtttgactttttttaactgtatataattattaaaatttggtgatttttttgtgtgtgtttttttgtttttgtttttgtttagacagagtttcactctgtcgcccaggctggagtgcagtggcacggtctcggctcactgcaacctccacctgctgggttcaagcgattctccttacctcagcatcccgattagctgtgattacaggcgtgcaccactatacccggctaatttttgtatttttagtagagacagggtttcaccatgttggccagtctggtcttgaagtcctggcttcaagtgatctgcctgyctcagcctcccaaagtgctgggattataggggtgaacaaccacgcccggccattaaagatgttgtttaaattaacttaaaatttgaaaacagacactgttcactatgtacaatacagcagatcaaagacaaagcacaatcttctccctc

SEQ ID NO: 287743 - DNA, 610 bp, Homo sapiens
ggttggtggtgtagtagtacaactttactacttagagaagctaattaacactcagagtcagaggactaaaaattgaaacagaggtgtttccttctgaagagcagtactaagactaggagggggaagttaaggtttataaaccttttatttgtttgactttttttaactgtatataattattaaaatttggtgatttttttgtgtgtgtttttttgtttttgtttttgtttagacagagtttcactctgtcgcccaggctggagtgcagtggcacggtctcggctcactgcaacctccacctgctgggttcaagcgattctccttacctcagcatcccgattagctgtgattacaggcgtgcaccactatacccggctaatttttgtatttttagtagagacagggtttcaccatgttggccagtctggtcttgaagtcctggcttcaagtgatctgcctgtctcagcctcccaaagtgctgggattataggggtgaacaaccacgcccggccattaaagatgttgtttaaattaacttaaaatttkaaaacagacactgttcactatgtacaatacagcagatcaaagacaaagcacaatcttctccctc

SEQ ID NO: 287744 - DNA, 557 bp, Homo sapiens
taaattcggggtgcggtgggggaatgattgccaacattctggtaacgatgaaaagaaagcttcagcagttttcctgaaaacctgtaatgccattttccctgtaagaccaagagatrgccttgtggtaccatgtgaaaaacaacgttcacgcttactaaatggaagatgtaataattcttcatctctacagcacagtcagagaggactttttttttttttgagatggagtttcgctcttgttgcctaggctggagtgcaatgggtgatctcagctcactacagcctctgcctcctggtttcaagcaattctcctgcctcagcctcccaagtagctgggattacaggcatgtgccaccacacccggctaatattgtatttttagtagagacagggtttctccatgttggctagggtcttgaattcctgacctcaggtgatccacccaccttgacttccaaagtgctgggattacaggcgtgagccactgtgcctggcctacttttttctttttgataaataaaagagtattatttcttctctctactgctattttataa

SEQ ID NO: 287745 - DNA, 557 bp, Homo sapiens
taaattcggggtgcggtgggggaatgattgccaacattctggtaacgatgaaaagaaagcttcagcagttttcctgaaaacctgtaatgccattttccctgtaagaccaagagatggccttgtggtaccatgtgaaaaacaacgttcacgcttactaaatggaagatgtaatrattcttcatctctacagcacagtcagagaggactttttttttttttgagatggagtttcgctcttgttgcctaggctggagtgcaatgggtgatctcagctcactacagcctctgcctcctggtttcaagcaattctcctgcctcagcctcccaagtagctgggattacaggcatgtgccaccacacccggctaatattgtatttttagtagagacagggtttctccatgttggctagggtcttgaattcctgacctcaggtgatccacccaccttgacttccaaagtgctgggattacaggcgtgagccactgtgcctggcctacttttttctttttgataaataaaagagtattatttcttctctctactgctattttataa

SEQ ID NO: 287746 - DNA, 557 bp, Homo sapiens
taaattcggggtgcggtgggggaatgattgccaacattctggtaacgatgaaaagaaagcttcagcagttttcctgaaaacctgtaatgccattttccctgtaagaccaagagatggccttgtggtaccatgtgaaaaacaacgttcacgcttactaaatggaagatgtaataattcttcatctctacagcacagtcagagaggactttttttttttttgagatggagtttcgctcttgttgcctaggctggagtgcaatgggtgatctcagctcactacagcctctgcctcctggtttcaagcaattctcctgcctcagcctcccaagtagctgggattacaggcatgtgccaccacacccggctaatattgtatttttagtagagacagggtttctccatgttggctagggtcttgaattcctgacctcaggtgatccacccaycttgacttccaaagtgctgggattacaggcgtgagccactgtgcctggcctacttttttctttttgataaataaaagagtattatttcttctctctactgctattttataa

SEQ ID NO: 287747 - DNA, 533 bp, Homo sapiens
tttagcattaatatctctccagcttccagcaaaccaggacttagaactgttggttttatggagaacccaggactccttgcgtgctattctgtatcctcttgaccccagtcatctgagagagccaagaagtgaaaaggtcataaggaaggatccaagcagtccagatacactaagaaaagggcagcaaatggaaccagargaacctggaaatggaaaacaatgggctccttatgttaggtttgcagtgttgatgatatggccctttccatatattatttcatttaatattctcgacaaccttgtgagtcactattattacctccattttacagatcaggaagacaaggcataggaggttaggtaacttgcctgagttcacagagctgggtagtggcagaaaaaaagactggaagccaagaattctgacttttaaccataccactgccaaggtggtgaatgaatgctagacttaaatcagcaccaggatgatcccgtctgccaactgggaactttcaccattggaaggtttggtg

SEQ ID NO: 287748 - DNA, 533 bp, Homo sapiens
tttagcattaatatctctccagcttccagcaaaccaggacttagaactgttggttttatggagaacccaggactccttgcgtgctattctgtatcctcttgaccccagtcatctgagagagccaagaagtgaaaaggtcataaggaaggatccaagcagtccagatacactaagaaaagggcagcaaatggaaccagaagaacctggaaatggaaaacaatgggctccttatgttaggtttgcagtgttgatgatayggccctttccatatattatttcatttaatattctcgacaaccttgtgagtcactattattacctccattttacagatcaggaagacaaggcataggaggttaggtaacttgcctgagttcacagagctgggtagtggcagaaaaaaagactggaagccaagaattctgacttttaaccataccactgccaaggtggtgaatgaatgctagacttaaatcagcaccaggatgatcccgtctgccaactgggaactttcaccattggaaggtttggtg

SEQ ID NO: 287749 - DNA, 560 bp, Homo sapiens
gtggcagaaaaaaagactggaagccaagaattctgacttttaaccataccactgccaaggtggtgaatgaatgctagacttaaatcagcaccaggatgatcccgtctgccaactgggaactttcaccattggaagktttggtggcctagttgccttgactacaggagatatgggtaatgtgtaatttcctataatacaattcaaattgggatcataaaaataataactaacattgatttagcattactgtcaggaatagttccaagtgcttataatgtattatttaatttattacaattctaccagataagtagaatgttctcatttttcaaatgagaaaactcatgcacagagagattaatctacttgctcttgtccttacagtttgtaaatgatagaaccagtttcacaccctgatggtctcactctggatgtttaaataccacaccatgcctttcctgagtgtggggtgtgtgtgagagtgtgcgtggagagaggagtggaaaaggggaccgtgtcctatttttcagtggacagaaaacaacttcctatgcaaagcc

SEQ ID NO: 287750 - DNA, 556 bp, Homo sapiens
gcatgccccaccatgctgacctagcgggaagatgtgaccagacatctggctgcaaacacagggttactcctcatccaggcccccaattcctcaaggagaggagccaactcttcctggaacacagactagagcagcagactggagtctgcatcagcaaacgagatgaggaagcagggcagctgacccaataggggaagcaagtctcagggtcagtatttttgatctgggacaaaacagggttaaggaaagcaagaaaaaaaaaatacttatatacatagcttagtggatgtcccaaaagaatrtgctgactgcacttgcaggatggctcatctctcaaacctcatcaggaataattaaaaagaaaatattccaaatcttttattcttttctgagaattaatgagttgcaaatctctgaaatgtcttaactgcagaagaaaatgcagaatctatgctgagacagcagaatacaaaaccctggagaaaaaccctccaggaacattattacattttacaatttagtggcatagttgtctcatttacttatcactcaacac

SEQ ID NO: 287751 - DNA, 543 bp, Homo sapiens
tgttaatactacccattactaatttttaaaaatgggtgttttgatgtctcctagcttctttacttatacttgcacatttggctttggggtgttcatagggcaaaattcattctatcaaagaagaattttaaaatgtgtcaaccctttatctgaactctaaagaagtaatatttatcctaattgagaaaacattttggagcatgtacaaaaaacatgtttttgtrccttccctcaacctgtcatttatgtaagttagatagatccctcacttcaagctgattatctggagcatatggtactgggaaaacagataagtgtaggcttatctttttgatggccatgtatccatcaaaatgtaactatactgccaatcattctttaggttttaggtaaaaacataaataaatcctgtccatttttatagaacctcagagtttactggatgtttttgtaatctagcaaggaggggcttggtaattaatatcatatttacattttatatcaattttcatttgttgtgtgcacaaatatgtttaggttaac

SEQ ID NO: 287752 - DNA, 541 bp, Homo sapiens
tgtctgtttatgcattcaacctcgcttacctcacggttgaggggtgggctacctatcctctttgctctccattgcagagtagtatatcaccatctctaaaaacaaaaactactcatttgagaccmatggcatttatttattctacccttgcccctcctcaaagctgccctcgaatgaccacctattcaccatccgtcattcatcaaagacattgacatttgtctcgtcaccttcctctctactctaaccttgctatcctcttgggtatcctcagtcctccaacgactgcatgaacaacccagtgaataccatggctttctggtttccagcccccactcttccagtttccttctcctccgtaccccttcaaccacccactcccacaagaacattttggaaatatatcatcaccaaaaaccatcccaccgacagaattaataattcaagcatctttccctctcaccatagccccctctactttcagattattaatctacccctgtagaccatctttgatcattttcacaatgtctggtgtttt

SEQ ID NO: 287753 - DNA, 1173 bp, Homo sapiens
tgtctgtttatgcattcaacctcgcttacctcacggttgaggggtgggctacctatcctctttgctctccattgcagagtagtatatcaccatctctaaaaacaaaaactactcatttgagacccatggcatttatttattctacccttgcccctcctcaaagctgccctcgaatgaccacctattcaccatccgtcattcatcaaagacattgacatttgtctcgtcaccttcctctctactctaaccttgctatcctcttgggtatcctcartcctccaacgactgcatgaacaacccagtgaataccatggctttctggtttccagcccccactcttccagtttccttctcctccgtaccccttcaaccacccactcccacaagaacattttggaaatatatcatcaccaaaaaccatcccaccgacagaattaataattcaagcatctttccctctcaccatagccccctctactttcagattattaatctacccctgtagaccatctttgatcattttcacaatgtctggtgttttwagcaaatgccttgaattctactaattttgatgaggtaaaacataacacaaaggtttttttattagtcagtctaccagtctaattctctaatgattttgagtttctctgttccttacaaatgaggatcactattttagtaggtaattgccatttttacgattaaatgagcgactaaaagtcatgttaactcttttgttcttagaataaattaaaaatagagtgcaatagaaattattaaagccaagaaagaatttcagaatctgagctaagcagcagacatcattgcttgttggagaaagtgcacagtacaaattcagggtcaggtccagcccacagcatttgttttgttgtttgaggataatcagtgcttctctaagtttcattgcccccgtttgwtctgaaaggacaggcaagctgtataaaatactgtgctcctgaaaaaactgcctttgtaggagaggaaaatgagtctctcctctccaaaagcaagtgttaggatagggcatggccaaggagcatgtcaccaaatagaaggtcttctttgatgcatggctggggcaacaaagggtccagccaatgggaagatggaattttgtttcaaagctaatggagagaattaaggtctgacata

SEQ ID NO: 287754 - DNA, 581 bp, Homo sapiens
ctttctctgccagttttgtgcacacctttccttctgggaaacaatagatgactaaaattcactctcttcctgcagtraatgctgctgaatggcacagtgattaagatcttgacctaaatttaatctgggatctgccatttatcatctacacagactttgtttcattacccggaaaatggaaatatcagtacccacttcagagggtgaccatagcaaccaaaaatgacaaaagcaataccagcaccaagcagctgcctggctgttcccagaactccaagttctctcacatcctggatggttcccttcctgctcctattccctcaattcttcagtgacacatcaaaatgtacctgttttttctttctttttttttttttacttcatttcccaagggccaactgagatgtctgcaaataatgcactaaacaaatttatttcaatggaagaattcatgctgtcatccaaagaaacagtacaaactagctcaatctttgttatctgaaggtacttgggaggtcagtgggagagatatcccggggcaggcagagtttcagcaccaaaaaggatttttattcagccta

SEQ ID NO: 287755 - DNA, 600 bp, Homo sapiens
ggtttcaccaactttggattaaatattataaacaaatgaaagaaaatcttcacaatagtatttgcttttaacttatttcaactgggaaactctgtagtcatgtcattaagaacttcatataacttattttgtgccttttatacatcagaaaaagttcagatttgaactataaaacatctttgataagtgctraaagaaaaataaatcacttggattcttacacaaactagctttaaaaaaagcaattaaatgcattttatcctttgcttgttttgagactttgccatgtagtaaatccagttttcaccaccctatcctgggatgacttgaagaatctttcctatgcatgctcaggattttgcttaaaaaggataatggggccttactttccttggttacccctactgttcagtaaagtctttatgaggagtcttcggggggataaagagaaggaaagtaagaaatatgtgatctgtccctagccaatgtacatctcccctgaagcttgtaatgaggaagcataatataacaaggtagaattctaagtcatgagcaatagcaaactatggagttgtccacagcgagcctggagcagaaagc

SEQ ID NO: 287756 - DNA, 550 bp, Homo sapiens
agacagctgttacttttagtttcttagcatctcttttccctttattcttttcttttttttatagagacagggtctcactatgttgcccaggctggtcttgaacttccaggctgaagccatcctcctgcctcaacatccgaaagtgctgggattacaggcatgagccactgcacccagcctcccctttattctttaaccatgccctttttctagaaggaatttcatctcctccatgacaattgtggygttctatttgatcctggcaagctgagacaatcatgaacttcacccctctctctgcagcagttggttcaaagcagtgagcctgtgacccaagagagaatacctagattcagcactctggtattaagaattgaagcaggattccatttcctttgtgatagttaagctaaggaggcaaaagcttggagttgtccacagatatggctccagagtcagagagaaaggcagtttgaggaaacgaagttagtatgcagagccaaggagagatcagagagcttcagttgtacacaggatactgcattacatt

SEQ ID NO: 287757 - DNA, 603 bp, Homo sapiens
tggtaaccatccttctactatctccataaaatcaattgttttaattttcaactctcacaaacgaatgaaaacgtatgaagtttgtctttctgtgcctagcttatttcacttaatataatgatctccattccatccatgttgttgcacatgacagkatctcattctttttatggctgaatagtactccattgtgtgtatgtaccacattttctttacccaatcatctgttgatggacacttaggttgcttccaaatctcggctctcgtgaatggtgcatcaataaacacgagagtgcagatatttccttgacatattgatttcctttctttggggtatatacctagtagtgggattgctggatcatatggtagctctatttttagatttttgtggaacttgaaaacgttgtctatagtggctgtactaatttacattcccaccaacagagtacgatgattcccttttctccacatccttgccagcatttgttattgcctgtcttttggataaaagccattctaactggggtgagatgatgtctcattgtagttttgatttgcatttctctggtgatcaatgatattgagccctttttcatatgc

SEQ ID NO: 287758 - DNA, 572 bp, Homo sapiens
tttcctcaggcagaaagtctctccccacagccatcacagctgggaatgtgctaggtcaaacctgaagccagcagagcactgggcctcacccaaggcctgtggcaagtactgcctggctactsctggtgtttattcaaggcccaaaagttctttagtcaggaggtgatgaattctgccagaactgggtctttttcttcaaggcagcaggtgcccttctggcctagggtatgtctaaaaatgtcatctgggagcaagggcctggaatggggtcctcagaactctgcctggtgtcctattctgctgtggctgagcttgtatgcaagttggaaaacaaaatcctatttactcctctctcctctcctcaacagaaggagggagtctctcctggaacagcgagctgcactgtctggtgttgggggagggggtgaaacaggcactcccttggctgctccagctggtgtctctcgaggtcttttgcaccccaagtccattggctttgagcccagaacagcatcaggacttgcccaggaatttcagtccctgtggtcctacgtttatttagatccccagag

SEQ ID NO: 287759 - DNA, 376 bp, Homo sapiens
ataaataaataaaataaaaaagaaatattcctcctatatttaaattcctagaaaagtgctttaattatkaatggatattgaatttcttcagatgcattatttaagggaccaaagagaggattgtatgattgattatttttttaatatttcaaatcgtattaatagattcccttgtattgtgctattctttcaataaattacactcatttatgatttaatgttttaatttcaaatatatatatattttattttgcaaggagacttgttaatttctacccacattgatctgatgtcaaagacaggaatagagttgggaggtccccgatccaggcatgcggacgagcatcctggttaacccatctagcagccccagaag

SEQ ID NO: 287760 - DNA, 595 bp, Homo sapiens
cctgcccctcgaacattctggggtcgtctggggcacactccacacccattcctggatcccatcttcccagccacragctccgtcgtaagatacagaactaaagcagaattgcaagtgtcagataagatggcagcttggcatcagggcctgtcttcctctcttaaagccaaacctagagatgttacagatttgacatgcatttcaataatcccagtactgatgcatacaccaaaatagaaagaaaaaaaaagaaacacacctttgagaaactcttgaagcagcagaaggtggctagggggttggttttggaggaggtaagaggaatgcacactcaagcagcacacagccatgtgtaatgggaagacagctatggaaagaggacaggttagaaaggaaagctcatgttagactgcaaggaatgttccaggtatactgctttctctctcctgcaaaatacatgggacagtaaaaactgcagggcccctggaataggcagtggcagagaaacatcaaggctgcactgcagcctgatttaggaagagatgggcaggccagtcccagagccttctctaccctctaccctcccatacctctg

SEQ ID NO: 287761 - DNA, 595 bp, Homo sapiens
cctgcccctcgaacattctggggtcgtctggggcacactccacacccattcctggatcccatcttcccagccacgagctccgtcktaagatacagaactaaagcagaattgcaagtgtcagataagatggcagcttggcatcagggcctgtcttcctctcttaaagccaaacctagagatgttacagatttgacatgcatttcaataatcccagtactgatgcatacaccaaaatagaaagaaaaaaaaagaaacacacctttgagaaactcttgaagcagcagaaggtggctagggggttggttttggaggaggtaagaggaatgcacactcaagcagcacacagccatgtgtaatgggaagacagctatggaaagaggacaggttagaaaggaaagctcatgttagactgcaaggaatgttccaggtatactgctttctctctcctgcaaaatacatgggacagtaaaaactgcagggcccctggaataggcagtggcagagaaacatcaaggctgcactgcagcctgatttaggaagagatgggcaggccagtcccagagccttctctaccctctaccctcccatacctctg

SEQ ID NO: 287762 - DNA, 468 bp, Homo sapiens
cagggtcacagttgacaatgaagaaaattagagaaaagagaacagaagcctctagcagctcatggcagtttctgagacatcaaaatagaaaatatgagacctgcccctcgaacattctggggtcgtctggggcacactccacacccattcctggatcccatcttcccagccacgagctccgtcgtaagatacagaactaaagcagaattgcaagtgtcagataagatggcagcttggcatcagggcctgtcttcctctcttaaagccaaacctagagatgttacagatttgacatgcatttcaataatcccagtactgaygcatacaccaaaatagaaagaaaaaaaaagaaacacacctttgagaaactcttgaagcagcagaaggtggctagggggttggttttggaggaggtaagaggaatgcacactcaagcagcacacagccatgtgtaatgggaagacagct

SEQ ID NO: 287763 - DNA, 595 bp, Homo sapiens
cctgcccctcgaacattctggggtcgtctggggcacactccacacccattcctggatcccatcttcccagccacgagctccgtcgtaagatacagaactaaagcagaattgcaagtgtcagataagatggcagcttggcatcagggcctgtcttcctctcttaaagccaaacctagagatgttacagatttgacatgcatttcaataatcccagtactgatgcatacaccaaaatagaaagaaaraaaaagaaacacacctttgagaaactcttgaagcagcagaaggtggctagggggttggttttggaggaggtaagaggaatgcacactcaagcagcacacagccatgtgtaatgggaagacagctatggaaagaggacaggttagaaaggaaagctcatgttagactgcaaggaatgttccaggtatactgctttctctctcctgcaaaatacatgggacagtaaaaactgcagggcccctggaataggcagtggcagagaaacatcaaggctgcactgcagcctgatttaggaagagatgggcaggccagtcccagagccttctctaccctctaccctcccatacctctg

SEQ ID NO: 287764 - DNA, 485 bp, Homo sapiens
cttgataaataataaatagaccactactggatcttgcttagaactatcttttaattaaaagaactgaggagctagaaggtccggtgactgacatttatttcagttgcagtccaggaaaagcattcattgagggtaaaatgatacttgaaatgtattttcgttgtcagctagtattccccaaaaaccctgtctgtaatctgcatggatggagggtggtggtggtggctggcagtagcaacattttgtagggaacrtaacacttaacttcctgccttctctgccttcccctagcaaccttttctttttcgtgctgcagcaataaacacttgtctggttcagcatcaccacagaaactgcttcagtgccgggctcatccaatcagagacccgcctgccacattgagcgctaccctaggagtgacaggaaagccatttcccgtcttttccacaggagggcaggtgcccttcctctgccagccaaggtga

SEQ ID NO: 287765 - DNA, 485 bp, Homo sapiens
cttgataaataataaatagaccactactggatcttgcttagaactatcttttaattaaaagaactgaggagctagaaggtccggtgactgacatttatttcagttgcagtccaggaaaagcattcattgagggtaaaatgatacttgaaatgtattttcgttgtcagctagtattccccaaaaaccctgtctgtaatctgcatggatggagggtggtggtggtggctggcagtagcaacattttgtagggaacataacacttaacttcctgccttctctgccttcccctagcaaccttttctttttcgtgctgcagcaataamcacttgtctggttcagcatcaccacagaaactgcttcagtgccgggctcatccaatcagagacccgcctgccacattgagcgctaccctaggagtgacaggaaagccatttcccgtcttttccacaggagggcaggtgcccttcctctgccagccaaggtga

SEQ ID NO: 287766 - DNA, 504 bp, Homo sapiens
cttctttaaaagtcttcagccccagtacggtcgctcaggcctgtaatcccagcactttgggcggctgaggcaggaggatcgcttgaggccaggagtttgagaccaggccagcctgggcaacatagcaagactccatctctacaaaaaaaaacaaacaaaaaaaatgttaaagagccaggcgtggtggcacatgcctatagtcctagctattcgggaagtgagccaggatggcttcagcccaggagttaagactgcrgcagggtatgcaccactgcacccagcctgggtaacacagtgagacccccatctcctaaaacaaaattaaaaaaaaaaaaaattaaggccaggcatggtggctaacacccgtaatcccagcattttgggaggttgagatgggtggatcacttgaggccagcagtttgagatcagcctgggcaacatggttaaaagcccgtttctactaaaaatacaaaaattagccgggcgtcatagcatacacctgta

SEQ ID NO: 287767 - DNA, 574 bp, Homo sapiens
ctagtgtccaccttcccggtcccctgcagagaagtggaaaggaaatagtctaggacaatgctgtccaacaaatcattctaccagttccagaaagagactgtcttcatggagatatgaagtttctcctagccaaactgaacttcctaccatttcctgctattagggtcccatgggtgtttgacaggcccaggactagggtgaggcaagagctgaatctgcactcacatgacccaagtgtgagggactcgctacacttgttcctaggtgtctcacttgcctcaccctagtcctagccctggagttgggttgtgtgtcacaaatgctgtggtcccctccccagatcccctcttcacctgttccagctctggggactaagctcacagctacaaccctcattgagaattactctggccacaaggaacttccctgcccaatattatrccccttccaggggggacgtctatgatcaaggactggctgaggcagggatgaaaacacctacttttttttttttttatatcactttagaagaactctaaaagagccatcccctcatccagagctccagagcctc

SEQ ID NO: 287768 - DNA, 558 bp, Homo sapiens
agggaagagagagatcaatattggctgaagttctcagagattgcctcatgggacaggggaacttgagcgaggtcttgaaggatggacagggcttagttagggagacaggtgtggtccctggaccagtggtgccagcatcgcctaacaacttgttagatagcagattcttggacctcaccccagacccagggaatcaggaactctgggggtggaggccagcaatgtgtgtttaaccagccctccaggtgacagtgatgcttgctgagcatgaggaccgctgatgcagagggagggatgtgatctttacataagagactgaggagttcggaggggacctggcctgctcttccgttggtggcatagggagaaaatgggagggagacggcaagaggagcttgaaggcatcagggaagcgggcttgggrggctgagggtctcagctggattggtggtggccatggtaacagagcaaagccagggggtactgtgaaggcctggtgacacactgggtctcatgccagactttaagggcactcttctttgaaatgttttaaagaag

SEQ ID NO: 287769 - DNA, 594 bp, Homo sapiens
agtgaatttttgttcctttgaattattgcacttttcgattctggaattttcatttgtttcctttttataatttccatctatctgctgagatcccttatccgttctttcattaaaataatattttcctttaatttttgaatatgttttcctttagttctttgaaggtatttatatgaacttctttaaactgtggtgtgctgaagtagagtcatcttgggccttattaacttatttatttatattgattttgcctaaggacaaaattttcttttcttttttatttttttggtgcatctttattactttctagataaaggaccttgtggttgataccttgtagggactctggattctgttatttttctccatagaatttttttkttgttgttgttcttataggctgttcaattactagttaatcacctttaagttgtgtagacttggtttttacattctgttaaggcaaatacatagaaagccaaagatattatccaacaccatgggacctgtcttacaaactatctttctgaggcttgctttcagtccttgtaggtaggtttagagtagtcctaaggtgtggcctttatgttgttt

SEQ ID NO: 287770 - DNA, 610 bp, Homo sapiens
gatggcagtggagagactttctttgtaatattacccttagagtaacttggtgctcactgtcttaaccaagttactgagctgtacattggagatattgggacaaactagcctccttctaatatgatgcaatgaaaaaggacacagtatcactttagtgtcattcttgccaaaatctcataaacctagtcatgaggaaacatcagacaaatcctaatggagagacatttaataayggtctgtactcttaaaaaatgtcaaggtcactaaacacgaagaaaggctgttccagattaaaggagaaataaatagttgatgtgacaactaaaagcaatgcgtgattcttggttggatcctggattatgaaaaataatagctataaatgacattactgtgataatttgtaaaacttgagtataaactgtgcagtagataatatcattgtgttaatattacatttcctcaatttgataaccacgctttggttatcaaagacagtgttcttgttctaaggaaatatatattgaagtttttagggataaagaggcaggatgcttctaatttacaaataattgaggaagtaatatgtatgcatttatatatatagagaggt

SEQ ID NO: 287771 - DNA, 1189 bp, Homo sapiens
cattgtcctgggtatggtcatttaaattattttattgaatatgattttcacaatccactgaggtaaggatacttttccttaattagcagaagaggaactagagtgtcaaagggtcacttgctcaaagtcacaacagtgcatatatggtgggattggaattagagttggaaaagaggtctgccagactccaatgtataacacttaactctcttaaattgtgaggaatcatgtgrccaaatactttcacatttgagataatcaattttatgttgctcttcttgaaacctgtcactattgctcttttaattctaggatacccttcttatattaagaagattggttacatttttggctttgctcagagcaccgttgcatgtggtgttggtttggagaggatagaagttaaggaatgcttggaaggagataaagtcactcccttgagggagcgggggtctatgattccgggagagagaactgaaaaactgtcgaaagatatgcactaatcagtaatttgccatttttatggatattcattctcaagtcatatttacatatgtaggttaattagagtattttaaaatgagcaagtagatcaaagaaaaaaawtgaattatattttagggaatcactgaaattattatttatactgtccttaaaaattattatacaaaaatctcagataacgtatttctttcagataataattattcttgtatatttaataattttcttaatgcactataatataatttttacagtttggggggaaaccatttatgagattagctgagatagacttacaaaaatattatgctcattgaaaagttatatgattggttctttacgagwttctattaatgtatacctactaattcaccattcacttattatctgctggaatttgctagcagataaacaacagtagatatcgtaagtataagaaaaatatgtgaagagaaatattagacacatacaatttcagctatttttatgctaatctgagaaaaagaatccctaactccctttcaggacaaaacacttctacctaatttacaaaacactgacatttgagaatcaatttaaaaagtcacttaaatcactacaatgccaatttgcggcaatattcactagtcaaaaggaggaaagtctcacgatttcaggcaacttggaagcttccaagtgtggcaga

SEQ ID NO: 287772 - DNA, 1003 bp, Homo sapiens
actgcctggctaatttttgtagtttttgtagatatggggtttttccatgttggccaggctggtatcgaactcctggcctcaagtgatccttcygccttggcctcccaaagggctgggattacaggtgtgagccactgtacctgccccctcactgaaggctgtgtgtgtgtgtgtgtgtgtgtgtgtgtgtgtgtgtgtagagtaattttatgtaaatctgggctgagatgaaaactgagtacaagcaggacaggcaccaaaattaataagcacatgttagatacactttgttatttatgtagtcattcattcaacaattattatgtattctacatggacaaggtgatatatgtatgtgtgtgtgtatattccctaatagaaatatgcatcctatgtctctcaccttaagtcccagttattcaactacctatttaaaatctctccttggtctgaattccatcattgtccttaaacttcatcttcttcgtttgttgctaaaatwactgcctggctaatttttgtagtttttgtagatatggggtttttccatgttggccaggctggtatcgaactcctggcctcaagtgatccttccgccttggcctcccaaagggctgggattacaggtgtgagccactgtacctgccccctcactgaaggctgtgtgtgtgtgtgtgtgtgtgtgtgtgtgtgtgtgtgtagagtaattttatgtaaatctgggctgagatgaaaactgagtacaagcaggacaggcaccaaaattaataagcacatgwtagatacactttgttatttatgtagtcattcattcaacaattattatgtattctacatggacaaggtgatatatgtatgtgtgtgtgtatattccctaatagaaatatgcatcctatgtctctcaccttaagtcccagttattcaactacctatttaaaatctctccttggtctgaattccatcattgtccttaaacttcatcttcttcgtttgttgctaaaat

SEQ ID NO: 287773 - DNA, 501 bp, Homo sapiens
actgcctggctaatttttgtagtttttgtagatatggggtttttccatgttggccaggctggtatcgaactcctggcctcaagtgatccttccgccttggcctcccaaagggctgggattacaggtgtgagccactgtacctgccccctcactgaaggctgtgtgtgtgtgtgtgtgtgtgtgtgtgtgtgtgtgtgtagagtaattttatgtaaatctgggctgagatgaaaactgagtacaagcaggacaggcaccaaaattaataagcacatgttagatacactttgttatttatgtagtcattcattcaacaattattatgtattctacatggacaaggtgatatatgtatgtgtgtgtgtatattccctaatagaaatatgcatcctatgtctctcascttaagtcccagttattcaactacctatttaaaatctctccttggtctgaattccatcattgtccttaaacttcatcttcttcgtttgttgctaaaat

SEQ ID NO: 287774 - DNA, 597 bp, Homo sapiens
ctttaaagcctcctagactgagtgacctggactccaattcattgttaggtttgggaaagtgctcactgatgcattatgcctggtacatagcaggtactaataaaatttgttgaatgaatacattttaatcacctctggttagactatgagaccagatgcctatctagtcctcaaacacatcagccaagtaatagcatagttgtttttgccagtgccatttttacccttgtagtctcaactacaaattccttggatgagtgttgtagactgacttacagccacccctccgacagygacggtccctttataaaacaactgtggaagacacatgagaaaccactaagttttgatgggctattagatttttgacattcggcaggcatatgttctaggggctttgggagaccttaaacatgaggaaaccactacatcatataattgctcctgtaagtacaactgtaaaattctaagtgactcctttagagcccattatctgagttactatcatgtcactcgacagctgtgaaggagcactgagatttgggtgcattgtaccagctatgtgactcacttttgaacaacagacctaatactgct

SEQ ID NO: 287775 - DNA, 597 bp, Homo sapiens
ctttaaagcctcctagactgagtgacctggactccaattcattgttaggtttgggaaagtgctcactgatgcattatgcctggtacatagcaggtactaataaaatttgttgaatgaatacattttaatcacctctggttagactatgagaccagatgcctatctagtcctcaaacacatcagccaagtaatagcatagttgtttttgccagtgccatttttacccttgtagtctcaactacaaattccttggatgagtgttgtagactgacttacagccacccctccgacagcgacggtccctttataaaacaactgtggaagacacatgagaaaccactaagttttgatgggctattagatttttgacattcggcaggcatatgttctaggggctttgggagaccktaaacatgaggaaaccactacatcatataattgctcctgtaagtacaactgtaaaattctaagtgactcctttagagcccattatctgagttactatcatgtcactcgacagctgtgaaggagcactgagatttgggtgcattgtaccagctatgtgactcacttttgaacaacagacctaatactgct

SEQ ID NO: 287776 - DNA, 426 bp, Homo sapiens
tgagttactatcatgtcactcgacagctgtgaaggagcactgagatttgggtgcattgtaccagctatgtgactcacttttgaacaacagacctaatactgctttacaatgtttatttcagcaaaactaaaaattagatacatcagggatttcggggaccacttacaaataatcaaaactgtgtatgttaaacttgcaaaatccaggagtcttctgtatggctattactgagcatcctcattcttcctattmagctagaaactagaagaagcgttcttgagacctttaccagtacaattatcataattattgcctgcattctgccctagcttccatctctcacaggttttccctgtccttccagtatctttctagtcaaataagagttcacactgcctctatttgtcctttctctcttccctattt

SEQ ID NO: 287777 - DNA, 426 bp, Homo sapiens
tgagttactatcatgtcactcgacagctgtgaaggagcactgagatttgggtgcattgtaccagctatgtgactcacttttgaacaacagacctaatactgctttacaatgtttatttcagcaaaactaaaaattagatacatcagggatttcggggaccacttacaaataatcaaaactgtgtatgttaaacttgcaaaatccaggagtcttctgtatggctattactgagcatcctcattcttcctattcagctagaaactagaagaagcgttcttgagacctttaccagtacaattatcataattattgcctgcattctgccctagcttccatctctcacaggttttccctgtccttccagtatctttctagtcaaataagagtycacactgcctctatttgtcctttctctcttccctattt

SEQ ID NO: 287778 - DNA, 603 bp, Homo sapiens
gacaggacatttgaaattatacattccacaagagcaaaaatgtttttaaaagactgaagaaaacataagaaacttatgagacactatcaagcaggccaatttacatattactaaagttagagaaagagaagagagagaaaagcagtaagcttatttaaagaactaatctgaagagaaaaatggacatccagatttatgaagctcaaagaatcccaagtaggttgaatgtaaagagatctacaccaggacacattataatcaaattgccaaaagtcaaagacaaagaattttgaaatcaaaaagagaaaagcaactcactayatacaaaggagactcataaaactgtaaaaggatttttcaacagaaactttataggccaggagagaatgggatgatatatgcaaagtactgaaagagaaaaactgccagtcaaggatattattatataccatgcaaatctgtcctttaaaaatgaaagagagatacggtcccagataaacaaaagttgaaggagttcatcaccactacacttgacttaaaagaaattctaaagggagttcttcaagttgaaatgaaaggacactagttagtagcatgaaaaca

SEQ ID NO: 287779 - DNA, 375 bp, Homo sapiens
cagctaaaaccaattcccaggagggtttgaactaggttacactgctctactgaggaggcacrtttctcctcaagccacagcctgcttcactggtactctaaaatgatatgttacacagcctgcttcactggtactctaaaatgatatgttatacagcctgcttcactggtactctaaaatgatatgttacatgggaaaccaacaaggaattgctatcagagttgctgacaagtcaataagtattttgcaaattggcactgtgcctccaatgtaccatgtaccagtagtttcccctctatttactgttgattttttttttctgggactcagaactgccacataaaagcacagttgagatttacgcctttaaatggg

SEQ ID NO: 287780 - DNA, 375 bp, Homo sapiens
cagctaaaaccaattcccaggagggtttgaactaggttacactgctctactgaggaggcacgtttctcctcaagccacagcctgcttcactggtactctaaaatgatatgttacacagcctgcttcactggtactctaaaatgatatgttayacagcctgcttcactggtactctaaaatgatatgttacatgggaaaccaacaaggaattgctatcagagttgctgacaagtcaataagtattttgcaaattggcactgtgcctccaatgtaccatgtaccagtagtttcccctctatttactgttgattttttttttctgggactcagaactgccacataaaagcacagttgagatttacgcctttaaatggg

SEQ ID NO: 287781 - DNA, 591 bp, Homo sapiens
gcatttcctccccctgaagagatatttagaactaagttttataccaaaagttattgaatgtgcacacctgtaacactaacaacaacaacaacaacaaaaaagccctatacatcccatttagctctacaattacatagtccagagctacggaagatttatgtcaggtcttcgagctatcaaaaaggatattccctgagagggatataagacatcaaaactycaaggcttgagatcacagcaggtttaataaagaaagaaaaacagatgtcaatgtaaaagggggagattatgaaattaattgtaaaataaaaagtggcatgctgagcaacattttcttccaatgtaaataatgttaggaacatatgcaatatgaacaatgatggctatttttcttttaaagattgttattattttaaacaaatcttagttacagtgaaaacaactaatatacattaacaagtaacgttattaaaaagctaggccaattgataccgcatggaaagggaatcactgtagttatgacacctaataaaaaggatttaggtctgctccttgaagtgaaatagaataggaatggtcagcaggctactg

SEQ ID NO: 287782 - DNA, 591 bp, Homo sapiens
gcatttcctccccctgaagagatatttagaactaagttttataccaaaagttattgaatgtgcacacctgtaacactaacaacaacaacaacaacaaaaaagccctatacatcccatttagctctacaattacatagtccagagctacggaagatttatgtcaggtcttcgagctatcaaaaaggatattccctgagagggatataagacatcaaaactccaaggcttgagatcacagcaggtttaataaagaaagaaaaacagatgtcaatgtaaaagggggagattatgaaattaattgtaaaataaaaagtggcatgctgarcaacattttcttccaatgtaaataatgttaggaacatatgcaatatgaacaatgatggctatttttcttttaaagattgttattattttaaacaaatcttagttacagtgaaaacaactaatatacattaacaagtaacgttattaaaaagctaggccaattgataccgcatggaaagggaatcactgtagttatgacacctaataaaaaggatttaggtctgctccttgaagtgaaatagaataggaatggtcagcaggctactg

SEQ ID NO: 287783 - DNA, 561 bp, Homo sapiens
tacttaacattttgtattgagctgcattaaaactgcaacaataaggaaatttattatgatttaaaagagcactcatgcaggtcaatacgtgttgctagaaacacttttccaaatgacagaaacagatttcttcctatacactaagctcatgaagggcagaatctatgtctaattcatcctcaaccccaccccagtacctaatataataccttccccaatataaccatttaatgggtatctgctgagtgactatatggataaacaagatggtggtattacaaagtgttttttaacattttgtgatataaaccatatgtaattttaacttgtatgtattctaaatagtttaaaggttaacttttttcattttctattatktttgtattttacaagtagattgacttgataaatgttaaaacagcagatagtgacaaaagcagcaacaaacatttgccatttaactactcttttactttctatatcttatagcaaaaaagaatttagaaacttaagtttcatagtcagaaatctatagaactctgtttttcccgagatggtgga

SEQ ID NO: 287784 - DNA, 561 bp, Homo sapiens
tacttaacattttgtattgagctgcattaaaactgcaacaataaggaaatttattatgatttaaaagagcactcatgcaggtcaatacgtgttgctagaaacacttttccaaatgacagaaacagatttcttcctatacactaagctcatgaagggcagaatctatgtctaattcatcctcaaccccaccccagtacctaatataataccttccccaatataaccatttaatgggtatctgctgagtgactatatggataaacaagatggtggtattacaaagtgttttttaacattttgtgatataaaccatatgtaattttaacttgtatgtattctaaatagtttaaaggttaacttttttcattttctattatttttgtattttacaagtagattgacttgataaatgttaaaacagcagatagtgacaaaagcagcaayaaacatttgccatttaactactcttttactttctatatcttatagcaaaaaagaatttagaaacttaagtttcatagtcagaaatctatagaactctgtttttcccgagatggtgga

SEQ ID NO: 287785 - DNA, 440 bp, Homo sapiens
tgcccagtccagctctgcccagatttggcctccactgagactgagcacaggacccagtccactgaatattccatggcccagccattgtctgggcaatgaagtacttctcatggttaacaaaggtcaagcataaactttattcctacaagagcaactggcgtttttacctgcaagtgccacctactggtctggaggttgacctgcaaaccccatagtaaatctgctgacacaaatgcacagtgcttgggaataacrtaagattcccacgccccttgctaccacaatcatcaatgccactgtggcttctcaggaggctgtgagcctgcttaccttccaggtacaccactactacaaccagtatttgagaaagccaccacactaagtctatttataaccaaggaaatcatacaaagccttaacattcaacatacccagaagta

SEQ ID NO: 287786 - DNA, 587 bp, Homo sapiens
catgaagaaaaaaatcctaaactcagcaagacaaaagcatctagtcacctattaagaaaaaaaacatcagactaacatcagacttctcagcacaaaccttttccaaaccagaagagattgggatccgatcttcagagtgcttaaaaagaaactgtcaaccacaaattttatatcctgacataacaagcttcataaatgaaagaaatacaaagtatttcccagacaagcaaatactgagggaatttgtcactattaggctggttctataataaatgctcaaaggagttctaaacatgtaaatgaaaggtcagtattcaccaccataaaaacacatttargtataaaactcacaggtcttacaaagcaattgcacaaaggaggaagagaaagaaattaaatagcaacatgacaaaactccaccaacccacaaagagaaaaaagaaacaaataatttagaaaacaactagataacattataacaagaaaaaaactcacatatgaatattagccttgaatgcaaatggaatgaatgctctacttaaaaggtaaagattgacaaaattgatttttaaaagcatgaacaaaaa

SEQ ID NO: 287787 - DNA, 562 bp, Homo sapiens
aaaacacatttaagtataaaactcacaggtcttacaaagcaattgcacaaaggaggaagagaaagaaattaaatagcaacatgacaaaactccaccaacccacaaagagaaaaaagaaacaaataatttagaaaacaactagataacattataacaagaaaaaaactcacatatgaatattagccttgaatgcaaatggaatgaatgctctacttaaaaggtaaagattgacaaaattgatttttaaaagcatgaacaaaaaaagtaaagaccaatatccctgatgaacatatatgcaaaaatccataataaaatactaagaaatcaagtccaacagcacatcaaaaacataatacaccatgatcaagtgggttttactccagggaggcaaggatgattcagcatatgcaaatcaataaatgtgattcatcacataaactgaattaatggcaaaaaccatatgaccgtctcaacagatgcagaaaaagcatttgttaaaactgaccrcaccctaatgataaaaaccttcaacaaattaggcatagaaggaatacacttcaaa

SEQ ID NO: 287788 - DNA, 544 bp, Homo sapiens
acatcatccacagcctttattattttttgtgcacaatgtttggcaattaatcacaaaataacaggcataccaagaaataaaatcagaggaaaaatagaaatagacatgcagatgccccatatattgaaattgtaaaacatatgaggcatgtgttttcctgactcaaaatatatgagacatcacacaaaattaagtgaagatcaaatataattacaggaatagtccaraagaagaagtctcgtggctggaaatcctgaaaatgtcatcagaacacacttgtacaaactaagtggcatgcaaataacatcgctggttcaataataacagatgcatacattccaactgtagcttctttcaacataatctggcacgaaaaagaagcaagaaagattatgctgaatgaaaaaaatcacacaaaccatttttgcacaaagcaatctatggatgagattgattaagggaaagaaataacattatgagcaagtaaaaactgtaagagcaaacaaccaacatagaagaaaacaaaatggagatccagcattta

SEQ ID NO: 287789 - DNA, 544 bp, Homo sapiens
acatcatccacagcctttattattttttgtgcacaatgtttggcaattaatcacaaaataacaggcataccaagaaataaaatcagaggaaaaatagaaatagacatgcagatgccccatatattgaaattgtaaaacatatgaggcatgtgttttcctgactcaaaatatatgagacatcacacaaaattaagtgaagatcaaatataattacaggaatagtccagaagaagaagtctcgtggctggaaatcctgaaaatgtcatcagaacacacttgtacaaactaagtggcatgcaaataacatcgctggttcaataataacagatgcatacattccaactgtagcttctttcaacataatctggcacgaaaaagaagcaagaaagattatgctgaatgaaaaaaatcacacaaaycatttttgcacaaagcaatctatggatgagattgattaagggaaagaaataacattatgagcaagtaaaaactgtaagagcaaacaaccaacatagaagaaaacaaaatggagatccagcattta

SEQ ID NO: 287790 - DNA, 559 bp, Homo sapiens
ctcaaagccttttcatttactgttctctctgcctaaagcatcttcctccaggggcctgcatagctcatttcctcacttctttcagttctccacctaaatgtcatcttgtgaaggaatctttccatagccattctacctaaataagcagatctctactgcctatatttctgtggcctcttaccctttcttttgctttttctttctttgttgtttgttttccacaataaagtataagcttaagacagccaagacattgctttatttgcactagatctcctgtttctttctagcacactgcttagcttgtagtaggtattcaataaacatttgccrattatcaaaacagctgaccttgaatgatatgggtttgaactgtatgggtccatttatatgcagatttttttttcaactaaatggtgatcaaaaatacaatattcacaggatgtgagacccacttacatgaagggtccgctttttctgtacccagactccacaatgccgattgcaagacttgaatgtgtgccaattttgatatacacagaggtcctggaaccaatcc

SEQ ID NO: 287791 - DNA, 1183 bp, Homo sapiens
ctcaaagccttttcatttactgttctctctgcctaaagcatcttcctccaggggcctgcatagctcatttcctcacttctttcagttctccacctaaatgtcatcttgtgaaggaatctttccatagccattctacctaaataagcagatctctactgcctatatttctgtggcctcttaccctttcttttgctttttctttctttgttgtttgttttccacaataaagtataagcttaagacagccaagacattgctttatttgcactagatctcctgtttctttctagcacactgcttagcttgtagtaggtattcaataaacatttgccaattatcaaaacagctgaccttgaatgataygggtttgaactgtatgggtccatttatatgcagatttttttttcaactaaatggtgatcaaaaatacaatattcacaggatgtgagacccacttacatgaagggtccgctttttctgtacccagactccacaatgccgattgcaagacttgaatgtgtgccaattttgatatacacagaggtcctggaaccaatccwcgaaaaactgagctcccgaagtgtgatgggggaaagtcagcctccaaatacacatccacactggggagcctgaacaatgtaaatgtccatggatgaatgaatagctaaagaaaatgtggtatatacatgcaatggaatattattcagccattaaaaagggaaagcctgttttatgttacaacttgagtgaatcttgaaaacattatgctgcatgaaataaggtagtcawggagggacaaacactgcatgattccagttacaggaaatatctgaaatagtcaaacccatataaacaaagtagagtgatgattgccaggggctagacagaatggaaaatggaagttgctactcaatgggtacagagttttagtcacgcaagacaaaaaagttttaaagatatgccaataatatcgtgcctatagttactaacactgcattgtaccttaaaaatgtgttaagagggtagatctcacactatgtgtttttaccacaataaaaagaaaaagagaaaacaatggctaaaacttaacaccacattaaatgtgcatacatgtaaaattcttgcccaataaccaaggcttcatggaccaccgacgtattttgatgatgaatataatgacaac

SEQ ID NO: 287792 - DNA, 623 bp, Homo sapiens
cgaaaaactgagctcccgaagtgtgatgggggaaagtcagcctccaaatacacatccacactggggagcctgaacaatgtaaatgtccatggatgaatgaatagctaaagaaaatgtggtatatacatgcaatggaatattattcagccattaaaaagggaaagcctgttttatgttacaacttgagtgaatcttgaaaacattatgctgcatgaaataaggtagtcaaggagggacaaacactgcatgattccagttacaggaaatatctgaaatagtcaaacccatataaacaaagtagagtgrtgattgccaggggctagacagaatggaaaatggaagttgctactcaatgggtacagagttttagtcacgcaagacaaaaaagttttaaagatatgccaataatatcgtgcctatagttactaacactgcattgtaccttaaaaatgtgttaagagggtagatctcacactatgtgtttttaccacaataaaaagaaaaagagaaaacaatggctaaaacttaacaccacattaaatgtgcatacatgtaaaattcttgcccaataaccaaggcttcatggaccaccgacgtattttgatgatgaatataatgacaac

SEQ ID NO: 287793 - DNA, 623 bp, Homo sapiens
cgaaaaactgagctcccgaagtgtgatgggggaaagtcagcctccaaatacacatccacactggggagcctgaacaatgtaaatgtccatggatgaatgaatagctaaagaaaatgtggtatatacatgcaatggaatattattcagccattaaaaagggaaagcctgttttatgttacaacttgagtgaatcttgaaaacattatgctgcatgaaataaggtagtcaaggagggacaaacactgcatgattccagttacaggaaatatctgaaatagtcaaacccatataaacaaagtagagtgatgattgccaggggctagacagaatggaaaatggaagttgctactcaatgggtacagagttttagtcacgcaagacaaaaaagttttaaagatatgccaataatatcgtgcctatagttactaacactgcattgtaccttaaaaatgtgttaagagggtagatctcacactatgtgtttttaccacaataaaaagaaaaagagaaaacaatggctaaaacttaacaccacattaaatgtgcatayatgtaaaattcttgcccaataaccaaggcttcatggaccaccgacgtattttgatgatgaatataatgacaac

SEQ ID NO: 287794 - DNA, 555 bp, Homo sapiens
ggctgacataaggttaggaagtcctggggctgtaccagatacaacagggagtcggaggttgcagtgagctgagatcgygccactgtactctagcctggcaacagagcaagactctgtctcaaaaaaaaaaaaaagaaaagaaaagaaaagaaaaaagaagattctgatacgatttattcaaacagtgaacacctgccaagacataactgctgttagaagctggcatgctttctcacatgcagataagtattacatgaaatgaaaaagtggcctttgcattaagatctctatttgtcaaacaaatacttttgtatatactgatgccaagtttctgactgaagaagcaaactatgtgacgtcacttattcattttatttttgatttttaaagcattttctgaacactaatgttctacacacaattttacacacaaagtacataaattttgaacctataacatcaagggaaagcctataggcatatataaagtatcttaaaaacaacaacatttgccaaattaattttttaaacggaataaaagagctgagaggatgc

SEQ ID NO: 287795 - DNA, 555 bp, Homo sapiens
ggctgacataaggttaggaagtcctggggctgtaccagatacaacagggagtcggaggttgcagtgagctgagatcgcgccactgtactctagcctggcaacagagcaagactctgtctcaaaaaaaaaaaaaagaaaagaaaagaaaagaaaaaagaagattctgatacgatttattcaaacagygaacacctgccaagacataactgctgttagaagctggcatgctttctcacatgcagataagtattacatgaaatgaaaaagtggcctttgcattaagatctctatttgtcaaacaaatacttttgtatatactgatgccaagtttctgactgaagaagcaaactatgtgacgtcacttattcattttatttttgatttttaaagcattttctgaacactaatgttctacacacaattttacacacaaagtacataaattttgaacctataacatcaagggaaagcctataggcatatataaagtatcttaaaaacaacaacatttgccaaattaattttttaaacggaataaaagagctgagaggatgc

SEQ ID NO: 287796 - DNA, 555 bp, Homo sapiens
ggctgacataaggttaggaagtcctggggctgtaccagatacaacagggagtcggaggttgcagtgagctgagatcgcgccactgtactctagcctggcaacagagcaagactctgtctcaaaaaaaaaaaaaagaaaagaaaagaaaagaaaaaagaagattctgatacgatttattcaaacagtgaacacctgccaagacataactgctgttagaagctggcatgctttctcacatgcagataagtattacatgaaatgaaaaagtggcctytgcattaagatctctatttgtcaaacaaatacttttgtatatactgatgccaagtttctgactgaagaagcaaactatgtgacgtcacttattcattttatttttgatttttaaagcattttctgaacactaatgttctacacacaattttacacacaaagtacataaattttgaacctataacatcaagggaaagcctataggcatatataaagtatcttaaaaacaacaacatttgccaaattaattttttaaacggaataaaagagctgagaggatgc

SEQ ID NO: 287797 - DNA, 498 bp, Homo sapiens
tgtcaaacaaatacttttgtatatactgatgccaagtttctgactgaagaagcaaactatgtgacgtcacttattcattttatttttgatttttaaagcattttctgaacactaatgttctacacacaattttacacacaaagtacataaattttgaacctataacatcaagggaaagcctataggcatatataaagtatcttaaaaacaacaacatttgccaaattaattttttaaacrgaataaaagagctgagaggatgcaaaatagtggagttcttaaaatggagtaaaaacttagtcaagaaaaagaatgctgatgtagaactatgttttgccggctgtaacagacaatgcagaagcagaattcagtggtatatgacaacagaatcagggaagaaataagttactgtacagaaaatgatgaacagattaccttgtatgaacaggatatcttcccacattgggaactgaaaggtagcacttggaaaactaggtt

SEQ ID NO: 287798 - DNA, 498 bp, Homo sapiens
tgtcaaacaaatacttttgtatatactgatgccaagtttctgactgaagaagcaaactatgtgacgtcacttattcattttatttttgatttttaaagcattttctgaacactaatgttctacacacaattttacacacaaagtacataaattttgaacctataacatcaagggaaagcctataggcatatataaagtatcttaaaaacaacaacatttgccaaattaattttttaaacggaataaaagagctgagaggatgcaaaatagtggagttcttaaaatggagtaaaaamttagtcaagaaaaagaatgctgatgtagaactatgttttgccggctgtaacagacaatgcagaagcagaattcagtggtatatgacaacagaatcagggaagaaataagttactgtacagaaaatgatgaacagattaccttgtatgaacaggatatcttcccacattgggaactgaaaggtagcacttggaaaactaggtt

SEQ ID NO: 287799 - DNA, 2517 bp, Homo sapiens
cacatgtggtatatgcatagagtggaattattatttagcctttaaaaaggaattttgacacaagccacaacatgaatggaccataatgacattatgcgaagtgaaatacgccagtcactgaaggacaaatactgcataattccacttacatgagtttcctagaatggtcaaattcgtaagagactaaaagtgaggaactgaataaagacggcaaatggagaattattgtttactgggtacaaagtattaggaaagatgacaaaatttggagctggatggtagtgatagttgcactacartgtaaatgtacttaatgccactgaactatatacttataattattaaaatggtaaatttcatgttacgtctattcaataaaaaaagaatgacgaaaaagaatgtgatgatttatttgtatcctaaatatataaaatgttcctataaatcaaggaaaagaataactcaatttaaaaatagacaaaggggatgaaatggctattttaaaaggccaagaaatgtaagagccaaawgctattttaaaaggccaagaaatgtaagagccaaaagggaaatggaaattaaaataatacattttttcaagctagaaacaaaaaaaaaawttttttttttgaaacagggtcacactctgtcacccaggctggagtgcagtggtgtgattatagctcactgcagtcttggcttcctgggctcaagcaatcctcccacctcggccccacaagtagctgggactacaacgtgcactaccacgcccggctaatttttttattttttgtagagatggggtcttgctgtgttgctcaggctggtctcaaactcctgggctcaagtgatccacctgcctcagcctcccaaagtactggggttacaggcgtgagccaccatgcctggccaaaatattttaaaatttggtaagtccaagtcttggcaaggatgtgaagacaattcctactcttgttgagcagtgccataaactggtatgaccactttgaaaagcttactatggatacagaaattacactcttaaatacatactccctaaagcagtgattttcaaattgtgggtctcaatccatgtgaaatcaagttttaawgctattttaaaaggccaagaaatgtaagagccaaaagggaaatggaaattaaaataatacattttttcaagctagaaacaaaaaaaaaatttttttttttgaaacagggtcacactctgtcacccaggctggagtgcagtggtgtgattatagctcactgcagtcttggcttcctgggctcaagcaatcctcccacctcggccccacaagtagctgggactacaacgtgcactaccacgcccggctaattttttwattttttgtagagatggggtcttgctgtgttgctcaggctggtctcaaactcctgggctcaagtgatccacctgcctcagcctcccaaagtactggggttacaggcgtgagccaccatgcctggccaaaatattttaaaatttggtaagtccaagtcttggcaaggatgtgaagacaattcctactcttgttgagcagtgccataaactggtatgaccactttgaaaagcttactatggatacagaaattacactcttaaatacatactccctaaagcagtgattttcaaattgtgggtctcaatccatgtgaaatcaagttttaawacactatcatacaaattaaatcaatacaagtcaataaactggacaaagggatatatttttgcatgctaaaggcaagagtactcaatcgaaatatgaaaagatgttaggaacacatggagaaatggacatagatagtcatgggatgttttcatatatttttctccatctctgacaggtcaatgggtaaaatccaaatggggtgtaactaacaaattatatgacagctatattttgactttttcttttttagcgttttatttttttwcgtttacttttgtagatatatgtttccattttattccaataagtacagtagtcccaccttatccaaagtttcactttccatggtttcagttaccttccatcaaccacagtccaaaaatattaaatggaaaattccagaaataaagawacactatcatacaaattaaatcaatacaagtcaataaactggacaaagggatatatttttgcatgctaaaggcaagagtactcaatcgaaatatgaaaagatgttaggaacacatggagaaatggacatagatagtcatgggatgttttcatatatttttctccatctctgacaggtcaatgggtaaaatccaaatggggtgtaactaacaaattatatgacagctatattttgactttttcttttttagcgttttatttttttacgtttwcttttgtagatatatgtttccattttattccaataagtacagtagtcccaccttatccaaagtttcactttccatggtttcagttaccttccatcaaccacagtccaaaaatattaaatggaaaattccagaaataaaga

SEQ ID NO: 287800 - DNA, 558 bp, Homo sapiens
agcttgcagctcctctccgatggccagagaagtgtatggagactcacatcgtgaactttggctccaagaactactacaggaacatagcaggaaagctgagagaatccacagaccctttgaaagaactggatcacatcactgctgcaggctccctgagacaacaaaacactgagagtctgcttgctttctcaatgggaggctcgtgatctggggcaagttctcaaccctgattgccagttgcctggaaatagactcggtgctgttggaaggacacagtgggagtcagacaggccttcaggactgagggctgtgtgggagcagggtgaggccttgactgctggctttcccctacttccctggtgacctgtatggctcackagaggcagccataatccccctggaaatataactccactcgactgggaaccacactcccatcccccgcagcagtaacagccagccccacacaaggagaggctgagctcagacatgcctattgctgcccccacctagtggtctttctctgcctaccctggtatcagaagacaaaaatcgtaa

SEQ ID NO: 287801 - DNA, 448 bp, Homo sapiens
actctgtgccttttaattagggcattttgcccatttacattcaaggttagtattgatatgtgcttatttgatcctgtcatcatgttgttagctggttattatgcagacttgtttgtgtggttgctttatkgtgtcattggcctgtgtacttaagtgtgtttttgtagtggctgttaacggtctatccttcccatgtttaggactctcttcagaacctcttataaggtaggtctggtggtaatgaaatcgcttagcatttgcttgtctgaaaaggatcttatttctcctttgcttataaagcttagtttgctgggacataaaactcttggctgaaaattcttttccttaagaatgctgaatataggcccccaatgtcttctgatttgtacggtttcttctgagaggtctgctgttaccctgatgggcttcactttgtaggtgacgtgcc

SEQ ID NO: 287802 - DNA, 436 bp, Homo sapiens
gcttgtctgaaaaggatcttatttctcctttgcttataaagcttagtttgctgggacataaaactcttggctgaaaattcttttccttaagaatgctgaatataggcccccaatgtcttctgatttgtacggtttcttctgagaggtctgctgttaccctsatgggcttcactttgtaggtgacgtgccccttctctctagctgtctttaatattttttttatttcgaccttggagaatctgataactatgtgtcttggggatggtcttcttgtggagtactttgcaaaggttctctgcatttcctgaatttaaatgttggtctctctagcaaggttggggaaatttttatgaatgataacccaaaggatattttccaagctacttgctttctttccctttcagggacaccaataagtcatagatttggtctcttc

SEQ ID NO: 287803 - DNA, 575 bp, Homo sapiens
ttgtacggtttcttctgagaggtctgctgttaccctgatgggcttcactttgtaggtgasgtgccccttctctctagctgtctttaatattttttttatttcgaccttggagaatctgataactatgtgtcttggggatggtcttcttgtggagtactttgcaaaggttctctgcatttcctgaatttaaatgttggtctctctagcaaggttggggaaatttttatgaatgataacccaaaggatattttccaagctacttgctttctttccctttcagggacaccaataagtcatagatttggtctcttcacataatcccgtatttctctgaagttgttttcattttacttttttttttctttatttttgtctgactgagttatttcagatagctgttcttcaagttctgatattctttcctcagcctggttgattctactgttaacacttgtgattgtattctgaaattcgtgaagtgagttgtccagctctatcaggtaagtttggttcttcgttaaaatggcattttcatatttcatatcctatattattttattttattccttataatc

SEQ ID NO: 287804 - DNA, 630 bp, Homo sapiens
tcacaattatttttaacctacatccctctaatatttagcaagttaaaaattaatacctctgccctgttaaaataatagcttggcatatgtttacttctccctctcctagtcattttggttttcttttatataatcttgagatgctgaggcagatagtggttttaaattgttttaacttcacataccttctttttcaagattctcttctgacatttccattgtttatattgtgtacacaataaatatttaaattcatctctattttaattttggcattcaccagtactttttcgttcttgagtattttttttgtttgatttgatcttttgcttatccttaggctgattaaagtccatcatccagtaattttatttttcaaaaagaatatcctagtgatatatcttctgaggctttgcacrttcaaaaatgtcattctgttgcctttacacatgaaggaaattgtaggtataagattcttaggtcacaacactttggcctaaaacacagcacacgttaagtttctctattgttttatgacatttaggtttgcaaataagaagactaaagtcatctaaactttgctttcccctccccctggggtctggacatttataaaaatcattctctttg

SEQ ID NO: 287805 - DNA, 590 bp, Homo sapiens
ctatttgtcttatgagaaagagaaagaacaacttgccttgcaaatttttgccactacatttattttatcttacatgcaggaaaaagaagtctgctgttcaagtttttaccatgttcaagtgtttaattattattttggatccctaatatgtattacagtgtttggcacatagtaagcatactatactagagtacaaacattactaaagcaacaaaagcaccatttcaacgcaaatcyagtctttttaatgtagagagtcaaagactaaaacctcaaaatgaaattcagatatgacctaatacaaagatcctggaaacatgtttttacatcagtaaaaaataaaatcttaagtgaaaaatcacccaccaatttaggaaaaacacacagagaaaagtcaatgtattcaagtgaaagggtgggggaaggacaattcagaagaaagttaaagggagaaactaatatgtgagatgttatcttacactggtgtttacttatacatattcacctctccttttgctttaatcgttctttcttagtcaagttctctcgcaagttgaatttggcccaaatcatacatttttttcttagat

SEQ ID NO: 287806 - DNA, 590 bp, Homo sapiens
ctatttgtcttatgagaaagagaaagaacaacttgccttgcaaatttttgccactacatttattttatcttacatgcaggaaaaagaagtctgctgttcaagtttttaccatgttcaagtgtttaattattattttggatccctaatatgtattacagtgtttggcacatagtaagcatactatactagagtacaaacattactaaagcaacaaaagcaccatttcaacgcaaatctagtctttttaatgtagagagtcaaagactaaaacctcaaaatgaaattcagatatgacctaatacaaagatcctggaaacatgtttttayatcagtaaaaaataaaatcttaagtgaaaaatcacccaccaatttaggaaaaacacacagagaaaagtcaatgtattcaagtgaaagggtgggggaaggacaattcagaagaaagttaaagggagaaactaatatgtgagatgttatcttacactggtgtttacttatacatattcacctctccttttgctttaatcgttctttcttagtcaagttctctcgcaagttgaatttggcccaaatcatacatttttttcttagat

SEQ ID NO: 287807 - DNA, 467 bp, Homo sapiens
tcaaatgacatagtacttgcatataccctatacaccycctgctgtatattttaaatcatatccagattacctacaatatgtctaatacaatgtaagtgctacataaatagctgttatgcagtacttttatttgtattatttctattgttgtatcatttttgtttttttttttatttttttgaatatttttatgtgtggttggttgaatcacaaatgaggaaccgatagatccagacagctgactgtatttgtaaaaggaaagggcccagaatggccaagactcttctgatgaacaaggaaggaagacttccttatcagacatcaagagtaattatgaagctgtaatagagatgacagtataatcattgcagagccagagaaattatccaatgttcacatatatagaagttcaatatataagagcaggcatgacagatcaatgaaggaaggaggaattactctaaagt

SEQ ID NO: 287808 - DNA, 583 bp, Homo sapiens
tgctttatgatagctggcataagacatacaggcaaaatatccccgaagtagagaagggcaacttgcccaacttaactgcttatcctaactagatagaaacaccatttaagaacacacaattctcttagttataattctatgattatcagacaacatttcaactgatggtttgaattcttgaacagactagcccactagaaaaacatatttttatcaagtgcctggaaaccctttaaataattttcaatggcttttctccttttgtgggcgatagctgcagttccaattagggtaaaagggaaatrtgtgtgccaactgccagagtattattttggagaccaatactgaaagccaagtatacaaacagtaagctgtcccagcaattccactcctgggtatatacacaaataattgaaaataggtactcaagcgagtaattatacataaatattcatagcagcactattcacaatagccaaaaggtagcaacaacccaaatggccatcaatagttgagtaggtaaactaactatggtatatacacacaatggaatataattcagccatcaaaaggaatgaagtga

SEQ ID NO: 287809 - DNA, 583 bp, Homo sapiens
tgctttatgatagctggcataagacatacaggcaaaatatccccgaagtagagaagggcaacttgcccaacttaactgcttatcctaactagatagaaacaccatttaagaacacacaattctcttagttataattctatgattatcagacaacatttcaactgatggtttgaattcttgaacagactagcccactagaaaaacatatttttatcaagtgcctggaaaccctttaaataattttcaatggcttttctccttttgtgggcgatagctgcagttccaattagggtaaaagggaaatgtgtgtgccaactgccagagtattattttggagaccaatactgaaagccaagtatacaaacagtaagctgtcccagcaattccactccygggtatatacacaaataattgaaaataggtactcaagcgagtaattatacataaatattcatagcagcactattcacaatagccaaaaggtagcaacaacccaaatggccatcaatagttgagtaggtaaactaactatggtatatacacacaatggaatataattcagccatcaaaaggaatgaagtga

SEQ ID NO: 287810 - DNA, 583 bp, Homo sapiens
tgctttatgatagctggcataagacatacaggcaaaatatccccgaagtagagaagggcaacttgcccaacttaactgcttatcctaactagatagaaacaccatttaagaacacacaattctcttagttataattctatgattatcagacaacatttcaactgatggtttgaattcttgaacagactagcccactagaaaaacatatttttatcaagtgcctggaaaccctttaaataattttcaatggcttttctccttttgtgggcgatagctgcagttccaattagggtaaaagggaaatgtgtgtgccaactgccagagtattattttggagaccaatactgaaagccaagtatacaaacagtaagctgtcccagcaattccactcctgggtatatacacaaataattgaaaayaggtactcaagcgagtaattatacataaatattcatagcagcactattcacaatagccaaaaggtagcaacaacccaaatggccatcaatagttgagtaggtaaactaactatggtatatacacacaatggaatataattcagccatcaaaaggaatgaagtga

SEQ ID NO: 287811 - DNA, 467 bp, Homo sapiens
tcaaatgacatagtacttgcatataccctatacaccccctgctgtatattttaaatcatatccagattacctacaatatgtctaatacaatgtaagtgctacataaatagctgttatgcagtacttttatttgtattatttctattgttgtatcatttttgtttttttttttatttttttgaatatttttatgtgtggttggttgaatcacaaatgaggaaccgatagatccagacagctgactgtatttgtaaaaggaaagggcmcagaatggccaagactcttctgatgaacaaggaaggaagacttccttatcagacatcaagagtaattatgaagctgtaatagagatgacagtataatcattgcagagccagagaaattatccaatgttcacatatatagaagttcaatatataagagcaggcatgacagatcaatgaaggaaggaggaattactctaaagt

SEQ ID NO: 287812 - DNA, 467 bp, Homo sapiens
tcaaatgacatagtacttgcatataccctatacaccccctgctgtatattttaaatcatatccagattacctacaatatgtctaatacaatgtaagtgctacataaatagctgttatgcagtacttttatttgtattatttctattgttgtatcatttttgtttttttttttatttttttgaatatttttatgtgtggttggttgaatcacaaatgaggaaccgatagatccagacagctgactgtatttgtaaaaggaaagggcccagartggccaagactcttctgatgaacaaggaaggaagacttccttatcagacatcaagagtaattatgaagctgtaatagagatgacagtataatcattgcagagccagagaaattatccaatgttcacatatatagaagttcaatatataagagcaggcatgacagatcaatgaaggaaggaggaattactctaaagt

SEQ ID NO: 287813 - DNA, 360 bp, Homo sapiens
ggcaccactatatgaaagactgagcactctgatggctataaagaattttaaattgttctggtgcattttcactctttctatattattctgttcaagaacaggaggctttaagttgtatgtaggatttccctgctacaaacattgaataatttgtttgaatataaaaatatctaaatactaaaacagcacatgggaacaacataaagtcatataaattgytattgggtaccatggtctagacctggcttggcaaatagatgctctctggtgtggtggtcccaattgactggaaggggctgcctggaatgtactatttaaaggattctgagagcaagctcagagggaaagggtgctgtggtt

SEQ ID NO: 287814 - DNA, 360 bp, Homo sapiens
ggcaccactatatgaaagactgagcactctgatggctataaagaattttaaattgttctggtgcattttcactctttctatattattctgttcaagaacaggaggctttaagttgtatgtaggatttccctgctacaaacattgaataatttgtttgaatataaaaatatctaaatactaaaacagcacatgggaacaacataaagtcatataaattgttattgggtaccatggtctagacctggcttggcaaatagatgctctctggtgtggtggtcccaaytgactggaaggggctgcctggaatgtactatttaaaggattctgagagcaagctcagagggaaagggtgctgtggtt

SEQ ID NO: 287815 - DNA, 590 bp, Homo sapiens
tcagaaagtccctagaaaagtgtacaaacagtgagagctcaacaagtgtttgttaaataaacgaaacaccaagactttacaaaatctcccttattcattattgagtaatgagaaaaaaataccagttggagactaaaagctattgtagaaccaggggaaaagaacaacatcctataaacacagaataaaaatataccatcaaaataatctaatatccagaagaaaatatcagaaaagtatgaggaatcgtaaagaagaccgtctctatgaaatacaaggtaaaatcttaagaattagctaagacaaaaagagaacagaataatatttaaaaggggatatgattaagatgaaaaatagaaaagaagcaaaaatgcagagcacaataaaaattcataatggaagtggcaaagagcaaaaatgcaaatcagtgatgttgtaaaccatcccatatactcagaggacaaaaacaacacatgaaaatatgagaaagaaactagaaatatgaaagaatgataaaagagctacamaagtgaaaatggaaaataaatgctaaaaaaaggaaaacaatattagaaataaactaagcttaa

SEQ ID NO: 287816 - DNA, 561 bp, Homo sapiens
gaagcaaataatttaaagaagctccaattcrtttggcaacagacctctcagggaaaaccatacagcccaggagggagcaggatgacagtttcaaagttcagaaagaaaaaaaaaactgtcatacaaaaatgctatatacagcaaaactatccttcaaatatgaaggggaaataaagtctttccctgacaaacaaaagctgagagaattcaccaacaccagaaccatcttacaacaaatgctaaacagagtttttccattagaaagaaaaaaatactaacgggcaaaaagaaaacatttgaaggtaagaaacccactggtaaaattaagtatatgaacaaacccagaatagtctaatactgttaactgtgctgtgcaattcactcataactctagtatgaagccaaaaagacaaacctataaaaaacaatactacctacaggaacctgttaagagacgggcaatataaagatgtgtaattgagacaacataaagtctaaatgtggagagataaagtatgtaagttttttcattttttgttttttcctatactttgagatcta

SEQ ID NO: 287817 - DNA, 561 bp, Homo sapiens
gaagcaaataatttaaagaagctccaattcatttggcaacagacctctcagggaaaaccatacagcccaggagggagcaggatgacagtttcaaagttcagaaagaaaaaaaaaactgtcatamaaaaatgctatatacagcaaaactatccttcaaatatgaaggggaaataaagtctttccctgacaaacaaaagctgagagaattcaccaacaccagaaccatcttacaacaaatgctaaacagagtttttccattagaaagaaaaaaatactaacgggcaaaaagaaaacatttgaaggtaagaaacccactggtaaaattaagtatatgaacaaacccagaatagtctaatactgttaactgtgctgtgcaattcactcataactctagtatgaagccaaaaagacaaacctataaaaaacaatactacctacaggaacctgttaagagacgggcaatataaagatgtgtaattgagacaacataaagtctaaatgtggagagataaagtatgtaagttttttcattttttgttttttcctatactttgagatcta

SEQ ID NO: 287818 - DNA, 561 bp, Homo sapiens
gaagcaaataatttaaagaagctccaattcatttggcaacagacctctcagggaaaaccatacagcccaggagggagcaggatgacagtttcaaagttcagaaagaaaaaaaaaactgtcatacaaaaatgctatatacagcaaaactatccttcaaatatgaaggggaaataaagtcttyccctgacaaacaaaagctgagagaattcaccaacaccagaaccatcttacaacaaatgctaaacagagtttttccattagaaagaaaaaaatactaacgggcaaaaagaaaacatttgaaggtaagaaacccactggtaaaattaagtatatgaacaaacccagaatagtctaatactgttaactgtgctgtgcaattcactcataactctagtatgaagccaaaaagacaaacctataaaaaacaatactacctacaggaacctgttaagagacgggcaatataaagatgtgtaattgagacaacataaagtctaaatgtggagagataaagtatgtaagttttttcattttttgttttttcctatactttgagatcta

SEQ ID NO: 287819 - DNA, 561 bp, Homo sapiens
gaagcaaataatttaaagaagctccaattcatttggcaacagacctctcagggaaaaccatacagcccaggagggagcaggatgacagtttcaaagttcagaaagaaaaaaaaaactgtcatacaaaaatgctatatacagcaaaactatccttcaaatatgaaggggaaataaagtctttccctgacaaacaaaagctgagagaattcaccaacaccagaaccatcttacaacaaatgctaaacagagtttttccattagaaagaaaaaaatactaaygggcaaaaagaaaacatttgaaggtaagaaacccactggtaaaattaagtatatgaacaaacccagaatagtctaatactgttaactgtgctgtgcaattcactcataactctagtatgaagccaaaaagacaaacctataaaaaacaatactacctacaggaacctgttaagagacgggcaatataaagatgtgtaattgagacaacataaagtctaaatgtggagagataaagtatgtaagttttttcattttttgttttttcctatactttgagatcta

SEQ ID NO: 287820 - DNA, 409 bp, Homo sapiens
attttgatcaacgatgttgaaagtcaagaagaaacttgtggttaaagtgagatggtagcacacaagattccagcagcttgacttcagaatctgttgctctgattctggatgcatgacagagaacaggggacaggaagcaggctcactgacctcttcttgaccttctatggattatatggctctcctggaagaagcccaagggcatctttgaggtaaagcatccacaaagtttcataaaacttttggaaacaggcgctgggggtggaggtggcaagggtggtttcattttaatttcatgctggagtatcaaacattagatcagcatttcattatgggtggactgattgaagtgayttttcatttcaacccaagaagaacccagcaggaaccaaagagcagaacaaaactc

SEQ ID NO: 287821 - DNA, 633 bp, Homo sapiens
tgctcatcaaaaccacctagggagcttgttaaatgtagtgcttcttgtgtcctggacatacgataaggtccaggacaggagactgatcttggactacataggggacaaatgtggtcacctttacaaccattgggatctcaaaaatagaagcctggctattagctcctctataaagttcatctaaattaaacatttaagtgtaaaatgtttattgttttcattcattcattattttcattcattcattgttcaggtaggttcaggagttttcaagtaactttaatatgtcaatctaattccaatgtactcaatgtattcagtgacacggcaagagataatcacaaactgggttcaaagttccagtaaaattaayaagttcagctactgttgtgtcaactcagctacaatcactaatttctgcagttgcgaaagttcattgctggtgctcactggactccacgtgtttcttgtgaaagtcattcagtcatcagttctgttatcatggaactgaaaggagccttacagtttaaccagcccaaattataatatcattctacagatgaggaaaaataaagtaaggaggtctagaaccagaactcccactcctggttcagcactggagaggaaagatag

SEQ ID NO: 287822 - DNA, 489 bp, Homo sapiens
gatcatgccattgtactccagcctgggatacagagtgagactccatctcaaacaacagcaacaacaacaacaacaaaatacataaagaactcttacaattcaataagaagacaaataacccaatgaaatgatattcaaatgaccaatatacacatgggaaaatgttcaacacaccattcatcaatggggaaatacaaattaaaaccacaatgagatactactacatacttacgaaaatagccacaagttaaaactgatgatagctgaccatagaatatggagcaactggaactctcatacattactgtgtaaaatggtaaaaccactctgaaaaatgccaattctataagttatgcatatatcaaccatctgatccaacaatccactcctasacagttatccaagagaaatgaaaacatacacccacaaaaagagatgtacatggatgtttataccagctttatttggaatagtccaaactgcaaataa

SEQ ID NO: 287823 - DNA, 582 bp, Homo sapiens
acaacatgataaagaaaggtacaaataaagacacagatatataaagaaaatgcaaactaaacataagtaagacttaagtatgagaccacatagaatttaatatttaaagaacctaagtcattaargggacacattatataataatacaaggcacaatttatgaatatgtgacagtcctaattctgtctggagcaaagaacacagtcaatgaagcaaaaactattagaaaggcagggaaagatctgtttcaatattttatgcatttattgatgctccagaatacctgaaacagggcttgtaatacttgttattaaaatttgctttttttaacgaatagaagagattattataatggaacatttactataaccagtgaattcaggaggattactacaaaaaaaattaacaatgtaatttaaaaatcccagaatatacatatgtatgcatatacatatatacctccatttttacatgtatttctatgtataattatctatctataagacatgctaaattttttgaaccataagtattttaaaggccaaatgtgtgattttaacctaataaaatttaaaacaaata

SEQ ID NO: 287824 - DNA, 516 bp, Homo sapiens
aatagtttttcagtcccttccccctaacccccctccctactctagaagacaccagtatctattgttgccatctttatgtccacgagtacccaatgtttaacttccggtcatacgtgagaacatatagtatttggttttctgttcctgcattaattagcttaagataatggcttccagctgcatgcatgttgccgcaaaggacataattttattcttttttatggctgtgtagtattctacagttattttctttatccaattcactgtcgatgggcacctaggttgattccatgtctttattattgtgaataatactgcaatgaacatacaagtgaatttgtctttctggtagaactatttatttttctttgggtatatacctagtaatagaattagatttctcaaagaacttaaagcaamtttaccatgaggtatatgaaaatgaaagctaatatgggagaaattagaaaattcattttctgctaagtaataatacaaatattattacttttaaac

SEQ ID NO: 287825 - DNA, 1163 bp, Homo sapiens
taatctgctttactatggtaaccattttgctgtctatatgtattccataacctcatgttatgaacctcaaatatacayaatataatttattttttaagaaatttgcatttgtcaatagtttattatatctatctatctatctatctatctatctatctatctatctatctctctgtctgtctatctaccatctatctatcaatcatctggagtgaaagagaaaggtttataataggtcagggaaatgactgtggaatattgtaacaacagtggaagaaggcaggctgcccccaggaagggagtatagtttggggtgaatcagttcctttacccaagggaaattcctggaaagtggatccgctgtcaggtctcagcagccaacactcctggcagctggggaatgactaactcagtcctgaagaaggagtcagagcagcacgatgtggtggccactaagatgccaaatttctgtcacaccatccattacaccaacccgtaccccctccctgaccacgtgtgccaatgctcagaatgggtatgcagctagaataaaaactggaagagcaacccttcatcctccttccttcctttatctccttaaccatatwaattggtctcagaaggatgtaagacaacatcatagagtctgttaaatgtatcttctcagtttaatatgcaagaatacaactataggaaaatgcaaagaaaaagataaagcaaaattagcaaaataagatgaagatttaaaaaggaagatgaagaggaggaaaagggagaaagaagaaaagaatggaaagaaaatatagtaagaaaagtgacattgtcaagatgacagaataggaagcactggaaccttccatttcactacagatacactgattcaataattatttgcagacaaattccctttgtgaaaaatccagaaacaaattgtgcaaattgaaaggctcaatttgtacctaagccactttttgwggccggaaaagagcccttcttagaatcctggggttcttctttcttttctgatattttgttaaatatcttatatgattcattctactggtgtggcttgtatcttatttccataagagaatacttacaattgtgaatgtgaaatcacattcatcaaagccagtggacagatctgtcacacattcacactg

SEQ ID NO: 287826 - DNA, 555 bp, Homo sapiens
aattggtctcagaaggatgtaagacaacatcatagagtctgttaaatgtatcttctcagtttaatatgcaagaatacaactataggaaaatgcaaagaaaaagataaagcaaaattagcaaaataagatgaagatttaaaaaggaagatgaagaggaggaaaagggagaaagaagaaaagaatggaaagaaaatatagtaagaaaagtgacattgtcaagatgacagaataggaagcactggaaccttccatttcactacagatacactgattcaataattatttgcagacaaattccctttgtgaaaaatccagaaacaaattgtgcaaattgaaaggctcaatttgtacctaagccactttttgargccggaaaagagcccttcttagaatcctggggttcttctttcttttctgatattttgttaaatatcttatatgattcattctactggtgtggcttgtatcttatttccataagagaatacttacaattgtgaatgtgaaatcacattcatcaaagccagtggacagatctgtcacacattcacactg

SEQ ID NO: 287827 - DNA, 600 bp, Homo sapiens
cacaaatatgtgaaaattaaacgacacagtcttgcagaatcaatgcaaagaaaacgaaggcaagttaaaagatatcttgagacaaatagaaagaaaattcaccacaccaaaatttatggggtacagcaaaagcagtactaacagggcagtgtgtagtgttaaatgactacattaaaaaagaagaaagacctaaaatagacaaccgaatattaaatctcaagaaagtagaaataaagaacaaattaagattaagccccaagttagcagaaaaaaaaaggaaataaagtttagaacaraacaaatagactacagaaaaacaatagtaaaaaaaatcaacaaaactagactttttttttttttttttttttttttttgagatggagtcttgctttgtcacccaggctgaagtgcaggggcgcgatctcggttcactgcaagctccgcctcctgggttcacgccattctcccacctaagcctcctgagtagctgggactacaggcgcccgccaccacgcccggctaatttttttgtatttttttagtaaagacggggtttcaccgtgtcagccaaaatggtctcgatctcctgatctcgggacc

SEQ ID NO: 287828 - DNA, 600 bp, Homo sapiens
cacaaatatgtgaaaattaaacgacacagtcttgcagaatcaatgcaaagaaaacgaaggcaagttaaaagatatcttgagacaaatagaaagaaaattcaccacaccaaaatttatggggtacagcaaaagcagtactaacagggcagtgtgtagtgttaaatgactacattaaaaaagaagaaagacctaaaatagacaaccgaatattaaatctcaagaaagtagaaataaagaacaaattaagattaagccccaagttagcagaaaaaaaaaggaaataaagtttagaacaaaacaaatagactacagaaaaacaatagtaaaaaaaatcaacaaaactagactttttttttttttttttttttttttttgagatggagtcttgctttgtcacccaggctgaagtgcagkggcgcgatctcggttcactgcaagctccgcctcctgggttcacgccattctcccacctaagcctcctgagtagctgggactacaggcgcccgccaccacgcccggctaatttttttgtatttttttagtaaagacggggtttcaccgtgtcagccaaaatggtctcgatctcctgatctcgggacc

SEQ ID NO: 287829 - DNA, 1239 bp, Homo sapiens
tttttgttactcgcaaaagaacacaataactgatatattatctcatatattgaaccgtaaaaataaatgagaaaaaatttgtaatgcacctaacacagggctcaggatatggctatttttagctacaacaccttgggccttatgcctcctctgtcaacacattccttcagcattttaggtaagtagcttctgccaattagcttaatcttcatacaattcttgacttattcctcagttctaactttcattatgtgtattgttttataaacattttcttcatagcccatgagttcacattttataaggcagtggctaaagtagtacygggtattatggtattatttacattatgtattgtaaaatatagtatacatttttagaagaatgtacttgcttgtctgaatcctacaatacccgacaatgattcttatttgtacatctggcttattaagcctctgacgaggaaatgtttcatttatacacattatcctgcataagaaataaaaggtacagcaagtgagtcatatattgaaaggtacaaaagcttgtgtatgctatcatcaaatctatcatacaaactttgaaactttgtaagatttgttagatccttgtgtagtcacacactaaaacttaccctccaaagccatwgtataacacacttgaacttaagacctgaagaatctgaatgatcagtttttcatcccctaatcaccagactgagagaaaggctcaggttctgtgcagaaaagtaaaataaaaaaatttwaaaaacaagacaaagcattctccttaattttctgaatacactaataaattatgtgatgtgaaggaagtagaaaaaggtgacacattaaaaagaaaaattgcaatcaataaaaagaggtacatagataaactagttattgagatagcaggtgtactagtttgctcaggctgacataacaaaacaccatagactcagtggcttaaacaaaagaaatttattttctaacagttctgggggctagaaacccaaagtcaaggcttttgctcttttggtttcagatgggagttcttaccttggcttgcagaaagttttcttattgctctttccatgtatagtccttccttagtctgtgtggatagaaaaagagggacagacggtgagctctcaggtatctcttcatctaaaaacatcaatcctttggattaatagattaatcctattggatcaccatctgtatgacctcatttaacctt

SEQ ID NO: 287830 - DNA, 597 bp, Homo sapiens
ctagttattgagatagcaggtgtactagtttgctcaggctgacataacaaaacaccatagactcagtggcttaaacaaaagaaatttattttctaacagttctgggggctagaaacccaaagtcaaggcttttgctcttttggtttcagrtgggagttcttaccttggcttgcagaaagttttcttattgctctttccatgtatagtccttccttagtctgtgtggatagaaaaagagggacagacggtgagctctcaggtatctcttcatctaaaaacatcaatcctttggattaatagattaatcctattggatcaccatctgtatgacctcatttaaccttaattacttgcttagtaacccatctccaaatataactacactgggggttagagcttcaatatatgaattttggaggacaaaagcaatcactccttaacagaagaaaaggatttcaaaaccgctatactgtattaaatatttacacacttaaaatgtgaagatatagtctattcaaaaaataaattgaaaccctaatgataaaaattgaacaaaatactatttctgaaatcataaattcattcaagagaattaat

SEQ ID NO: 287831 - DNA, 597 bp, Homo sapiens
ctagttattgagatagcaggtgtactagtttgctcaggctgacataacaaaacaccatagactcagtggcttaaacaaaagaaatttattttctaacagttctgggggctagaaacccaaagtcaaggcttttgctcttttggtttcagatgggagttcttaccttggcttgyagaaagttttcttattgctctttccatgtatagtccttccttagtctgtgtggatagaaaaagagggacagacggtgagctctcaggtatctcttcatctaaaaacatcaatcctttggattaatagattaatcctattggatcaccatctgtatgacctcatttaaccttaattacttgcttagtaacccatctccaaatataactacactgggggttagagcttcaatatatgaattttggaggacaaaagcaatcactccttaacagaagaaaaggatttcaaaaccgctatactgtattaaatatttacacacttaaaatgtgaagatatagtctattcaaaaaataaattgaaaccctaatgataaaaattgaacaaaatactatttctgaaatcataaattcattcaagagaattaat

SEQ ID NO: 287832 - DNA, 1168 bp, Homo sapiens
ctagttattgagatagcaggtgtactagtttgctcaggctgacataacaaaacaccatagactcagtggcttaaacaaaagaaatttattttctaacagttctgggggctagaaacccaaagtcaaggcttttgctcttttggtttcagatgggagttcttaccttggcttgcagaaagttttcttattgctctttccatgtatagtccttccttagtctgtgtggatagaaaaagagggacagacggtgagctctcaggtatctcttcatctaaaaacatcaatcctttggattartagattaatcctattggatcaccatctgtatgacctcatttaaccttaattacttgcttagtaacccatctccaaatataactacactgggggttagagcttcaatatatgaattttggaggacaaaagcaatcactccttaacagaagaaaaggatttcaaaaccgctatactgtattaaatatttacacacttaaaatgtgaagatatagtctattcaaaaaataaattgaaaccctaatgataaaaattgaacaaaatactatttctgaaatcataaattcattcaagagaattaatwtatatgaattttggaggacaaaagcaatcactccttaacagaagaaaaggatttcaaaaccgctatactgtattaaatatttacacacttaaaatgtgaagatatagtctattcaaaaaataaattgaaaccctaatgataaaaattgaacaaaatactatttctgaaatcataaattcattcaagagaattaatagcattttggacctaaggaaaaggttatagaatttgaaggtagctcaatagaagttatccaaactgaggcagaaagagatgcatcaatgtactgtaataaattgttaagataactggtgtctccaaggagaaaagggtggaaaaagtatttgagaaaaaaatggtaattttttttwaaatttgatttaaaacatcaactaataattccagaagttaaaacagcaacagcagcaccaatagaaagggcagcagcatcaagaacaaaaccatgatggatgaatacagagaaaaaccgcatacagacatacctcagtcaactttctcaaaactcaagttaaagagaaattcttaaagcaggcagaggtgaaagagaca

SEQ ID NO: 287833 - DNA, 566 bp, Homo sapiens
acattggttgttagggctttaatctatgaattttagggaacgtgattcagtatacagcatgcagcacttacagctaaggtaacagagacccccagagaataaggtggggttgcagcacagcttaataaattgaggaactttcttattcctgacactgagtcttacacataaaccagatttagcatatatttataaaattgatccaataatactataaaaatatcctcaattcgtgtttttgtacacagagccctaagggcagacatgtttaaaggcagcaactgtaactatccaataaaatgagtaaatcacaaagataaagaagaatatacaaacatacaatcattttatttcaataacatctgtgtttctatcacattatattaattcaattttmtaagctctgcaattttattgaaatatatagaaaagtgttttatcagtagaaaccattatatttagagatgtaactatacatcattttaattacagaggctcttacatagcaaatctcagtgtaccctgattgcatcctgttaagtgcctaagcacagatctatagaact

SEQ ID NO: 287834 - DNA, 555 bp, Homo sapiens
agcttgggtgatttttttttaaatctgctttagtagatgcatccactgatttgttgcttttgcatatgacatcacaaacagataaacatggagatttgggagactgcatgccaacagatttttttaagtcccacacatacacaaaagctctacttcaggaaatcaaacttgagtgcttacacctgcatgcgttacaataataatttakacagtgctgccttagtctgtattagaagaataaaaaccttcatcacaaagaatttaacctatgggttctccacaaagacttattagcaaatatccacaatgagaatcatcttccaacttctaggcatcccagagaaataaaaacagaaatgaagttattgatctggccatttttgtacttaatcatgcaattggtgtatgttttctagattacattattgctgagaactttattacaatatgtattttcatttttattgtgcttccaataatgttagtcttagtggaaagttctcatgactgaaaaaggaattgaacacatcagtatataatcaattggatcaaaaa

SEQ ID NO: 287835 - DNA, 616 bp, Homo sapiens
aatatttatgtcttttataacaatgtatatctccaaacattatcttatattgttatataaggttcagtagctcttgatrtgcttagaattatacatgctctcgttttatgttcaaataaagttttgttttctggttatgctagcccttaaaaaacaaatgcaatgactttacttggtttccttttttatagtccttagtagcctttagcatggtaacttcttaataagtgttgtataaacaaatttgtagtctgttaaagtaagagcaagcaagctttgaactcttacagaatagacacataaaaagggggacatgttttaatgttttccttatattactatttatatatagaaactcttgacatcagaaataaaagacaatacaaaaattgtaagtccacgaccaggaaaaaaaatcacattaattaaaataaagaaacacagatgtttgaagacagagcagaacagcaacttgaacatactagaataatcacccaggaaataagataaagacagatgccttgtaaattaagaaaagagcccaaatatgcagtgcaagtatgacctgaaagaaaccaactgtcacattctttctagtaaatgattaacagacagg

SEQ ID NO: 287836 - DNA, 616 bp, Homo sapiens
aatatttatgtcttttataacaatgtatatctccaaacattatcttatattgttatataaggttcagtagctcttgatgtgcttagaattatacatgctctcgttttatrttcaaataaagttttgttttctggttatgctagcccttaaaaaacaaatgcaatgactttacttggtttccttttttatagtccttagtagcctttagcatggtaacttcttaataagtgttgtataaacaaatttgtagtctgttaaagtaagagcaagcaagctttgaactcttacagaatagacacataaaaagggggacatgttttaatgttttccttatattactatttatatatagaaactcttgacatcagaaataaaagacaatacaaaaattgtaagtccacgaccaggaaaaaaaatcacattaattaaaataaagaaacacagatgtttgaagacagagcagaacagcaacttgaacatactagaataatcacccaggaaataagataaagacagatgccttgtaaattaagaaaagagcccaaatatgcagtgcaagtatgacctgaaagaaaccaactgtcacattctttctagtaaatgattaacagacagg

SEQ ID NO: 287837 - DNA, 478 bp, Homo sapiens
atacaattttatctgcatgtgtartaatgtgttaataccaggaaaatatgactttgaagacattgaaagctgactctctctctccccctctctgtctctctctcactatatctatgtgtgtgtatatatatatagagagagagagacagagatctttaaccattatgccttagcttagttcagtacagaaataacttgtgttttcaaaaggccaattaaacacttacttctttttgagaatctatgaaatagttttaagtagcaaagtcaacaacagttaacataattaaaatggcatttttagtaagaattttattccaacttgtattaatgtttatttaaaaatattcttgccttgtgaacccatctgtttcctgcctattatgctacctaaattctgtaatcatagtactcaagggagattttcacataatttttttcatgatatagaaagcattctacatttcattcaaaagaa

SEQ ID NO: 287838 - DNA, 618 bp, Homo sapiens
tatatgcatttctgtagttttgagaggttttcttaatattgaattctatttttgttgcacagtggtccaaaagtgtgcatggtatgatttcacatttttttaatttattgagacttgctttatgtctgagcatgtggtcaattttataatatgttgtgtgtgcagatgagaagaatgtatactccctagtgctgggaggagtactctgtagatgtctagtaagtctaattggtcaaatgtcaagtttattaactaattaatatatttatttttatttctataggttattggggaacaggtggtgtttggttacatgagtaagttctttagtggtgatttgtgagattttggtgcacccaccacccaggcagtacacackgcaccctatttgtagtcttttatctctcagccccttcccacccattcctctgagtccccaaagtctattgtgtcttcttatgcctttgcattctcatagcttagctcctacttatgagtgagaacataagacatttggttttccatttctgagctacttcacttagaataatagtctccaatctcatcaaggtctctccaaattccagtttaagtgcataatttattagttttctgtct

SEQ ID NO: 287839 - DNA, 551 bp, Homo sapiens
ggaagtctgctctttccatcttctcctgcctcctttattctagccaggctggcagctcattagatggtgcccacctagattgcagctgggtctgcttgtcctagttcagtgactcaaatattaatctcccttggcaacatcctcacagatatacccaggaacaatactttgcctccttcaagccaatcaagttgacactcaatatttaccaacatagcctacatcatgactggtagaaaataactgctgtaagaygaatgtgaagagaatgtcataaacatctaaataaaaagggaaactttggaaaaatctgagaaaaatttaaattttgaacaagagatcctattaaatagtaggtgacatattttatgatgagaataagtataaaacaatttaatgagttaaatgcctcaggtaaaaggctcagttaaatgataagtgaatttataggttaatatgtgtcactaaagggaagtacaaaaaatcgactatctttactctgcaaattgtttaacatttcatttttccctaaagaatattaaatagcaaat

SEQ ID NO: 287840 - DNA, 427 bp, Homo sapiens
aaaatgcatggaaaatgaatttaagcatttaaaaattggcccttgtcaaggaaaacaaatgtttctatcaaaatttcagtcaacattttcaaaaatgataatcattatttctccataaacttgagaccytaggcctataaagacatttctttcattccagctgctataaaataaacaagcaaatacaactaagggaagacataagttttgtgaaaaacataaacttttacatagttttattgaatttacttaagactccaggcgatgaaagtaaaagctgagagcgaaagttgctgaaaagatgtcaaggattataaaacagtctcttgaaatacctgccttaatgtcactgaaattaatgaaacgtttcttgaaaatggtaagaacacaatttaaatgtgaaagaaatatgtcaataataaaaaga

SEQ ID NO: 287841 - DNA, 546 bp, Homo sapiens
agagaactaaagctaagtgcasggcacacccttctcaaaggacatagccaggcagctgtacagaggccacttttgcatatattgaaatttccctgaaagtcattggagggccacagctggctgcatgggaggcagctgtacagccatctgactcactaaaaatgtgattatggcattaaagaaaaaatggtgataatggacctttgaggaaaccacctgtctaaccatgctgtttcaaacttatttttgagaatgatgtttcatttctttcttcagaatttggggcaaataacagcaataataatataattcgtagaatgcataaaacagaacaagtaggaaacataaattttattatttagagtacctgaggaataagaacataaacttcttatagacattattaaatactaagtcaggtgggacatctctaaagataaactcaacccatactagaataatttccacttcaaattaaatttctgactaggctaactttgtctcctgttaatgtatgttacttacttttcacgaattagaatgtgc

SEQ ID NO: 287842 - DNA, 546 bp, Homo sapiens
agagaactaaagctaagtgcacggcacacccttctcaaaggacatagccaggcagctgtacagaggccacttttgcatatattgaaatttccctgaargtcattggagggccacagctggctgcatgggaggcagctgtacagccatctgactcactaaaaatgtgattatggcattaaagaaaaaatggtgataatggacctttgaggaaaccacctgtctaaccatgctgtttcaaacttatttttgagaatgatgtttcatttctttcttcagaatttggggcaaataacagcaataataatataattcgtagaatgcataaaacagaacaagtaggaaacataaattttattatttagagtacctgaggaataagaacataaacttcttatagacattattaaatactaagtcaggtgggacatctctaaagataaactcaacccatactagaataatttccacttcaaattaaatttctgactaggctaactttgtctcctgttaatgtatgttacttacttttcacgaattagaatgtgc

SEQ ID NO: 287843 - DNA, 694 bp, Homo sapiens
tgttggctgactttgttgctattttgaagttgagctgaatattttataagtttattaactatgaatgcaagaagagataattgtttccatgaaaattaagtagaatgtatcagaaaaatcagttaatatgaatctctcaaaaagayatcatttgaattaggtattgaagagacaagtgtaaactttttggtgaaaaacataggacgattcatccagatagtgtttttttggcttctgatattttaagttttaaacaaatgtatggagatacaattgacattacacacacacacaaacacacacaaacatacacacacacacacacacacacaccccagtgaaagcatcattgtaattaagcaaatggaaatattcatcacgcaaatttgttttcttctgttcttgtatatagtccatgcttttccctttcttcaattcacttttagaaataaacatatgccactacagattaatttccatcttaacagttttctttaaatggaatcatacaacttatatatttttgttttgcatcttttatggagcatattattttgagattctttcacattttgtataacaataatttaattcaatcatttttattgctccatagtattctattgtctaggtgtatcataatctgtttatccgctcgctttttgtttgttatttattgtttacaggttattac

SEQ ID NO: 287844 - DNA, 588 bp, Homo sapiens
aagagttttatagctttagctcttttatgtaggcagttgatccattttgagttaattttttgtgtattgtgagagataggggtccaatatcattcatttgcatgtggatattcaggtgcctgtgtgcaaacgtctgttgaagacagttaytttctcgctgaattgatttgggaccttgtaaaaataaattggtcatagatgtatggatttatttttggactgtcaattctatactattgatctgtaaatctatccttgtgccagtacaacacaggtctgattaatttatctttgcaatgagtttcaaaatcaggaagtgtgtttcctccaacttgttcttctttttcaataatatttttgtggttcagtgcccattgaagttccatataaatttggcaattactatttccatttctaaaaataaaaagacattagaaattcgatagagattgcattaaatctgtaaatcattagggtactattgccgtttttaacactattaagtcatccaattaggtcttctttaatttatttcaggatttttttagctttcagtgtgccagtccttaacctccttggttaaattta

SEQ ID NO: 287845 - DNA, 500 bp, Homo sapiens
cctctcatgggtgtcagtgtttgctttgattccagaattcccaaaacttgactctgtccattttcgtcaacttaatggttgctttaatggacgaacagattatcggagcttcctactctgacatgcccatgatgttagggctcatggcagatatctttttagtggaagaattttctgatctcagttgccgtactatttttctttatttcctcaaagagatcaatccatatatttccccagagtagatttaaaasaaaaatcttcatttctcttttctaccatgttattaaggcacttcatcccaatggtcacaaagagatatgatctttaaaattaactacatcagctaatatcacagtttcttaagcagattctcttttccgggttatgattcacattgacatttgctttagaattctctgatgatagttggataggtgctactcagaggctttaactcctagctagtggcagaagttgagttgggcttactataactt

SEQ ID NO: 287846 - DNA, 620 bp, Homo sapiens
gtgatcttttttcatcttgagtctcctaagggagaagacgtcaaagacccttgcgattgatttcacccaaactgatttcatgtaaaccttagaaatctttggtctatttcctccaagaagtatctgaagccatgagttggtagaaagcaaaagtggggacaattttcagtaacattcatctcagtagatcctggcttgaaagttgcctagtttacacaaaactttgaacaagtcagagtaccttaaaactgggagaaaaaggtgaactctctcacattctgctttataatcattttatatttcttcattyagtcagtaatttatttgttatatgaatttttaaaaatggcaagaataagcccctctgtagaatcctgtgacatgatgagtgaggcattattcggcttctgtagcctcctgcacttgattataggctgaaagtgaccacatagagggtgtgctggaggttaatttgtcaataacatttcttaatagtggtaataaatcaattaccttggcatagtgatatttaaaataaagatttaactgtaaagatacttagcaatatttcatgtgaaagagaatttaaacagaaagagaattaaacgccttgacatagc

SEQ ID NO: 287847 - DNA, 620 bp, Homo sapiens
gtgatcttttttcatcttgagtctcctaagggagaagacgtcaaagacccttgcgattgatttcacccaaactgatttcatgtaaaccttagaaatctttggtctatttcctccaagaagtatctgaagccatgagttggtagaaagcaaaagtggggacaattttcagtaacattcatctcagtagatcctggcttgaaagttgcctagtttacacaaaactttgaacaagtcagagtaccttaaaactgggagaaaaaggtgaactctctcacattctgctttataatcattttatatttcttcattcagtcagtaatttatttgttatatgaatttttaaaaatggcaagaataagcccctctgtagaatcctgtgacatgatgagtgaggcattattcggcttctgtagcctcctgcacttgattataggctgaaagtgaccacatagagggtgtgctggaggttaatttgtcaataacatttcttaatagtggtaataaatcaattaccttggcatagtratatttaaaataaagatttaactgtaaagatacttagcaatatttcatgtgaaagagaatttaaacagaaagagaattaaacgccttgacatagc

SEQ ID NO: 287848 - DNA, 615 bp, Homo sapiens
gttcaccttaatcacctggctaagtgctgtcgggtttctgtacagtaaagtcactttttgccagcattttgaatagtatatgcctgtgtggatgtttggtcgtatatgtgtgtttggtttttgcattttttgtttttggtatttagyctgcttggtttcctttaggctgcttggatatgtgttttggggtctgttataatttaaaaaattctcaactattatttcttcagatatgttttctgtctcattccctctcctcactcttccttctgtgatgttttgcacaggttacacagcacttttaccctacacttcttaaattcctctaatttctctacccaccttctttcctttcagtttcagtttgggtgatttctactgacttactttcaaattcactgagtcttttatgttgtcaaacttactaaataatccctcagaggaacacttcatttccattactctatactttctagcatttccatttgatgctttcttaaagtttctttatctctgctgaaatcacctatctaatcagtgatgatgtcttgcttgtccattagaatttctaatgtttaattataaatatttaaaatttcctacctgatagtttca

SEQ ID NO: 287849 - DNA, 615 bp, Homo sapiens
gttcaccttaatcacctggctaagtgctgtcgggtttctgtacagtaaagtcactttttgccagcattttgaatagtatatgcctgtgtggatgtttggtcgtatatgtgtgtttggtttttgcattttttgtttttggtatttagtctgcttggtttcctttaggctgcttggatatgtgttttggggtctgttataatttaaaaaattctcaactattatttcttcagatatgttttctgtctcattccctctcctcactcttccttctgtgatgttttgcacaggttacacagcacttttaccctacacttcttaaattcctctaatttctctacccaccttctttcctttcagtttcagtttgggtgatttctactgacttactttcaaattcactgrgtcttttatgttgtcaaacttactaaataatccctcagaggaacacttcatttccattactctatactttctagcatttccatttgatgctttcttaaagtttctttatctctgctgaaatcacctatctaatcagtgatgatgtcttgcttgtccattagaatttctaatgtttaattataaatatttaaaatttcctacctgatagtttca

SEQ ID NO: 287850 - DNA, 615 bp, Homo sapiens
gttcaccttaatcacctggctaagtgctgtcgggtttctgtacagtaaagtcactttttgccagcattttgaatagtatatgcctgtgtggatgtttggtcgtatatgtgtgtttggtttttgcattttttgtttttggtatttagtctgcttggtttcctttaggctgcttggatatgtgttttggggtctgttataatttaaaaaattctcaactattatttcttcagatatgttttctgtctcattccctctcctcactcttccttctgtgatgttttgcacaggttacacagcacttttaccctacacttcttaaattcctctaatttctctacccaccttctttcctttcagtttcagtttgggtgatttctactgacttactttcaaattcactgagtcttttatgttgtcaaacttactaaataatccctcagaggaacacttcatttccattactctatactttctagcatttccatttgatgctttcttaaagtttctttatctctgctgaaatcacctrtctaatcagtgatgatgtcttgcttgtccattagaatttctaatgtttaattataaatatttaaaatttcctacctgatagtttca

SEQ ID NO: 287851 - DNA, 628 bp, Homo sapiens
ttctgccccatgttttgtcaccacaaagtggtgcatacttgatggtatgcagcttgaggctccaagatggcttcgttcacaagcctagtgcctgtttagaaatgtcagttggctgggctcagatgggccactctcccttcccacatggttggtcaccaaggttcctgggctgcttctgtgacagctcagggttctgcgagtgagtattctaaagaacagaaacaggaagttgctaatatgttagcaacgtggccgagaaagtggaatcgtggcacttctgctatgcctcttccacgtgtatcagttaattaatttttgaagatgaggaaatgyaattggaaacataatgctgcaacaactgaatatatgtataaaaataaacctcaaacataacttcatataatataaaaaattactgtggataatagacctatacagaaatcccaaactattacatttctaggaagcatagaaaaatatgtatttatgatttgggggtaggaaaagacttctttacatgccatgaaaaaatatcataaaaaacgataacttagaattgatccaaatttataatctttattcttcaatatacataaataggaaaattaacagccaaactagagattct

SEQ ID NO: 287852 - DNA, 568 bp, Homo sapiens
aggaattaatggggagggagagatgaacaggtgaagcacaaaggattttagggcagtgaaactattctgtttgtaactacagtggttgatacatgtcattatacctttgccaaaacccatagaatgtagatcacgaagagcaaactctaaggtacattaaggaytttggatgataacgatgtgtcagtgttgtttcatgagttgccacaaatatgccatcaaggttcaggatgtggatagtggggcagattgtgtgtgttttgggggatgggtgtgtatgggaaattgctattgtttccatttagttttgctgtgaacctaaacatactttaaaaaagtgtttattaatttaaacacagtgtgtatgtagtatacacacacatatacacatatatgaggactgagaacatcaaatgttggtgaagatgtggagctatgtataaattgtttctgggagtataaaatcatgcatccacttttgaaacccatctgtcattttgttataaaattaaacatgtgccttccttatgacctagaagttcggccattgtgtatatgagcaacaaaa

SEQ ID NO: 287853 - DNA, 568 bp, Homo sapiens
aggaattaatggggagggagagatgaacaggtgaagcacaaaggattttagggcagtgaaactattctgtttgtaactacagtggttgatacatgtcattatacctttgccaaaacccatagaatgtagatcacgaagagcaaactctaaggtacattaaggattttggrtgataacgatgtgtcagtgttgtttcatgagttgccacaaatatgccatcaaggttcaggatgtggatagtggggcagattgtgtgtgttttgggggatgggtgtgtatgggaaattgctattgtttccatttagttttgctgtgaacctaaacatactttaaaaaagtgtttattaatttaaacacagtgtgtatgtagtatacacacacatatacacatatatgaggactgagaacatcaaatgttggtgaagatgtggagctatgtataaattgtttctgggagtataaaatcatgcatccacttttgaaacccatctgtcattttgttataaaattaaacatgtgccttccttatgacctagaagttcggccattgtgtatatgagcaacaaaa

SEQ ID NO: 287854 - DNA, 568 bp, Homo sapiens
aggaattaatggggagggagagatgaacaggtgaagcacaaaggattttagggcagtgaaactattctgtttgtaactacagtggttgatacatgtcattatacctttgccaaaacccatagaatgtagatcacgaagagcaaactctaaggtacattaaggattttggatgataacgatgtgtcagtgttgtttcatgagttgccacaaatatgccatcaaggttcaggatgtggatagtggggcagattgtgtgtgttttgggggatgggtgtgtatgggaaattgctattrtttccatttagttttgctgtgaacctaaacatactttaaaaaagtgtttattaatttaaacacagtgtgtatgtagtatacacacacatatacacatatatgaggactgagaacatcaaatgttggtgaagatgtggagctatgtataaattgtttctgggagtataaaatcatgcatccacttttgaaacccatctgtcattttgttataaaattaaacatgtgccttccttatgacctagaagttcggccattgtgtatatgagcaacaaaa

SEQ ID NO: 287855 - DNA, 568 bp, Homo sapiens
aggaattaatggggagggagagatgaacaggtgaagcacaaaggattttagggcagtgaaactattctgtttgtaactacagtggttgatacatgtcattatacctttgccaaaacccatagaatgtagatcacgaagagcaaactctaaggtacattaaggattttggatgataacgatgtgtcagtgttgtttcatgagttgccacaaatatgccatcaaggttcaggatgtggatagtggggcagattgtgtgtgttttgggggatgggtgtgtatgggaaattgctattgtttccatttagttttgctgtgaacctaaacatactttaaaaaagtgtttattaatttaaacacagtgtgtatgtagtatacacacacayatacacatatatgaggactgagaacatcaaatgttggtgaagatgtggagctatgtataaattgtttctgggagtataaaatcatgcatccacttttgaaacccatctgtcattttgttataaaattaaacatgtgccttccttatgacctagaagttcggccattgtgtatatgagcaacaaaa

SEQ ID NO: 287856 - DNA, 544 bp, Homo sapiens
ctgtttgtaaatattaagtttgggatgtcttgaagtatccaaatcccaatagccaattggatgtacaagcctggcgatcagaaaattctaatataaggatataaatgttggcattattagaatatgatattcaaagtcatgttgctatttaccctagcttataagtaacaaatttttgagaaaaaaatacactgtggtacactctgtgayggcaaatggatttggtaaccccaggacttttgctttgtcaaggtggattactcaaagggtctcgatttcctggcccatttgctcctccctcagaattgttttagtggatgctgctccattatctgccagcaactctgttgctgaggtaggactgaggccagcctcctagtgacaggaaaattctttctcaaaaccaaactagtttttattttattgtcaaaatccaattacttaatcaatgtatgtttcacagacagttaaatacaaataacttcattggtatgtattgtgtatcctttcgatctacagatttaggtcttctgtaatcagacag

SEQ ID NO: 287857 - DNA, 532 bp, Homo sapiens
aagttgtaggacgagaccgtgagccaaagaatgtgggcaacctctagatgctagaaaaaggcaaggcaatgaatttttccctagagcttccagagggaatcagccctgccaacatcctgacattagtccaataaaactgatttcacatttctgacctccagaattataagataacaaattcattttgttctagccactaaagttgtgctaattttttacagcagaaataagaaatgcagcctccatcttgaatatctgtagcacatgcttcattgtctacagctgtatagtatcatctgcaagaagtagcttgtggtctcatccatccagtttttttttaagtcttacgaacccaaatgcagtttaaagtccttaagatagacaatgtattccatatttcttggtrtaaaataaggatggtgattagatatatttcatatatatacttttattttcccctgtaaacatgttcttcagcagcatttacctccaagaatctttttctcagacaatgagtgggcatcccctggaa

SEQ ID NO: 287858 - DNA, 1603 bp, Homo sapiens
aagttgtaggacgagaccgtgagccaaagaatgtgggcaacctctagatgctagaaaaaggcaaggcaatgaatttttccctagagcttccagagggaatcagccctgccaacatcctgacattagtccaataaaactgatttcacatttctgacctccagaattataagataacaaattcattttgttctagccactaaagttgtgctaattttttacagcagaaataagaaatgcagcctccatcttgaatatctgtagcacatgcttcattgtctacagctgtatagtatcatctgcaagaagtagcttgtggtctcatccatccagtttttttttaagtcttacgaacccaaatgcagtttaaagtccttaagatagacaatgtattccatatttcttggtgtaaaataaggatgrtgattagatatatttcatatatatacttttattttcccctgtaaacatgttcttcagcagcatttacctccaagaatctttttctcagacaatgagtgggcatcccctggaawaagttgtaggacgagaccgtgagccaaagaatgtgggcaacctctagatgctagaaaaaggcaaggcaatgaatttttccctagagcttccagagggaatcagccctgccaacatcctgacattagtccaataaaactgatttcacatttctgacctccagaattataagataacaaattcattttgttctagccactaaagttgtgctaattttttacagcagaaataagaaatgcagcctccatcttgaatatctgtagcacatgcttcattgtctacagctgtatagtatcatctgcaagaagtagcttgtggtctcatccatccagtttttttttaagtcttacgaacccaaatgcagtttaaagtccttaagatagacaatgtattccatatttcttggtgtaaaataaggatggtgattagatawatttcatatatatacttttattttcccctgtaaacatgttcttcagcagcatttacctccaagaatctttttctcagacaatgagtgggcatcccctggaawaagcatatcctttttatggacaaagaagttaatagaataaacctcaacagaaataaaattaagttttcaaagaagatggcttttattataaacaaatatatacttttattataaatatagtcctacttttaaaagtacctatctgtctacttcataaacwctttcctacctcagacacaaatattttaaaattcctcaaactataaatgtaacaatgtatctttaattctgatttattaaagaaaaaagctcttcttatttcttacgtaaacagagaagatagatttttgatgattttgaatctggaacacagctcctcacatgtggctcttttataatgacatctggcttcaagcaggtagaaaaaaaccactctggagtaaagtatattttaattaattgcaaacagttctcaaggccatcttcaaacacttgcacttcattgcaagacagagaaaagataattaataaaagacttcattgcaagacagagaaaagataataaaagagtctctctagaaaataaattagtcacaa

SEQ ID NO: 287859 - DNA, 606 bp, Homo sapiens
gtatctctgcaagcataaacacttaggtatattaatgagtcacactggtataacagttatgagcagataactgttattttgaactctattcataaagaaataggtcaaaaagaaaaatgtgtaaatatcactgtggttgacaattgtgtgcacccagctttataactttgtcatatctgaagtaccatggtggacaacctgttttttgacaagattgatcaaaaactgcaatgggtctccactgcatatgcaatcatccaaagagttgagatctcaaaaagtttatctgtcacaaatgcggatgtacaaagacatttcttcatttattgagtaagtttcaatgccttaatacatayatatacaatgctcacacacaaagtccacattatgcaaaaaaatgcataaaacaaattagaactctctaaaagtctttacacaatttgtgcatccagtatagaaataaggcaaagatgaaatgcatagcatagtgagttataaaatataatgtagccaatttaaaatagtgggacaaaaaaactaagaaaagaaaaataaaaaagataaaaactaaaaaaaggctaaaaagaaaattcaacatgtgaaaaa

SEQ ID NO: 287860 - DNA, 638 bp, Homo sapiens
aacccacagttggtaagcaggcagagctgagctcagacatgattaggcaaactccagacaatggagacctgtgagtaaaacacaaaagtattgtcataaaccactaagactccaaggttgccacacagcaataactaatacatggactcttgaccttttgttgaacatccacaatacaaatccacaataaaataggcaagtttataacttaaatcattatgtgcaattttcttcattattcctatatgtgaatatgtatatatacacacacacatatatatacatatatatacacatatatatggatagtgctttaagttattctttccttaaatatctttattgtctagtttatcatctgttctttttttctagaagatttaatgtaaacgttcaagtagtattcctgtgagtgttagggggtcatttctgcaggtttttcacaaactagagcamtttgagataaacactattgcaacacatgtttttgtaattctacattaagaatgcaatttgcatattatatgataaggcacatgtgttttatacaatgtaaaaggaaatcagcagaacttgtaactaagagcctctctacaacatgacctgaacaaagtaggtgaatttgctactggttgata

SEQ ID NO: 287861 - DNA, 1178 bp, Homo sapiens
acacatttctgaagggatttttatctgaaaagaaaaagaatggataaaaatgacccatacagtaattaaagctctaagacacattgggcctttaatattttccctttccaaagaaaaactcatagtatcacagagaatataacatatgtgagtaaataaaataactggatttaaaccaaagaatcacttgtctgcaattgaaatatttttacttgaaaaattattatatttactaataaatgaaaaatatttcctgattccaaatgagtaacaccaacattttaatgttcaaacttaggtttaaaactaatatattttctttacaatggatgggagatgggccttggagaaaatagcagcagggttgggtctgttacctttttkttgttgttgttgtagttatcttaacatttattagtattaagttatttcatgcaataatatctgatcatgtttgcattattatctgaaaaccaaattcattcaccctttttttctcaagtaactacctaagtttctttttttttttcttttattattattatactttaagttttagggtacatgtgcacaatgtgcaggttagttacaaatgtatacatgtgccatwaggctaatttttttttttttttttgtatttttagtagagacagggtttcatcatactggccaggctggtcttgaactcctgaccttgtgatccgcctgcctcggcctcccaacgtgctgggattacaaagtggaagatattttaaaaatcttttcaaaagagatattcaaataagaaataaatcttttaggcacaatatgtgtaacatagatactgcgttaaaataagcccttctatattgatattcaaatgcacataagttacactgggaaagtgtttagcagttagaaagtgattcaaactcttacactgtgtttccaagcttacttgtaaacagcagaaaacwtgtattgtctttttgaatactcagtttatactcattctcaaagtttgcattactttaactactaccctcttagggagtcactgcattaaataatctataataacttgaaacagctgagaaggatctcagaaaatttctaatttcggaaaagagatctatctataattatagccttctcactatataccctgacaatgccatcttgtttatttccaaagcgaa

SEQ ID NO: 287862 - DNA, 558 bp, Homo sapiens
cctaatttcattcatacttgcttctttctactttccactttcaatgttattattacagccacataatcatggagcgtcagcactggccaggtattagaacacaagtgcaatctctgtgtattcctatgataaaattgatgaacaaataaatgatataatttagccattgctacacagctaaataatagttagtttaaatttgattcttaggctcctaatttaatacagtcccttttgcttgcataaaaaatatctttcttgaattcccctcttgtcagttgtttcccttttaagyatttttctcccttgacatactggttagtcattcttaattgcagttttgatcatacaattaccttgctcatatataaactttcctttagagtaaaacaagagtccagctattcactagcttgcacagcttcatattacctttactttagttttcagtttgtttagtttagttttcgtcaaagatacttaacctaagttgagataatatctatttctattgtggggatcaaatgagataagatatctaaaaccataaacatagag

SEQ ID NO: 287863 - DNA, 415 bp, Homo sapiens
aatctttgtttttcctgaccttgggagttataaggaaatctagtcaggtatttgtagaatgttcttcactttgagattgtctggtgttttcttcaacgattatactgaagttatagattgtgggaaagaatmcacaggggtgaagtaacatcataggattgctttggctatttgcacttttttgtttttacatgaattatagaacagcttttttttctaattttgttaagaattactttggtagtttgataggaatagagttgaatctgtaaattgctgtgggcagtagtgctattttagtgacattgagtttttcgattcatgagcatggaattttttaaatttattcatgtcatctctgatttctttcagcaatgttttgtagaactccacatagagatctttcacctctttg

SEQ ID NO: 287864 - DNA, 1088 bp, Homo sapiens
cattttaaagaggaggaatgtgtgactgagaaagattaaaacatctttttccaagtcccagagtaaattaagtggccaagctaaaattctagccccagtcagtctgcttgagagcctgttaaccatcacatcttcctggccccttgttcatattgagaggatttaccaggttgtagtgtgtgatacaaataaaggtaatcatgattaagatatcgtatcctgccctcagctgactgttaacaatgtcaactgaaaggtcagactttcaaagtgaaaatttgcactccatatgttcttgaaatctttctggggctgttcttttgtcagactaagtatatatgactgtctttgcccatttttttgtcatcaaggataaagctctttgatgctctgaactcgtaatgaaacaaaatagtctaataaattaggaagtaaagaataaacgatttagtaatcaatgtcataataaccagttggatgaatcctccaaaaacacaaacacccgaacaccgcccaaaaattatggagaaagagctggttcytaaataatttatgtatgatgttttaaggaawtaaggaaacagattccttcctgaagcctctagaaggaatacagacctgctgacatcttgcttttagacttctcatctccagaactgtaagagaataagtgtgtgctatttgaagccactaatttggtaatttattatagtagcaataggacactaattgatatccaaagattttggatatttatctataaagcttttattaagcactttctacatggcaggcacaaaaatattcatcatgatcacccgagctccattttctaaacctttttaccttcatagggctgttatagagctaaatcaatcactgcctttcattwtgggtagactcctaaatccaatagaatgctttctgttgcccgtaagataataggaatttgttggctccgataactgaaaagtgcaaatcctgggaaaccagcatgggctctggccacatttctctgtgaatctcttggctctgtttttttctgttgtcagcatcatgcttgggctagtggccccatctcaacatgg

SEQ ID NO: 287865 - DNA, 598 bp, Homo sapiens
gggaatgtacacacttaagtcagcaaaaactaaattaattttgccctatattgtgctggtgaaccatgatataccttataatcttgtcaaaaagaaaagttgtagctgtgttcacaggaaaaaaaaaaaaagaaaaacacatggcctgtcagccttttgcctaagatcaattggagtatcttttcttatcagtttaatatctgttatgtcctctatctaaggacaatatattaaatggatttttggagcagggagatagaataggctcttgctccattaacttcacacatygacctggtattgcaaatacctccagaaatagtgtacccctaccaagaaaaaaaaaacacattaacatgttcttttatctcacagaattgagcatttattccctgtcaggtaagaaatatattaggtgaaagtggcctttcagattactaataataaagctaaacagttattaaaactaataaactattaaaccaattattaataaacaattattaaaattaacaactaattattaaaactaaattattaggaataatttttagaattgtttataaaagaagtgaaaaataatgaaaaaaatatgaac

SEQ ID NO: 287866 - DNA, 598 bp, Homo sapiens
gggaatgtacacacttaagtcagcaaaaactaaattaattttgccctatattgtgctggtgaaccatgatataccttataatcttgtcaaaaagaaaagttgtagctgtgttcacaggaaaaaaaaaaaaagaaaaacacatggcctgtcagccttttgcctaagatcaattggagtatcttttcttatcagtttaatatctgttatgtcctctatctaaggacaatatattaaatggatttttggagcagggagatagaataggctcttgctccattaacttcacacatcgacctggtattgcaaatacctccagaaatagtgtacccctaccaagaaaaaaaaaacacattaacatgytcttttatctcacagaattgagcatttattccctgtcaggtaagaaatatattaggtgaaagtggcctttcagattactaataataaagctaaacagttattaaaactaataaactattaaaccaattattaataaacaattattaaaattaacaactaattattaaaactaaattattaggaataatttttagaattgtttataaaagaagtgaaaaataatgaaaaaaatatgaac

SEQ ID NO: 287867 - DNA, 598 bp, Homo sapiens
gggaatgtacacacttaagtcagcaaaaactaaattaattttgccctatattgtgctggtgaaccatgatataccttataatcttgtcaaaaagaaaagttgtagctgtgttcacaggaaaaaaaaaaaaagaaaaacacatggcctgtcagccttttgcctaagatcaattggagtatcttttcttatcagtttaatatctgttatgtcctctatctaaggacaatatattaaatggatttttggagcagggagatagaataggctcttgctccattaacttcacacatcgacctggtattgcaaatacctccagaaatagtgtacccctaccaagaaaaaaaaaacacattaacatgttcttttatctcacagaattgagcatttattccctgtcaggtaagaaatatattaggtgaaagtggcctttcagattactaataataaagctaaacagttattaaaactaataaactattaaaccaattattaataaacarttattaaaattaacaactaattattaaaactaaattattaggaataatttttagaattgtttataaaagaagtgaaaaataatgaaaaaaatatgaac

SEQ ID NO: 287868 - DNA, 421 bp, Homo sapiens
tttgtctccccagaactaaactactaataacctattgttaacaggaacccttaccaataacataaaaagtcaacacatattttgtacacatcaaatatactgcgttcttacaataaagtaagctagaggaaagaaaatgtttctaagaaaatcataaagaagacaaatatatttactattcattaaacagaagtgggttgtcctaaaggtcttcatcctctttgtgttcatgttgcataggctgaggcagaggatgaagaagaggggctggtctcaggggtggcagaggtggaagaaaagaagtggatgagtggacctacaaagttcaaacckgtgttgttcaagggtcacctgtacaaaaaacggaggtgatatgaacatgattgagattaggaatgaaggagaatctgggcatggtggc

SEQ ID NO: 287869 - DNA, 1007 bp, Homo sapiens
tttcatttattgggaattacctaacagtggaaggttagatgtcctactttgagctgctataacaaaataccttagatggggtaatttataaataatagaaatttatttcttacaattctggggtctgagaagggtcactctkcttcatagctggtgcctgttgctgcatgctcacatagcagaagggtagaaaggcaaatggagctaagacacttccccaagcgcccccttttttgtatttattattatttttaactgacacataataattgtacatataaggacactaatcccatccatgaatgaggagtcctcatggcttaatcaactcccaaaggcccaatcaactcccaaaggtcccttttcttaacactatgatcttgtggtttaagttccaatatatgaatttggaaggacacacacattggaactataggactgggttatatgcaggtgaatatctaaccctttaataaactgccaactgttttacagtcccacaawtttcatttattgggaattacctaacagtggaaggttagatgtcctactttgagctgctataacaaaataccttagatggggtaatttataaataatagaaatttatttcttacaattctggggtctgagaagggtcactctgcttcatagctggtgcctgttgctgcatgctcacatagcagaagggtagaaaggcaaatggagctaagacacwtccccaagcgcccccttttttgtatttattattatttttaactgacacataataattgtacatataaggacactaatcccatccatgaatgaggagtcctcatggcttaatcaactcccaaaggcccaatcaactcccaaaggtcccttttcttaacactatgatcttgtggtttaagttccaatatatgaatttggaaggacacacacattggaactataggactgggttatatgcaggtgaatatctaaccctttaataaactgccaactgttttacagtcccacaa

SEQ ID NO: 287870 - DNA, 562 bp, Homo sapiens
taattcattcatttttgtggctgagtagtattcatatatgatayatgacacatatatcacaatttctttatccattcgttgattgatgggcatttggactggttccatatttttgaatttgtgaattgtgctgctataagcatgggtgtgcaaagtattttcttcacataatgacttcttttcctctggctagataaccagtaatggactgctggatcaaatggtaggagccgagtagtgggattactggatcaaatggtagttctacttttagttctttaaggaatctccgcgctgttttccacagtggctgtactagtttacattcccaccagcagtgtagaagtgttctcttttcactgcatccacaccagcatccattattttttgaattttttattatagccattcttgcaggagtaagatgatcgcactgtggttttgatttgcattttcctgatcattagtgatgctgagcattttgatggaattatttgtttttttttcttgctaatttgagttccttgtagattctggatattagttctttgtcagatatata

SEQ ID NO: 287871 - DNA, 609 bp, Homo sapiens
atttgacccatcttaagttgatttttgtataaggtgagagatgaggatccagtttcatttttctacctgtggcttgccaattatcccagcatcatttgataaatagggtgtcctttcttcattttatgtttttgcttgctttgtcaaagatcagttggctgtacgtttttgggtttatttctgggttctctattctgttctattagtctatatgcctatttttataccaccaccatgctgttttggtgactatgggcttatagcacagtttgaagtcrggtaatgtcatgcctccagatttgatttgttctttctgcttagtcttgctttggctatgcaagctcctttttggttacatattttaggattgttttttctagttctgtgaagaatgatagtggcattttgaattgcactgaatttgtagattgcttttggcagttcagttgttttcacagtattgattctacccatctatgagcatgagatgtgtttccatttgtttctgtcatctatgatttcttctagcagtgttttgtagttttccttgtagaggtctttcatgtccttggttaggtgtattcttaagtatttcattttttgtagcta

SEQ ID NO: 287872 - DNA, 486 bp, Homo sapiens
atgactgcatatttcaaaaaccaagaacagtgacctttggggaaggggaaagaatcttatttacagagatattatataagaataatcaaatgtctaatttttaacagaaagagacatagcatacaaaaaaaatcagggaaatatggcctatttgatgaaaaaatttaatctaccaaaactatccctgaggaagctaagacattgcagtttttagacaaagactttaaatccactgccttaaatatgctctaaaagctaatgaaaaccattcataaagaaataaagtaaataaaaaaattgatgtatgaacaaattgtgaatatcagtaaaaaggatcaaaattataaaaataaatcagatataaattctggagctgaaaagtrcactaactgaaatgaaaattttacaagaggggttcaacaacagatataaacttgcagaaggataataaacagacatgaagataaggcaagtaaaactacccac

SEQ ID NO: 287873 - DNA, 529 bp, Homo sapiens
ttataaagtaacaaaaaaagaagaaaatcttagaatttacttctgggtcacttcttaagtcctgtagttcttagcatctccaccctccttccttcatctttcaaagccattagtcaattgcttattgaattttctccaagactttttatttagtaagaggaatacggtgaatctacttactctgtaatttccagaactaaaactaggaggttatttttgatgtttaaagaattattttagttcagttgtcaagttggaagccagactagaataggttgaygtgaaagagggaaataaaaaaagaatatcaatatagacatataatttgacaaatttggcagccaagagaggcaaaaaagccaaggtaatagtagagaaacatataatttaatggaaaggcttttttattcccccagggaagtaaacatcagcctatttaaataatgatgataattagtctgtataggcaccatgggctaagaagcagaccccagacaggaggtttgtggttgatttgcatttacctgat

SEQ ID NO: 287874 - DNA, 529 bp, Homo sapiens
ttataaagtaacaaaaaaagaagaaaatcttagaatttacttctgggtcacttcttaagtcctgtagttcttagcatctccaccctccttccttcatctttcaaagccattagtcaattgcttattgaattttctccaagactttttatttagtaagaggaatacggtgaatctacttactctgtaatttccagaactaaaactaggaggttatttttgatgtttaaagaattattttagttcagttgtcaagttggaagccagactagaataggttgatgtgaaagagggaaataaaaaaagaatatcaatatagacatataatttgacaaatttggcagccaagagaggcaaaaaagccaaggtaatagtagagaaacatataatttmatggaaaggcttttttattcccccagggaagtaaacatcagcctatttaaataatgatgataattagtctgtataggcaccatgggctaagaagcagaccccagacaggaggtttgtggttgatttgcatttacctgat

SEQ ID NO: 287875 - DNA, 434 bp, Homo sapiens
aatcaattacactagatattcaacacygcattataatataatctatgttttggataattttgcccaactgtaggctgatataagtgttctgaacaccttcaaggcaggctatgctatgatgtttggtagtttaggtgtattaaatgcatttttgatttatgatattttcaactgacaattggtttattgggacatgactccatcataagtcagtaatgttatttgaaaagataaaatatgataaggcaaaatagatattatttcttctagaacaaccactagaaagtaagatagaggaataaatcaaagatatcttaatgatggaagagccagacaaaataatttgtttttcctgtggagggtatttttcctcaaacattttgccattgtagcaggtctgagtctttattttccaccctctggagtgcatgtct

SEQ ID NO: 287876 - DNA, 622 bp, Homo sapiens
tccccactgtataaaccctcaattttattaggccagagataaatttaagactgatcttccatctgctcaggtgcaacacccaaataaaaccttctttcctggaagtactcattgtctcagtgactggctttctgtgcagcaatcagcaggatctagaccaaacccctggtgcttcagtaacaccaaacctggaccaaatcatggaacacttctctgagaactctgaaaattaaaatgtaatttataatttaaccaattaattcagcagagaaaagaactgggaatatgaggatatgataaataaaagtaggaagacaattttgctcataagcatatgaaactatgtatagtaaaactggaattaggaaaataaaaatcacagtaaaatgatctattaattcttcagcatctgattagtcatagctttaaagtttggttaatatcaaatattgccaagaatgtggaaaatcaaaaactctcatttactgtagtggaatatatgtattagtatacactttggggtgggcaattayatagaaagtgcccaatcttattatgtgcttattcagcagttctcctcttatgaaaaatatccacatatctgcataatgtttatgtacaa

SEQ ID NO: 287877 - DNA, 584 bp, Homo sapiens
gagacggggtggaggtgtggtcttcagaattgagcttgggtcccaggggccatgaagaaggatccggattcccagaagagagcgtctgattgggaactcctgagaaaggtgtggggcatcagtaccaagggtcattggagcagccaggggtctggcccctggaacatttctgaggagtcttccctgccctgttagaaaattaaactccatcttccacacatgtcattggaaacagaatgtccagtaacgcgggaaagatggtccctttccccccgcacactgtccccagcaagaaccagagtgaggttggacagaaaaagcagcaggtggcagctccgttcctccacccagctggyccttcaggaagggaagtgactgattccagagactgtctccttcctgaatgaccccagggtgaagaggtacttccagaatggtccctgcagagggtgtggtaaaagttgaattggcctctcaagcgccaattgcaaggcctggaaggaccaagaggcttggaccagtccctggagggaggggactgtgatgtcagagagaccagagttcgaatagctccaactgcctga

SEQ ID NO: 287878 - DNA, 467 bp, Homo sapiens
tcatttacttaactaagataccaggtatctccaaactcttgggctacagctaaagccgcattcttttcattaaaggccagggtttgatctaacagtagcatgacatctctccaagcaaggtcgaaggtttgccctagaccctgtaggacatctatgtacctatcaggatcatctgaaaacttccccaggtctgccttgatcttctttaaatcagagagggagaaggggacatgtacccgggttgggccaaattcccctcccccracagcttgaaggggacataacaaatagcctgaggattcttgtggtcctttggagatttctttgcttatttctttctgggcaggagagattagaggaggattatcattaataggaaggggagctataggaaggctaggatatgggggtaagctgagaggtcctcctgtgggatgtaaattgcaagctttgcgtagttgtgtatt

SEQ ID NO: 287879 - DNA, 581 bp, Homo sapiens
tctcaccttgtgtatgatcgcttccagttaaagatctcctccaggttggaagaggaagagacttcccgcctctgcaaggctcccccacgacgacggcccccaaggaaggaagctctgtgcctgctcagccctttaatcctctcctccgttcggaagaactcagtcaaggcccggaaggactccaagatgacctcatggctccaggctggcaagggctcctggcgcaggaagccacagtggcctccgtggcgactgagcaggaggaagaagtaggggttgctgtggaagagttcagttgtcagagtgtggtctgggggtccacacacggggtcgtcagcactgcagatacacagcacaggcacggctgcctcatcgacatcccggagsgggtcgttgcggtcccagtaggcatcccagctgatggggaagcttttggtgtggcagaagagagcctcctcaaactctcgaagggaacggctcctgaacagtctgctggtgtccacagtgtcctccagggctgtggcatacctggcagcgaggtgtttagtggggaaggtgggaaagagagggaagaatgagaa

SEQ ID NO: 287880 - DNA, 534 bp, Homo sapiens
aaaaaaatttgcgtgagagagaggatgtcacactttcatgcaggctgtggtgtaggatttgaaattctattacaaacattgccatgtagcttctgtttctgtcacygcatagaaaccactcttgtcaaatttatccacaacctcaatctttccaaagctgacattttattcttcctcttctgtggcagcttagcagcatctggcacagttccttccttgaaagtcttctcagtcttggcttccagtagggtttcctgctacttctctgccctcttctcctcagtcctctttgtaggcttctcctaaactgcctgcatcagaaaggttggggtgtcccagcctttgacttgagatctcacttcttctctatcttcatttattctttaaattgttccattgctgtgaaaatctcctggatgctactaattccagtcctgaccactgaactgaattttgactcatatgtccagctacttacttgaaaacaccacttgagtgaataagcatctcaaaattgatttgtccaaatgaagt

SEQ ID NO: 287881 - DNA, 1069 bp, Homo sapiens
aaaaaaatttgcgtgagagagaggatgtcacactttcatgcaggctgtggtgtaggatttgaaattctattacaaacattgccatgtagcttctgtttctgtcactgcatagaaaccactcttgtcaaatttatccacaacctcaatctttccaaagctgacattttattcttcctcttctgtggcagcttagcagcatctggcayagttccttccttgaaagtcttctcagtcttggcttccagtagggtttcctgctacttctctgccctcttctcctcagtcctctttgtaggcttctcctaaactgcctgcatcagaaaggttggggtgtcccagcctttgacttgagatctcacttcttctctatcttcatttattctttaaattgttccattgctgtgaaaatctcctggatgctactaattccagtcctgaccactgaactgaattttgactcatatgtccagctacttacttgaaaacaccacttgagtgaataagcatctcaaaattgatttgtccaaatgaagtwaaaaaaatttgcgtgagagagaggatgtcacactttcatgcaggctgtggtgtaggatttgaaattctattacaaacattgccatgtagcttctgtttctgtcactgcatagaaaccactcttgtcaaatttatccacaacctcaatctttccaaagctgacattttattcttcctcttctgtggcagcttagcagcatctggcacagttccttccttgaaagtcttctcagtcttggcttccagtagggtttcctgctacttctctgccctcttctcctcagtcctctttgtaggcttctcctaaactgcctgcatcagaaaggttggggtgtcccagcctttgacttgagatctcacttcwtctctatcttcatttattctttaaattgttccattgctgtgaaaatctcctggatgctactaattccagtcctgaccactgaactgaattttgactcatatgtccagctacttacttgaaaacaccacttgagtgaataagcatctcaaaattgatttgtccaaatgaagt

SEQ ID NO: 287882 - DNA, 1163 bp, Homo sapiens
ttgttttcccatagaatacaacaggctgaagttcccttcattatacaaattaataaaattcaaactatataaaatatatattagtcatcaatgattaattcatctatatctgggtaccaaaggtctggactacttaaaccatgtagattcaaaattctagattgggaaaaattataaggaaaacctgaagctttcatatagtgtgaaaattattcagcacatatgggtaatttttgatgtttgcaataagcaggaagatctctaatggagatgactttatgactttgtttaggaacagcagaaaaataarcattttaaagtgctgttatataaaaataaaacaacagttatttctctatgttttgaaagctaaaactaaataaatgatagtaggagcagaggtgctttgttacaagtgcttctcaagcacttacaattaatacctttaatggcggagggaaaaaatactgcttcaacaatataaagatatagcagttcacagtggcaaccaagcaagatgttactttgaaatgccctgcttwcagacagcagagactttgtctttttgtacatagctaggcatttgatgcttataacagtgacttctcaataattatgcattgccaggaaagataattactttaaaaatttatttaggaaattattcagcaaatagtaaataaatagtattagttggttgctattatttctgaatatcttcagtttccctcaattttctcatctgaaatgtggagacatgtatttcacagcagcattgtgagagacaatagactcaatatagatwaaattctccaaagaccaacactttatctagctcatatgttctgcatgagtattcatttatttaattactgtatctttttaactcattatgactaaaattaaatatttttttctctttcaagacgttatgcttctcctatgttcccaatatgctggacatcaggtgtgggtaataacagtaccatgattttcctttggagactccaaatcctcagtccaaatgactttattccacttataactccatagaagccatgaaatccagacctcagtacagacggtgacttccatgaacttagctaaaatttttggacaaagtttactccctctggattctaaatggatagggtaatgttgct

SEQ ID NO: 287883 - DNA, 621 bp, Homo sapiens
cagacagcagagactttgtctttttgtacatagctaggcatttgatgcttataacagtgacttctcaataattatgcattgccaggaaagataattactttaaaaatttatttaggaaattattcagcaaatagtaaataaatagtattagttggttgctattatttctgaatatcttcagtttccctcaattttctcatctgaaatgtggagacatgtatttcacagcagcattgtgagagacaatagactcaatatagattaaattctccaaagaccaacactttatctagctcatatgttctgcatgagtattcatttatttaattactgtatctttttaactcattatgactaaaattaaatatttttttctctttcaagacgttatgcttctcctatgttcccaatatgctggacatcaggtgtrggtaataacagtaccatgattttcctttggagactccaaatcctcagtccaaatgactttattccacttataactccatagaagccatgaaatccagacctcagtacagacggtgacttccatgaacttagctaaaatttttggacaaagtttactccctctggattctaaatggatagggtaatgttgct

SEQ ID NO: 287884 - DNA, 621 bp, Homo sapiens
cagacagcagagactttgtctttttgtacatagctaggcatttgatgcttataacagtgacttctcaataattatgcattgccaggaaagataattactttaaaaatttatttaggaaattattcagcaaatagtaaataaatagtattagttggttgctattatttctgaatatcttcagtttccctcaattttctcatctgaaatgtggagacatgtatttcacagcagcattgtgagagacaatagactcaatatagattaaattctccaaagaccaacactttatctagctcatatgttctgcatgagtattcatttatttaattactgtatctttttaactcattatgactaaaattaaatatttttttctctttcaagacgttatgcttctcctatgttcccaatatgctggacatcaggtgtgggtaataacagtaccatgattttcctttggagactccaaatcctcagtccaaatgactttattccacttrtaactccatagaagccatgaaatccagacctcagtacagacggtgacttccatgaacttagctaaaatttttggacaaagtttactccctctggattctaaatggatagggtaatgttgct

SEQ ID NO: 287885 - DNA, 603 bp, Homo sapiens
tatatatatattgcagttgttgtaaaagggattaagttcttgatttgattctcagcttgattgttgttggtgtatagcagtgctaatgatctgtgtatattgatgttttgtgtcctcaaacttaagtgaatttatcagatctaggagctctttagatgagtctttagagttgtctagatacacaattatatcattggaaatcagtgacagtttgacctcctctttactgacttggatgccctttctttcttttgtctgattgctctggctaggacttccagaactatggttaatagatgtggtgagtgggcatcatattctcacggggaatgcttttaaaattgccctgttcagtctgatgtcagctgtgggtttgttatagatggcttgtatcacctagaggtatgccccttctatgccaaatttgctgagaattttaaccataaagggattctgaattttgccaaatsctttttctgtctattgagatgatcatataatttttgtttttaattatgtttatgtgatgtatcacctttatgacttgtttatgttaaactatccctgcatccctggtataaaccccacttgaaatctttagat

SEQ ID NO: 287886 - DNA, 480 bp, Homo sapiens
aactaaactaaggaaaagagaaagaatactgaaataaaatcatagatgaggstaggcatggtggctcacacctgggatcctagcactttgggaggccgaggccttttggatcacttgaggtcaggagttcgagatgagcctggccaacacggtgaactctctctgctaaaaaacacaaaaaagttacctgggtgtggtgggaggtacctgtaatccagctactgaggaggctgagggaagagaatggcttgaacccgggaggtggaggttgcagtgagtcaagatcatgccactgcactccaacctggatcacagagggagactctctatgacatgcttgaactttctgacttgtcctatctttccctatttcctaaataattagtcattctactttaggacaagaatttgccatacaagatcctctctcatataacatttcttcataacatttctaaccataaacacatcttcatatcc

SEQ ID NO: 287887 - DNA, 480 bp, Homo sapiens
aactaaactaaggaaaagagaaagaatactgaaataaaatcatagatgagggtaggcatggtggctcacacctgggatcctagcactttgggaggccgaggccttttggatcacttgaggtcaggagttcgaratgagcctggccaacacggtgaactctctctgctaaaaaacacaaaaaagttacctgggtgtggtgggaggtacctgtaatccagctactgaggaggctgagggaagagaatggcttgaacccgggaggtggaggttgcagtgagtcaagatcatgccactgcactccaacctggatcacagagggagactctctatgacatgcttgaactttctgacttgtcctatctttccctatttcctaaataattagtcattctactttaggacaagaatttgccatacaagatcctctctcatataacatttcttcataacatttctaaccataaacacatcttcatatcc

SEQ ID NO: 287888 - DNA, 961 bp, Homo sapiens
aactaaactaaggaaaagagaaagaatactgaaataaaatcatagatgagggtaggcatggtggctcacacctgggatcctagcactttgggaggccgaggccttttggatcacttgaggtcaggagttcgagatgagcctggccaacacggtgaactctctctrctaaaaaacacaaaaaagttacctgggtgtggtgggaggtacctgtaatccagctactgaggaggctgagggaagagaatggcttgaacccgggaggtggaggttgcagtgagtcaagatcatgccactgcactccaacctggatcacagagggagactctctatgacatgcttgaactttctgacttgtcctatctttccctatttcctaaataattagtcattctactttaggacaagaatttgccatacaagatcctctctcatataacatttcttcataacatttctaaccataaacacatcttcatatccwaactaaactaaggaaaagagaaagaatactgaaataaaatcatagatgagggtaggcatggtggctcacacctgggatcctagcactttgggaggccgaggccttttggatcacttgaggtcaggagttcgagatgagcctggccaacacggtgaactctctctgctaaaaaacacaaaaaagttacctgggtgtggtgggaggtacctgtaatccagctactgaggaggctgagggaagagaatggcttgaacccgggaggtggaggttgcwgtgagtcaagatcatgccactgcactccaacctggatcacagagggagactctctatgacatgcttgaactttctgacttgtcctatctttccctatttcctaaataattagtcattctactttaggacaagaatttgccatacaagatcctctctcatataacatttcttcataacatttctaaccataaacacatcttcatatcc

SEQ ID NO: 287889 - DNA, 1187 bp, Homo sapiens
taatacagctataaataagggtgtacaaataatctctagaagaccctgtyttcaattcttttgagtatatactgagaagtgcaattgctggatcacatgctaattctatttttaatttgttcaggaaacaacgtactgttttctacagtagctgtaccattttacattcccactaaccatgcagaagccttccagtttctccacatccttgccaacacttgttattttctatttttattttattttatagatgccatcctaatgggtgtggagtggtatctcaatgcagttttgatatacatttccctaatgactagtgataatgagtatcttctcgtgcttattggccattttctatcttctctgaagaaatgttcctttaagacttttgcttatttttgtattaaattgttgtttgttgttgagttttagaagttctttatatattctggatattaatcactttatttgcaaatattttctcccattctgtgggttgcatttttactttgttgataatgtatttagatgcacaaaatttgtaattttcgtgaagtccagtttgtctattttaaaaattttgttgcctgtgtttttgwtacaaataatctctagaagaccctgttttcaattcttttgagtatatactgagaagtgcaattgctggatcacatgctaattctatttttaatttgttcaggaaacaacgtactgttttctacagtagctgtaccattttacattcccactaaccatgcagaagccttccagtttctccacatccttgccaacacttgttattttctatttttattttattttatagatgccatcctaatgggtgtggagtggtatctcaatgcagttttgatwtacatttccctaatgactagtgataatgagtatcttctcgtgcttattggccattttctatcttctctgaagaaatgttcctttaagacttttgcttatttttgtattaaattgttgtttgttgttgagttttagaagttctttatatattctggatattaatcactttatttgcaaatattttctcccattctgtgggttgcatttttactttgttgataatgtatttagatgcacaaaatttgtaattttcgtgaagtccagtttgtctattttaaaaattttgttgcctgtgtttttggtgtcatattcaa

SEQ ID NO: 287890 - DNA, 598 bp, Homo sapiens
taatacagctataaataagggtgtacaaataatctctagaagaccctgttttcaattcttttgagtatatactgagaagtgcaattgctggatcacatgctaattctatttttaatttgttcaggaaacaacgtactgttttctacagtagctgtaccattttacattcccactaaccatgcagaagccttccagtttctccacatccttgccaacacttgttattttctatttttattttattttatagatgccatcctaatgggtgtggagtggtatctcaatgcagttttgatatacatttccctaatgactagtgataatgagtatcttctcgtgcttattggccaytttctatcttctctgaagaaatgttcctttaagacttttgcttatttttgtattaaattgttgtttgttgttgagttttagaagttctttatatattctggatattaatcactttatttgcaaatattttctcccattctgtgggttgcatttttactttgttgataatgtatttagatgcacaaaatttgtaattttcgtgaagtccagtttgtctattttaaaaattttgttgcctgtgtttttg

SEQ ID NO: 287891 - DNA, 1154 bp, Homo sapiens
ggggcagtgcagtcactgcaagatggtcttttcatcctctttaatgtgttttctcttgtttttaagctaaaacccggttctgtgatctgtcacctgctttctttagctcttgtgaaggtactatcttgcttggattgttggacggtggttcaatgtaatattcttgcagagacrcagtcactgagattctatcctccatctcgctccacctcttctcatttatttagttcttcttcagtttatttcaacaatattttggaggtttcagagtattcgttttgaactgctcttgttaatttctaaatttattacttgttttgctgctattataaatgggattgtttctttaatatcattttaaggcagttcattgacagtatatggaaataaaattaatttttaatattgcatttatatctggaaaccatgccaaatttattaatttgaatactgttttactgaatttcttagaattacatatatatgagatcatgccatctgtaaatataaataattttattttttttcaatcaggatgttttcagttttctattctttactaaatacacctcgctagaatccacagtataatgttgagtagaatttgcaagagtggacattcttggaawttttaatttctcctttagactattttagtttctgtcattctaggacttcattctatctaggctatcttactttttcggcataagatttttcattgcattctcttttaatcatatttattttgtaatactgccagtgatgtgttctcttttattgccgattttagtaatttgagtctcttctctttttttcttgcttagcctaagtaaacatttgccaattcttttatctttccaaacatttaattttggtttattgattttctctgtttcgtattccctatctttctgttatcctaactctattttccccccatctttattttatttatttatttatttwttttttttttgagatggagtctgtcaccaggctggagtgcagtggcttgatcttggctcactgcgacttcccactccctggttcaagtgattctcctgcctcagtctccctagtagctgggattacaggcacacgccaccaggcccagataatttttgtatttttagtagagacagggtttcacc

SEQ ID NO: 287892 - DNA, 1139 bp, Homo sapiens
gtgcttttccttggcactgatgctaccgctagatcacagtctgctaggtaatgggcaccttcccagacgctgacgttactgctagaccaaggatccctctgatggccccrtctgggcataacagaaggctcacgctcttgtcttctggtcacttctaaccatgtcccttcagctcctatctctgtatggcctggtttttcctaggttatgattgtagagtgaagattgttataatattggaataaagactaatttttacaaactaatcattaatgatactcacatataatcatatctatgatctacatctagtatacctattcttattttatatattttctttattatactggaacagctcgtgccctcggtctcttgcctcggcacctgggtggcttgctgcccacaagaggatgactgtggtgccttgtgctgagacataagaccttctagagtagcagagggtgcggaagaaggtacagggtaacctggctttccacctagtgcatgtgaggtgcctgtggattgtccagggaagggatatgggaggtggttttgtgcgtggttctwgtgcttttccttggcactgatgctaccgctagatcacagtctgctaggtaatgggcaccttcccagacgctgacgttactgctagaccaaggatccctctgatggccccgtctgggcataacagaaggctcacgctcttgtcttctggtcacttctawccatgtcccttcagctcctatctctgtatggcctggtttttcctaggttatgattgtagagtgaagattgttataatattggaataaagactaatttttacaaactaatcattaatgatactcacatataatcatatctatgatctacatctagtatacctattcttattttatatattttctttattatactggaacagctcgtgccctcggtctcttgcctcggcacctgggtggcttgctgcccacaagaggatgactgtggtgccttgtgctgagacataagaccttctagagtagcagagggtgcggaagaaggtacagggtaacctggctttccacctagtgcatgtgaggtgcctgtggattgtccagggaagggatatgggaggtggttttgtgcgtggttct

SEQ ID NO: 287893 - DNA, 364 bp, Homo sapiens
ttctcaacataacacatcaaaacttatactcccttaaatattaaaaaataatacaaatgtaagcaatattttaaatacaatatttaattgttagatacattaggtatattatattacttataacattccattatataaaaattcatttgtctatttattcagattaaacaactattaaggctgaatgtctcatgcctgtaaccccagcactttgagaggytgaggcgggcagaacacttgagcccaacagttaaagaccagcctgggcaacaaggcaaaaccctgtctctacaaaactcagccgagcatggtgacacaggtctatggtgacatagctctactgtttcaactacttggatggctg

SEQ ID NO: 287894 - DNA, 364 bp, Homo sapiens
ttctcaacataacacatcaaaacttatactcccttaaatattaaaaaataatacaaatgtaagcaatattttaaatacaatatttaattgttagatacattaggtatattatattacttataacattccattatataaaaattcatttgtctatttattcagattaaacaactattaaggctgaatgtctcatgcctgtaaccccagcactttgagaggctgaggcgggcagaacacttgagcccaacagttaaagaccagcctgkgcaacaaggcaaaaccctgtctctacaaaactcagccgagcatggtgacacaggtctatggtgacatagctctactgtttcaactacttggatggctg

SEQ ID NO: 287895 - DNA, 557 bp, Homo sapiens
atgaagtgttttatataaactcttcatggacaactcataaaacacacaaaaatcccttcgcaatacaaattttgagaacataaatttaaatttctatgtttccacaatttatatttttaaatcagatacagtcttgttatgttgcccaggctgttctcaaactcctgggctcaagcaatcttcctgcatcaaactcccaagtagcagggactacaggtgtacaccaccacactcagctatttttctacaatttttaatattattttagtctcactayagaaccaataatataagtagagaaacaatctctcctaaaaactatatgataccaaaataataagtttccaagaagaaaagctatatgctatgtgccgaacctttttgcaactaaaagttaccaggattccatgattactgcaaataatttgatccactgaagagttatacaggcataaatattatgaaagtcacactcacaggatttaaaactcaaagtattagtatttatccaaataaagcttaatcaaatttcatatttcctctattggagaaagcat

SEQ ID NO: 287896 - DNA, 557 bp, Homo sapiens
atgaagtgttttatataaactcttcatggacaactcataaaacacacaaaaatcccttcgcaatacaaattttgagaacataaatttaaatttctatgtttccacaatttatatttttaaatcagatacagtcttgttatgttgcccaggctgttctcaaactcctgggctcaagcaatcttcctgcatcaaactcccaagtagcagggactacaggtgtacaccaccacactcagctatttttctacaatttttaatattattttagtctcactacagaaccaataatataagtagagaaacaatctctcctaaaaactatatgataccaaaataataagtttccaagaagaaaagctatatgctatgtgcygaacctttttgcaactaaaagttaccaggattccatgattactgcaaataatttgatccactgaagagttatacaggcataaatattatgaaagtcacactcacaggatttaaaactcaaagtattagtatttatccaaataaagcttaatcaaatttcatatttcctctattggagaaagcat

SEQ ID NO: 287897 - DNA, 306 bp, Homo sapiens
cataaattttgttacctaaactggaagaaaactgatgacctaaaacaaggtagaaagatccactgtctcttttccatratctatctctggttaaaagactaatctgcatcacttcaaattggcagtcttgattcctcaacatggaacccacttaggaatgtcctattgctttcctttgccctaaatcggtacaggaaatcccatgcaatatttgaaaggtatgaaagctacatgtacaaaaatcaaataaaaaaagtgtatgttcttattgagaatacttttcccagaaagattaaaatattagca

SEQ ID NO: 287898 - DNA, 626 bp, Homo sapiens
acaaggtagaaagatccactgtctcttttccataatctatctctggttaaaagactaatctgcatcacttcaaattggcagtcttgattcctcaacatggaacccacttaggaatgtcctattgctttcctttgccctaaatcggtacaggaaatcccatgcaatatttgaaaggtatgaaagctacatgtacaaaaatcaaataamaaaagtgtatgttcttattgagaatacttttcccagaaagattaaaatattagcaattataaaatcccattattttcactctataggtcctactttattcaggtccacataaattagcaagcccttaaaaattttcataggcactcagacacccaaggagagagactgccagaaaaacagagtcctggtagttgtacctctatttccctaagtactatctaagtatctgtcttcctatgggctcccacttccagattccacttctgcagggctccacagaagtctccaatcttcaaatcttcagcctatgaaagcacagattcctgaaaggatggcctcaaatgaccaggagtaggagccctctatatccctgctcctgaaaaacaagctaactggagtctccatcacctgcacccagc

SEQ ID NO: 287899 - DNA, 626 bp, Homo sapiens
acaaggtagaaagatccactgtctcttttccataatctatctctggttaaaagactaatctgcatcacttcaaattggcagtcttgattcctcaacatggaacccacttaggaatgtcctattgctttcctttgccctaaatcggtacaggaaatcccatgcaatatttgaaaggtatgaaagctacatgtacaaaaatcaaataaaaaaagtgtatgttcttattgagaatacttttcccagaaagattaaaatattagcaattataaaatcccattattttcactctataggtcctactttattcaggtccacataaaytagcaagcccttaaaaattttcataggcactcagacacccaaggagagagactgccagaaaaacagagtcctggtagttgtacctctatttccctaagtactatctaagtatctgtcttcctatgggctcccacttccagattccacttctgcagggctccacagaagtctccaatcttcaaatcttcagcctatgaaagcacagattcctgaaaggatggcctcaaatgaccaggagtaggagccctctatatccctgctcctgaaaaacaagctaactggagtctccatcacctgcacccagc

SEQ ID NO: 287900 - DNA, 576 bp, Homo sapiens
tataggtcctactttattcaggtccacataaattagcaagcccttaaaaattttcataggcactcagacacccaaggagagagactgccagaaaaacagagtcctggtagttgtacctctatttccctaagtactatctaagtatctgtcttcctatgggctcccacttccagattccacttctgcagggctccacagaagtctccaatcttcaaatcttcagcctatgaaagcacagattcctgaaaggatggcctcaaatgaccaggagtaggagccctctatatccctgctcctgaaaaacaagctaactggagtctccatcacctgcacccagcatagacacactaccaactacccaastgaactccatgactgatttgccagccaatcatgcccctgacccagcctacatggacatgggaaggacatcagtgaatcgggaacagaggcagaggtgaagaggccacctgtcctgggccacacatctatgtagtccagcaatctccagccccttagtactccaggggctctaagccacccctctgaaagtcaggacggaagtagatgacacta

SEQ ID NO: 287901 - DNA, 586 bp, Homo sapiens
taatctgattcagacctataccttgatccaagtgctgcatggatgtctatcaatctatgctgaggagcaagagaagggatttggaagccaggcaggctgacggtccaactgtaggccagctactttgttaactatgagattataaggcaattaatcaactgctctaatccatagttgtttatttaataaacagtaggttataggaacacagatgttgtgatggctttatgagatgataaatgcatagaacatattaggatgtctagcccagaatataacactcaacagatactagtttcttccatctatgttttcttagttaacataattctttaaatctataaaatcctacctgactgcagattcatcagaacttccaacatctattraagaaaaaggtagaatgcattttaaatcaataataaatgtacagaatattaaaagcataagaatgcacagtgatgcatgcctgcaatccaaactactcgggaggatgaggcaggaggatcacttgaggaatctagaagtttgagaacagcttgggaaacatagtaagacactaccttcataaaaaaagttgtgcaca

SEQ ID NO: 287902 - DNA, 589 bp, Homo sapiens
gcaatcccaactaatattggttaaagaacagacaaacacgggtctcaaaggataacttaccatgaatgcctaggctaagtctagcttagatgtgggctccaaataaggtttttastgtagggtgaggatcaacttgctcgacatttgtgtgggtaaagctaggaggcctagctgccagatcagggtgctgggaacaacgactgagcataagtacataaattaataaacaccgtagctttgaactctatgtatgaatcaccacaaaaactgaggggtctgaatgagtgaaggcatcctggtggcaaaggtcaatcattatcagattgcaggactggttacaatggcaacaatacaggaagtgagtccatggaaacaacagaaagatcagaatggcctttttcccccttcttctgacttgtaaagaaagattgccttccttggacttaggaaaccccttagcttcttggaaaattcaaagaaggaagacacaggagatagccccacgggaaaatacaagattttctgctaaattggacatttcaagacccaataactaattagaaaagtcaggccaggcatggtggctagc

SEQ ID NO: 287903 - DNA, 1179 bp, Homo sapiens
gcaatcccaactaatattggttaaagaacagacaaacacgggtctcaaaggataacttaccatgaatgcctaggctaagtctagcttagatgtgggctccaaataaggtttttagtgtagggtgaggatcaacttgctcgacatttgtgtgggtaaagctaggaggcctagctgccagatcagggtgctgggaacaacgactgagcataagtacataaattaataaacaccgtagctttgaactctatgtrtgaatcaccacaaaaactgaggggtctgaatgagtgaaggcatcctggtggcaaaggtcaatcattatcagattgcaggactggttacaatggcaacaatacaggaagtgagtccatggaaacaacagaaagatcagaatggcctttttcccccttcttctgacttgtaaagaaagattgccttccttggacttaggaaaccccttagcttcttggaaaattcaaagaaggaagacacaggagatagccccacgggaaaatacaagattttctgctaaattggacatttcaagacccaataactaattagaaaagtcaggccaggcatggtggctagcwgcaatcccaactaatattggttaaagaacagacaaacacgggtctcaaaggataacttaccatgaatgcctaggctaagtctagcttagatgtgggctccaaataaggtttttagtgtagggtgaggatcaacttgctcgacatttgtgtgggtaaagctaggaggcctagctgccagatcagggtgctgggaacaacgactgagcataagtacataaattaataaacaccgtagctttgaactctatgtatgaatcaccacaaaaactgaggggtctgaatgagtgaaggcatcctggtggcaaaggtcaatcattatcagattgcaggactggttacaatggcaacaatacaggaagtgagwccatggaaacaacagaaagatcagaatggcctttttcccccttcttctgacttgtaaagaaagattgccttccttggacttaggaaaccccttagcttcttggaaaattcaaagaaggaagacacaggagatagccccacgggaaaatacaagattttctgctaaattggacatttcaagacccaataactaattagaaaagtcaggccaggcatggtggctagc

SEQ ID NO: 287904 - DNA, 501 bp, Homo sapiens
aagaaaagaaaggaaaagaagtaaaaaatgtggctctttttatcccatgcatggggattatacttagaataaaatgaacaacattgagatccctagggataaaggtcttaaaaatcctgaaaacatcttgcactctacttctaactaatctagacttctgcttgatttctggctaaaaggtagactaactcattgctatttcaaaccatctgaacaaaactaggaactctcacctaatgtataagatggaatagttgcaattattttaaacttcaattcaatattaactggccttttaacataaacacttactttgtcaaacrgcgagaaatagtgtaatcttctgcatcttgtccacacgtcttgagtaaagacattaatattttgtttaagaaggatgttgacaatacccggtgagtcatagtgcacagcaagcataagggctgttctaaaataacaaggaaatcactccactcaagaactttaataaagactttttta

SEQ ID NO: 287905 - DNA, 501 bp, Homo sapiens
aagaaaagaaaggaaaagaagtaaaaaatgtggctctttttatcccatgcatggggattatacttagaataaaatgaacaacattgagatccctagggataaaggtcttaaaaatcctgaaaacatcttgcactctacttctaactaatctagacttctgcttgatttctggctaaaaggtagactaactcattgctatttcaaaccatctgaacaaaactaggaactctcacctaatgtataagatggaatagttgcaattattttaaacttcaattcaatattaactggccttttaacataaacacttactttgtcaaacagcragaaatagtgtaatcttctgcatcttgtccacacgtcttgagtaaagacattaatattttgtttaagaaggatgttgacaatacccggtgagtcatagtgcacagcaagcataagggctgttctaaaataacaaggaaatcactccactcaagaactttaataaagactttttta

SEQ ID NO: 287906 - DNA, 653 bp, Homo sapiens
catgcatggggattatacttagaataaaatgaacaacattgagatccctagggataaaggtcttaaaaatcctgaaaacatcttgcactctacttctaactaatctagacttctgcttgatttctggctaaaaggtagactaactcattgctatttcaaaccatctgaacaaaactaggaactctcacctaatgtataagatggaatagttgcaattattttaaacttcaattcaatattaactggccttttaacataaacacttactttgtcaaacagcgagaaatagygtaatcttctgcatcttgtccacacgtcttgagtaaagacattaatattttgtttaagaaggatgttgacaatacccggtgagtcatagtgcacagcaagcataagggctgttctaaaataacaaggaaatcactccactcaagaactttaataaagacttttttaaacagctagtttgatacactttaccaatttaatatccacctgtcagtgtagacataataacattttgcatgtactagcttgggtctataagcatctagggtgctcaggtgttcatctttataaattgtcaccaagtctaaaagaaaaggacaataaggaagcctcctgtcccactggggtatgatataatacaagtt

SEQ ID NO: 287907 - DNA, 501 bp, Homo sapiens
aagaaaagaaaggaaaagaagtaaaaaatgtggctctttttatcccatgcatggggattatacttagaataaaatgaacaacattgagatccctagggataaaggtcttaaaaatcctgaaaacatcttgcactctacttctaactaatctagacttctgcttgatttctggctaaaaggtagactaactcattgctatttcaaaccatctgaacaaaactaggaactctcacctaatgtataagatggaatagttgcaattattttaaacttcaattcaatattaactggccttttaacataaacacttactttgtcaaacagcgagaaatagtgtaatcttctgcatcttgtccacacgtcttgagtaaagacattaatattttgyttaagaaggatgttgacaatacccggtgagtcatagtgcacagcaagcataagggctgttctaaaataacaaggaaatcactccactcaagaactttaataaagactttttta

SEQ ID NO: 287908 - DNA, 581 bp, Homo sapiens
catttattgagccaataacaagaaagcacattaataaggatattacatgtattatttaattttcataacaagcctatgagttaaaaattactattatttttattttactgatgagggaactgaggtttagtgaggttgagtaactgtccactcaaatagtaagaaacagaaccaaaactsaacgtcctccttatgtcagtttgtttacaaagttttatgatatatttttaaaggctctattctttacagaagagtgcacgtcctttaaaaattcatgcgcatcctattgtgcaaaagtttccttaggtatatagcgataagtggtactgacagatcacaggaaatacgcatgttcaacttcactatgaaatgccaatcagcattccgcagaagtgttacaatttacaccctcatcaaaagtgaaggagagtttctgtggccccacattcttgccagcacctgatacattctcatagttcaattttctctaattttatagttttaattttctttaccctggttaatgagattgaatatcttttcaaatattgatagaacatttttgttttgtcatctttgaa

SEQ ID NO: 287909 - DNA, 581 bp, Homo sapiens
catttattgagccaataacaagaaagcacattaataaggatattacatgtattatttaattttcataacaagcctatgagttaaaaattactattatttttattttactgatgagggaactgaggtttagtgaggttgagtaactgtccactcaaatagtaagaaacagaaccaaaactgaacgtcctccttatgtcagtttgtttacaaagttttatgatatatttttaaaggctctattctttacagaagagtgcacgtcctttaaaaattcatgcrcatcctattgtgcaaaagtttccttaggtatatagcgataagtggtactgacagatcacaggaaatacgcatgttcaacttcactatgaaatgccaatcagcattccgcagaagtgttacaatttacaccctcatcaaaagtgaaggagagtttctgtggccccacattcttgccagcacctgatacattctcatagttcaattttctctaattttatagttttaattttctttaccctggttaatgagattgaatatcttttcaaatattgatagaacatttttgttttgtcatctttgaa

SEQ ID NO: 287910 - DNA, 581 bp, Homo sapiens
catttattgagccaataacaagaaagcacattaataaggatattacatgtattatttaattttcataacaagcctatgagttaaaaattactattatttttattttactgatgagggaactgaggtttagtgaggttgagtaactgtccactcaaatagtaagaaacagaaccaaaactgaacgtcctccttatgtcagtttgtttacaaagttttatgatatatttttaaaggctctattctttacagaagagtgcacgtcctttaaaaattcatgcgcatcctattgtgcaaaagtttccttaggtatatagcgataagtggtactgasagatcacaggaaatacgcatgttcaacttcactatgaaatgccaatcagcattccgcagaagtgttacaatttacaccctcatcaaaagtgaaggagagtttctgtggccccacattcttgccagcacctgatacattctcatagttcaattttctctaattttatagttttaattttctttaccctggttaatgagattgaatatcttttcaaatattgatagaacatttttgttttgtcatctttgaa

SEQ ID NO: 287911 - DNA, 586 bp, Homo sapiens
cgagggttttatttcatgaagcagttgaaatcattattaatttttaaaattgatccttgggaacatgtctttttattttttatttttttatattcaatgtgacaaaataagaagtatgcatagaggttttactgcataccaaagtatgagacttttatcaagggaaagcacttctgaaattatttcaaaattatttccataaaggggctgaacaagcccctttaatggaacaacactttgccttgaaataacaattgacaggcatatagtggttattcsgacttggttatttggcagtcattttcccaaaaatgaacgaagtaagcctgccacatcaaagaaaacaactgatagtatttgtgaccaatgataaaattggaggcttcaagtaaaaattagaactgtggcaaacttctatgttacaccttgaatttgacccacttctcagtacttaaagactttttaatgagactggtgattttattaaataatgtgacttttaaaatattgtacaatggaatacatcaacattttgaagatccatataactcagtgagctaatattttccaaatgtgtgatgttaca

SEQ ID NO: 287912 - DNA, 629 bp, Homo sapiens
ggttcactgcagccataaaaaacaacaaaatcatgtcatttgcagcaacatgatgcagctggaaatcatcattctaagctaaacattgggtaaaggtggacataaacatgggaacaatagatatagggaaataacagagaggagaggatgggaaggagtgaaggttcaaaactacctgctgggggcttgggtacggtggctcatgcctataatcctaacacttggggaggccrcagtgggtggattgcttgagtccaggagttcgagatcagcctgggtaacagggcaaaacccagtctctacaaaaaatacaaaaattagcagggcatgtggcccaccactgtagtcccagctacccaggaggctgagctgggaggatcgactgagcccaagaggtcaaaactgcagtgaccagtgattgcaacattgcactccagcctggggagcagagacctaccctgtctcaaaacactaaaacaaaactacctactgggtgctatgcttactacctgggtgatgggatcaattgtaccccaaacctcatgtaatacacccatgtaacaaacctgcacactattattattgggagaaaaagagctaatttagaacaatatatatagcttgaccca

SEQ ID NO: 287913 - DNA, 1010 bp, Homo sapiens
ttataggcttcaagctcggttatcagtgagaaaatatttacctccatttgtctttatttctttgtgaaggtgcttgtgagtgaggattctgacagtgatggcattgtggcccacttccctgcccatgagaagccagtgtgctgcatggcttttaatacaagtggtaagttcgctctctgtcttttttttttttttttttgtagaccatttatataatgggttttccagccaaatatggaatatggaatctgacttttcttcatgtatcagtatatatcagaaaagttattaagtcattatattgaataaaggaatttataataaaaatttagtacccctctaaaatccytctaaaattggttttgttctcgataaagtagctattaaatagcagccatttaaacaatgctgttgagttacatgaatttctgtttataattactccaagaacttcagtattccaaactagaatattaatggatatgagcagtattttttttttgtaacttwggcctgaagaaagcaggattttctagggaagagagattatttcagagcaatttctgtggcaaaatgaaaactacacaatccacacaaatagtttttagtattacaatctttgagggttttcccatttatgaggacacctagaggagaaaagcaataattattwaacaattactgtattctatgagaggtgtgtgcctaacctccttcccttaaaaaaaaaaaagtcaagaggttcctgtgcccgtgaaaagagaaaattcctatttgatgaaaaaaaaaaaaaaaaaacccaccccataatgatgggggtttgtaaaagtggcacgagaaccaactgagatcccaatgtccaaaactgaacaatttgagcaacaaaataaattagtattggattataaacataaaataaatgtaggtatttatggccataatgacataaataaacgaatgaacccatcaataaatgggagagaagagatgaattcccaggcagtagaatt

SEQ ID NO: 287914 - DNA, 580 bp, Homo sapiens
ttttatcccattaccttattttattgtattcctagcaaacatcactatctaaaattctcattgatttaggtacctgtttattgtaattcgccatccccmctagaattatgcaccatgagggtggggaccttgtctgtcttgttcactgaggtatccccagtgcttgtaacattgcctggtatgtacagtaggtgttcaatacatgtttatggttgaattagtgaatgagaatattgaggcccatgaggcatataaactgctgaatcactaaaggtaagtataggttgtattttagggaggatattcctgccaatttttcatgataattaagtggtctatgggcaagggaatgaaccttctcttctggttattcaatcaatttgtggcaaggaaaagagactagcaatcatagctttttctcttgtaatgcctgtgtatataaactggtcatcatttatcagttctgcatacttttctttgcaacttgatgtgttatgtgcttgaacaacagtacgaagtgtactccttgcagataagagtctgaaatcgtggtaagtactcattacaatgagaacagctt

SEQ ID NO: 287915 - DNA, 565 bp, Homo sapiens
tgtgttattttctgtcatgtgattgataatgttttcctttctacattcttagtaaaagtagcagacttcaaagttaagaacttttcccactgacattcacaaatttcccagtcccaactgtcttctgtgttccrctgcacggtagcaatttttcctttaggagttttgagcccctttccttcccctgttccaatggcaagtacccaaatctgagttctgctacattctctcacaataaaagctttagttacatgcagcagttaccattaatccttcgatcagttcccctggtaggaactatgcaggaatctagagctggtggatttggggctgaccgacttggcctggtagaattaaggttcactgtttctctgttatttgaatataactttcttcttaattgggatctgatttttgtcctggatgatatcctgtttttaaattagagaggtggtcctaacactgagattttaatcagcaatacagaataagagtttaaaagtgattctttctcattggattatggatagattgatcgtgaattggcaccttgaaaatttctaaa

SEQ ID NO: 287916 - DNA, 522 bp, Homo sapiens
ttatgttggcattgggtaaaacatactcagtggatatacttcagaagaaggagcctgtagttaaatagactgggacattgtctttaaaaagtttcttcactatagggcaactcttaaggctgttggccacattttaggaaaacctgctttgtatagttgagttgtatccaccagaaccttaggctgtagacttttccctacatggytgtcaatgcctgctaacccagaagagctgttcagtcagaagacacagtatcaggcatgttaaaaaagatctgacactccctattctgtccgtgtgagtgcccctgcccagttgggaaggcctcacggtcatctttagcatcattatgtgagagtgttttggcagccctgcatgtcgtattctgaacaagagacatcatcactctgtactacagccagaatgctacactacaactggggcactgcacgatgctgtttgagtgatctaagggccatgggggtagccagaagaaaatctactactgcaccttacgaaat

SEQ ID NO: 287917 - DNA, 583 bp, Homo sapiens
taaaaggaatccgaatagaaaagaaagaagtgaaaatgtctctacttgcagatggtatgatattgtatagaaaaaatcctaatggctccacgaaaaaagtgttaaagctgataaatacacttagtaaaaattaaataaaaaacaaaccacaattgattggcacaattcaactagagagatacacgttgttgttgttttttctcatggcagttcattttattgctaaagaattaarccactagaaagtggctctttcttccaagctgaatccaaagctattttgtactttttcttctttgtaataaaagcatttcagactgacattttcctctgagtacaggttttactgcaagtcatcatagcagccagtaacagagcactcgcttttaaccattatacattctgccctttataggcttgatatatacttgtaacaatatgttttgaaatttctggagagctggaaagttatttttaattaaaaatataaaatatagggattaaattataacaaacacccaaaacacccatactcttttcgttttgtattaataactgcttttgtcacaaatgcatttacatg

SEQ ID NO: 287918 - DNA, 583 bp, Homo sapiens
taaaaggaatccgaatagaaaagaaagaagtgaaaatgtctctacttgcagatggtatgatattgtatagaaaaaatcctaatggctccacgaaaaaagtgttaaagctgataaatacacttagtaaaaattaaataaaaaacaaaccacaattgattggcacaattcaactagagagatacacgttgttgttgttttttctcatggcagttcattttattgctaaagaattaagccactagaaagtggctctttcttccaagctgaatccaaagctattttgtactttttcttctttgtaataaaagcatttcagactgacattttcctctgagtacaggttttactgcaagtcatcatagcagccagtaacagagcactcgcttttaaccattatacrttctgccctttataggcttgatatatacttgtaacaatatgttttgaaatttctggagagctggaaagttatttttaattaaaaatataaaatatagggattaaattataacaaacacccaaaacacccatactcttttcgttttgtattaataactgcttttgtcacaaatgcatttacatg

SEQ ID NO: 287919 - DNA, 624 bp, Homo sapiens
ggcgtcactgtgcctggatgaagcctatcttttgttcacagcttgcctcagcctacatctctccttggcttatagtatttaccctgatgactttaactatatgttggtggctctactctataccatcagtcctgaattatccctatgataaattaaatggctgttgaacagctccacatggatgtcttataggaatctcaaactcagcatttctaaaattgaactctcaatctcccactggagaacctgatcctccttctgtatccctgtctcagatgatggcaatcaccataagcccagaaagatgaatgtctattgagaccccttcttctccttgatgctcacgttaatcagctaattcctgctagtttcacttcccgagtagttctctaatttgtcctctcttctgcaacctgttatcattctagccaaggacctcatcatttgtcaccgagacgactgaaatgacctccaactagttttcctatctcgtcttcttcttacrcattacagccaaaatgatctagctcaagttcaaatcaaaccatgccattcctctgctctataagttatagagtgaaatccacatttcttaggctggctgcctataacttttcccttaac

SEQ ID NO: 287920 - DNA, 1169 bp, Homo sapiens
ctgcaggaggcatcttgttgcttggagggttggggaggtgatgcttaaacacataggccaactcagggccttgggcaccatgtggagcagtccaaactttgtgctggaaacacggggaggatacttgtgatactgcgtgtgtcagtccttctactggagagctggttctaaccatcatcaagtgagaggagaggaagccctcaggtggcaggtgtakctctattcggtgagaatgtcatggttgtcagtcatgctatagggttgccctccagtagaatgatctgatatgtctatgcagaaagtaatttggagggttttgacagtgtctcctgtgggcttctcggactgaataatggaatctcagaaggggatgtcccttagcaatcacctgttccaaccttctgacctccaggtctcaccagtcactagttttgtggtagattgcaggcatgtctggtgcgtccaacactagaaaagtcacggcattggacagggaatcccctgccaaccttgggggaaggagctggcgtgtagggccatgagttgctcaggttggatggtgtgccacctcatagcccttgcccwctgcaggaggcatcttgttgcttggagggttggggaggtgatgcttaaacacataggccaactcagggccttgggcaccatgtggagcagtccaaactttgtgctggaaacacggggaggatacttgtgatactgcgtgtgtcagtccttctactggagagctggttctaaccatcatcaagtgagaggagaggaagccctcaggtggcaggtgtagctctattcggtgagaatgtcatggttgtcagtcatgctatagggttgccctccagtagaatgatctgatatgtctatgcagaaagtaatttggagggttttgacagtgtctcctgtgggcttctcggactgaataatggaatctcagaaggggatgtcccttagcaatcacctgttccaaccttctgacctccaggtctcaccagtcactagttttgtggtagattgcaggcatgtctggtgcgtccaacactagaaaagtcacggcattggacagggaatcccctgccaaccttgggggaaggagctggcgtgtagggccawgagttgctcaggttggatggtgtgccacctcatagcccttgccc

SEQ ID NO: 287921 - DNA, 572 bp, Homo sapiens
acagcaaagcaggctgttagctcatcctcaaccaggctctcaccgctcagcagacggccgctggccatcgcttctttcmttaaattacatactaaatccttattttgaaggactggtttatttttttccttaaaaatcctttggtttatttacactaaatcaaaggtaaggtcagccctttgttctcatcccagattttatatactttttacggtattttatctttataaatattttatacatttatcttataaatatttcttatatttatatattatgtataatgtaatatgtattatataaatctatataagaaaatgcattttaattttaattaagtccctaaaaaattgacttttcagttccattcacatttctaaatacatttaagttggtgaaaaactctgaatacaaagaatagctgagactattactgacttgagggtaggaaacagaagtaggtttactggaaaaaaaaaaagcgattaaatgaaaatctgagatactgtgaaagccaggcctccacccctgtccccccaggtgataactaagtcatgaacgtttcagcaaac

SEQ ID NO: 287922 - DNA, 517 bp, Homo sapiens
ccctggtactgaggagagaggatggacggcctggaggctgcgctggctccctgcctgccatgccagttggctggttctgtcctttggtaggtagaggcagcagacatgtgcccatgagcatttcatgcagaggaggcgatgttgcctcccaatctccccatcstcccacaccagctcctctgcaggcgcctgtgaacctcagtgtgggcaagagggagacgaaacggttcagaacacaaaacgccaccccacaatgagcccttcagcatgttgactaattgtagctgaaggcacttgagaagcctcagctgcaaggctggctggctggctgacctcccgctctgtcccaaaaagcaggtcatgaaatcttccctaagaaacgtgcctgccctgtaccaggaagaggagaatgttcttatcaccaggggttcggagtccaccctgaaactgatctgtacaaacccaccaaaataacccttgtctttcattagtcactgccccacaatgactgccccta

SEQ ID NO: 287923 - DNA, 576 bp, Homo sapiens
actgagagaagataattacagcatatgaaactgacagatgattacttttacagaagtatataaagaatttttacaagtcaatgtcaaaaatacttggacaagctgggcatggtggtgcacacctaagcccaagctactcaggatactgaggcagaaggcttgctcgagcccaggagttcgaggctgcagagagctatgattgtgccactgtattccagcttgggagacacagtgagaccccatctctaaaaacaaacaaaaaatacttgggcagattcctcataaaagaggaaactcaaatggccagtaagggtgaaaagatgttccatctcattactaatcagaagaatgcaatttaaaaccatgttgtgatgctacttcaagstgccagattggcaaaaatgtaaaagctgatagcgtcaagtattggcgagaatatagaacagtgagaccattattccgttgctgatgggagtataaattgttaccaccctgttggaaaataggcattgcccagtaaaattgatcatgcccaaatattgcctactgactactctaccccctatagggttcaaa

SEQ ID NO: 287924 - DNA, 562 bp, Homo sapiens
aaaataccaaaatggtcctaggtcccaaaacagagatggtagcccaagactttacacactggtgaacctcagagtagaccactaaagaagaaaccatccaggttcatgacttaacatccagattcatttacgtgacatatacttgttgagtgcctacttggtgcagacactgtgctggaagtcaacagcaaaccaaagagataggaaaggccgactttcctgsgacttatatccagtacctccagtaccttatgaatatgaaagggaaccaaagaatgagaagctgacctgcctcacaccttcctctcagtgtttcttcacacaatgtatgttctcattcattcattgtctcactcatctatccattcattcattccatcaagtatacactgaacacaaactttgtgtgtgtgtggttttttggggctgtttgtttttgttttgtgtgtgtgtgacacagtctcactctgttgtcaaggctggagtgcagtggcgcgatctcggctcattgcaaacttgcctcctgggttcaaacgcttctccttcctcagcctcccaacta

SEQ ID NO: 287925 - DNA, 627 bp, Homo sapiens
gggtgagggtctgaccagtttgttggcatataatcaacacacaatgtcatctgtttctactgcaactcgatgtgatgtaggatgctgaagcataggagccatggctgcccgggtcagtcatcacagaggctcccggcgtatctgctgagtgaatgagtgaaccgacccacctcaacaggagcctgaggtgagtgacaccagggggcacagtggttactggcaggctgtgctgtagggcactggaaatccagctcctgggtctaactctgggtgtgaccctgggcaggactcacttcctcctaggtatgagttttctgcagcacgagatgctgggtcagggctccaaggtcccacctaatgcccgattcccatgaatccaygagcatcatagccatgatgcagagaggcttgcagactccagggagctcttgctttagcttagtagctcccacagaagacacatgccaccatagcctgctggttgaccccaaacttggagctcgtagactccagggagctcttgctttagcttagtagctcccacagaagacacatgccaccatagcctgctggttgaccccaaacttggagctcgtagactccagggagctcttgtttagcttagta

SEQ ID NO: 287926 - DNA, 531 bp, Homo sapiens
ttggaaaattgctgtttacacgtaagaactggccaaagccagtactaaccagagctgcaaagagcactccacctccctgcctctaaacagagagctggctttttgagttaaaaaaaattcccttttaaaaaatgtgtttgcatcagaaacggtcactaggaatgggaccactgtttgtatttttataaaataggataaagcaaatggsatgtgtgtgtgtgtgtgtgtgtggtgtgtgtgctgtgtgtgttttgtgtgtgtgttgaaggcagagtggggtaaggggaggttagaaaagagaaactacttttaaaaatgagattaaagggaaaacttaattccaacagcactggcctaaagatattcattatcacacaaggaaaacaaaaacaaaacaaacaccaaaaaaaccaaatatttcttaatcagaacaaatacatgaaaaggcaggaaatggctctggagagccttaaatgagtatgagaaaggcccacaggaattaaatcagctctggctattatcatgttcctt

SEQ ID NO: 287927 - DNA, 537 bp, Homo sapiens
ccccgtgggagccaagcctgccaagtgtggtgcctcaaatagcagcccccaaagctgtggggttcactgagtatcattcaagacagaagcaggaaagcatgtgtgtgaccacaagacctcagaaaggagatggggctgtacagagatcctggctggatgatcaagtcactaaggtcaaaggtaagggcaaagactcagtcaagagaaacaacagagcaccttcagctcatcaaaaaaaaagattaatgtattaatcggaacactaagcatttctcccttgagtattttctcttcctatttactgatcaaatctttgtgaatgaaagcacaatcctcttactggatcaagaacgacacatacacaaaagcccctcaactgaaaaatcaagtcgggcaggtcatgatttcacctttatgtgaacaggatrcaaccacaaaggcctggatagggagctggtggcgcagctcccaccagcgtcatcgttaataagtaagcagcagcggcctatgcaaagctctcctcgccctggcaagcac

SEQ ID NO: 287928 - DNA, 545 bp, Homo sapiens
gtcttgtggtcggccagatatctactcctctgtcactgctttctcttcatctatgttctcctccctcccacttccaccagtcactcctccatcatatctgggatcttgggcttaccaatatataagatctcaactctgagcattcaaaacatgagtgttacctcctattctttcaattccaaagcaatttaaacttcactgagatcttccatttgacaatcccttcactccctctgtggactgtyattacaatcaacttcccgatgccctctactccagtagaattccctgccaaaccctaacctgctttagtgtaagtatctttcttccttctgtctgtgtccaagcagaacttgattttaaaagtatcaatcactcaaccggactgactggtttcatcttaaatcatgactataaatctcaaatgagcaatgattctacagaccaatcctattcaggttcccccaattgcagtctgccagtgtgtcaggcagtggtcttgaagacagagaaatagaatttacctcatctgaacgacagaaaga

SEQ ID NO: 287929 - DNA, 647 bp, Homo sapiens
cgataactttaaaatatttggacctatggtgtgggtgccacttgcctcttaatcagtgttgggtaggagtagaacttgctacgggcaacctgtttccccacctgctgcactcctgtattatgacatgaggtttttaaaaataagtacaaacttatctgaaaggaagttggtccttcctggcccttcagcatagttttagctgctcctgttttgttctgttatcattattcttccactctcctattttgtgccgaagtaataagatgtttccatgggagtatgcatttgtcccaataaaaggacttttagtgaaccaatagaacaagtcccccaaacccacctccaagtcgcaatgatagtctcaccatgcaagaggaaaggtggttttaggtgcagcagcttatggggtgagacttgggaatgaggctcctgcgtcttacatggcacccactcatgcctgctgtgcaagtcaatttctatgtctgcccccaggcaatgtccagccacctactratcgtatgtgatggggggtgaggaggagatactttgcatggcccccagtgacaaagaagaggcccttagctatagctactcttgtgtgagtacaggggaggatttctcaaggagcagaaatagcttctccttga

SEQ ID NO: 287930 - DNA, 514 bp, Homo sapiens
ataaacagtcacttgccaaaataacaaatcagcttcctggaacatgcttgctcaaaaccaggagaggagcttagagacgtcagcttgacttctgcctcgtacgcaggaagggtgaccttcaaagatcaaacatcgtcccaaatctcccttcatcttgtartactcctgcttgtcgtagctcctgttaccatcaggtactgggccaaccatccgtcatgtcagaagagagttggggacaatccctggattatttcacctttgccctgctggtatagacaatgtgtgttatggctgggtgacttgctgacttttactctgagcaacagctttgtcagagtaaactaaaacagagacttcagagcataataaaatatgacattttttctgtatagaactaaagacacgggggagagagaacaacttaattaaaaagacagtgccctttcagtggcttttttttttttttttttttttttttaaggaaatggagtcttgctccgtcgccaggctggag

SEQ ID NO: 287931 - DNA, 644 bp, Homo sapiens
aaggacatcaatatatttcaacaatattgtccccatttcattatagcctctctacatttttttttgaaaaacaagactaaggtcagaaaaaatttcaatcagtcttgttaattctctttttgtttttttcygtccattctttgagctttctctaagttcaattttgaaataacatgtaccagtcacaatgctatcatctttaaggaagacaaaaccaattcagactgatctaaaaaggaccttgtagcctccacagtgccaacttggagatgaccctgaccaaggctggggcaccgtcctccaggatacagtatacacccttcctccagaatcttcttatagacctgcccttctactcccaaagtcgtagaacatatttttgggaaccaagaggtggaagtaggaatgaatctgcttacatccctccttggggggacttatcaacactggtgggcagagattctcccagtggttggagttttcagtagctcacttggaaatctttgtgtgaagaaagaagaagttcgatgtaagactatacttgaatttatgggtaatgtgtgatttggcttgggagtcttaagggagatgggttaggagagtgggaaagaggtggtctggggagaaggcatggatgggtctat

SEQ ID NO: 287932 - DNA, 557 bp, Homo sapiens
attagggcccatccatatggccttatttaactttataattacctctgtaaaagccctatcctcaaataaggtcacattctgaagcattgagaattagacttcaacagatgaactttgggagccacaattagcctataacagggggttaacacacatggggccactgtcagcacctggcatcaccttcttgctcaccttgggcactggtggccatgcctgcccctggccttcccaccatctctgtacctttcctcgtcgaagtgcttgggcccttcaccctttccaagtcctcatatttgccagatgatagatgtctgtatcattttttaaagattcatacattgttacarctgtggtccaggtctctctaaagaatgccaatgtggcatttggcttcactctttggtaggggctgtgcccatctcagggtgcaaagcctgcttgacccctgtctgcaccttcccacctcctctccagccaggtctgatgtgcactttgagctgctgagccctgaacaagagggacaaatggaagcctgcactccatctccagcctcc

SEQ ID NO: 287933 - DNA, 557 bp, Homo sapiens
attagggcccatccatatggccttatttaactttataattacctctgtaaaagccctatcctcaaataaggtcacattctgaagcattgagaattagacttcaacagatgaactttgggagccacaattagcctataacagggggttaacacacatggggccactgtcagcacctggcatcaccttcttgctcaccttgggcactggtggccatgcctgcccctggccttcccaccatctctgtacctttcctcgtcgaagtgcttgggcccttcaccctttccaagtcctcatatttgccagatgatagatgtctgtatcattttttaaagattcatacattgttacaactgtggtccaggtctctctaaagaatgccaatgtggcatttggcttcactctttggtaggggctgtgcccatctcagggtgyaaagcctgcttgacccctgtctgcaccttcccacctcctctccagccaggtctgatgtgcactttgagctgctgagccctgaacaagagggacaaatggaagcctgcactccatctccagcctcc

SEQ ID NO: 287934 - DNA, 660 bp, Homo sapiens
agtctgcagtgcttttggctcacatgtcagagaagcttggaactaactgctttcagtaagagggcagcttgctatgtcgtagaacttggagtctggaatgagaaggtacacatttctttttggaattcaacaatggattgaaggtccttggctccaccttctatcattgtctgccttagctggccaccacaagagtggctgcatagctcttagcaagcagctgacagttcctgccacctacctcttccctatcctgcactcactgtcayctttctcagacaggccttttgcgcttttacttggcatagaatcatctctctacctttctaggccacatactccttcaagtccaaatcattgtctctgctaagccttcctgtattcattatagtctcttattttctgtagtcttaatgctctggattcaggggtcctgctgactgtggagagaatttctagagtcagctaagaggtagcaaacacttcccaagagtgtgcctttctcatgcaaaagaaccaatccagagcccaatcttgctcatacactctagccaatcttcttctgccttaattacctgaagaccagggaccagacaactcaaggcaaagcctgtacctgaaacacattgaaattattcaaaccagatgatcctaaatctg

SEQ ID NO: 287935 - DNA, 588 bp, Homo sapiens
atttcctcaatatgataatacttatgcaaagattctgcgcccacaaaagaaaacaaataaacttaatggatatgtacacacagaatatgtataaaattgtgcctggaaagtaygctaccatcttgataggtgttactttggggaaatggcgtaggaggtgagagaataagggaaggttaggaggttagaaaagatgtttttgcaatattttcatttcttttacaaaaagatactatcagaacgtccagcaacataatcttggctgtggtatagactgtttaatagctttgtggagatataattggcaaacaataacctgcatgtatttaaagtgtatacctcaaaaagttctgacatttgtgtacacctgtgaaaccatcaccacaatccaagtgaagaacatgccaatcttccctaaagtctccttatgcttactcttactccctccggcccaaccctcctccccaccccaggcagacactaagatactttctgtcactatacattagtttacatttcctagaattttacataaatggaattacaccagatgcatgcttgttgttccagtgtaattatgaagagcat

SEQ ID NO: 287936 - DNA, 564 bp, Homo sapiens
ggtttcagttaccatggatgcacacacaaaatgcccctacttgatggcataaatgaccatttgactatacttgcagattctgtgattgggagttcagacacgtgctgcagagatagctcatctctgttccacgatgtctagggcttcagctgggacaacctggaactttgtggtttgcttggccagctagaggctggaaccatctggaagctttctcactcgcatgtctggtgcccagaatgcaatgattcaaaggttggaatcagctggggctctgtgcctgcacatggcatctccatgtgacttgagtttctcacagcctggaggctgagctctgaaaaggagggtttcaaaagggatcgtccagacagcaagtgtcccaagagaaccgggctgaggtccatgctttctgaccaagttcctgaggccagcccagcttcagcagggtggctttagtggggactaggatggccacattgaagaagagcatggaggatgggatgtgtataaactacttgggctgccataacaaaaactgttsagttggtagcttaaataacagaa

SEQ ID NO: 287937 - DNA, 563 bp, Homo sapiens
ctgctttttagttacaggaaagatttttctggtgagatttctgggcccaggggctacccttccctagatattagagatgcagtgttgaacaaaatgtagaacgagcctatgcccctggaagattttcggtgtcgaggagacaggctaagcacacacacaaactgcagacactaagccattgtccactagggaccagaagcttctgtgagatactgtggtggtggaggaggtggtgctttggcagaacccctaacctcyctgccttccccagctggaaggagtctctcctaagtcccagcttctcacctcatttttcttttctccctccttcccatttttgtctccctccagagacagaatgtgctataaccttctggaaacttctactattttcctgcaacctgactaccccttaggtgagggagtccagaatgctggcttgaaatgggagagagaaagaactgccacataatttgcaagatcttttttgaaaaagaaaaggtattaagaattccaggacagcattaggaatgtattaaaccaggtgagagacatcatatgac

SEQ ID NO: 287938 - DNA, 548 bp, Homo sapiens
atctttaggaaataactcatttcatttcagttttcaaatgcattggcaaacacttcaatatccttccccaaatttgtaaacattatatatctgtaatataatgtgtgcatgtgttgagagagagattagatttactgaaatctaagttgctcttgcttaaaagacatataattattttacaaattacaaagaaataataaaagctgctggctgccagtttacctataacaaatgcatttttgatcatttagaatatttactttaaaatatttgatagagatcttttacttagtcttctttagatgtgtagagttctggtgcagtggtatggttatacacacataaaagggaaaatatgctggttaaaatgtccctaatgcrcccttacagcagggccctctgctctgaattacttctggagctgcctcctccattatctccccagctcttctcttggctccatccctcccctcctctggaacttctctccgccactgggcttttctcagaaggacatctggtgctgaggtccagagtcccacaggcac

SEQ ID NO: 287939 - DNA, 335 bp, Homo sapiens
tgtgagcacacttctaaatgacaaaatgattgagttatcatcaagatattgttcagtataaacatcattttacttttctaaacttttaaaagtggccaacacattcagtcgctgtattatcttttgattaacccaagtgctcarctatccatcgcattccacgaagtcagtttgcaattaatgagcaggacacagtttatcagcatgcctgagaaaagcgattgtatctggatgtcctcagccctttcccctccaaataggctgtgtggtgagtgctccttcgaatggtacagatggccggcctgtttatcctctcctgcccttgcttcgggcca

SEQ ID NO: 287940 - DNA, 583 bp, Homo sapiens
agctatatatatatctatatgtacacatatatagaatatatatgtagatatatacatttatatctatatatgcatgtgtatatatagatataaatgatatctatatatagatatatagtatatatatgcacacatatatagagagatatacatgaatatctatctatctatctatctatctgggcataacttggagataagtttggttccaagtcacacaaatattttgttttcccagtgcatataaaagttacrtttacactatagtctattgctatgtaagtgtgcaatagcattaggtttaataaaaaaaagaaatctaaattaaaaacactttattgctaaaaaatactaacaattatctgagtcttcaacaagtcataatctttttgctagtggagagtcttgcctcagtgttcattgttgttgagtgagcagggtggtggttacttaaggctggggtggctgtgactatttcctaaaataagaaaataaaatttactgcatgaactgacttttcctttcaagaaagatttctatgtggcatgcaatgtcatttgatagcattttacccacagtagaa

SEQ ID NO: 287941 - DNA, 587 bp, Homo sapiens
caccaccttcaacattgccctcatcttccttttgtaatccatcccctcctctacagtctcatggtggcagtgctaactcagccactcgtgtactgtgtggactcatcataytccatgtactgtgtaaagtccctcaaagtcgcagctcattgctcactcactgggattaaggggaggcaagtgatttgccatgcaagtacaggttcagatcctgtctgtatgttaaattcgaggcatgtgtatcatggagcttgaggcataaatatggatttttaaaatattgcattaagtattatttactataattaatgagctatttgggaacgcccttaaattttgtgctggcccttgagtgactatgcaatactgatcaagaccatagctcatccacacgctttccttccttcactaaacaaactcttcagagcattgctttgcatccaactgtactaggctgtaaggatgcagaggtaattaacaccaagtcaggccttcaagaatgtcatttgtctagtgggggggaacaaatcaatgccactttgaattctacatgcaccaataaagggagagtacaagataagcatgcc

SEQ ID NO: 287942 - DNA, 478 bp, Homo sapiens
ctgtggcttgcacctgtaatcccagggaggctgaggcgggaggctcgtttgaggccaggagttcaagacaagcctgggcaacatatggagaccttgtctctgttaaaaaaataagaaaaaacttagacaggcttgtgcctgtagtcccagctactcaggaggctgagtagggatgatgctggagcycataatttgagactgcagtgagctgtgatcatgccccactttactccagcctgggtgacagagtgacagagtgagaccctgtctcaaaaaaagaaaacaaaagcaaaaacaaacaaacaaaccaaaaaacctccctatcttccagggaggatagagcctttgtccttttttatgtcttaattacatcagattgtaaaaatgccttaatcaaactatcaagaaaaggttctgggatccaaggaaaaggaatattagtttcacctggtatgattttacaaacaaggttacagag

SEQ ID NO: 287943 - DNA, 525 bp, Homo sapiens
ggaatcatctgcagtagggtagggagtcacccagcaaaaatcctatgtgagttgcttctataacccaggcaagatgaggacaaaaaatgtccgcgaaaggaagcctccctttcctctaggagagtgacatttatgaatgcttacccatccctgatttcctgtcatcattgcagctaccctgttacgggctaactggtgtgccccaaaacactcatacattgaagtcccaatccccagtaccagagaatgtgaccttatttggagacagggtgtttatagaggtaatttgtttagttaaaatgaactcattatggtgaaccctaatccattatggctagtgyctttttaaaaagggaaaatttggacacagagacagacatgcaaagaaggaagacaatgtgaagagacacagggagaaggccacctacaagccaaggagagaggcctgggacacatcctccctcagagccctcagaaggaactgttgcaatctaatcactccttagttcagctaggtccaagttc

SEQ ID NO: 287944 - DNA, 572 bp, Homo sapiens
gcaacatcctggcattagaggaaattcttaaccacatttctttccaccagcaacaggggtagcgcaggcgctgtcccaygggtatttttccactcctgagacctgccctctctatctggctaaccagcctctaactgccttctctctcagaaccaaccctgcaacatcttgatctcagacttctgggacaatacataccttgtttaagctacttggtctgtggtactttgttacagcagccctcaaaaacgaatccacactctgtgagagaggagttattatctgttttgcggatgaggacactgaggctcagagaggttggatgttcccctcaaaggccctcatatccagtaagaggcagggattttggcttccatgaaattttccactgcactgagctgctcctctcgaggcagtgagaggtttggggtccctggggttttcccacacctggcacaggctgcactctcgcgctgtaaacagagaaggctctgtaattaggattattctccactcttctgtggttaggtaacaatgctgccaattatcttcctggtgcttacatgggacag

SEQ ID NO: 287945 - DNA, 592 bp, Homo sapiens
tctgtggaaacaggtgtgttggtccctgagtttctgtcctcagagtgtttcaggcactgctctgaagcttcacagggccctcaggcgatcccaggccaagagacactgtcagtgtcagatactgagcctgcccttccagaaacctctcatataagcctctcaactctgccctgggagaagggttaggccctcagaaatacaggaaaaaagcctcgaggccttgttgagcaaggaagacactgtctatctcaggtctggcttctcatccagagatgccaagagctcagggtggttggtatttggtcctgtaaccaaaacaatgtgatcagcctgtagggcattccccgagattccacaggagggccacgagactgcagcattttcccaggatgctaattaaaaacacggagaccaacatagcatcataaataattcaacttggagagccccagggacccagggtccatgctattgctcaaatccctccagagcaggctggttcttgcagttcttcatctttctaaagagcttttrgagatgagggcacttcctggtaggcagctgcttcccagtccctgggaaccccaggact

SEQ ID NO: 287946 - DNA, 634 bp, Homo sapiens
gtctgtaggattaataatctgtggtaggaagaagaagatatatacagactgtgaggatgagacaggatgtttagttccaaagcaaaaaccttctcaactaaaaagaagaatatgaaggaggaacggcagataacagcagaaaccatggggagactgacaacagggctcagcttcccagtgtgagagcttcttaactgtagacgggtcaagkggtgactttgatgcacactcgatgtgctcacctgggtcccctcttctgcctcttcctcccctcaaactagatataaggtagatccctggtatctataatttaacaagccatgtattaacctgccattttcctgagctaagaatttgaatgacaaacaatgatgggtgaaatcagcctcccaatcaaaatagttttatgtcatataacctaaaagtttaacagtacacaaatactgactcctttccttttcagatgcttgcctaaacttttcccttgtttattgtttatctctgttttcaaaatgtacatctcttttccgatatatactttaccctgtttactattattccatctgatttcaatgtatatacttatgatgcttgtcaaacatgcattgcatgcttatttacttgtaagcaccag

SEQ ID NO: 287947 - DNA, 470 bp, Homo sapiens
gcaacctctgctgagtggagtactcagcttgaaccgcctcccaggttcaagcaattctcctgcctcagcttctcaagtagctaggactacaggcatgcgctaccatgcccrgctaaatttttttgtatttttagtagcgatggggtttcaccatattggtcaggctggtctcgaactcctgacctcaaatgatccgtccaccttggcctcccaaagtgctggggttataggcatgaaccaccatgtctggcccactggttgtttaaaggaagggtttctcataggttagagaacttgggaatagccaggcgtatactaggggttcatagaagtttgactttggtctcagtgtttttccagatatacagttccatttaaccttggcctttggaaggctcaatagccaaatgcccacctcaatgtcatatctggcacctttgagctattataaacattcctcttatacttct

SEQ ID NO: 287948 - DNA, 517 bp, Homo sapiens
gacatgcctttgtgaaaccaggaagtattttaagttaaaaatgaaaaagsttttaattgctttgtgtgtgttttaatggagccccattttagaattattttttccgtctccctttaccaacaaaaggaacaatgccaccgtgaatggaatagtttggggaaagctttgccaaacacaaccctgatttcagagcaggaacatggtttggatagatcttcagttccgcttgaattattctgttactgcgctgtcattttcagaagatttccattcctttgcagatgctgttgggagttcgggattatgttcatttcttctgttttaatggcattcagtactaattttataagtgcatcttgtgtgaatctcaataaattcagttttgtaatcttttttaaaaaggtcactgaatttattttaatatttactattgtatttggtagagtgaatttcccactgtataataagtatttatttgtaattcacaagtgatagagctatcttaatttgaattatt

SEQ ID NO: 287949 - DNA, 625 bp, Homo sapiens
tggttaaatgaaaacatattttaataaaaatgtatttgtaagaagaaactgacaaattttcaattacacaaagaataagacataggtaatatgaatagttaaaaccttcgtcccactcgaaatcttttgagggtattgctaaaaattcagttgacttttctgggtttcattcttcctgcctctgctcaatctctaacagaggtgaagcaagaagaggtctaaccatggttaaagggagaggagagaggcaaaagagatggataataagttgaagttttagaagtccagagtcactgttaaagaagaaagaaatgggtccatggcactgttaccagtagaaacaatatgttcacctatacccgacttcaggctttcttgttttacaagcaatacctatccccatgcatctccaacacctgcattacacaggtactgtttcacctgtgctaccytcacaggtgctacccttatttacaccaagccttctgttaggtctccatggtgactagaagcaacctagatgcttcagatactgaactatctagtagtggcattatggaacagaaccaaactgattaggcaagcagtctaagcaagcacagagtttacaaagcaattcaacaac

SEQ ID NO: 287950 - DNA, 581 bp, Homo sapiens
cctgcctctgctcaatctctaacagaggtgaagcaagaagaggtctaaccatggttaaagggagaggagagaggcaaaagagatggataataagttgaagttttagaagtccagagtcactgttaaagaagaaagaaatgggtccatggcactgttaccagtagaaacaatatgttcacctatacccgacttcaggctttcttgttttacaagcaatacctatccccatgcatctccaacacctgcattacacaggtactgtttcacctgtgctaccttcacaggtgctacccttatttacaccaagccttctgttargtctccatggtgactagaagcaacctagatgcttcagatactgaactatctagtagtggcattatggaacagaaccaaactgattaggcaagcagtctaagcaagcacagagtttacaaagcaattcaacaacccaaccaagccaaaaacacagatttcctaatgcttagtccaaagttgatttgctgtacttagattcctaaataaaaatatggctatacagaaactctcctacgtaggacttctgcagatgaatcaagtgg

SEQ ID NO: 287951 - DNA, 625 bp, Homo sapiens
tggttaaatgaaaacatattttaataaaaatgtatttgtaagaagaaactgacaaattttcaattacacaaagaataagacataggtaatatgaatagttaaaaccttcgtcccactcgaaatcttttgagggtattgctaaaaattcagttgacttttctgggtttcattcttcctgcctctgctcaatctctaacagaggtgaagcaagaagaggtctaaccatggttaaagggagaggagagaggcaaaagagatggataataagttgaagttttagaagtccagagtcactgttaaagaagaaagaaatgggtccatggcactgttaccagtagaaacaatatgttcacctatacccgacttcaggctttcttgttttacaagcaatacctatccccatgcatctccaacacctgcattacacaggtactgtttcacctgtgctaccttcacaggtgctacccttatttacaccaagccttctgttaggtctccatggtgactagaagcaacctagatgcttcagatactgaactatctagtagtggcattatgraacagaaccaaactgattaggcaagcagtctaagcaagcacagagtttacaaagcaattcaacaac

SEQ ID NO: 287952 - DNA, 576 bp, Homo sapiens
ctattgccaggctaaatataagtcagaacgggagttctgagaacgaagtgatgaggaaaagaaagcttagacttaatggagacacatgtttagtataatacaatatagagcatatacagctattcatacagacaaatatacatatctagtttctaaacatataaatcaacaaggagagatataaaacaaaaaatgaacctcagacaccacgttttattttattcagatggaaagagtttggataagtacctaatatgtacattcatttagggaattctaggctgttgggactgatcaacaaatgtcttaccygtaggagccctaaattccttgtgagaaatgataaagggaactttggaactgactgatggttcagccaccaagacactaagattatgactttcaaaaagaaaagccaaaggttgccttaacttgcagggggatctagatctcaagggcagtggtgctggactctcagaggcacacaagaatataaaaaaatcaacaagtaataccttaagtccgagcatctagccgtggaggactagtttgattcagggagaaatgctatccaaa

SEQ ID NO: 287953 - DNA, 618 bp, Homo sapiens
gttaagagtggcacacccatgtatgtgtgccgatgcaatagtgggggctgtgactagaaacaatcactcatataacaacccatctcaaaagcttttttacagtctgctgtcatttccctactttcccactgcctcagtaaatgcaagcctcacccatatcattcagccatggcgcacctcctgtaagcgctctgaatttcaatttcatcctgatgtacttcatgggactgtctttgcttctctttttttacttccacctttccccattattctctagcaacatgatacaaacttttattccacagcaaaaccttattctctgtaagcgagttggcctttattctctgtaccttccctacatccttaagctcttccagtcagttgctggtaccttctttttcagggtagctcacctccttattagtgatgggtctgagctgtgccttcactccctcaaagcccagtgggcactactcrcttcctatttccaaagctgaagcactatttattatgagtgtgagctcagggcacagtgagtctcaaggtaccaagcactgagatgcctctttaggaggcagggcacctccggagcaaggccatgtggattttcaggtgcac

SEQ ID NO: 287954 - DNA, 547 bp, Homo sapiens
acttctcagttttcctggaatagttcaaaattctgcccctttcccccccatttcctaatttttagtaacacktctttcactatgtgtccaagtttggatgataaatttcatggtcaccctacttgatgtccagaattcaccagggcttcgtgaagaagatggagaggagttattgcccaacactatcaacaagaacaggccctttgacactatactgtttgtgtgggcatggataaaagagatttcagtgaaaacttagtatatcaattcaatgctaaatgttgcaaatatataatgactgatgggttaaccactcaatgggcttgctgtttctttatcagctcagttgtacttgcctgagaaatctgaaaagaaatgagaaggaaagtcataagcaactggtgaaggaaatcagaaagaagagctttagttatgcaggggcatgaggccttgttcctgttcttcaaatggaactgaattttcatggaaggttttgatacttacttgaggatagcagaaagggccgagaaaccttattaaagtttca

SEQ ID NO: 287955 - DNA, 448 bp, Homo sapiens
ctctctactttgattttttaaaaatttttacattattatttatttttcatttttgagactgggatctcactatctggcgtaggccaatcttgaactcctggacttaagggatcttcctacctcagcctcccaaatagctaggattaccrccactgtgctaggcccccactttggttttttagaaaacattttttattttatataataattcacaggaatttgcaagatactgtacagagaggtgttgatattcatcactcactttccccagatggaatattttgtgttagtatagcacagttccaaaaccaggaaattgacagtggtgcaggctatggtttaaatgtatgtgtccctccaaaattcataggctgcaacctaacccctaagttgatggtattaagaactgggcaccttggaagatgacgtgattaatgcccttttaaaa

SEQ ID NO: 287956 - DNA, 448 bp, Homo sapiens
ctctctactttgattttttaaaaatttttacattattatttatttttcatttttgagactgggatctcactatctggcgtaggccaatcttgaactcctggacttaagggatcttcctacctcagcctcccaaatagctaggattaccaccactgtgctaggcccccactttggttttttagaaaacattttttrttttatataataattcacaggaatttgcaagatactgtacagagaggtgttgatattcatcactcactttccccagatggaatattttgtgttagtatagcacagttccaaaaccaggaaattgacagtggtgcaggctatggtttaaatgtatgtgtccctccaaaattcataggctgcaacctaacccctaagttgatggtattaagaactgggcaccttggaagatgacgtgattaatgcccttttaaaa

SEQ ID NO: 287957 - DNA, 552 bp, Homo sapiens
gagattttaaaattgttcattagactacttagtttacagtgataaaaagtaaatctaaaacagataacactggcataggattcttacaaaaggcaactcattaaaacataaagcaggcttcattgctgaaaatccatctatacactgccaaatccatctatactctcccatagatgggagaaaacccatctatgattaacatggaagttagaatacatgactactacagttgtatttctaaggaaataatttggaaaacagaattttagtaatgtgtgctgttttttattgatcacatttgacaatgttaaatccgaaatgtacaagctccagagagaattggtgagttctgcaagtagaaatgaagcaaatgaaaagggtccrgaagttttcaatgtccaaaaattgaatgagacaaatgtttctagatccctgtaaaagacaagatggaaaaggctctcagctatatagccctcataatatttttcagctgatcaaaatgattccactttttggcacaaaacagatcaaatatatggcttttccaccctt

SEQ ID NO: 287958 - DNA, 563 bp, Homo sapiens
ccaggcattcacttgaataatctggaaatatattgaaaatatctctcatgtctactgagaccttgtttgttcccactggtcaggcatagagaaaattaactcctgttccaaattaatgtcaccattattaatacacatggtaaaacccaatagcctatatggaaacaaatttaaattcttgtccacmtgttccattgtttgtgcttgtattcaagatgtccttcctatcttcagtaaacctaatgttattcctctttcattcagtttctttcatatttattatattaaacttcctccatatattcctatttcagtttcctataaagcctcaactaaaagcatgatgagtagtgccaatgatgcattcttgtttcaaaacatttcaccttggcaagttttgcaattgctacataaaagtaataagaggcaaaacagagggagcaaaaatagctccaaaactgcaaagaatattttatttcatgagggaattaacttgcttgccctccccttctcggtgttgagtggatcaaaatgggtatctttagttacactgacacaatttg

SEQ ID NO: 287959 - DNA, 540 bp, Homo sapiens
aatgcactggctttctcaggaacagtttstttatttttcctttttatgggccatactttcttgtttccttgaacagttatatttttgctttgaaactagatattttaaacaataatacagtgtggctactctgaaatttagattctttcatttctctacagttttttgattttgctgcttattatagtcattgtttatttgttggtgactttttcaaatttattatttaagttttctttgccatataagcctattgaattattttcttggttagtttaacaattagctaataagacacagatttccataaatgcctggaaccaacacatgttcaggtatttgctaaagggttctgtggacgtatttaggcttcattttaatactcagccaggaaacataaagtttctttcaatttctgcataagcagagacttaagatgagtataaggttagagcttagggctcctcctgtcttttctatgcatgcacacaaccctacacgtgcatattgtcttccagattccctggaataaataaaagc

SEQ ID NO: 287960 - DNA, 569 bp, Homo sapiens
ataacaactgatgactctccaaaaaattatggtgagttaaaaaaagccaagctcaaaagattacattctgtatgcttcaatttatataatattctttaaattacaaaattatagaaatagagaacaaagtagtgatttccagaggttaaggagatagtgagagcaagagggccctggatgctgctataaaagggtgataaggtaaatccttgtagtgatggaaatgttctgtatcttgattgtatcagtattaatatcctggttttgttattacactatggttttccgagatgggaaaaartgataacttgatccctctatattattgatctctatattatttctttcaactgcatgtaaatctatagttatctccacatgaaaaatagtttttaaaatgatatagcttaactacgtagataaagtaatcaaagaaatacatttcttagcatttcttaccattacattgactgagattggctttttctctaaaacatgcgtttaaaaggcagctgtgagtttatatgtcttctgtaacctgttagtgttactatttttgaaggtgtttg

SEQ ID NO: 287961 - DNA, 225 bp, Homo sapiens
gtcattttcctaaataattgacatacagacactttctgtaggattaatatcactatatatttccaaagaatgggtttttctccctaarggctcatgttctcactccattcattactaattagctgtcggctaccaaacgcataaaagcagtaatcaggcctaagaaggaaatgagacattgtcattgcttctgactcagttagtcttttttagcttcatatctga

SEQ ID NO: 287962 - DNA, 304 bp, Homo sapiens
ttttaatttttaaatatttagttttataagaaatgaggaaaatatatatgaattatattatttcctatttatttgtaatatattgcctataataatgatgttctcatagatcccaatgcttgaatgtatttcaaaaatgaaattaccatccaatgattaaataaagatatagaaagtaggccaaaagaatggtatattatatttggaactttctttataaattgtgtttttaacaatgacttacttgatttttgcaaacytaagacaatccattcttgacatccatcaaatgctgtaggagaac

SEQ ID NO: 287963 - DNA, 641 bp, Homo sapiens
actgtatgccttatgttatgattacttgtatacatatatgagcccattgcctaagataatgaagattaggtagggattgttcacttttgtctttcttagtaacaagccccaaaatatttatatgattagttattgatcaatgtcagaatgcaccgaatatgcacggtagttatagtcaaggcagatcaactgaattatatgttagtactttttcaatgagataaattaaatagaacctttcaatgtgtaaagaaagaaactaaatgggagaatgaaaattttaactaaaattgtgtttctagtggatggattccagttaacattaaaagcttgaaaaattaagataaatcactttttaaaaatagagttcagaagagaccaaaggaaataacgtaatttccatttggatcaaaaagaagcagtgaaattattagtaaagattgcagggaaaaaataacactggaaggaagttcatagtggaacatgacaagggaggtgsctagtagttaggttgacaaatgaatatatgaaaactacaggtaaagaggtaaagatgaaataagatcacaggcacaaataagatggaaagcccaaaatatataatacattatttttagtgtaatatacattgatagaaattg

SEQ ID NO: 287964 - DNA, 421 bp, Homo sapiens
tgcctttttctttggtgcatattttagcttcagtattctctattttggattatccccttttcttttctatttcccctaccatgttcttaagaaatatatctgatggtgcccaagaaccccacttccttttggtaataagttatctatctatctacatatatrtgtgtgtgtgtgtgtgtgtgtgtgtgtgtgtgtgtgtgtgtgtgtatacataaacatatataatttatacataattaacatcatttcagtatattacagaagagaaaaaatttaaatgcacagtccccactttaagtgttaaatgatgccctgataattttttgtcataaagctgtatttttaaattaattttaaggttacaagacttcatggtctctagttatagaaaatgtttgattcatgaatattattaatttat

SEQ ID NO: 287965 - DNA, 592 bp, Homo sapiens
tggattatccccttttcttttctatttcccctaccatgttcttaagaaatatatctgatggtgcccaagaaccccacttccttttggtaataagttatctatctatctacatatatgtgtgtgtgtgtgtgtgtgtgtgtgtgtgtgtgtgtgtgtgtgtgtrtacataaacatatataatttatacataattaacatcatttcagtatattacagaagagaaaaaatttaaatgcacagtccccactttaagtgttaaatgatgccctgataattttttgtcataaagctgtatttttaaattaattttaaggttacaagacttcatggtctctagttatagaaaatgtttgattcatgaatattattaatttatcctcagttttaatactatcaccctgatctcttatttctgggagatctagcaaatataaaacagatgtttttatcaccttttgtgaaatatctccccattctaacatattcctaccataagcattagaaagtatgtcttctctacttgttttctgtgataagtccactggcctagagttttctgttttattttttgcatcttcatttatggtaagta

SEQ ID NO: 287966 - DNA, 592 bp, Homo sapiens
tggattatccccttttcttttctatttcccctaccatgttcttaagaaatatatctgatggtgcccaagaaccccacttccttttggtaataagttatctatctatctacatatatgtgtgtgtgtgtgtgtgtgtgtgtgtgtgtgtgtgtgtgtgtgtgtatacataaacatatataatttatacataattaayatcatttcagtatattacagaagagaaaaaatttaaatgcacagtccccactttaagtgttaaatgatgccctgataattttttgtcataaagctgtatttttaaattaattttaaggttacaagacttcatggtctctagttatagaaaatgtttgattcatgaatattattaatttatcctcagttttaatactatcaccctgatctcttatttctgggagatctagcaaatataaaacagatgtttttatcaccttttgtgaaatatctccccattctaacatattcctaccataagcattagaaagtatgtcttctctacttgttttctgtgataagtccactggcctagagttttctgttttattttttgcatcttcatttatggtaagta

SEQ ID NO: 287967 - DNA, 421 bp, Homo sapiens
tgcctttttctttggtgcatattttagcttcagtattctctattttggattatccccttttcttttctatttcccctaccatgttcttaagaaatatatctgatggtgcccaagaaccccacttccttttggtaataagttatctatctatctacatatatgtgtgtgtgtgtgtgtgtgtgtgtgtgtgtgtgtgtgtgtgtgtgtatacataaacatatataatttatacataattaacatcatttcagtatattacagaagagaaaaaatttaaatgcacagtccccactttaagtgttaaatgatgccctgatarttttttgtcataaagctgtatttttaaattaattttaaggttacaagacttcatggtctctagttatagaaaatgtttgattcatgaatattattaatttat

SEQ ID NO: 287968 - DNA, 481 bp, Homo sapiens
aatatactttaagtgacagaggattgaagctcaatgataaaatcaatgttaattttcagatgactttatgtataaactctaataccataatgaagagaaaatacttgttcttgcagcctttgtattgacaattgcctctccagtgctgcagtacatttttaggggccagcgggctgccaattaatgcgatcatgcttttgccttgggctccactattttcagtgccattccatcacacatttttctagcactcttggtcagaatctcttatttgacagattttctgttagtgaagaatggagagctctcagctagcatggggagaacaaagtggtctttcctaacttctttaaaatcaccaaacccagaatttttctaggtcaaattagtcatttaataggctatcttttaaactattacagaccttatatttatagaamattttaagaatgcattggtattttttaatattcatagtaaa

SEQ ID NO: 287969 - DNA, 1257 bp, Homo sapiens
cacaataaaataaaactatatgtcactatcactaataaaaataggttaaataatcctcaacaaaatactagcaaacaaattcaacacacatttaaaatctcattcgctatgctctagtgggatttatcccagggatgcaagtatagtgcaatatacacaaatcaataaatgtaatccatgcattaataaaaccttatgattatgtcaataggtgcagaaaacacaattgataaaaattcctttatggtagaactctaaacaaattagacatagaaagtacatacctcaacagaataaatcccatatatgacaaacccacaactaacctcatactataacagaaaaaagttgaaatattatttggtgagatctggaaaaaaaaattaaaaatgtgcastatcatcgcttctattcaatctagtactggaagtcttagctagatcatttaacaaagacaaataaataaaaggctttcaaatatgaaatgagaaagtcaaattgtccttatttgcagagcatattattatatgtagaaaaccctaaacactctaccaaaaactgtaagaactaacagtaaattcagtaaagttacagaatacacaatcaacacacacaaatcagaagcatawcacaataaaataaaactatatgtcactatcactaataaaaataggttaaataatcctcaacaaaatactagcaaacaaattcaacacacatttaaaatctcattcgctatgctctagtgggatttatcccagggatgcaagtatagtgcaatatacacaaatcaataaatgtaatccatgcattaataaaaccttatgattatgtcaataggtgcagaaaacacaattgataaaaattcctttatggtagaactctaaacaaattagacatagaaagtacatacctcaacagaataaatcccatatatgacaaacccacaactaacctcatactataacagaaaaaagttgaaatattatttggtgagatctggaaaaaaaaattaaaaatgtgcactatcatcgcttctattcaatctagtactggaagtcttagctagatcatttaacaaagacaaataaataaaaggctttcaaatatgaaatgagaaagtcaaattgtccttatttgcagagcwtattattatatgtagaaaaccctaaacactctaccaaaaactgtaagaactaacagtaaattcagtaaagttacagaatacacaatcaacacacacaaatcagaagcata

SEQ ID NO: 287970 - DNA, 628 bp, Homo sapiens
cacaataaaataaaactatatgtcactatcactaataaaaataggttaaataatcctcaacaaaatactagcaaacaaattcaacacacatttaaaatctcattcgctatgctctagtgggatttatcccagggatgcaagtatagtgcaatatacacaaatcaataaatgtaatccatgcattaataaaaccttatgattatgtcaataggtgcagaaaacacaattgataaaaattcctttatggtagaactctaaacaaattagacatagaaagtacatacctcaacagaataaatcccatatatgacaaacccacaactaacctcatactataacagaaaaaagttgaaatattatttggtgagatctggaaaaaaaaattaaaaatgtgcactatcatcgcttctattcaatctagtactggaagtcttagctagatcatttaacaaagacaaataaataaaaggctttcaaatatgaaatgagaaagtcaaattgtccttatttgcagagcatattattayatgtagaaaaccctaaacactctaccaaaaactgtaagaactaacagtaaattcagtaaagttacagaatacacaatcaacacacacaaatcagaagcata

SEQ ID NO: 287971 - DNA, 628 bp, Homo sapiens
cacaataaaataaaactatatgtcactatcactaataaaaataggttaaataatcctcaacaaaatactagcaaacaaattcaacacacatttaaaatctcattcgctatgctctagtgggatttatcccagggatgcaagtatagtgcaatatacacaaatcaataaatgtaatccatgcattaataaaaccttatgattatgtcaataggtgcagaaaacacaattgataaaaattcctttatggtagaactctaaacaaattagacatagaaagtacatacctcaacagaataaatcccatatatgacaaacccacaactaacctcatactataacagaaaaaagttgaaatattatttggtgagatctggaaaaaaaaattaaaaatgtgcactatcatcgcttctattcaatctagtactggaagtcttagctagatcatttaacaaagacaaataaataaaaggctttcaaatatgaaatgagaaagtcaaattgtccttatttgcagagcatattattatatgtagaaaaccctaaasactctaccaaaaactgtaagaactaacagtaaattcagtaaagttacagaatacacaatcaacacacacaaatcagaagcata

SEQ ID NO: 287972 - DNA, 332 bp, Homo sapiens
atacaaaatcaacatataaaaatcagtcatatttatatgcacagataacaactagttaaaataggaaakcaagaaaatgattgatgatagcgtccaaaaaaaaggaataaatgtaaacaaacaggtaaaaacattggcatgctgaaaataataaattattaataaaagaaattaaagtcacaaataaatggaaagatagctcatgttcataaatcagaataattaatattggtaaaataaccaaattaccctaagcaatatacagactaaatgcaattcttctccaaattctaatggcattcttaatagaaaaatgaaaataattccaaatt

SEQ ID NO: 287973 - DNA, 515 bp, Homo sapiens
aacacagatccacacgttaatacaattctcccattaattgataaagcaattaaacaattgctagtgtatagatgatattaaaaaaaagtaaagtttatttaattgatattaattagttgacactcaggaagtgcaaattacacattctcttgaagtgcacagggcctgtttaccaaaataaaataatatgcttttccataatgcaattaccaataaatttcaagttaaaatcttaaaatcctacatggcatagtgtacttgacatataaatcaataagcaaatgtaaaatamaattcttaactattttaaaatagcaaaacagccttctaaatagcccaaatgcaagttatcaaaataggatttagaaaaaagtaactaaatgataataaagatattataattaaatcctgtgctgggatttcctctttacagaatgatgaagtaatagaggctagatttaccttcatctgcctgatgaaacaaccaaataaatacatatacattcattgctgga

SEQ ID NO: 287974 - DNA, 652 bp, Homo sapiens
ctgactgttcccatagccatactggaaaacttcaagattcaaaggacatttggtagaatattcaagaaagtcttctagtaatgaagaataattagccccagacagagctttgctgtcttcsttgactaacgtatcataatagtaaaatctaaaatgatcagcctatttaaaagtaagctgtatccaataattaaaatcaataacatttgtaataatacaaaaacattcattcatcaaaaatgtaaaattcacgtctgcaaaccaaaaaatctgatcatttaagaaaaggaataggaacatccaacccatgctgagataaatcaattaaatcaattaaaactgaactagatattacataaatattagaattacatcaaaagttattagcaaaagttattctaactttcaaaaaattaagtagaaacttacaatacattttaaaagaataatttaacttataaaaataaaaactaccatatgttaagacaaaaaagttactggatggggtcagaaacacattaggcatttcagaagaagaaaatttgaagttataataatagaacctactcaaaatgaagcagaaagacgacagagaatgaacagtgtattagttaatggtgagacaagattaagggccctactacacttaaag

SEQ ID NO: 287975 - DNA, 652 bp, Homo sapiens
ctgactgttcccatagccatactggaaaacttcaagattcaaaggacatttggtagaatattcaagaaagtcttctagtaatgaagaataattagccccagacagagctttgctgtcttcgttgactaacgtatcataatagtaaaatctaaaatgatcagcctatttaaaagtaagctgtatccaataattaaaatcaataacatttgtaataatacaaaaacattcattcatcaaaaatgtaaaattcacgtctgcaaaccaaaaaatctgatcatttaagaaaaggaataggaacatccaacccatgctgagataaatcaattaaatcaattaaaaytgaactagatattacataaatattagaattacatcaaaagttattagcaaaagttattctaactttcaaaaaattaagtagaaacttacaatacattttaaaagaataatttaacttataaaaataaaaactaccatatgttaagacaaaaaagttactggatggggtcagaaacacattaggcatttcagaagaagaaaatttgaagttataataatagaacctactcaaaatgaagcagaaagacgacagagaatgaacagtgtattagttaatggtgagacaagattaagggccctactacacttaaag

SEQ ID NO: 287976 - DNA, 652 bp, Homo sapiens
ctgactgttcccatagccatactggaaaacttcaagattcaaaggacatttggtagaatattcaagaaagtcttctagtaatgaagaataattagccccagacagagctttgctgtcttcgttgactaacgtatcataatagtaaaatctaaaatgatcagcctatttaaaagtaagctgtatccaataattaaaatcaataacatttgtaataatacaaaaacattcattcatcaaaaatgtaaaattcacgtctgcaaaccaaaaaatctgatcatttaagaaaaggaataggaacatccaacccatgctgagataaatcaattaaatcaattaaaactgaactagatattacataaatattagaattacatcaaaagttattagcaaaagttattctaactttcaaaaaattaagtagaaacttacaatacattttaaaagaataatttaacttataaaaataaaaactaccatatgttaagacaaaaaagttactggatggggtcagaaacacattaggcatttcagaagaagaaaatttgaagttataataatagaacctactcaaaaygaagcagaaagacgacagagaatgaacagtgtattagttaatggtgagacaagattaagggccctactacacttaaag

SEQ ID NO: 287977 - DNA, 551 bp, Homo sapiens
caagatctggaacaaaacaataatgtctaccataactatatgtattcaacattgtactgaaggaactagtcaatcaaggaaaaaaaaatgtactaatattggaatagaagaaatacaactgtcattacttctagtagcataattttaatcccagataatttttaatacatacatataaattactagacttaataaatggattttataaaatcacatgatgaagggtcaaacaaatctgaggtagaaaggccaagaacaaagctggagtccttacagtaacagatatcaagtttttattataagactatatgaaattgggacctaccacgaagctacattttaatatacaactacaaataaaatgaaaactatttctgtgayagaaaaatggatcaacgaaatctaataatgattttaaaagcataatcataaacaatcacccaatgtatgtcgaagtagcaatggcaatgcagtgagaaatgatggctttgtcaaggattttcaataataccctcatgctcagagattcagtagaaaatttagtgtgtaat

SEQ ID NO: 287978 - DNA, 406 bp, Homo sapiens
atagtaaaaatacagcaaagaaacaacaggcataataaaaccagcagatactgaaactgactacttgaaattactaaagattaaaggggaaaaatagctctgaatgtaaacaaaaagacctagcaaatttataartgtttttcattttaaaaaacatagagcccctttttgaattgtgggtcagaggctcaattaaagcaatattaaaacatgttttaagagaggccaaggactcttagcacaagaaagcaaaattactaaaaaccacaaaaatcagcacaaaagctgggtcttctccaagaaactttggcatgacaaagtacttgaatttagaaactgcatctactctgctagaataccaaccaattagacttaacattttcttgaatatacatgatagttttag

SEQ ID NO: 287979 - DNA, 406 bp, Homo sapiens
atagtaaaaatacagcaaagaaacaacaggcataataaaaccagcagatactgaaactgactacttgaaattactaaagattaaaggggaaaaatagctctgaatgtaaacaaaaagacctagcaaatttataaatgtttttcattttaaaaaacatagagcccctttttgaattgtgggtcagagkctcaattaaagcaatattaaaacatgttttaagagaggccaaggactcttagcacaagaaagcaaaattactaaaaaccacaaaaatcagcacaaaagctgggtcttctccaagaaactttggcatgacaaagtacttgaatttagaaactgcatctactctgctagaataccaaccaattagacttaacattttcttgaatatacatgatagttttag

SEQ ID NO: 287980 - DNA, 627 bp, Homo sapiens
ttacatgttcaacaaaataaaagagatccataggcattcacatcaatatcatatatttgaatgccaaatgcaaaaagagaatcttcaaaacagcaagagagaaataataacatattcaggtgatcttcaataaaattaactgatttctccttaggcctcatgaaagtcagaaggcactgatatgaattaatcaaagtgctaaaagaaaaaaaaaagtaaagaaaagttccaaatctagcaaagtcatccttcaaaaatgaagtatttattaagactttccagataaacaaaaattgagcctatttgccaatagcagaactaccctgcaagaaattctaaagaaagtggtttaggacaaaattcaagaataatagagagtaatctgaatacacatgagaaaaaaaaataacactgttaagggtaactctataggtaaatttaaaagagatcagcttcaggcatcaaagtgtgaaaagtaccactgacctactctccacccactctccactgagactggtgaaactacgtgtgtgcatgcrtgtgtgtgtgtgctcaaggcctttggcaatggtcctgagtgcagtatcaaataaaaaatatatattctagaaaatacataaacattta

SEQ ID NO: 287981 - DNA, 584 bp, Homo sapiens
cataaacatttaataagactacttttttctctttgtcctttatgcacagaaagatgcactttactccagatcgctgtagccaggaagacaaggctccttccaatgtccaattggagagctttgtcatcaggagaagcaggatgtcagcactgctcactctaccccaattacctattgctcaacttaagagtggttgagagattagggtcccttttgttacccaaccctcacttgtggaaaggagactttacattgggcatgatgttctgagaagactgaggtcctaatcacccttaacacagcttgtcaggtggtggttccataaatggagaggcaagttgagagggctctgggctgttccctccccacccccaaccaagtatgtagaccctagagcagagtcttagagagaacctgactattgtctccacccttagatacatattcctagctcgaatattttacctgggaggagcacaggccataaaaccaaaaactcttsatccgtttacaaaggaactaactttatttccagcaacgtttggagaagttgggtcctaggtgtgctctcaagaacagtggaa

SEQ ID NO: 287982 - DNA, 579 bp, Homo sapiens
tctacagaacactcaacctatataaggaaaatgaaagatataaaatcaattgcctgccattatatgttaaaacactgaaaaaagagtataccaaacctaaagcaagcacagggcagtacataataaagatacatcaaaaattaataaaatagaagataaaaatccaacagggaataacaacaaaacccaaagctacttctttgaacatttcctcaaaatggacaaaacttttttaaaaattttgttcattttatttatcctttttcaaaatattagttttgggagcgtatttacctagactaaccaaaataaaaatagagaggatataagtaattagaatcagaaatgaaagaggtgacattacaatttacatcagtgaaatgaaaattattgtagacctaattatactatgaataattgcacaccaaaaatttaataacctagtggaaacaaattcttagaaacatactaactattgaaamaggcataaaaagtggacaatcaaatttataacaaatgtagagatcaaattggtagtcaaaaactacttagaaaagtcaacatcgagatggttttgcc

SEQ ID NO: 287983 - DNA, 612 bp, Homo sapiens
atctaaggaagcttaaactatcttggattgtgttgcttgcatactactcaattactaaacatgtcagcattcattaaattaataaatatctaaatgtcctgycaatagtgaagataaaacataggctcagaaacatacttttcagttccaggaaagcctactttagtttagatgtcttgacatcagaaaaaaatcaatcttatcaacaaactataaaccattagacttttattatatttaagttttttctaataccatatggatggatatactgttgaaaagttgtaacaataattctgaaaaatgattgtatttatgactgcagagaaataaacaaaaattgatatttttcttggaaaaattaatttccaattaatatagattttttatttcagtatataaggatttctttaaagcaaaagacaacagacccacaacaaataagctgttatcaattcattaatggctttccaaaacatggtattaagaatatacaaaaataaatctatatttagataaaatatttagcattgaaccacacaaaatatattcctcaaaattaaaactgacagccttgctcatatattcttttgtaagaaaaatgtaaatatc

SEQ ID NO: 287984 - DNA, 612 bp, Homo sapiens
atctaaggaagcttaaactatcttggattgtgttgcttgcatactactcaattactaaacatgtcagcattcattaaattaataaatatctaaatgtcctgccaatagtgaagataaaacataggctcagaaacatacttttcagttccaggaaagcctactttagtttagatgtcttgacatcagaaaaaaatcaatcttatcaacaaaytataaaccattagacttttattatatttaagttttttctaataccatatggatggatatactgttgaaaagttgtaacaataattctgaaaaatgattgtatttatgactgcagagaaataaacaaaaattgatatttttcttggaaaaattaatttccaattaatatagattttttatttcagtatataaggatttctttaaagcaaaagacaacagacccacaacaaataagctgttatcaattcattaatggctttccaaaacatggtattaagaatatacaaaaataaatctatatttagataaaatatttagcattgaaccacacaaaatatattcctcaaaattaaaactgacagccttgctcatatattcttttgtaagaaaaatgtaaatatc

SEQ ID NO: 287985 - DNA, 518 bp, Homo sapiens
gtgaggaccaaagtgagaacttacatccctgttttcccgcttgactactgccttttctaaaaccacccatgcccaccctgcctccgatcctgtgcccattagaaacctcaggcttaaccagcagagagaggagaggcagctgaacatcagaggctagggttagatgtgagagagaagtggcttgacttcagagggacagcttgacagcatagctttggagaggagtgcagtcatccctacaagattatcttcctgctccatcccttttcagttccccttcccactgacagccactatcactggcaataaaatcctccacatttactatcttcaattcattcatgcgacattgttcctcctggtcgccggacaggtactcatrtgccacaagtgtggattcaaatgctgtcacactgactcttcactgagctattaacacttaagccatctgcagatggcaaagctaaaacggcactgcaacacttcctctggggcttcagggatcatggccatcctgc

SEQ ID NO: 287986 - DNA, 547 bp, Homo sapiens
tccatagtcatggcatggaagactttaatattattaaaatgttcatactacactatgtgatctatagatttaatattattaacataaaaattccaaatatgctacattttgtatagaaaattttaaaaatatctaaaattcatatggaaccacaaaagacccagaagagcaaaagtaattttgagaaagcagaacaaaactgattctgatttcaaaatatatatgtgataaagctacagtaattaaaacacgatggtactataaaaaatacagacctatacatcatggaacagaatagagggcccagaaataaacctacacaaatacagacaactgatcttatacaagggtgccgagaatacacattsaggagtgaatagtctcttcgacaaatattgttggaaaaacagactatccacacgcaaaataatgaaattggaccagaattaccttacatcatacacaaaaatgaactcaaactgtaacaaaaacttaaagacatgaaactttaaaacttctagaagagaacataggaaaaactcttttt

SEQ ID NO: 287987 - DNA, 556 bp, Homo sapiens
taaaaagaaaaaataaaggaaaaggaaagaaagaatgaaggaaagaaggaaggaaggaaggaaagaaggaaggaaataagtttgattcaaagcttgacccaagtgcaatttggggaagattatctgttttattcaaatctggcataagcagcaacattttacattctgctgaaaacaaagggcrttgttacttgctcctgaggtaaggtttctttatctaactttattgtattagcaactataagagaatgtgaaagttcaaatattttacctttttattccttcagtgattttaggtttgtttcattgttcctatcctgtgggttgggtcactatataaagatagattatactcagtaatttcttaaaaattttgtatgagtttgtttacataatagatcttattggtgttaacttccttttctctagagagcaaactagacaaatggttcagatataatatagatcaaagcaaatatattgtttgctgttggctagaggccaataatttaaaggctaatatgtcagaaactatgctagtacaagtagatttcat

SEQ ID NO: 287988 - DNA, 601 bp, Homo sapiens
attgtttgctgttggctagaggccaataatttaaaggctaatatgtcagaaactatgctagtacaagtagatttcatcagtatatggcctaaaatgtaaatattcattatgtattaaacagtataatcttatccaaataggttcttcatactcatattttaccttgttccctgacacaaatatctagggcttccattaataagggtctgataggatttgcctctgtgttcctgctcaaatatcatgtcaaattgtaatcccttatgttggaggtggggggcctagtgggaggtgattggatcatgggggaaaatttcccctttggtgctgttcttgtgatagtgagtgagtgattgcaagatctggttctttaaaagtgtgtrtcacctctcaccccttccacttccttctgctccaggcatgtaagatgtgactgcttcccttttgccttccatcatgattgttaagtttcctgaggcctttccagaagcagaagcctgcatagccttcaggactgtgatcaaattaaaactcttcccttcatcaattacccagtttcaggtatttctttatagcagtgtgagaatggactaatataggg

SEQ ID NO: 287989 - DNA, 416 bp, Homo sapiens
ctaactgaggctttgagatatatcatatttctacacacttttctggcacttctatggtttgatataaggaaaacatactctacatagccacagatcaatagctgctgtaaaccaaacccagattttccctgctgagtaccgtagtgcyttaatcaaaatacccagggagcaagaaaaataatatctgactatataaattactgaggctttgaggttgttttttgaggggaatgtaggagagttggtaactgactaatacaaatttaatcatgtcctatgtgttattgcaatcccttcataaaataatactagtttacaatctttagaaatatcatagcctaattcagaacattatgagaatgatcttgataacacaagttatacaatatatacattttgtatatattgtataagcc

SEQ ID NO: 287990 - DNA, 416 bp, Homo sapiens
ctaactgaggctttgagatatatcatatttctacacacttttctggcacttctatggtttgatataaggaaaacatactctacatagccacagatcaatagctgctgtaaaccaaacccagattttccctgctgagtaccgtagtgccttaatcaaaatacccagggagcaagaaaaataatatctgactatataaattactgaggctttgaggttgttttttgaggggaatgtaggagagttggtaactgactaatacaaatttaatcatgtcctatgtgttattgcaatcccttcataaaataatactagtttacaatctttagaaatatcatagcytaattcagaacattatgagaatgatcttgataacacaagttatacaatatatacattttgtatatattgtataagcc

SEQ ID NO: 287991 - DNA, 573 bp, Homo sapiens
agccacactgaataggtttggatttcagcttcattaatgtaaagcaaatgaccttaagaggttgcttaacccctcagtaacttttctcatttgtaataataataataataataataataatcttctagacttaggattaatgaattgatacatctaaacatctaaaatcacttagaaaagttcccggcaaatataaagtacagggtaaatattagttatctatttttatcaacagaaagtagacctgcttggtaaaagtacaagaggtgaagataaaagtaatgcaataataccagtaaaaatatgtttgaatataaagaaaataaaattatatttgattggagttgcaaaagaaaatagaatgaggccaaaactacaggaatagaagattaytaaaagtctggaaaatgtcataaagaaggcttttcatcctacctttagcgtccgacatcactttggatataaaatacatgaataagcttcagtaaaaatgctgttccaatgtaatctatataaagagtctatatatttgtcaagaattactggttgtgaaagagaagtgagtgtcagctt

SEQ ID NO: 287992 - DNA, 573 bp, Homo sapiens
agccacactgaataggtttggatttcagcttcattaatgtaaagcaaatgaccttaagaggttgcttaacccctcagtaacttttctcatttgtaataataataataataataataataatcttctagacttaggattaatgaattgatacatctaaacatctaaaatcacttagaaaagttcccggcaaatataaagtacagggtaaatattagttatctatttttatcaacagaaagtagacctgcttggtaaaagtacaagaggtgaagataaaagtaatgcaataataccagtaaaaatatgtttgaatataaagaaaataaaattatatttgattggagttgcaaaagaaaatagaatgaggccaaaactacaggaatagaagattattaaaagtctggaaaatgtcataaagaaggcttttcatcctacctttagcgtccgacatcactttggatataaaatacatgaataagcttcagtaaaaatgctgttccaatgtaatctatataaasagtctatatatttgtcaagaattactggttgtgaaagagaagtgagtgtcagctt

SEQ ID NO: 287993 - DNA, 652 bp, Homo sapiens
cacttgacctgccttagaaggtatgatattgtgattatacacattagattttattcatggtttctgcctcataactcccatagcccttgttataatgttggggtgctttaggcctcagaagttggcttcagaaaatagaatctctctctctgaccttcttctgcttgcctttcacytgcttctttttctcccccaggcaggcttttcaaactaaaaatatactctatcccttacctttctgtctaggagctgatcttaaagaaattctttgacttatcttgtctgattgtgggtcataagaccctcatttcagaaggggtcctgctccatacctgaaggaaggaatgtatacagagaggccatgaagaatctgaacagaaaaggcctgctgagtttgtccattcagtctattagtattagattatgcactttttgtccagttacatttctatacagttgtcaattatcgctgtccagtgaagtgtctgtaaaaggatcaagagaacagggtttggagaacttccaggtaattgaacacatggaagttcctggagggtgctgcacccaagaaggcatagaggttctgtgcccctttctccataccttgtcctgtgcatatcttctatgtggtgtatatgggtatcctttgcaa

SEQ ID NO: 287994 - DNA, 575 bp, Homo sapiens
cacattagattttattcatggtttctgcctcataactcccatagcccttgttataatgttggggtgctttaggcctcagaagttggcttcagaaaatagaatctctctctctgaccttcttctgcttgcctttcacctgcttctttttctcccccaggcaggcttttcaaactaaaaatatactctatcccttacctttctgtctaggagctgatcttaaagaaattctttgacttatcttgtctgattgtgggtcataagaccctcatttcagaaggggtcctgctccatacctgaaggaaggaatgtatacagagaggccatgaagaatctgaacagaaaaggcctgctgagtttgtccattcagtctattagtattagattatgcactttttgtccagtyacatttctatacagttgtcaattatcgctgtccagtgaagtgtctgtaaaaggatcaagagaacagggtttggagaacttccaggtaattgaacacatggaagttcctggagggtgctgcacccaagaaggcatagaggttctgtgcccctttctccataccttgtcctgtg

SEQ ID NO: 287995 - DNA, 653 bp, Homo sapiens
tataataaagggaatttatgaaaaatgctcaatggtgaaagactgaactttccctctaagaccagaaataagacaargatatccaatttcaccactactgttcaaaattgtactggaagatctagctaggtcaattaggcaagaaaaagaagtaaaaggcatccaaattggaaagaaaggaagacatccaaactatctttttttacggatgacatgatcctatgtatatagaaaataaaaaaaaactactatagctaataaatgagttaccaaaatcttagggtactaaatcaacaccaaaatcagtgtgtttctacacaacaacaatgaacaatctgaaaaggaaattaagaaaataattccatttacaacagcttccaaaagaataaaatacctaggaataaatttaaccatggaaataaaagacttgtacactgaaaattacaaaacattgctgaaacaaatcaaagaagaactaaataaatgaaaggactatgttcatgaattaaaatgcttaatattgttaagatgcaatactacccaaagtgatctataaattcaatgaaattcttatgaatattttaacagcctttttttaatttacagaaatgagaaagttaaccctcaaagccatatagaattgcaaggagctc

SEQ ID NO: 287996 - DNA, 609 bp, Homo sapiens
ctccaaaatgccaaacaatattgaaaaagaagaataaaattggaggactcataatttctgacttcaaaacttaactataaagctacagtgataaaaacactgtagtactgtataaagtagacataaaaaatcaatggaaataaaccaatacatatatggctaattgatttttgacaaagatgccaagactattcaataggaaaagaatggtctcttcaataatgtttctgggataagtacacatgcacacacaaaagtgaaattggactcctactttacaccatatgcaaaaattaactcaagatggatcggtggcctgcatgtaagtgcraaaccttaatactcttagaagaaaacattggggtaagtttttatggccttgggctcaataatggatttttagataggacaccaaaaacttcagcaaccaaagaaaaatgaaataaattgaccttcctaaaaattaaaatcctttgtgcatcaatgaatattatcaagaaaatgaagacaattcataagatgggagaaaatatttgccagtcatatatctcataagggtctagtatctatattacataaagaactcttacaactcaaaaagaaaaagac

SEQ ID NO: 287997 - DNA, 647 bp, Homo sapiens
ctttaaaatggctaactttacattatgtaaattttacctcaatttttaaaaatctacttaggaatgattctcatgtactaaaatgcacccaatttaaatgcatgtcaataaattttgamatatatacaatttcatgtaacaaccacctcaatcaaaatatagaacatttctattcacctgaaaagtttctttgtgctccttttcagtcatactaccaccttgaactcctagccggacaaacactgatctttttttctcacaccatatattagtttttcttatactaaaacatttataaatcaaggtatgtgcttactttttgaaggctagcttctttcacagtatgtgagatttgtccaatttgttgatacatcagtaatccattcctttttaatcctaaacagattccattgtatgactaagacacaatttttttactcagctatctatttgtgttgtttccaatttttggcaattatgaataaagctttgatgaacatctgtgtacaaatctgtggttggtatgtttttatttcttttgggtaaattcctacaagtggaattgccagatcataaggtaagtatatatatgtttagccttttttttttttttgtttgagtcagagtctcattctgttgcccagcca

SEQ ID NO: 287998 - DNA, 647 bp, Homo sapiens
ctttaaaatggctaactttacattatgtaaattttacctcaatttttaaaaatctacttaggaatgattctcatgtactaaaatgcacccaatttaaatgcatgtcaataaattttgacatatatacaatttcatgtaacaaccacctcaatcaaaatatagaacatttctattcacctgaaaagtttctttgtgctccttttcagtcatactaccaccttgaactcctagccggacaaacactgatctttttttctcacaccatatattagtttttcttatactaaaacatttataaatcaaggtatgtgcttactttttgaaggctagcttctttcacagtatgtgagatttgtccaatttgttgatacatcagtaatccattcctttttaatcctaaacagattccattgtatgactaagacacaatttttttactcrgctatctatttgtgttgtttccaatttttggcaattatgaataaagctttgatgaacatctgtgtacaaatctgtggttggtatgtttttatttcttttgggtaaattcctacaagtggaattgccagatcataaggtaagtatatatatgtttagccttttttttttttttgtttgagtcagagtctcattctgttgcccagcca

SEQ ID NO: 287999 - DNA, 597 bp, Homo sapiens
ctatctatttgtgttgtttccaatttttggcaattatgaataaagctttgatgaacatctgtgtacaaatctgtggttggtatgtttttatttcttttgggtaaattccyacaagtggaattgccagatcataaggtaagtatatatatgtttagccttttttttttttttgtttgagtcagagtctcattctgttgcccagccaggctggagtgcagtgacatgatcgcagctcactgcaacctctgcctcctgggttcaagagattcttgtgtctcagactcctgagtagctgggattacatgcatgtgccaccagcccagctaatttttgtaattttaatagagacagtgtttcgccatgttggccaggctggtcttgaacttttggcttcaagtgatccacccaccttcgcctcccaaagtgctgggattacaggcgtgagccaccatgcccagcctgctttatttatttatatttttaagccagccttttttctgaatacttgaaacattttacactccatcagttgggtatgagtgtcatatgttccaaatcctcaccaagagttggtatgatcagtctttaattttagac

SEQ ID NO: 288000 - DNA, 597 bp, Homo sapiens
ctatctatttgtgttgtttccaatttttggcaattatgaataaagctttgatgaacatctgtgtacaaatctgtggttggtatgtttttatttcttttgggtaaattcctacaagtggaattgccagatcataaggtaagtatatatatgtttagccttttttttttttttgtttgagtcagagtctcattctgttgcccagccaggctggagtgcagtgacatgatcgcagctcactgcaacctctgcctcctgggttcaagagattcttgtgtctcagactcctgagtagctgggattacatgcatgtgccaccagcccagctaatttttgtaattttaatagagacagtgtttcgccatgttggccaggctggtcttgaacttttggcttcaagtgatccacccaccttcgcctcccaaagtgctgggattacaggcgtgagccaccatgcccagcctgctttatttatttatatttttaagccagccttttttctgaatactygaaacattttacactccatcagttgggtatgagtgtcatatgttccaaatcctcaccaagagttggtatgatcagtctttaattttagac

SEQ ID NO: 288001 - DNA, 601 bp, Homo sapiens
tcgccatgttggccaggctggtcttgaacttttggcttcaagtgatccacccaccttcgcctcccaaagtgctgggattacaggcgtgagccaccatgcccagcctgctttatttatttatatttttaagccagccttttttctgaatacttgaaacattttacactccatcagttgggtrtgagtgtcatatgttccaaatcctcaccaagagttggtatgatcagtctttaattttagacatcataagaggtgggtagttgtatctcattgtggctttaatttgcatttctataatgttatatgatgttgagcttatttttacattcatttgctatccatatgtctttggtgaagtatctgttcaaatttttggctcattttacaatttttttttattattgagttttaagagccctttatatattctggctacaagttcttaattaaatatgggattattcaaatattctctcccaacttatggcttgtcttttccctctgttgaaagtatttcaaagagcagatgttcttagttttagtgaaggccaatttatcttttttttcttttacattgtgctttggtgtcttacccaagaaa

SEQ ID NO: 288002 - DNA, 601 bp, Homo sapiens
tcgccatgttggccaggctggtcttgaacttttggcttcaagtgatccacccaccttcgcctcccaaagtgctgggattacaggcgtgagccaccatgcccagcctgctttatttatttatatttttaagccagccttttttctgaatacttgaaacattttacactccatcagttgggtatgagtgtcatatgttccaaatcctcaccaagagttggtatgatcagtctttaattttagacatcataagaggtgggtagttgtatctcaytgtggctttaatttgcatttctataatgttatatgatgttgagcttatttttacattcatttgctatccatatgtctttggtgaagtatctgttcaaatttttggctcattttacaatttttttttattattgagttttaagagccctttatatattctggctacaagttcttaattaaatatgggattattcaaatattctctcccaacttatggcttgtcttttccctctgttgaaagtatttcaaagagcagatgttcttagttttagtgaaggccaatttatcttttttttcttttacattgtgctttggtgtcttacccaagaaa

SEQ ID NO: 288003 - DNA, 601 bp, Homo sapiens
tcgccatgttggccaggctggtcttgaacttttggcttcaagtgatccacccaccttcgcctcccaaagtgctgggattacaggcgtgagccaccatgcccagcctgctttatttatttatatttttaagccagccttttttctgaatacttgaaacattttacactccatcagttgggtatgagtgtcatatgttccaaatcctcaccaagagttggtatgatcagtctttaattttagacatcataagaggtgggtagttgtatctcattgtggctttaatttgcatttctataatgttatatgatgttgagcttatttttacattcatttgctatccatatgtctttggtgaagtatctgttcaaatttttggctcattttacaatttttttttattattgagttttaagagccctttatatattctggctacaagttcttaattaaatatgggattattcaaatattctctcccaacttatggcttgtcttttccstctgttgaaagtatttcaaagagcagatgttcttagttttagtgaaggccaatttatcttttttttcttttacattgtgctttggtgtcttacccaagaaa

SEQ ID NO: 288004 - DNA, 597 bp, Homo sapiens
gctttctctgcggctcgttgcatctctattcataaacccttgatcggctatttccagtaactgtgaggtattcatacccacaaacccagcckgtttctgcagttttctcctgatatcttctgcgctttgattaactaaggccatgttaatcatgcgctgattttcagggctatctggatcaaaaggagtgtacatacagtaagcctcacacagactttcatagaattgcactggactcttcttttccttggatgacctcagagaccttatttacatttgtagccttttaagcccctttgtttagaccttctattaatgcctcatggtaccgtcttagcctctctatgtctggtccctcgttcgggtcccactgggggtctgttcctggcagctgaattcttatatattcttgggggttttggtaatcagctgggacgtgctcctatagccacttagttgccacctggagcaccctttgcctttcatctgtattaaagaggtacatgaatagctggtggcaatcagcccaagtaggattatgagtctgtataatagtttggagcaagtcagttaaaggttgaggcttttcagcgtaag

SEQ ID NO: 288005 - DNA, 413 bp, Homo sapiens
gatgctttctttataaaaacatcagtgaaataacaattctataattgaaaataattctgatgcagaaggagagggacagcaaagaaacccattgactgatatgcaratttttcttgccaaactggtaaaaaataattctaatttttccagtattagcaaagagaaagaaaggggacatatccttttactgaaaaaatgctagccaacctgataggaaaaatagagaaaagatgcaaattaccagtatcaggaataaatgagttaacatcactacagattctggagatattaaaaggaaagtaagacaattttatggaaatttatgtcaataaattcaacaacttagatgaagtggacaaattccttgaggacaaaaactgtcaaagctcactctagaaaaactggataaccag

SEQ ID NO: 288006 - DNA, 611 bp, Homo sapiens
tttcagcttcttgagtgaaagatatgctaacttgtgctgcactaagcattggttgtgcttttatttatcagtactgaaaaggcattacagaccattttcatatggcaaagaacaagtttggagacttattcgggagcactggaaaacaactttcttttctaaaaaggttctgatgttacaaaacatcacattttacccctgatataatttaagcagaaaacaaattcattgcccaagtgatatggtttggctctgtgtccccacccaaatctcatcttgaattgtactsccataattcccacatgttgtgggagggacccagtgggagatacttgaatcatgagggtggtttcccccatactattctcatggtagtaaataagtctcatgagatgtgatggttttataaggggtttcagctttcactacctcctcatactctcttgccaccaccatgtaagaagtgcctttcaccttccaccatgattgtgaggcctccctagccacgtggaactgtgagtccaataaacatctttcttttggaaattgcccagtctcaggtacatctttatcagcagcatgaaaatggactaatacaccaagtgacatcc

SEQ ID NO: 288007 - DNA, 615 bp, Homo sapiens
cagagtacagctgtgaaaacacaggccttgccctgtttatattgtatttgggaattctgggaactcttggttttgtttaagagacctaaagacaaacaggcagttaacagcataaactgatgacagccgagatgggcaaaaggcagggtgctaacagagcagagaaggagcactcaatccagtcttggggaatgtcaagaaagacttcctggagggggtaatgtcttagttgggacytcatggatgaataagagatggctgggtgctggcaaggcagggagtagacagaaagaaggaagagtaggtatgcagagactgaggtgagggagtacctgatggcactggagagttgtaaatagctcaggatggctgaagtgtggtatgtgtgagaaaactggagtgggaggtgaggggagagacggggcaggtaaacaggggcatgattatgaaaggtccggcatacaaggctaagaagtttggcattgatctttagggtaatcgggggccactgataacaggaatcacttgtcagatttacacttgagaaaaaaacctaaggaatgttgaacaagtcgctttttgcctatatctatcttaaaaattaaagtttcagct

SEQ ID NO: 288008 - DNA, 625 bp, Homo sapiens
tcccttgtgatctaagataagttgtcatttttttaaataattcgtattatctaaaagatgttttttgtgtgcttcatagtaaccacaatgcaaaaacctatcatagatacactaaaataaaaaaagcaatgaattaaaacatactaccagagaaaatatcttaaccgcaaaaggaagacagtaagaaaggaaaagaggagttacaaaacaactagaaaacaagaaacaaaatggcagtagtaagtcctcatcaataataacatggatataaatggattcaagcctccaattaaaagacacagaatagctgaattgataaagaaacaagaccaaactacacgctgccaaaagaaacccacctcacctataaaaatacatatatactgaaagtgaagggatggaaaaagatacactaaaaaagatcaagaatagcgatatttataacagataaaatagactactagtcaaaaacygtaaaaagagataaagaaggtcaatatataatgataaaggggtcaattcagcaagaggatataacaactataaatatctatgcacccaacatcggagcacccaagtatataaagcaaacagatctaccaagggagaggtagattgccacaca

SEQ ID NO: 288009 - DNA, 603 bp, Homo sapiens
tgatgaatgggtataaataaatggttagatagaagaaataagataygatgttcaatagatcagtaggatgactatagttaacattagtctattgtacatttcaaaatagctagaaaagagcaattcaaatgttaacacaaaggcaagataaatatttaaggtgatagatatcccaattatcctaatttgattatatgaatgtatcaaatcttaacatgtacccccaaaatatgtacatctattatgtaataataaaaaaatgaaaacatttaaaaaacaacaaaaaagactggttccttccctatttctatatcctacagacagctggagccaaacctcagaaatcctagccttctcagtgatatggagagaacatctgaggagtctgcacaggaaatgctaggaattacattaacttcaatacacaacccacatcaacagcaaggaaagaaaaccatcagcctggggaactcaagagtaaaattcaatttaaaagacagagccactgccacatgcaacattggtccttataccttgacctcctctctatgaatcctgtatctcctgcctagagcttctcacaaggtgctgcttggtcaagcc

SEQ ID NO: 288010 - DNA, 603 bp, Homo sapiens
tgatgaatgggtataaataaatggttagatagaagaaataagatatgatgttcaatagatcagtaggatgactatagttaacattagtctattgtacatttcaaaatagctagaaaagagcaattcaaatgttaacacaaaggcaagataaayatttaaggtgatagatatcccaattatcctaatttgattatatgaatgtatcaaatcttaacatgtacccccaaaatatgtacatctattatgtaataataaaaaaatgaaaacatttaaaaaacaacaaaaaagactggttccttccctatttctatatcctacagacagctggagccaaacctcagaaatcctagccttctcagtgatatggagagaacatctgaggagtctgcacaggaaatgctaggaattacattaacttcaatacacaacccacatcaacagcaaggaaagaaaaccatcagcctggggaactcaagagtaaaattcaatttaaaagacagagccactgccacatgcaacattggtccttataccttgacctcctctctatgaatcctgtatctcctgcctagagcttctcacaaggtgctgcttggtcaagcc

SEQ ID NO: 288011 - DNA, 556 bp, Homo sapiens
gtgcagtcatatcacaaaagggctggcaaacctagtgcatcagccatacctccatattaatggaattatttttgtctgaattttgtgctcataaaagggaagaaaattactgaagttgtataggattttcttgggaaaaattcttcctaaaagatatttcccggtattctatttatgctgttcagtaggtaaacaaataaactagacttttagaatgctaagtaaatgaagttttagaatgccatatcaaaatgctcaaactcatagcccagctttttcaatgtagtatgcacagaatcctaagcgtgaacaggaaatgtgcgaaggcttcttttgcatccaaagtatccatggaatacaaatgttaaaataccgttcgacagaagtgttataaatccatgaatttaaaatacattttattctaataaacttggaaatttatgcctgcaatagacccrggaaataatgcaatcccttgttttatatatgagaaaacaaacgccaagaatcagtaagaaacataccagtccagattagttgcagaccttcaactaat

SEQ ID NO: 288012 - DNA, 547 bp, Homo sapiens
agaattcttcatgtgtttttaattaatttttatctatgcaatccaagtacaatttgtaacaagttaaaacggagataatatgattattcatggctggaagatttaaagcattgtttattgaaattgactaattttttgcttactacttaatccagccttaaagtagagctcattgttaacctcaaggcacaattttataggacagcaatagataaagtaaatacatgagttttcaacaagtcagatgctgcatttgttgaaatatttttaaaacaagctctttcgcttgtggcatttttactacgttacacacaagctcagctaagtgagcatgagccatgttaatatcttgtgagtataaatgtacagactgctcttattaatttcagtraagccagaagtacagcatccttctcacataagtacaagcacaaagacattttgagttaggcattgtattccatgaaatgaaaaggaacaagagcataaaaaaaagcttccaagcaaaacacacaaacaaatacaggaataagttggaaaccagaag

SEQ ID NO: 288013 - DNA, 649 bp, Homo sapiens
gcacccagcctccaataggtatttataagattatactcagtgtatagaactttatcaccgacttaaaaccaagattacatacaataaaaattcagattcaaacattattgacacattttctttcaggaagttgcctttgtttctcaaataaacatttaaccaaaattacttgggaaaatagtaaactaatagatgagtattcttgagtaacatcccaaatttaatagcttaaagcaaaacacaattacctcattttgaaattttaaatccactaatttatagagaatcatgcagctcaaatatgttgccataacattttgctgtatgctcataatcatttctttctttcttattcatccatccatttattcacaatatctgctgagatttctgccaatagctgacatttttgccctgaagaaatacttcagattttgcctagtcaaayaccgttttcaaaaatagccaatattcacttttagcatcaacaaatatattcatctgtccaaagatgctactcagtataagaaaatgaataaggtagttatcaagaaattgaatatgatcatatctttcaaagtaatattttaaagttggatttctcaccatacccctaaataacttcagatggactaaagagttaaactta

SEQ ID NO: 288014 - DNA, 570 bp, Homo sapiens
ggaacagaaattcattaaagctcttttttggggtaaattacccagtcttgggtatgtctttatcagcagcatgaaaacagactaatacaagggtcaagtcaaagaagactacatatatatatatatatatatatatatatatatatatataattaagtagccaaacttgaggacaaagagaattttgaaattagcaagagaagagaaaaaacctagcaaaacyatctttcaaaaattaaggagagattaagttttccccatccaaacaatcactgaaggagttttttagcattgtacctgccttacaaaaaatacttaaggggattcttcaaattgaaacaaaaatatgctgaacagcaaaggaaaagaatatgaaagcataaatttcattgatgaaggcaaatatgcagaaatatgtagattaatgtaacgctgtaatggtagtgtgtaatttagttttaactctattataaaagttaaaagataaaagtttgtttatagatacacaatataaaaagaaactgactacaagaatataaattatgtatatatgtgggagtaaaagtacag

SEQ ID NO: 288015 - DNA, 570 bp, Homo sapiens
ggaacagaaattcattaaagctcttttttggggtaaattacccagtcttgggtatgtctttatcagcagcatgaaaacagactaatacaagggtcaagtcaaagaagactacatatatatatatatatatatatatatatatatatatataattaagtagccaaacttgaggacaaagagaattttgaaattagcaagagaagagaaaaaacctagcaaaaccatctttyaaaaattaaggagagattaagttttccccatccaaacaatcactgaaggagttttttagcattgtacctgccttacaaaaaatacttaaggggattcttcaaattgaaacaaaaatatgctgaacagcaaaggaaaagaatatgaaagcataaatttcattgatgaaggcaaatatgcagaaatatgtagattaatgtaacgctgtaatggtagtgtgtaatttagttttaactctattataaaagttaaaagataaaagtttgtttatagatacacaatataaaaagaaactgactacaagaatataaattatgtatatatgtgggagtaaaagtacag

SEQ ID NO: 288016 - DNA, 2255 bp, Homo sapiens
taggttaaatctgctcacaaaagagcatcaggtcaatttgacttgtccccaagtatgatcacagctgtgacgaccttgatgttttaattctcagattaagtagttctcctacrtctaaaccatttccaatagaatgtgatggaaaacactcttcctttctgctctcaatttcctggctgaaaccaaccccctggatgcctcatccctaacatcatgataattttacttgtttctccaatcacctccctacctctgtatcttggtttcatccacccaaatttattccaaaaatgtttgaattctgaatcctgaagacagatgtttgaagactattgatcccttcttcccaataaacaagaagcacttagacaaattgagtgctttgggaggccctcacatttataccaggaggaagggcttaacgttaagccaaatagaagattgtaatggtctcaatatcttttttcttgtctgtgatctgccaggcttatatctaaaacwtctttaaaatggatccaacaataaaacaattacccaagataaacagcctgaaatagagaaaaacaggacagatttctcacattgcacatataaaattacaatatgcatttataatgcaaattaggtaaatgagagagatgaaatggtattgttttgcgtgaaagtattatatataaaaatagaacataatggactatcacgccacaagggttttttgtttttgtttttgttttttagtatcacacagtwctattccatatttatcatttggttctatttttagtccccaactcttactgtcaaaatcagaccttcttaaattaaacattaaaatacatcatatcaaccacgtaccacacaattccccatatggcgctgtcctcacattccacacactactctctcgacttttgcacgcattctgttgctatggccaaaagtgagtaaatttagcctatgtgaaaataaagaacgcttatcaccagacacatgcatcccacccaactaagaggtttccttcctttttccatctcaaagacaaatttacagaagaaattctccaaccccttgaatttgcaagcagaaaaawctcttaactgattatcctgtttccagatttagcttcatttaagccaggctcctacaatgcattcatagagatctttctaaagtgaaaatctgaatatggtcttccctttataaaaactgtaatcatttctaacttttccaggtttatccctttaggagggatgcaaacatttcatgatgatagcagccaactctatgatgctgawcctcaatgccatgataaattccagcttttctgaaaaatatcatattctgagaacagcacttcctctgtgctgccatacatttgctcatgatttcatcttacccattattccgcaaattcccatttgcctagctagtattcattcatccatctcaactcaattgaaataccacctgctttctaatagaatgcaattttttaaatgataatatccattttaataagaacatgagaaaaaaggcattcttatataatattggtaggtttataaactccaacaactatttgaaaaagaatttttcatttcttttctggcaattttaaacatttattttatgttaaaatgttcatatttttattttttggcaattgtaaataagaatatatttwagttgcaacaatatatttccatattatttatggttacttcagctccacagtggctgagttgagtagttacggcaaagacaatatggcccacaaggtctgaaatatttactatgtagctttttacagaaaaggtttgcccacccctatctagagcacaccttctgagttaccttattctgattctgatattttatagctctgtaggttatttataacctacaatactacagacaagaatttgatagcaatactcaaattcttgtctgtagacatggaaagcctctatcccccattgtgactgaagagagttttatttccatttgcacattcatttccawattcctgatctttaaatatgttttctggatttccctttgagctagttaaacatcttcccagtttcctaattaatgagttaaataaaatccttaacacagattcattcttccatctgcatgaagtcatgattttaaatttcttttgaaaattatttttaacagtgctctcaaattgtcactatttgaggttaagctacatatttgtataataaagtcattcttagacagcatat

SEQ ID NO: 288017 - DNA, 567 bp, Homo sapiens
gagaaatgcatatctaaagcacaatgagataccatttcataccagtcagaatggctattactaaaaagtcaacaaataaccaatgctggtgaggctgtggagaaaagggaatgcttctacactgctggtggtaatgtaaattagttcagccattgtggaaagcactgtgacaatttctcaaagaacttaaaacagaattatcatcagacccagcaatctcattactgggtatatacccacaggaaaagaaattgcttcttcctaaagatacatggatgcatatattaattgcaatactatttacaatagcacaaacatggaatcagcctaaatgcccgtcagcgacagactggacaaagaaaatgttacgtacaccatgaaatactatgcagctgtgaaaaagacaagatcacatcctttgcagcracatggttggagctggaggccattatcctaagcaaagtaacacaggaacagaaaaataaataccacgtttgcatttataagtgggaactaaacaacaaggacatgtgggtactagaaggggaacagcagacactggagccc

SEQ ID NO: 288018 - DNA, 493 bp, Homo sapiens
ctgggccaaaatatcattttttgaatattcctgactgggcttgtcggttggttttgcatttatataaataaccactattacttttgcaccaatctaatacctcgcctctgtcctctcgcttaagttgtgggctgtctggctgcaggcagggggcatgcatagtgtcggctgttttcttcatttgtggcctttggtcggctttgggatggagcaggagttgggaaaggtgaggtctggtcccgccgagtcgtgagaccacagacagatcagtagatgatgctggacttgtcttcatcgagcattcgagggcctctgaacttgtgtgtgtttcrataccagatgatgtgattagagtgtgtggtttgtagaaaattaaattctttagccaaaccggctgctaaagcttctgcccagaatcaatatactattagaagtcctggaaactaataaacataccataactattaatttatgaatagatttttggaaataa

SEQ ID NO: 288019 - DNA, 1139 bp, Homo sapiens
acagcactgcgagaccctccctgaggaccaggctggctgagttccacctgcagctctgtcagtgctggttatggctgtcacctgagcggtgcccacgtggggactgtgcatcctgtcccactcccgtctgttcccacctacctgggccctgccccctttctccccaacgcagctccctgccgtacttcaccgtggctgattctcacatcccaggtgcctgaccatcagtcctgagatcttcatgtcctaagaagcctcccagtcttcacacagacaaagctcacgcccctcctgatggcccaggagaacctcaagctcatgtcaacractcccctttccagtccagtcaggacctttggcaccgtaatgctccaagcctggtcagaggctgtcaggatggataggcaggggaggtagatgtgaatgctgttctgtagctcttcttcacttggcaataaatgagaggtttctttccatgccagtacatagaaagtgacctacatgtttttagagggtgaacggttttcttctatgtgcatgtaccataatttaacctgtwaagtagctgacagtctagtgagggagatggataagtagatggacaattaaatacattcttctaagttctgctacagccagggaaaactcaggatcccatgggagttcatgggaagggcaataaaaccactttgggaaagtttgggaaggctttttgaaagagtgctatggtccgcatgtttgtgtctcttcagaattcatawgttgaagtctttttttgttaaaattttttttttaacttttattttaaattcaggggtaaatgcacatgtttgttacagaggtaaacttgttccacaggagtttgttgtacagattatttcatcacgcaggtattaagcttagtacccattagttatttttcctgagtctctccctcctcccaccctccacactagggtagttcccagtgtgtgttgttcccctgtatgtgtccatgtgttctcatcatttagctcccacttataagtgagaacatgtggtacttggttttctgttcctgaattagtttgctaaggataatggcctccagcttcatccatattcctgcaaaggacatgatctcattcttttttatggct

SEQ ID NO: 288020 - DNA, 580 bp, Homo sapiens
aagtagctgacagtctagtgagggagatggataagtagatggacaattaaatacattcttctaagttctgctacagccagggaaaactcaggatcccatgggagttcatgggaagggcaataaaaccactttgggaaagtttgggaaggctttttgaaagagtgctatggtccgcatgtttgtgtctcttcagaattcataagttgaagtctttttttgttaaaattttttttttaacttttattttaaattcaggggtaaatgcacatgtttgttacagaggtaaacttgttccacaggagtttgttgtacagattatttcatcacgcaggtattaagcttagtacccattagttatttttcctgagtctctccctcctcccaccctccacactagggtagttcccagtgtgtgttgttcccctstatgtgtccatgtgttctcatcatttagctcccacttataagtgagaacatgtggtacttggttttctgttcctgaattagtttgctaaggataatggcctccagcttcatccatattcctgcaaaggacatgatctcattcttttttatggct

SEQ ID NO: 288021 - DNA, 580 bp, Homo sapiens
aagtagctgacagtctagtgagggagatggataagtagatggacaattaaatacattcttctaagttctgctacagccagggaaaactcaggatcccatgggagttcatgggaagggcaataaaaccactttgggaaagtttgggaaggctttttgaaagagtgctatggtccgcatgtttgtgtctcttcagaattcataagttgaagtctttttttgttaaaattttttttttaacttttattttaaattcaggggtaaatgcacatgtttgttacagaggtaaacttgttccacaggagtttgttgtacagattatttcatcacgcaggtattaagcttagtacccattagttatttttcctgagtctctccctcctcccaccctccacactagggtagttcccagtgtgtgttgttcccctgtatgtgtccatgtgtyctcatcatttagctcccacttataagtgagaacatgtggtacttggttttctgttcctgaattagtttgctaaggataatggcctccagcttcatccatattcctgcaaaggacatgatctcattcttttttatggct

SEQ ID NO: 288022 - DNA, 569 bp, Homo sapiens
ctggccagggtagccttcctgtttcttaggtgcttgcttattccagccggtgattaagaggcaggccctgcagggtgcaggttcattccttcccatgtaattgaatctcctcccaacggccagctaaggcatggagaggctaactacatttcccaagatcatgaagccagccaggctgccatctgagctccttggggacagttcccagatactgggaagtatgagaccctttgmaagtgtgcttgattagaaagctacttctgccaattggtggcccacccagcagctgctttgagcataaaccacagatgaaacctcagccgcttctccccagcatcacccagtgctgtccatagcagaggcctcaagctcaaagtgcaggacttggtgtcctcactgacgggggctatgggaataaacttggaggtgggagtggcctggggagggcgcctcagctgagctgctggggagcacaggcaagaagggtggtgaggcagcatgactaggtggtaaaacgcaggactctagaatccaaactctgccatttactagctcagtgacattgggca

SEQ ID NO: 288023 - DNA, 480 bp, Homo sapiens
tggttccattacaaatttatgagcttcccagcctcagctgtgctgccaaccctgctcagtcatcttctaatcatctcttgttgactttctctccctttcctttctgtggctgccctgacctccccttgcttcacccaacccaccatcaccccctattcccagccgaggctctgcagagaatatggaggtcatcagaagtgatttatttcatgtatgtcccttctaagtttttacttctaaatttgtctatatttttacttccttcatcattatatctgaaattattctactctcacatcttcactgtctctttctttctcygggctttcgcccagcacatacaattatgtattcatttcccctttcacatgcttttcccccatttctttctactttgcttccttttcaaagatctgccttgtaggttcctctcttaatcactcgtccactggtccttcacctttgcagcccagtggaatc

SEQ ID NO: 288024 - DNA, 574 bp, Homo sapiens
cctttttactattttgtaaagtgtgtttttgtgctcactgaacagtatatcatatacatctccataaataatgtttatcattttgtcatttagtaatatcatagttttaaaatggtttattttgtcatctcatgaatgcatagtcttaaaagatattttattaattttctattgtgggacatttgttttgaatttttcactataaatcacagtgcaggacagaactgccatcttttcctactggcctgaggcattgctgctatcacatcctagtttccacacatacatgggttcgttctggactctctgccctgttgcatttgtccttcaggctatttacacaccatccccatattgttttagttattattastttgtcatgtgtttccctgcccctccaagcctctgatttatatttttaaatgtctatgctattctcttacattttctactccaggtgcatttttttcttcagtttgaaaaactccatgaaatatccctaaggttcttaagggaattgctttgtatttataaattactttgtgtagaactgacctactggggcttcccacca

SEQ ID NO: 288025 - DNA, 606 bp, Homo sapiens
tgtggtgatctgcttcaattgtagatctgattacgtctacagcagttgtcattggaggtctgccgaacctataagcctctcctttacagagacgtgtgctgattcctgaagccatgtttgcgtcatgagagctggagttcccttgccttgctcatagctcattgaattagggatgaatacgctgacccaagctggcttaattgaattctttctccatgaagtttgaattggggtcaataaccactgttgtgtgtgtctctctgtatggcyagaccctttggtttttttttttctttcttcctttcttttcatttcatttccttccttcctctttctttttccccttctcttttctttctttttcatccagttttattgaaatataattgatgaatattgtgtatatttaaggtgtaaaacaatgctttgatatacatgtactatacattgagaaataattactatcaaactaattagcatattcatcagctcacacagttactgtgtgtatgtggtgagaacattgacaacgtactgcctttacaaatttcaagtatacaagaaagtattactgactgtagtcaccaggctgtacattagatctct

SEQ ID NO: 288026 - DNA, 425 bp, Homo sapiens
tcaataaccactgttgtgtgtgtctctctgtatggctagaccctttggtttttttttttctttcttcctttcttttcatttcatttccttccttcctctttctttttccccttctcttttytttctttttcatccagttttattgaaatataattgatgaatattgtgtatatttaaggtgtaaaacaatgctttgatatacatgtactatacattgagaaataattactatcaaactaattagcatattcatcagctcacacagttactgtgtgtatgtggtgagaacattgacaacgtactgcctttacaaatttcaagtatacaagaaagtattactgactgtagtcaccaggctgtacattagatctctggaacttcatcctgtgtaactgacagtttgtaccctttgaccaatatctctg

SEQ ID NO: 288027 - DNA, 425 bp, Homo sapiens
tcaataaccactgttgtgtgtgtctctctgtatggctagaccctttggtttttttttttctttcttcctttcttttcatttcatttccttccttcctctttctttttccccttctcttttctttytttttcatccagttttattgaaatataattgatgaatattgtgtatatttaaggtgtaaaacaatgctttgatatacatgtactatacattgagaaataattactatcaaactaattagcatattcatcagctcacacagttactgtgtgtatgtggtgagaacattgacaacgtactgcctttacaaatttcaagtatacaagaaagtattactgactgtagtcaccaggctgtacattagatctctggaacttcatcctgtgtaactgacagtttgtaccctttgaccaatatctctg

SEQ ID NO: 288028 - DNA, 639 bp, Homo sapiens
ttgttgtataataatgtggcttccacacatgggtggcataaaacaatgtcaatttattatcttgccattcttcagtttggaagttcaacattggtctcactgggatgaaatgaagtcatcatcagggccaattcctttggtggctctcaggaagaatccatttccttgtgcatttacagcttctggaggctgcccacattccttgccttgtggccccttcttccaccttcaaagtgaattatgtggcatctttctgactctacttccagtgtcacagctttctccagctcactctttttactcccctgccccatgtgaatacactgagcccacttggataaatcaggatgattttctcatctcaaggttattgtttggtcatgttcccacccacatctcatcttgaattcccatgtgtggtggaggrgacctggtgggaggtaattgaatcatggggtcagatcttttccatgtgttctcacgatagtgaataagtctcatgagatctgatggttttacaagggggattttccctgaacaagctctctctttgcctgctgccatccatgtaagaggtgacttgctcctccttgccttctgccatgattgtgatgcttccccagccatgtgcaactgtga

SEQ ID NO: 288029 - DNA, 580 bp, Homo sapiens
gcggaactagatgaaatgtttggggaactagatgaaatcaaatatgcttttaaaaaaacattataaatgcctttctttttttttttttttgctttccttactttccttttcctttccttccagcctggaaccattaactgaatataccaagaatgctcttgagtgaggacccatgctgtcttggtcatgctatgtctcagctgcagaagtgacctggtgctagaaatctgaaactagcattccaccgggatgacaatccataatctcctcatgctccttctgccccatatttcaggtcttgttatctccaggagcgagagccattcaaggtcttctttttgtctttcttttctcacagcttacaatgacaagggccaggaagccaaggagaggatatttgggggttgctaagtaggagccrccaggacagtgatctcgagggcctatctgaatgatgggaggtattgaagaattcccaatagactgcatccagatcatggctacagcaagcttttccccatccctttgagcaacttatattcctttttttgtcttttttttttaaagttttattttaagt

SEQ ID NO: 288030 - DNA, 600 bp, Homo sapiens
tttgagatgtgtgttaagaatccagctgagatgtaaagttgggttgaggcatgtggaattcaggagagaggtctagcaggagagataaacctgggagccatcagtgtaaattgcatttaacaccatgagcctgaaagaggtcttagagaggtctctagtgagaagggtagaccrggaaaagaaagccgagggctgggtctggggccattgatgttcagacgtctgagatctgagcagggaccaggagaaacaaccaagaaggagtggccagtgatgtagaaggagactctagagaaaagagcatcctggaggcaaatcataaaagactttcaggaagaaggtagggacaaaaattgtcaaatgtttctgagagactgagtaagatgaagaccgagaattgatgattgggctttgtaacatggaggtattggaaacctagataagggctgttttggtgaggtgatgggcaaaaaagcccaaaagcattgagttcaagatggaaaaagaggtcagaaattggagaccattctgcaaaggagagcagagaaatgagtgggaactagaagtaggtaaagggtgagcaaagggtttgtgttttgc

SEQ ID NO: 288031 - DNA, 574 bp, Homo sapiens
cagacggtaagaaagcagaaggtgtaaagggaaaacaagccaggtatttaggaggtgctcctggaarccccaactgcaacttctcctggtgtttcattttcctgaactatgtctcaaaaccacatccttctttaagaacgtggtaatttttaaatgtttccacttggataaacctccttctgagaagtggagcctaacttttctcctcttgagtgcacactgtactgagtgacttgcttctaataaatagaatgtggcagaaatgatggtgtgtgacttccgagattgaatgataagtgatactgtgacctctttctaggatcactcattctggggaagcaagctgccacgttgtgaggccacacaagcagccctgtggagacgttcatacatgcaggaactgagacctcctgccaacaacctgcatgaatgtccccaacccattgaagctaggaatgagccacctgggaagcaagtccacagcctcaggcaagccttcagatgagttgcagcccaggtcaaagtcttgaccacaacttcatgagtgaccctgagctgaaaacatcagctaagc

SEQ ID NO: 288032 - DNA, 590 bp, Homo sapiens
aaacctccttctgagaagtggagcctaacttttctcctcttgagtgcacactgtactgagtgacttgcttctaataaatagaatgtggcagaaatgatggtgtgtgacttccgagattgaatgataagtgatactgtgacctctttctaggatcactcattctggggaagcaagctgccacgttgtgaggccacacaagcagccctgtggagacgttcatacatgcaggaactgagacctcctgccaacaacctgcatgaatgtccccaacccattgaagctaggaatgagccacctgggaagcaagtccacagcctcaggcaagccttcagatgagttgcagcccaggtcaaagtcttgaccacaacttcatgagtgaccctgagctgaaaacatcagctaagctgttcccaaatttttgacacrtggagacaatgtgaggtaacaaatgtttattgtgctaatctgctaatttgggggatactttgttacacagctttagataactaaaacaaagggagactatgaaatattaattttggtcatcaatgtggcagagactgctagttttccacaaaaatctacttatc

SEQ ID NO: 288033 - DNA, 517 bp, Homo sapiens
cgttcctgccagcttaaggaaatgccactcacacaacggggatgtctttctcccgagaggtctctccatctgactccatcctgagaagtggtctccttgagtgtggtataagagagccctttcccccatcacaggggcccrggaagcccaaggatggagggacccatgcctgctgctccttggggctaagtcacccaacctggttctcctttccaatgggtcacccatgtcagcaagccccaggactgactcgctccaagctcctccttctgggaatggaagcatggtgggacaaagctccttgcagaagctgataaaccttagatcacacaggtttagatgctctgatcagtagaggttctctccctctgctgaagtaatgtgaatttgcaaaaatcgcttcaaagtaaacaattaaattgaaatggtgatgggtgccacaggaatgcttaaatggcagctaaaaaaataaaaagttcaaaacaatccacaaagaactaagtaggcatttgctaca

SEQ ID NO: 288034 - DNA, 517 bp, Homo sapiens
cgttcctgccagcttaaggaaatgccactcacacaacggggatgtctttctcccgagaggtctctccatctgactccatcctgagaagtggtctccttgagtgtggtataagagagccctttcccccatcacaggggcccaggaagcccaaggatggagggacccatgcctgctgctccttggggctaagtcacccaacctggttctcctttccaatgggtcacccatgtcagcaagccycaggactgactcgctccaagctcctccttctgggaatggaagcatggtgggacaaagctccttgcagaagctgataaaccttagatcacacaggtttagatgctctgatcagtagaggttctctccctctgctgaagtaatgtgaatttgcaaaaatcgcttcaaagtaaacaattaaattgaaatggtgatgggtgccacaggaatgcttaaatggcagctaaaaaaataaaaagttcaaaacaatccacaaagaactaagtaggcatttgctaca

SEQ ID NO: 288035 - DNA, 517 bp, Homo sapiens
gacgactgtatccggccagactagcctttggagcatcccaataaaggaatctcccaaatggccccaagatgctccctacactgccaggggtaggtatttgaatctgtctgtcctggagcaatccgctccttgcacctttgtcctctcctgtccatccacagctgccctggcctggttcctgggggcaaccgtgcttttaagcaagggggcagcagtgctgctctgggaatgcgagtacagctggaaaggttgagtcacccctttaggggcatggtaagaatgcctggtatttcttcaattttgatgaaccaaaatagtgacaattgcccaaaggcgcagagtcgataataaagagtgcggacacttccggagcgccaactgcccaatagaaatgcaggccacgctggggaagtgtggagccgcagcccaggatggggaggrccggaaaacagaaaaggattcgcgttctttttactctgtggagagtgagcccgcggactgtagcctgggcctcgcc

SEQ ID NO: 288036 - DNA, 572 bp, Homo sapiens
tatttttctcctttcccttttcctttctgctccatacaggtaaatctctctctttctcttttcctttccaacgtgggatccttggtgggtagcgcctagacacggaggcgactgcaggtttctgrccgggggctactctccagtgctgcgttgaaggccaaggagtgaatggggatagttgccctgcccagaagcgggaagggctcttttctgtcttttctggttgtggtccctgatccctatgtgtgacgcagcttctccagggcgaactcacacgtgtttcaggtgacttaaaccttctttccttatgttaaattcttcccttcccctactctactggctaaggttaaaagaaacccacctagcctccatttcatatcattaaagttcatgactatcactctagtggaatgggaaccatgggaaagcatggccttatcaaattataaggatgctagaagtcaaggccttcatccagagacaaaaggaaagctcacagtaggccatcgcctctggagggaaaacatgtaaagtggcactggtgaccacctaaggtcagagacgtctgacgc

SEQ ID NO: 288037 - DNA, 572 bp, Homo sapiens
tatttttctcctttcccttttcctttctgctccatacaggtaaatctctctctttctcttttcctttccaacgtgggatccttggtgggtagcgcctagacacggaggcgactgcaggtttctgaccgggggctactctccagtgctgcsttgaaggccaaggagtgaatggggatagttgccctgcccagaagcgggaagggctcttttctgtcttttctggttgtggtccctgatccctatgtgtgacgcagcttctccagggcgaactcacacgtgtttcaggtgacttaaaccttctttccttatgttaaattcttcccttcccctactctactggctaaggttaaaagaaacccacctagcctccatttcatatcattaaagttcatgactatcactctagtggaatgggaaccatgggaaagcatggccttatcaaattataaggatgctagaagtcaaggccttcatccagagacaaaaggaaagctcacagtaggccatcgcctctggagggaaaacatgtaaagtggcactggtgaccacctaaggtcagagacgtctgacgc

SEQ ID NO: 288038 - DNA, 568 bp, Homo sapiens
gcgaactcacacgtgtttcaggtgacttaaaccttctttccttatgttaaattcttcccttcccctactctactggctaaggttaaaagaaacccacctagcctccatttcatatcattaaagttcatgactatcactctagtggaatgggaaccatgggaaagcatggccttatcaaattataaggatgctagaagtcaaggccttcatccagagacaaaaggaaagctcacagtaggccatcscctctggagggaaaacatgtaaagtggcactggtgaccacctaaggtcagagacgtctgacgctctaagattggaccctaaagggggatgctctggaggatcctttggacctcagcctctccaagggggttcctttggtagaggttcttaggcctagtactaagccctccttagaattttctcttccggttgcagtagtgtttggcctcaatattgtttggaatctggagtttgctgttgaatggtaaagtgggatggagttgcatgtatgcaggctcttgtgctgctgttctaagcagggttgtgtcgggttaaagtgtgat

SEQ ID NO: 288039 - DNA, 628 bp, Homo sapiens
cgggatcccaggctagttcacaagygctgggtcctctataaggtggctcaactgcagctcccatgggttccaagtttctcagtggtatgagcaccctccttaatcaatctgagggtgagatgtgatttctgtccccttctgtgtatggtgggttaggcaaaaaagtttacacagagcccagcctgatgtagacagtgcagaaaggtgggctaagaggaaaggggacaagactctagttagagaggctgcaaaaaagaatcggggagcagagcagaggctgcttggtgaggcattaccagaaaattgtagggctggggctgtgcgcctgggtagaagtggaactgattctcctgcagcctttgtgggtagagatggagaatctcttctgtctggtcaacagggaaggtggacttgcctttggggcagcctcatgtgcaagaaatatgaagaaattgggtctaaagaacactaattgtgctataatactaaggagaaagctcagcatggcagagatatacatcttcctctgctttctagcataattatgccacattgagactactattgagttttaaatttaaacttcaatgattgtgcttacctggcttcactcttgttcaactaccag

SEQ ID NO: 288040 - DNA, 496 bp, Homo sapiens
gatgctgctttctaatagcttttagaccacatcctcttacccccaaaaattacaggggaaaagttctgtaatccccactaagatgctttctaacagcttttagaccacatcctcttccccgcaaaaggtacaggccaaagttctgtaatccccactaagatgctttcyagtagcttttataccatatcctcttccccccaaaaggttcaaggcaaagtgctgtaatcaccactaagataaatttgctagcgataattctgatacaattatttgggaaagtatttgataatatatatcaaaatctttgaagtttttgtcacttgacacagtaatttaacttttacaaacttctgtctctctctgtgtgtacatatatacactctatatacttacataatttcagcttaattatgtacctaaggcacaggttcaaatataaccttatgtttcaccatgaacctttatttccacagattcagactctttcttctcttac

SEQ ID NO: 288041 - DNA, 496 bp, Homo sapiens
gatgctgctttctaatagcttttagaccacatcctcttacccccaaaaattacaggggaaaagttctgtaatccccactaagatgctttctaacagcttttagaccacatcctcttccccgcaaaaggtacaggccaaagttctgtaatccccactaagatgctttctagtagcttttataccatatcctcttccccccaaaaggttcaaggcaaagtgctgtaatcaccactaagataaatttgctagcgataattctgatacaattatttgggaaagtatttgataatatatatcaaaatctttgaagtttttgtcacttgayacagtaatttaacttttacaaacttctgtctctctctgtgtgtacatatatacactctatatacttacataatttcagcttaattatgtacctaaggcacaggttcaaatataaccttatgtttcaccatgaacctttatttccacagattcagactctttcttctcttac

SEQ ID NO: 288042 - DNA, 454 bp, Homo sapiens
tgatgtgtaaagcccactgtgaagaggcgatgaattggctaatcataaaggctctgattaaaagtctaaatggcagagacataaatagaaagtactcaataacactgtggaatggacaaatgaatgacgagagttggaaataagaaccatgacctggtcaaaaaagacaaagtgaaaaagtgaaaaacaaaaacaaaaagcccttgaagccttggtattatattgtyactaggtccattcactttacaggtaaggaaacccaggcatagagcgcccaagagacttgcacagatcatacctctgctcccggctctgtcctcaccagctgctgacactggacgtggctgtgagctctttgatcctcattttcctcctctggcatccagggtggtgaggaatagatgatatatttcacctaacactgaaatatgtcttgaatataacactgaatata

SEQ ID NO: 288043 - DNA, 454 bp, Homo sapiens
tgatgtgtaaagcccactgtgaagaggcgatgaattggctaatcataaaggctctgattaaaagtctaaatggcagagacataaatagaaagtactcaataacactgtggaatggacaaatgaatgacgagagttggaaataagaaccatgacctggtcaaaaaagacaaagtgaaaaagtgaaaaacaaaaacaaaaagcccttgaagccttggtattatattgttactaggtccattcacttyacaggtaaggaaacccaggcatagagcgcccaagagacttgcacagatcatacctctgctcccggctctgtcctcaccagctgctgacactggacgtggctgtgagctctttgatcctcattttcctcctctggcatccagggtggtgaggaatagatgatatatttcacctaacactgaaatatgtcttgaatataacactgaatata

SEQ ID NO: 288044 - DNA, 579 bp, Homo sapiens
tgctctccggtgagtttacaggttttgggggagggtaacttggctgtatgacacttgctggatcgtgggagtagagtcatgttctgatttgaaatcagagaactcactgtggcttcctgcctccacgcccatctgtttccctgtatcattgggataacatccaaattccttacaaaggtctgtgaggcccataaacctggcccctgcctgcctcccaggctcattgyagacactgtcccctcactctttagggaaggccacggtgaccttctggaagctcctaggacaaacctgctccttccccacctcagggtctttgcacttgctgctgcctctgcctgcaacaactctctccacctccatcctgtgccactccttctacccccacccttccctgccttgtatccccacctccatctcctttgtcaagctaattccttgacaaatcactgaaggtaccccctcttcctagagcctttcctgacaagcagctctgggtggggtacctgtcaatggccacatacctggtcatcttgactgctccttcctaacattcagcatacaatgtgttcttccgta

SEQ ID NO: 288045 - DNA, 592 bp, Homo sapiens
ctctctgttcttaaaggaagtttttgcccctgatatrtgagccatacccagggtccttagagcctcaaggaagcccttccttctctacctggatgcaggaacctggctccctgtgggtctgatttatttttaattctgcttccctccttctctcttttgggacgtgctagtctcgttcctgtgcagtctgtcccacatgcacagattcagctcctacttcttgtaaaccactctgagaggcaggtggggaggtggacaagggagccttctgtccacccttgttccatgtaccctgggcaactcctagcactaaatatcagagcccatggaaggtgcctgtgctcagatgacatcccagctaggtaaggagtacagttgagtcttaataagacacatcctcatcccttaaggaactcggtttagaaaactacttcattcaaggcataagaatatcaggtttagggcagaagtgcagagtgtttgtggatggggggagggcgggcatagtagtgaggggcttcccaggttcaaatcccaggtcctctacccaccagctgtatgaacctgaacaaactgcctagggtaggcagaa

SEQ ID NO: 288046 - DNA, 592 bp, Homo sapiens
ctctctgttcttaaaggaagtttttgcccctgatatgtgrgccatacccagggtccttagagcctcaaggaagcccttccttctctacctggatgcaggaacctggctccctgtgggtctgatttatttttaattctgcttccctccttctctcttttgggacgtgctagtctcgttcctgtgcagtctgtcccacatgcacagattcagctcctacttcttgtaaaccactctgagaggcaggtggggaggtggacaagggagccttctgtccacccttgttccatgtaccctgggcaactcctagcactaaatatcagagcccatggaaggtgcctgtgctcagatgacatcccagctaggtaaggagtacagttgagtcttaataagacacatcctcatcccttaaggaactcggtttagaaaactacttcattcaaggcataagaatatcaggtttagggcagaagtgcagagtgtttgtggatggggggagggcgggcatagtagtgaggggcttcccaggttcaaatcccaggtcctctacccaccagctgtatgaacctgaacaaactgcctagggtaggcagaa

SEQ ID NO: 288047 - DNA, 532 bp, Homo sapiens
tttcagattggtttcttttctttagtaatatgcatttaagtttaactccatgtctttccgtggcttgatagctcattttgttttagggttgaataatattccattgtctgcatgtatcatagtttatttattcattcacctggacatcttggttgcttccaarttggagtaattatgaataaaattgctataaacatctgggggcaggttttgtgtggatgtaagttttcaactcctttgggtaaacaccagggagtgtgattattgaatcgtatgttaagagtacgtctggttttgtaagaaactgccaaactgtcttccaaagtagctgcaccattttgcatttccaccagcaatgagtgagagttctgttgcttcacatcctcaccagcatttggtgttgtccatgttccagattttggccattctaataggtgtatagtggcatctcgttgttttaagttgcatttccctaatgatgtacgatgtttcacatgcttacttgccatctgtatatcttcttcagtagatg

SEQ ID NO: 288048 - DNA, 430 bp, Homo sapiens
aacgaggctagtagttggtggagccggggtttgaactcaggtccaaaggtatgtgctcttgcaggctgcctctgggtggctccttgggacagaggcccaaggtatgtgctcttgcaggctgcctctgggtggctccttgggacagaggctgtagaactttaggccctctgcctcgtttccctcaggaccgacacagscagtcctggaggtcgatgttgggtccgctggggccagccccacccagcctgtggacacagtgccatgttactctttgtcctggtctgcattcactggccatccacacacatttttctgagggatgcttggtaactaaggccaccaggtggcgctgcaagggctgggaccttgactgctggatctaaggctcagtaggttcttagcgatcttccatgacaggccaggattcccc

SEQ ID NO: 288049 - DNA, 468 bp, Homo sapiens
attctgtgatgacagcctgagctgactagaacccgatggtattctgtgatgacagcctgagctgactgggaccctctgcctagaaaaagaaggctgcagagcacccctgtggatggcaccgcctgtgctgttttacggttccctgtgtctgaaaatagagagcctgtctcctagcccaagaacaaccactgaaactccagggcccaaaagcatatgggataagaccttggctaatgctttctccagctttttctaagtctaaaatttygcaatttggttcctaaacagaggaccgtaacattttactgacctttcagctatcagccacgggttgaaggagcctacagcctcatgagatatgatccgaaggtactgctcaaaacgactacagtagtcaccgatgctgtgctgcatacccggtgggacaaagaggggagctcggccttctttctgttgagaatcttcggc

SEQ ID NO: 288050 - DNA, 468 bp, Homo sapiens
attctgtgatgacagcctgagctgactagaacccgatggtattctgtgatgacagcctgagctgactgggaccctctgcctagaaaaagaaggctgcagagcacccctgtggatggcaccgcctgtgctgttttacggttccctgtgtctgaaaatagagagcctgtctcctagcccaagaacaaccactgaaactccagggcccaaaagcatatgggataagaccttggctaatgctttctccagctttttctaagtctaaaattttgcaatttggttcctaaacagaggaccgtaacattttactgacctttcagctatcagccacgggttgaaggagcctacagcctcatgagatatgatccgaaggtactgctcaaaacgactacagtagtcaccgatgctgtgcygcatacccggtgggacaaagaggggagctcggccttctttctgttgagaatcttcggc

SEQ ID NO: 288051 - DNA, 542 bp, Homo sapiens
tcacacattccagaggatgtaactattctcttttggtgcagtgcttctgtgaaaacgtctgctcatatgacatcacaaagttcargattctttgtctttgaaactctgtacctatcatctgggagagctctaccagcctttcttgacctggtatgttgtacattcaaaaagcactttccagtttccaaagcaattttacatgctctgtatttctcttgatttgaatgcatgtttataatctgccctgaaagaggcttttgcaaagaatgtttgctgggggaattaattatatcaggcaataggatgaaatatttctagaattaaattctggttctgcccattcataagcctgcaaatttgggcaagtttacttgacctctccgggcctcaatcctctcatgtgtaatatggaaataatcttgtatttcagagctgtagggatttcataagagcttgcacgctgagacacttagcatagtgctcggcatgaaataagacactcaatgaatggttacagctacggcaatttaagaaacctttaa

SEQ ID NO: 288052 - DNA, 542 bp, Homo sapiens
gaaaagaggcagcggtcacgtatgcaggctaaatgctatgttattagactcacagccctcttccccaactcagctcctaggaagcaacatcctgatcttactctctgggccaaagatcagaaaacttctctgggcagtctgacccaggccaaaggaaagacytaaagaccaacataagtgtccttaacaaacagtccaggtgttactttcatcagatggtgttggaatagccagatatccattaaagaaaatgaatttcgaccagtatttcatctcatacacaaaaattaattctaaatggataacagacacaagaataaatggtaaaactataaaatacttaaaggaaaacataagagaaaatccttgagacactaacataggcaatgatttcttagctagttcaccaaaaatgactaaccagaaaagaaaaattgataaactggtcttaatcagaatttaacacttttagtcatcaaaagacaccattacaaagatctatgggcgagccatagtattgcgagaaaatatctgctgcacac

SEQ ID NO: 288053 - DNA, 596 bp, Homo sapiens
tctcttgctgctctttggggtgatgggagattcagagtttttcttcggctccctttgcccacacaccagctgtcatccctgccttctgtcactggtgcctgctgctgcaagggcgtctccctgatgtcttttgcctgcccttcacctgagaagcaaagcacaaccccttctgctctgttcaaccccaaccccatgcacattcaatcatccttgttcccagaagttcgaccctatcmgtggacagagctctgatcccttttacaatgaaccacaccgatgactcactttctgatcctcctgtctctttccccagtggaactgtatctcattctgcaatgcagtgaggctagcattggattattgtcttatttcttatttctggactcagctttaggcagtcacctctatgatctgcatcctggaaacgttggctgttggtgttgaaagtcaaacctttgaaattcaaaaaatcttttctctcctctgtggcctgactcttgccatctagaatcaccttttggctttcaggagttcgcttttgttagaggtttgaaaatccattcagaaatgcagctgacttatattgtctattgttc

SEQ ID NO: 288054 - DNA, 426 bp, Homo sapiens
ccctctgtgcttgtgatgaggcagaaggtctaatagagctgatgaacacaagccgcctacagacggcaaaactgaaagagcccccgtcacacamgcccactggggcttcaggagctgtaagcattcacccccagatgctgccgtggggttggagccccacaagctgcccgtcagcaggctccccctagaggtttgagcagtgggattctgaaaaaacgagctattcccgctgtcacacgccctgcgacggggacaagggaacctttcctgtttccgttcctgtttccagtccccagtgcccttgtggtatttcaaaagcatgcatgtcggccgcgcacggtggctcacgcctgtaatcctagcactttgggaggccgaggcgggcggattgcctgagctcaggagttggagaccagcctgggcaac

SEQ ID NO: 288055 - DNA, 426 bp, Homo sapiens
ccctctgtgcttgtgatgaggcagaaggtctaatagagctgatgaacacaagccgcctacagacggcaaaactgaaagagcccccgtcacacaagcccactggggcttcaggagctgtaagcattcacccccagatgctgccgtggggttggagccccacaagctgcccgtcagcaggctccccctagaggtttgagcagtgggattctgaaaaaacgagctattcccgctgtcacacgccctgcgacggggacaagggaacctttcctgtttccgttcctgtttccagtccccagtgcccttgtggtatttcaaaagcatgcatgtcggccgcgcacggtggctcacgcctgtaatcctagcactttgggaggccgaggcgggcrgattgcctgagctcaggagttggagaccagcctgggcaac

SEQ ID NO: 288056 - DNA, 463 bp, Homo sapiens
tgcttatacaaaaaaaaaaaaaaaaaaaaaaaaaaggctcagtgttagacactttgccttacattaacctgtttaataccaacaagaacygagtgaggcaggtattattatacccatttccagctgaagaaactgaatatcagaaaccttgagtcacttatccaaggttcccttatggctggtaagtggcagaaccagaattcaagatcacgtttgattctgaaggccctgcctggcttcccacagggagtcacttttacatgcgtctgactcttttttttttctgggttggtgctgggcttggacattgagtggtgagtaaggtagttcctgaggtcagggagctggcagtccagacagggagaggggcacaaagcaggagctgaggccatcagtgccttcatgcaacacagatttatggggacagaccaagcacaggtacctttctaggtgctggggattt

SEQ ID NO: 288057 - DNA, 521 bp, Homo sapiens
agttctgaggacgatggaaccttgggtaaggaggaagaaggctgcccacccgcccttttctggcagccaccctccctcacactgtccgttccttgatgacacagctgatgtgattaagatcgtccccaaatcgcttcacagcagccctcagcatctctatttccgtctccgtccacttcgcrctgtcagaaggggagaggggggatagcaaaaatgggagggggggtgtggagcccgcccacaggctatgcatcccacagccaaccagccgcctccttccgatttctgggaccccttccacggatgcataaagaggtcctccgtaaggggaggcggaaagctcttgaggccctgcgggaaccgggaggaccccaatcacaagaaatcacaaccacctccaccttagacacccctttccaccatcaacgttaaacggctgctgtacacagcacactgaaaccaactcgccaggaagggcttttcaaaacagacccaccaacacagcctgcagccgtctgggg

SEQ ID NO: 288058 - DNA, 446 bp, Homo sapiens
cctcttagtctgtgacttgcttgctttttttttttttattagctcattaatctcttgyttgcctgagttggatttgtaacactgtttggtttaccttgatgccaatctggaaatcgattgggattctgcttttgtaactaattcatggttttattcaggtggtgatatgctcatattctttgcctaggtccccagagtacattatctggtgttcaaccaccaatgaattattgtagtacaacatatatttgggtcaccacttttctttcaaaatgtttcagggaacttattacatgctgtgaaaaccaactgtatttttatcttttgaagtatacccatcagtgtttaggacaatgtctagcacatagttagtgctcaacaaatataggttgaataaatgagtgtggtcttgaacacacagataaattttgagttatttactgagg

SEQ ID NO: 288059 - DNA, 609 bp, Homo sapiens
cctgcagcaggtgcttgttattaaccgtaagagtagccacacttatcagatcattacgatgtgctgggctgtctcctcagagccctgtgtgtattctcacaactactctgtggtgtagacaccaacatctctttcactctaagtctcagagaagctgggtcacctgccyggggttactcagctaatgcatgctggagtagagggcccaaaagcccagatacaaatcctggcagtgaaaccctaaagcctccgtgcttttgactgctgagttgcattcctgcccggccagatccagtgactgatggaatgatcaaagggttactggagagaaccttctcttcctagaattctcacaccatctttgaaggcctttggagccagagagagcatcatccagggggcagccagagtcccctgggacttcttttgtcaggaaatccccccctgaggtggagccgagctctgcttcaacacagcactctgaggggtggttgtgccttcccgggtccatccctcccgtggctgagtaatcttggtttttagctgttctcactctcacatgtactttgacaaagccttgacctccctggtggtcctctcctgggtact

SEQ ID NO: 288060 - DNA, 609 bp, Homo sapiens
cctgcagcaggtgcttgttattaaccgtaagagtagccacacttatcagatcattacgatgtgctgggctgtctcctcagagccctgtgtgtattctcacaactactctgtggtgtagacaccaacatctctttcactctaagtctcagagaagctgggtcacctgcctggggttactcagctaatgcrtgctggagtagagggcccaaaagcccagatacaaatcctggcagtgaaaccctaaagcctccgtgcttttgactgctgagttgcattcctgcccggccagatccagtgactgatggaatgatcaaagggttactggagagaaccttctcttcctagaattctcacaccatctttgaaggcctttggagccagagagagcatcatccagggggcagccagagtcccctgggacttcttttgtcaggaaatccccccctgaggtggagccgagctctgcttcaacacagcactctgaggggtggttgtgccttcccgggtccatccctcccgtggctgagtaatcttggtttttagctgttctcactctcacatgtactttgacaaagccttgacctccctggtggtcctctcctgggtact

SEQ ID NO: 288061 - DNA, 609 bp, Homo sapiens
cctgcagcaggtgcttgttattaaccgtaagagtagccacacttatcagatcattacgatgtgctgggctgtctcctcagagccctgtgtgtattctcacaactactctgtggtgtagacaccaacatctctttcactctaagtctcagagaagctgggtcacctgcctggggttactcagctaatgcatgctggagtagagggcccaraagcccagatacaaatcctggcagtgaaaccctaaagcctccgtgcttttgactgctgagttgcattcctgcccggccagatccagtgactgatggaatgatcaaagggttactggagagaaccttctcttcctagaattctcacaccatctttgaaggcctttggagccagagagagcatcatccagggggcagccagagtcccctgggacttcttttgtcaggaaatccccccctgaggtggagccgagctctgcttcaacacagcactctgaggggtggttgtgccttcccgggtccatccctcccgtggctgagtaatcttggtttttagctgttctcactctcacatgtactttgacaaagccttgacctccctggtggtcctctcctgggtact

SEQ ID NO: 288062 - DNA, 609 bp, Homo sapiens
cctgcagcaggtgcttgttattaaccgtaagagtagccacacttatcagatcattacgatgtgctgggctgtctcctcagagccctgtgtgtattctcacaactactctgtggtgtagacaccaacatctctttcactctaagtctcagagaagctgggtcacctgcctggggttactcagctaatgcatgctggagtagagggcccaaaagcccagatacaaatcctggcagtgaaaccctaaagcctccrtgcttttgactgctgagttgcattcctgcccggccagatccagtgactgatggaatgatcaaagggttactggagagaaccttctcttcctagaattctcacaccatctttgaaggcctttggagccagagagagcatcatccagggggcagccagagtcccctgggacttcttttgtcaggaaatccccccctgaggtggagccgagctctgcttcaacacagcactctgaggggtggttgtgccttcccgggtccatccctcccgtggctgagtaatcttggtttttagctgttctcactctcacatgtactttgacaaagccttgacctccctggtggtcctctcctgggtact

SEQ ID NO: 288063 - DNA, 451 bp, Homo sapiens
gccatgatacctggtcagatgatatttcgtaaaggaccataaaaatacagaacaggataaacctttcaagattgtctagtttatagttataggggaaactggagctgagagaactaagtgccttgtttagagctacatagcaagccagagaccaggcccacagttgctgcccatgacccacaaacagtcacggaagaaaacaatccttctacagctcacagccaccaattatgggtactaaagttgggagtggggctaattagctctaaatagcagagaaaaacagtatttacrtcactaaagagaacaacaaaaacagcccattaatccctgtttctgcagcttctgatgatctcaatgttgacaagcaacttctggggattgctggaagcaagcaattgtcactgtgatcctttattacagtaaatagaatcatccaagcagacaggtg

SEQ ID NO: 288064 - DNA, 551 bp, Homo sapiens
tttgtctgctaatttcagcatttaggtcatctgggtttggattctgtggatagtcttttttcttgaaaagggatcacattttcttgtttctttgtatatggagtaatttggggttggattcttgatatcagtatcaaaaatattgaatgttaygttgtggaggctctaggttcagttacattcctctgagaaggttctttccttcctccctctcttctttcctccctcccttcctccttccctttctcctttccttcctgatatggtttggatatttgtcccctccaaatctcatgtgtttcccaatgttggaggtggggcctgatgggaggtgattggatcacagggcagatccctcatgaatgacttagcaccatcgccttgattcaaagtgagtttctcgctctgagttcctatgagatctggttttttaaaagagcatggcacctcccctgtgcatctcttgctcctgctgtgaccaggtgatgtgcctgctccccctttgactttggccacgagtgtaagcttcctgaggcccttacgagaagcag

SEQ ID NO: 288065 - DNA, 620 bp, Homo sapiens
tgattcaattttctcccactggctcctcccacaacacttgggaattatggcagccacagttgaagatgagatttgggtaggaacacagtcaaaccatatcacacctgttttgggcatttaccatgaatggagcttgcagggcagtaagttgttttgggtgagtcagtgagtaagtaatgagtgaatgtgaagcctaggacatyactgtatatatactattgtggactttataaacactctatacttaggatacactaaatttactgaatatatttttgttccttcaataataaatcttagcttactgtaacttttttactttataatcttttaaatattcttaaacttttagactcttttgtaataacacttggcttaaaacaccaaacaacagtgtatagctatccaaaaataatttatgtccttactgtataagcttttttctattaaaaagttcttttttttactttttaaacttttttgttaaaaactaagacccaaacatacacattagcctaggcctacatatcttgatgacaaccatcgcgatgtcactaggcgataggaacttttcagcttcattatattcatatggcaccactgtcgtatatgtggtccat

SEQ ID NO: 288066 - DNA, 620 bp, Homo sapiens
tgattcaattttctcccactggctcctcccacaacacttgggaattatggcagccacagttgaagatgagatttgggtaggaacacagtcaaaccatatcacacctgttttgggcatttaccatgaatggagcttgcagggcagtaagttgttttgggtgagtcagtgagtaagtaatgagtgaatgtgaagcctaggacatcactgtatatatactattgtggactttataaacactctatacttaggatacactaaatttactgaatatatttttgttccttcaataataaatcttagcttactgtaacttttttactttataatcttttaaatattcttaaacttttagactcttttgtaataacacttggcttaaaacaccaaacaacagtgtatagctatccaaaaatamtttatgtccttactgtataagcttttttctattaaaaagttcttttttttactttttaaacttttttgttaaaaactaagacccaaacatacacattagcctaggcctacatatcttgatgacaaccatcgcgatgtcactaggcgataggaacttttcagcttcattatattcatatggcaccactgtcgtatatgtggtccat

SEQ ID NO: 288067 - DNA, 576 bp, Homo sapiens
tggacaataggaccagtgactaagaacacaaaggcatctctaacaagtaacattgttgtctcacaagcacttaaaatgtaacaagtcccaacttgctttcttcacctggctcacacacccctaagcctactcttccttccctattccttgtctctgttagtggttctgtcattcaccaggaacttacactagagacttgggagtcatccttgacacatccagtaaatagcaaattctgaatactttatctccamattatactcaactgcatttccttctctctagctctactcacccacttaatgcaaagctgcactcacctcgctttctgcaattgctttcttactgtaggtctccctgtctctgaactcagtagtacattatgttctccacattgctgctaagttacctttgaaaaatgcaaattagatataattggttgcttgtttacaacattcagcagctttccattgcttctaagatagcacacacttctcagcaaggttcaccatctcacctcctgacagccttcgtttcacctcctgcctcctccccaccaggccttctttcagtcca

SEQ ID NO: 288068 - DNA, 576 bp, Homo sapiens
tggacaataggaccagtgactaagaacacaaaggcatctctaacaagtaacattgttgtctcacaagcacttaaaatgtaacaagtcccaacttgctttcttcacctggctcacacacccctaagcctactcttccttccctattccttgtctctgttagtggttctgtcattcaccaggaacttacactagagacttgggagtcatccttgacacatccagtaaatagcaaattctgaatactttatctccaaattatactcaactgcatttcmttctctctagctctactcacccacttaatgcaaagctgcactcacctcgctttctgcaattgctttcttactgtaggtctccctgtctctgaactcagtagtacattatgttctccacattgctgctaagttacctttgaaaaatgcaaattagatataattggttgcttgtttacaacattcagcagctttccattgcttctaagatagcacacacttctcagcaaggttcaccatctcacctcctgacagccttcgtttcacctcctgcctcctccccaccaggccttctttcagtcca

SEQ ID NO: 288069 - DNA, 583 bp, Homo sapiens
tgccactatgcccagctatttttctaaaacatttttgtaagaggaggtcttgctatgttgacctgattggtctcaaactcctggcctcaagcgattctcccaccttggcctcctaaagccctgagattataggtgtgagctactgcacttggcccttattgcatttttgactatataaaaagatgatacaggattttagagctcactaacatcrtaactaaaaaaatcaggccttattaacacaaaactttatttatacttaaagcaagcaaccacaagccaaatgtctcttcatcaataagagttggtgtttataatatgcttcatattaaatattaaccataatcaagtagagatttcccacaacagtaatacaccataaccaaattggaattttgcccccagatatgtaagaattttttcctactagaaaatctatttatgctattaattacataaataagtttaaaaagaaaccatatgaatagctcattaactgccaaaaaggaatttgctataattcttatctatttctggatttaaaaaaactcagtaaattcaaaacagatgtaagcttccctta

SEQ ID NO: 288070 - DNA, 583 bp, Homo sapiens
tgccactatgcccagctatttttctaaaacatttttgtaagaggaggtcttgctatgttgacctgattggtctcaaactcctggcctcaagcgattctcccaccttggcctcctaaagccctgagattataggtgtgagctactgcacttggcccttattgcatttttgactatataaaaagatgatacaggattttagagctcactaacatcgtaactaaaaaaatcaggccttattaacacaaaactttatttatacttaaagcaagcaaccacaagccaaatgtctcttcatcaataagagttggtgtttataatatgcttcatattaaatattaaccataatcaagtagagatttcccacaacagtaatacaccataaccaaattggaattttgcccccagatatgtaagaattttttcctactagaaaatctatttatgytattaattacataaataagtttaaaaagaaaccatatgaatagctcattaactgccaaaaaggaatttgctataattcttatctatttctggatttaaaaaaactcagtaaattcaaaacagatgtaagcttccctta

SEQ ID NO: 288071 - DNA, 583 bp, Homo sapiens
tgccactatgcccagctatttttctaaaacatttttgtaagaggaggtcttgctatgttgacctgattggtctcaaactcctggcctcaagcgattctcccaccttggcctcctaaagccctgagattataggtgtgagctactgcacttggcccttattgcatttttgactatataaaaagatgatacaggattttagagctcactaacatcgtaactaaaaaaatcaggccttattaacacaaaactttatttatacttaaagcaagcaaccacaagccaaatgtctcttcatcaataagagttggtgtttataatatgcttcatattaaatattaaccataatcaagtagagatttcccacaacagtaatacaccataaccaaattggaattttgcccccagatatgtaagaattttttcctactagaaaatctatttatgctattaattacataaataagtttaaaaagaaaccatatgaatagctcattaactgccaaaaaggaatttgctataattcttatctatttckggatttaaaaaaactcagtaaattcaaaacagatgtaagcttccctta

SEQ ID NO: 288072 - DNA, 629 bp, Homo sapiens
agcttagggggcatttattatggttgatgttctccgaccatcttgtggtttgctgtctgatattaatttggggaaaattctcagtcattattgtttcaaatatttattctgttcctttttctcttttttctccttctggtattcccyattatgcatatttacaccttttgtaattgttccacagtcattggatattttattctgggtttttttcagtcttcgttctcttcgtttttcagttttgaaagtttctgttgatacatcctcaaaatcagagattctttactctgatttttatctattaatagaccacatacagtccattaatagtcccattaaaggcattcttcacctcttttgcagtgttttttaatctctagcatttctttttggttcttccttaggatttccatctctttgcttacattacccactattgttgcatgctgtctactttatccattagcgcctttaacgtgttaatcatagttgttttaaattccctgtctgtgtgttacatctctgccatgtctggttctgatgctcaccctgtctcttcacattgtgttctttgccttttagtattccttgtgcttttttcttgatagctggatatgatctactgtttt

SEQ ID NO: 288073 - DNA, 590 bp, Homo sapiens
tggcttagccagtcatataagcctaatcaattctggtcgtcagtgggataactcatgccacattcagatgtaataatcaaatcctttagaacaaatacaacataatataatagaaaaggcctggattttagagtgagaactaggttttgggtctagttcttaaactaactacatggccttacatccctataagactaattagacttgtccataaaaatactataagaattttatgaggggcccataattccgtttgtcaggagagcccacaactgaggcagtcctgggtgaggtttatctccctctttttacctccccaagtcatrgagccagctgatctttctatttcctgtttcctgcctaagactactcagctagagctcagtgcatctgtctgaatgtctgcttttccatcaagggctctcagatgcccaagaaaccccctgagtggttagctacttcctgctatcaaatggcatcacagaaaagcagagtaagaagctctaagaatcagtccttgccctgaagcaaccattaagctggcaaaaaatgacaaaatcatctttttcagaattctggaatctaatcaa

SEQ ID NO: 288074 - DNA, 513 bp, Homo sapiens
cctaacctacagataagagctccaactgtaagactcttagaaaaagagtacaggaaaaatcctcatgaccttagattgggcaaaagattcttagctatgacaccaaaagcatgaggaacagcagtaaccaaaaaataagatattttgaacttcattaaaattaattttgtgcatcaaaggacactgtgaaaaaaatgaaaagacagcccacaaaatgggagataatatttgcaaatcatgtatctgataagggtctagtatccagaatatattaaaaaaactcctacaagtcaacaacaaaaagacaacccaatttaaaaatgaataaatgacttgaatagacatttttcaaagaagatrtacagatgtctagcttatgaaaagatgttcaacatcatcagtcattagggaatgcaaattaaaatcacagtgagatactattttacaccccctaggatggctgtaataaaaacaaaaaaaactaacaagtgttaatgaggatttggaaaaata

SEQ ID NO: 288075 - DNA, 567 bp, Homo sapiens
tcgcttcctttccttcttcccttatttttgcagaaattgaccagctgatcataaaaattatatggaaatataaggggcccaaaattaaaaaacaacctttaaaaagaagaacagagttggaagactcacatttcctattttcaaaatttattacaacgcaacattaatcaaggcagtatggtactggcatcagaatagaccaatgaaataamgagtccagaaataatactcttacattatggtcaattgatctttttttttcttttctaggacagggtctcgctctgttgcccaggctggaatgcagtggtacaaccatggctcactgcagcctcgacctcctgggctcaagcaatcctcttgcctcagcctcctgagtagctagggctacaggtatgcactgccatgcctggataatttttttaaaaatttttttgtagagatggtgcctcattatgttgcccaggctggtcttgaactcctgggcttaagcaatcctcccacttcaccctcccaaagtgctaaaattacaggcatgagtcaccattcctgccttggccaaatgat

SEQ ID NO: 288076 - DNA, 585 bp, Homo sapiens
ctggaataggatggctggctgactccacaggagaatttagagtgagaaagagaaaatctgagtcatccaaaacatgtgaatttgccgtgaatgagcttccactgtcagttgcgtcacacgtaggcattgaggctaccgatcagaaaatataggaacagcctttctgccttgcaggcagggctgctggccctattcactctctggccttcaggcaacaccagagagcagctccagccagttaccatcaattgccaggagatactagaagccggctgctgaaagactaaagacagaataaacaggtttctcacctgaacagaaggtggccatcagatgcttccacatggacaccgtttagtcccatgggagtgtagctccagcaggagacctagagttgtctttgtgygtagacacttgtccaccaagggtcccaagttgggaaagggaaaataagaagggagagtgtttcccataaggggagagtcccccatacagtcatgcgtgagtggcaactatctgggctggtggcacaggagtaaaaagaatttaccaagacagttgtaggtaaagaaaagcagatttatt

SEQ ID NO: 288077 - DNA, 585 bp, Homo sapiens
ctggaataggatggctggctgactccacaggagaatttagagtgagaaagagaaaatctgagtcatccaaaacatgtgaatttgccgtgaatgagcttccactgtcagttgcgtcacacgtaggcattgaggctaccgatcagaaaatataggaacagcctttctgccttgcaggcagggctgctggccctattcactctctggccttcaggcaacaccagagagcagctccagccagttaccatcaattgccaggagatactagaagccggctgctgaaagactaaagacagaataaacaggtttctcacctgaacagaaggtggccatcagatgcttccacatggacaccgtttagtcccatgggagtgtagctccagcaggagacctagagttgtctttgtgcgtagacrcttgtccaccaagggtcccaagttgggaaagggaaaataagaagggagagtgtttcccataaggggagagtcccccatacagtcatgcgtgagtggcaactatctgggctggtggcacaggagtaaaaagaatttaccaagacagttgtaggtaaagaaaagcagatttatt

SEQ ID NO: 288078 - DNA, 585 bp, Homo sapiens
ctggaataggatggctggctgactccacaggagaatttagagtgagaaagagaaaatctgagtcatccaaaacatgtgaatttgccgtgaatgagcttccactgtcagttgcgtcacacgtaggcattgaggctaccgatcagaaaatataggaacagcctttctgccttgcaggcagggctgctggccctattcactctctggccttcaggcaacaccagagagcagctccagccagttaccatcaattgccaggagatactagaagccggctgctgaaagactaaagacagaataaacaggtttctcacctgaacagaaggtggccatcagatgcttccacatggacaccgtttagtcccatgggagtgtagctccagcaggagacctagagttgtctttgtgcgtagacacttgtccaccaagggtcccaagttgggaaagggaaartaagaagggagagtgtttcccataaggggagagtcccccatacagtcatgcgtgagtggcaactatctgggctggtggcacaggagtaaaaagaatttaccaagacagttgtaggtaaagaaaagcagatttatt

SEQ ID NO: 288079 - DNA, 585 bp, Homo sapiens
ctggaataggatggctggctgactccacaggagaatttagagtgagaaagagaaaatctgagtcatccaaaacatgtgaatttgccgtgaatgagcttccactgtcagttgcgtcacacgtaggcattgaggctaccgatcagaaaatataggaacagcctttctgccttgcaggcagggctgctggccctattcactctctggccttcaggcaacaccagagagcagctccagccagttaccatcaattgccaggagatactagaagccggctgctgaaagactaaagacagaataaacaggtttctcacctgaacagaaggtggccatcagatgcttccacatggacaccgtttagtcccatgggagtgtagctccagcaggagacctagagttgtctttgtgcgtagacacttgtccaccaagggtcccaagttgggaaagggaaaataagaagggagagtgtttcccataaggrgagagtcccccatacagtcatgcgtgagtggcaactatctgggctggtggcacaggagtaaaaagaatttaccaagacagttgtaggtaaagaaaagcagatttatt

SEQ ID NO: 288080 - DNA, 579 bp, Homo sapiens
acctgcccttcccccaaatatctctcttgctttactcttacctgatcctgacctgccctcaccccactctcctacctttcaccagatgactcctcatgtgccacctcttcaaggaagctgtacctggtgattggtttgtctgttttctggactagactagaagttgttgatgccaggaacggccactatatccccagcacttgtcacagtgcttggcccaaagcaggtactgagtaaatatctgctaaatggacaaatacctactaaatgaatgaaagaaaaaatgaatggagggcatttgttaatctccttgaatgagaatttgtttgaagattagcagttaaattatttaaaaactcatccccacagagagttaggaaaatgaaacaagaatgacaggcaaaatggctgctaaaaataccagtgcctcaggatcttatttttcacacctggtatggcgagttttgtttattcagaattttcttatttccatgtaaatcacattcactgacatcartctggcttagattctatgtcttcttgtcctttggttaaaaaaaaatactgtagttagtaagc

SEQ ID NO: 288081 - DNA, 477 bp, Homo sapiens
ggaagcagaggccatgagtgattaaatgctatgtccagctcagggcttggcattgagtaggtgctcagggctataagatyaaggaataaataaatagttgagttgatgcccctccacaacattttagatgtacttcatttatgggatgcattccctcccttattaggttagaggatttttgttcttatattcatcatcaggctcttgtgaattcagtcacttctgttgtaagaaacaagtttgggttactactttgctaatggactattgtgaggattcacagaagaagatgcttttaacctagatatcccatgcaaagagtgagctaaagggagctgagatagctattaatatattattgtcaaaacagattttaagtaaagggttacaggagacaaagaaggacatcatatactgataaaatagtcaatccactaataaatattaaattttataataattataaacatatacata

SEQ ID NO: 288082 - DNA, 596 bp, Homo sapiens
tcggtctccccgcgcacagcgtaggcaccckgtgtactctgtaaacgggaggaggtggggcgaggcagccagagcccttggactggcacagggaccctcgatggagcgaagccctcaaacgggatgctttctggtattctatcggggagggtccttggcggtaaccagagggcagcgtagtgtcaacaccagagaccaggatccaaattgtggggaatcagtttcagccttccatgtgctgccggaactcgggcctttttacgcggttcgtcctctagtgcctttaactgcgttactacaataaaaggctgcggcagcgcctttcttcttaaagtgaggaggacaaatttgcaaaagaaataggcttttcttcttttttaaattggagaaatctctgctctggttgacctgggctggttttccctgtctctgagaacttgagacctagctccgagttgaactgtgcgtcagcactccagtcccatcacctgaaccttcagtctcccccatctgttacactagagggctgcaggactctatccaccgcccccgggttatcattcagggccccatcatcttggatgctgccctgcgta

SEQ ID NO: 288083 - DNA, 1126 bp, Homo sapiens
tcggtctccccgcgcacagcgtaggcacccggtgtactctgtaaacgggaggaggtggggcgaggcagccagagcccttggactggcacagggaccctcgatggagcgaagccctcaaacgggatgctttctggyattctatcggggagggtccttggcggtaaccagagggcagcgtagtgtcaacaccagagaccaggatccaaattgtggggaatcagtttcagccttccatgtgctgccggaactcgggcctttttacgcggttcgtcctctagtgcctttaactgcgttactacaataaaaggctgcggcagcgcctttcttcttaaagtgaggaggacaaatttgcaaaagaaataggcttttcttcttttttaaattggagaaatctctgctctggttgacctgggctggttttccctgtctctgagaacttgagacctagctccgagttgaactgtgcgtcagcactccagtcccatcacctgaaccttcagtctcccccatctgttacactagagggctgcaggactctatccaccgcccccgggttatcattcagggccccatcatcttggatgctgccctgcgtawgaatctagaaactacctaaccccatagccagatcattctgacaatgctatagaaaaattaggtaggatatgccatattataaagtagggccatgagttcaaaaaacaaataacacatggactagctagggaagccacaataggtaacagcatgcgtttwaaaggcttagccaatgctaagctccctgtgagtcaggaatgtcatgaggcttccataataataaacttcatttgtagcagcattaaaagaaatagagtgcccagagtgaggaggcaatggtcatacctgactttgccctgctcagggtgtctgaattgcccatgagcttcacactttttgatgggcattgattaactggactatgtcatagaagacaaacggaatggcgcagtggctgcaacctgtgtcccaggaggaggaattaggtgaattaggcttgtgtagcctgaagaaagccagtctggggtacatttccgtttcttgaagtgtctaaggagtttccagagtggagaaggcaggagagggagca

SEQ ID NO: 288084 - DNA, 544 bp, Homo sapiens
gccaccagctcttaaggtatttttcattacctggagaatggttctcttcttgatgagggtcaggtgtctgatggtgcttcaaatgagattggtcctttcccaaatccatcttgctgcaataccttcctgctattttggtctgacttccacaagcagcytagatgcttttttaaaatatcaaaaacatctaacacttaaaaaaaaaaaccacacacacaagtttgcctgtcacttgacttcccgcctaaaagttttatctggttggaccacaactgcaggctaattctactatctttatcacactgcacaggtgtgagtaggggaaatggctggtgctagcaacccctagcataggttgctatttatacagggaaactctctgaccacagcctggcatggcacagcctctagtcagcactcttttggttctatctgccaggaagtgtctggatccgatgttcctttttacagatggaggtagcctagtgtagaaagaacacaatctaggccccaaccagctcagtggcccagggcaagtcacctc

SEQ ID NO: 288085 - DNA, 572 bp, Homo sapiens
agtgccccatagcccatctctggcccttcctgtggtcctgatgaccatactttgctggtgctggggtctgtgaccatgcagtcctgggaggaagccaccttcaactcactctgcttctgccagtgctccrtgcaacatcttgttcatggtaggggctcacgtttgtgtggaatgatgagaatgggtggtgggggcctggctgccacagggaggtatgtgtagtctaccaaagcagcatgctccttcctggtcatgaggtggtgaccatctcatggcagccttgaagttgaaggaaagtgactactgaggctgctctccattttctcatccagaactggggctgggaacttagaagcaatggagggagcattgctttgctctgaatggaggacagtttatggctttcacgttccaggccctaggaggaaacaaaatgccacatcctgaaagatccctcagccactattactccattgcccagatcatgcaggctccccaccccgcaagaagcacctccccagcatcacctctgaatgggggagcaaatgattgggtggtcagctgatggtaga

SEQ ID NO: 288086 - DNA, 507 bp, Homo sapiens
cacccttgaagccaaggttggacaaataacttaattaccgtcaacagggtgtgggtggatgtaatatgtttttttaatctcatctggatcctttcattgtccctttggccctttactgttgactggaatggaaagtgatggtaggaacagtagcaatcaccttagaccaccttagatrgaagccacacattgaggataatggagcagcaggatagaaggaattgggattcctacagcagacctgactgtttacacttggttttctatataagagaggagaagccatctaccttgtttaaaagccactcttatgtctgtgtctttgttatagcagctggaacctcaatcctaactaatacagacggcaggaagatgcctggagaagtgggcaagggtcagagacagaggaactgataagacatccccaggtgtttgaaccttatcctgaaggccttggtaaccactgaagagttttagatatgagagtgacataatctagtttgcatc

SEQ ID NO: 288087 - DNA, 507 bp, Homo sapiens
cacccttgaagccaaggttggacaaataacttaattaccgtcaacagggtgtgggtggatgtaatatgtttttttaatctcatctggatcctttcattgtccctttggccctttactgttgactggaatggaaagtgatggtaggaacagtagcaatcaccttagaccaccttagatagaagccacacattgaggataatggagcagcaggatagaaggaaytgggattcctacagcagacctgactgtttacacttggttttctatataagagaggagaagccatctaccttgtttaaaagccactcttatgtctgtgtctttgttatagcagctggaacctcaatcctaactaatacagacggcaggaagatgcctggagaagtgggcaagggtcagagacagaggaactgataagacatccccaggtgtttgaaccttatcctgaaggccttggtaaccactgaagagttttagatatgagagtgacataatctagtttgcatc

SEQ ID NO: 288088 - DNA, 635 bp, Homo sapiens
tatttagttttaaatttacatacagaaaaattcacatttttatggcatatagttctaagggttttgacaaatgcatacagtcaggtattcatctctggaatcatgacacaggatagtttcatcttccaaaaaattsactcatgctgccccattgtagccaatccccactccagctctaacacctactttctatctctctagtttgctttttctggaatgtcatataaatggagccatacagtatgtagacagggcaagtttttatcatagaaaaaaaatggtccaatttgtatcttttcatgttcagaggtcagaatgttttaataaattgggagggaaaagaaaatcagtgtgataaggcccaacactggactcttttgcagacctttagatcctctctccaattgccttcattagtaccttatgctttatggacatgtttgttaagtctgtggctatgctccacgaagtcatccagcccactcttctctaagtggttctacagatatgttgcagagacttggacaaacttcttactgcatttcaccagcactggctgagggaattccctgatctgtctttagccaaaaagggggataaagatgatttggttgaacttgctgggacatttgggc

SEQ ID NO: 288089 - DNA, 557 bp, Homo sapiens
ctgaacagaattaagcagagcttttgggatttttgccaggcaggcacaaaaatatgtgtgctgttttttgttccacattttgaaaaakaagtaaatgaactcagagagaacgtttctgtttgcttattgttgctgctggtaataatagggaaccaaagattctccatttttaccaaaatgccaagtgagattccatatgcaacacatctttcagttcattttctgaaaatattcctttgctatggaaatggctatgcaacttatccaaataaaacacattcttcccaggtgaagactctcttactggattcaccgtatttctttgcctttcatatatcatgatctagtagaaacctgcattagaagcagtcctgccaggtatggacaaagctataggagtaaagtttagtttcatcatcacttaatattagtggtcagtgattctaaatacatctttttggtgtggtttaaagtagatttccatgtttcaatccaagaaatattgattccacatttactccataactgccacaagtgcggtgaccctcactgtaatt

SEQ ID NO: 288090 - DNA, 607 bp, Homo sapiens
acataatgactgagttaattttaaacagaacttagacatagttcatcaatttaagaataattttgtcaaaagttggcctcagctgggtgctccttcatttgtgcctataagacagggcattgtacaggcccaaatgagaaacgaatcctaggtagagagtccagtttccattctcagattgatctatgggctctagaattttgatacgaagcctgtgtcttgagcttcagaccatcctgccaactgagggtgttgccttccattttcttcacataggcaccttgtttgaaatttgtggctaaaacccatgttcttggtttgactcctaaatctgttttccttctaagttccttagggactctgtgggcagcataaccacatacttagttgtccaaatctgaaaccttcattgttttctctccacactcccctcaatttgcaatcartcaccaagttctgctactgtccctaaatatgcctgcagtcatctcctttctttcaccttccccttccccaatacccagttcaggccacaattctctcatgccttgatttctctaaaaacctccttaaccaatctcttgccttaatttttttcctcccataa

SEQ ID NO: 288091 - DNA, 659 bp, Homo sapiens
agaggaatttctccatttgctttttttctaaataaataacaaaacattacttctacgagcaatgtataaagaagaaatactgtggtcaagaaaatatttcaaaatatttgcatgatattttgactggaaaccacatgtgttctctggaacttttcagggtgtctgtgccccccacccccaaacaccttgtgcccacatctaggagaactctatgcagatgaactttttaaaatggcccttaccactgcgggttctgttagcttctgaggctgcatggaaccaaggcttgctttagaatgctacagagacaatagtcagttgactcatttttttcctttttaattaatccagacataagaaaatataagtatattatatatacctgcaattatacatataattgcaaaggcaattaactccaagagttaatctaggtgttctggtcaaagtcctcaartaatgagaggactttggaaatccattttttggagggatgggggtcacaggacaggccccctttcatgtcttggttgccattttgaatgtcatgttgtgcagtcattaaaactttttgcataagttaccaaaagaacatttcacttattttggtcagtatcagcgttaaaaagctctgacattagtaagttagagaatcttta

SEQ ID NO: 288092 - DNA, 568 bp, Homo sapiens
actttgctctgcacagtgggccactgtcctagatggatcttttatgattacaaagggcagagctctgagaatacaccaggcgacccttgcccacctctcagggagaagactagaggagccaggggtgtgctgagggcacagagaagctttcagagtgggaagagcatggagtttttgtttgagaacaggagctcagatgccagtctgccagaggcataagggagggcacttcaggaaagtgacttcacatccctgaatattatttttctcatcagtaaattggaagatggctgagagggttacatgccaagctgagacataaaaggaggccaggtatgtcagtcttccttacaagaccccacatcagccctctaagacattaacaggagtcttctaaggtcgttgttcctacaatgaagtctaatgagttttccagaaagaaattcactacttgccctaagacagctgggaagaacttaagcccccrtggtagctgcagaaaaaagccatactgaggttggacatcactcaccctgcaatttctcctttgagtggatgttccctccac

SEQ ID NO: 288093 - DNA, 610 bp, Homo sapiens
tccagacataagaaaatataagtatattatatatacctgcaattatacatataattgcaaaggcaattaactccaagagttaatctaggtgttctggtcaaagtcctcaaataatgagaggactttggaaatccattttttggagggatgggggtcacaggacaggccccctttcatgtcttggttgccattttgaatgtcatgttgtgcagtcattaaaactttttgcataagttaccaaaagaacatttcacttattttggtcagtatcagcgttaaaaagctctgacattagtaagttagagaatctttattctaaaaaagtcaacttagccaacaaatacaaaagtgaacaaacagaatatgatgtgaactactaggcaagcccacrgggccaatgccacatttgaaggcaaacagctagctaaattatgacacagaagtaattgaagaggaaacacattgaataatgttctttaaaatccacgttatagccagggatccttttagtaataataactgccttatcagaacagattggctatcacaaggagagtttctctcttgtgtccccaggttctatcttgaactgaaaattttgtggtagatt

SEQ ID NO: 288094 - DNA, 590 bp, Homo sapiens
cccagtgctcacacagggtgagaaataaagctggttcctatgaagcagggtgaggacctccggattcatggggcattgggcagagtacacaggaggatcttgcctcaatagtgggaaataagccctaaagtaagcattgctgtggtcttgaccaataaatcttaacagtaacacacaaaaggatcaaactgttccyatgcaatataaatgcattccataacaaagctcagaaatatttacaggaatacaaaaacatccagcatccaacaaggtgaaattcacaatgtctggcttccaacttaaaactaccaagcatgcaaaggagcagaaaatatgacccacaataaggagaaaactcaatcaacggaacctggttaaggatagatacagatgttagaattacaaatacattgaaatatttattatgacaatattccatatgcttaaaaagttaactagagacatggtagatataagaaaaggcccatattgaacttccagaaatgaaaactgcaaagtgtgaaatggagactatactggatgagaataatggcaaattagacattgcaggagaaaaaaaattactgaac

SEQ ID NO: 288095 - DNA, 533 bp, Homo sapiens
tatgacatatcagaatgcaatctaatatgtcattttccagtgtagaatctctcagtggctccacactgccaaaggatcaagtccaaagtctttggcatggcaaaaacccctgtgaaatgtgataatagcctcaagagcgtattttgatagcctcagaagaatagcaaagaagaccccactcctggatcacatactgtgatgtttacattgacatctctccttatatcctactttytgtcttcctctctatcctggcctagggcctccttgcaaatggaacaatttagggtctatatcttaaataccagctcaaacgttgtgtccctgagaaccctactctgagtttccaaagcaggctggaggcttcctcttttgggttcccattttgtatctacattacagcatttatcacattgtattaaaatgtctgggaactcctcaaagtagagcctaggtgcctttctttaaaaagtctagatgctttttgcatctaccattgcatctagcacatagtagttgtttcataaacatgt

SEQ ID NO: 288096 - DNA, 548 bp, Homo sapiens
ccaacaggcagaatgtgactgaaatctggttcagatgtttcctaaatgtcaggttttgccagtggaggaaagaaacaaaaaaacaaaagactggtactgcagatctgctaattaaaacaattcagagaacataaatgctagagtaattttggacccgccatgttgggctggtttcaatgcaaatgtagtgttccgatttctcccttcattgggaaggtataattagctcagctgcaacagggtggacgcctggaggcagccatttcctggtgctaccagctcccctgtaacgaaagaacagcygccacccgcccctcctgccatgaattgcacagagacatggctatccctcaaggctgcttataagccaccatgagtggaaggcttggacttctagtgggaatggttcttgcttaaagataaggaacattttatgcaattcagttgactccatgcccaatcaccattcttccacataagatagccctggtcagaaaacaaaaccaaaaccaaaaacaaacaaaaaaaacccacacacaactgtgtcc

SEQ ID NO: 288097 - DNA, 641 bp, Homo sapiens
gtcaatgagcagacaggcatttgagggggagtctctttgtcctgtgattccccagcctgggaagagaaagttatttttattcccagttttcatcatggaatgtkaaagaaaatctgactgttctttcattgagtgttgctgaattatcctcctggtttcaagtgtgaactacagcagcaattccactgtggaatattatgaacagagttaattataactgtttaatgaggcagatcccaattttcagtagatcatgacccttaatacattaaagaagagagacagttcacatttttattcaactgacatttgattaatatgcttcaaacaagttttggatatactgagataataatgaaatggactttatcctgttcataaaatgcctgtaataaaataaaaagtatcagtgttgttcttgttgttgactagctttctgatgtcagtttcaggttattaagggaaacttcagttaaaaatatcattggatttccctgaaggtcacaaagttagaacaaacactagccttcaccatcagtcaaattcagatgaaaattccttctctgccacctacttttgtccttgtacaataacaacaagaataatactaataataccatttactgagcaattatgagttt

SEQ ID NO: 288098 - DNA, 590 bp, Homo sapiens
tcattccacaattctaagtctagaggggcttatcagtgattcaaatagtcagtacagataagcaatatatgtcatcacagaagagtatgcagttgctgctgccaccatagatcttgtgcctcaatttattttcgtcaaaatactctagccagttctttatagtatatgaagccagagtgctgaaacttrcagagtccaaacaagaggttaatgatataaatccattacccaattcaacctataactatataaaatctgcaagaacctcagatatacacaatgtgagttgcttggctctgcccaattttggctgaaactgtaggccattgaccaaagtggatctgggaatcaatttgtacaaagtaaataatgtacaacaaaacacataaaagaagtacacataggtcagccagtgcctgtgtgaggatgacgataatgattgtgggggagatgaaaatcaagagatagaaagaggaagaggaggaggagaaatttttttttaaagtggttggtattgatgcgcctcagacccctcaagcatgttcagagactgaacacaattattgaagagtaaaaacagagataataag

SEQ ID NO: 288099 - DNA, 594 bp, Homo sapiens
tcagagagagagatttaatctatgaaaatacaaaattacaaggagattaggaagaagttgcctagaaataggcaggagccatcacccgaaaatgggggcatccttgtccgtggccgttggtgcatttgcttatatggacaggggcataggttgcaggttgctcttcattttcctttctgggagacagagaggaaayaggattaaaaggcagttcagatgagttaacatcatggcatagccaaaaaaccccaatgtaatgcaatactctttatacttagatatagctgagtttttattggctgtttggaattgggcatgttacttatcatctcagcggttttctcatctccaatatggaaataaaatacactttaaatgagctatgtataaaatgtgccttgcgcaatacagaatatagttagatgcataaaaatgttagttactctccctttttattgtctttcctctgtcacacacagagctttataattatggtagaggggcatatagtcaaaggaggggaaattcttgcatataaagggactttgggagtctaggacagaggttgaacttaatgctaagtaggttggaatt

SEQ ID NO: 288100 - DNA, 1171 bp, Homo sapiens
tcaagggcccattcaaggctacatgacttgtcagttaaagagccaggccttaaacttggcctttcaattccaagttcaatattctgtacacaagaggagcatactaggcattctggagactaagaatcaagaaagcaaaaagttcatcctggagatgaagctttgtagataagacactaatatcactgcaagaaactagactaaaaacagtgccaagcatttgcctactagagtgataggaactcaagaaagaagctgatgtggatggtaactatyggaaaggctttatagacacaaaagggtctaaggtgagatgtgaaaaatgtatttatctgaatgggcagagaggcaaagtagggatcttaaaaaaaggcaaatagcaaggcaccgaggcagggtggtaggactaggattcctctgctcaatcaggggtatgacgcaaggtggtggcatgtaagtttcaatgtatgtgtagataggggaccagaccatagagagcttgaaggttagatgaaggggtctagatttgattgtataagcagatgggagctattgcaggttccttaatgagggaatggcattatcwtcaagggcccattcaaggctacatgacttgtcagttaaagagccaggccttaaacttggcctttcaattccaagttcaatattctgtacacaagaggagcatactaggcattctggagactaagaatcaagaaagcaaaaagttcatcctggagatgaagctttgtagataagacactaatatcactgcaagaaactagactaaaaacagtgccaagcatttgcctactagagtgataggaactcaagaaagaagctgatgtggatggtaactatcggaaaggctttatagacacaaaagggtctaaggtgagatgtgaaaaatgtatttatctgaatgggcagagaggcaaagtagggatcttaaaaaaaggcaaatagcaaggcaccgaggcagggtggtaggactaggattcctctgctcaatcaggggtatgacgcaaggtggtggcatgtaagtttcaatgtatgtgtagataggggaccagaccatagagagcttgaaggttagatgaaggggtctagwtttgattgtataagcagatgggagctattgcaggttccttaatgagggaatggcattatc

SEQ ID NO: 288101 - DNA, 529 bp, Homo sapiens
tcacaattctaggatgtacaagaacaatcgtgtcagcatctgcttctggagagggcctcagattgcttccactcatgggaaagggaaagggagctggcctgagcagagaacacgtggctagaaagagtggcagcaagagagagagtggaggaggcaccagccacttttcaacaaccagggctctcaagaactaaaagtgtgagaactgattctctcaagaatagcaccaagccattcaygagggccgcatccccacagtccaaacatctctcaccaggatccacctcaacactggggatcacattttaataggagacttggtggggccaaacaaaccatagagtaacatacactaagccaagggtccccaaccccctgactatggactggtactgatctatggcctgttaggaactgggccgcacagcaggcagtgagcagcggatgagtaagcatcaccacctgagctttgcctcctgttagatcggcagcggcattagattctcataggagcatgaaccctacggtg

SEQ ID NO: 288102 - DNA, 494 bp, Homo sapiens
tgggctaggtaaatgagacactgtctctgtctgccttcaaagatttcatggcttatacaaaaacacatggtagctccaacccacatccatatgtgtatgatcagagatacatatatgcacagctataatctgacatgacagctagcaacaaatacaggcaagtttcatacggatcccattgaaagatacttgtattttccctttaatagttttagttctcagggtttgttactgtgattgtactctatgagcatttcattycatatttgaaaacttttgctagatagagtggaaatcttcttacccatttcttcattacctgaaaaggaaacagtaagaagccattagtaatgtttctatcggcaatgaagatcagaccctgctcccgtgggttgggactcttccctcaactcttaggaaacaatggatcttccaattccctcagctgcatagaaaaagctgttatgggccttacatcttatctgatgactatt

SEQ ID NO: 288103 - DNA, 494 bp, Homo sapiens
tgggctaggtaaatgagacactgtctctgtctgccttcaaagatttcatggcttatacaaaaacacatggtagctccaacccacatccatatgtgtatgatcagagatacatatatgcacagctataatctgacatgacagctagcaacaaatacaggcaagtttcatacggatcccattgaaagatacttgtattttccctttaatagttttagttctcagggtttgttactgtgattgtactctatgagcatttcattccayatttgaaaacttttgctagatagagtggaaatcttcttacccatttcttcattacctgaaaaggaaacagtaagaagccattagtaatgtttctatcggcaatgaagatcagaccctgctcccgtgggttgggactcttccctcaactcttaggaaacaatggatcttccaattccctcagctgcatagaaaaagctgttatgggccttacatcttatctgatgactatt

SEQ ID NO: 288104 - DNA, 670 bp, Homo sapiens
ttatgcacatccgttttcatttagcccgtggttaccttaactgtgagctgtttgaagctaccagtctgagcactattgactatttttttcaggctctgaatagctctagggatctcagcaggggtgggaggaaccagctcaaccttggcgtagtaccaaaatgtggccaatcgaggcttcgagtaagtcacagcagctggaaaacaaaacamaacaaaacaaaaaaccaggatgaactcactagagaccgaaagaagcagatgtgtgggctggacacaaatatttattcatgcatcaccttcattcactgcttgtaccaaatgtgcacccggtgtgaaaagtcaaagctgctccctggtaacaagaggcttttaaagatgcagaacacctgtgccacagggatgttcaatcaggcaggatgctataagcacattcaattatgccagtacttcactagtggccagctagtactgtacttcatttatgaatggcaaatctagctaactgtaaagatgctaggaattggatttaaaaacaagagaacagtcaatttattcatattttcttggagagagaccagcaaatttgaagaaagaggtgaagaaagggatgaaggatttagaatggcactcttaagaacaagatgaaaagttatcataatattatccac

SEQ ID NO: 288105 - DNA, 569 bp, Homo sapiens
ggaggaattatagaaatttgcatctcttattgaaatagtggatctaagtgatgatcatcagtgactaaaaggaagactatctgttatgcgttgttatgtactcctgataggaacttgtttgccaaaaaaaaaaccagggtctgatcaaacttctagatgtgccagcttctaagtaatacagagtgcagaggatcatattacatgaaattasagaatttgaatctgcaaaatctagatcgcaggggaaaatgtaggacaaatgatccagtttcttccacaaaaaagtttgaaaggaaaaagaggatgaagaatacatagattaaagaagagacctatcaaccaatctcattggaatctgattcaaacaaatgtgtatgtgtgtgttcagatatataatatacatacatttacacatatatgaaacatacataaatatgcttgcatatctgcatacctatgtgtatgtgtcaaaagataaaatcacaacaaattttattcaaagatcttaactggcttttattcacaattctagagttgggcagccctcagaaccagaacaggttcggaga

SEQ ID NO: 288106 - DNA, 1153 bp, Homo sapiens
ggaggaattatagaaatttgcatctcttattgaaatagtggatctaagtgatgatcatcagtgactaaaaggaagactatctgttatgcgttgttatgtactcctgataggaacttgtttgccaaaaaaaaaaccagggtctgatcaaacttctagatgtgccagcttctaagtaatacagagtgcagaggatcatattacatgaaattagagaatttgaatctgcaaaatctagatckcaggggaaaatgtaggacaaatgatccagtttcttccacaaaaaagtttgaaaggaaaaagaggatgaagaatacatagattaaagaagagacctatcaaccaatctcattggaatctgattcaaacaaatgtgtatgtgtgtgttcagatatataatatacatacatttacacatatatgaaacatacataaatatgcttgcatatctgcatacctatgtgtatgtgtcaaaagataaaatcacaacaaattttattcaaagatcttaactggcttttattcacaattctagagttgggcagccctcagaaccagaacaggttcggagawtaagtccccatcaactacttcaaatcaaacctgtttatatatatatatatatatwtttatatatatatatatatatatatatatatatatttatttatatcagtaatttttagggtacaggtggtttttggttatatggataagttctttagtagtgatttctgagattttggtgtacctgtcacccaagcagtgtacactgtacccagtgtgtaaccttttatccttcacccgcctcccacccttccccgtgagtccccaaagtccattatattaatattattcttatgcctttgtatcctcatagcttagctcccgcttataagtgagaacatatgatatttggttttctattcctgagttacctcacttagaataatggcctccagctccatccaagttgctgcaaaggccattattttgttccgttttatgactgagtagtattccatggtgtatatatatatcacagccaacaaatagttgatttctttttaactatatgctgatgataattcttgctttaatattggcaacaactgactggcagtgccagaaacagaagcaaatctcttcttgactg

SEQ ID NO: 288107 - DNA, 568 bp, Homo sapiens
ttaaacactcccaagtttgagcacttttcttatgatttgagtctgaatttatggcacgtagttgatgatttargaaaataagtatattgctttccttcaccttccttcatataaagcacagtcagcaacgtgctccagtcatgcgaggatcaaggtatttgtttctgaagggctgtgtagaagagtgagagattgtacttcacatacaggacatttgataatagaaatgattacacagctcactagattgtctgtctttatagtaagtgtagattaaggaattgcttctttttaaagtactttgcaatctttggttcaatggaatgcaaaaaattaaccactggaaagtactttaggaaccacttctaagcatgcaggttaaaagaataaattgcctgggccctatgttttattgtgaatagcagcaggacttagtttattgtgcgatcatgctatgcaccaatcactttcttgaaaatgttggccatttcttttatgttttctccatttacaagtgttctggtaatttagaattctgtccctttattctaagcaattactatagaag

SEQ ID NO: 288108 - DNA, 545 bp, Homo sapiens
attgtggtctttctggcaaccagccccatcctgaagcaaagaaggggcctccaatcatcagtcatcttatttagcatacggaagatactcatcactttagcgattccaagaattttaggagctgtatgccaggaaatgggaagaaagaacaaatatatatttcacagyatcatacattatatgactatagaacaatttgttggcccatttttccaaggaaggacattgaggttaattccagttatgggaaattattaacagagctggtataaacatttgtgtgaacatcagttcacttttctcaagtaaaaacccaagaataggataaagtagtgtatatttaactataaaaatcttccaaagtatttttcaaagttgatacaccatttttcattttcaccagtaaggtatgagagttttaattgctctgtacctttaccaacacttggtattgtcaggattgtttattttagctactataataaactaaattactcagttgagtttaaactaagctactaaacttagctacttaagtgtgtaat

SEQ ID NO: 288109 - DNA, 578 bp, Homo sapiens
tttggtaagaatgccacagaagtaattttgttcattatatcacaggggttatgatgccagtatgtctacttacttggttaaggtggtatctgtcaggttctctagtattaacataaagttactatttttcctttgtaattagtaaatctcyttgggaaggcattttgagactatgagaatatcttgttttcctcaaacttttacccactaatttttgcatccattggttaatcttgcatgcaataacacctattcaatgtggtgtttgacaaatgatactctttccattccctttgttcttctacatttactaattagaattcttctgtaaatcctttcttcttctatacatgtatttaattatttatattagtattcactctgaatatttattttattctatatattccaaatgcattgttcattgttttcttcaaattgttccagttttggttattaagagtttcttcaggatggcttctgtgttcttttaacaagctcccaactccctttcagcaacttcttaccttctggcacagcaggatggtccaggttgttatcttgtacatttcttgctc

SEQ ID NO: 288110 - DNA, 621 bp, Homo sapiens
attgctccatcctggctcataagaaaaaacctcaaacataattttgatcgtgctttagaaagaaaaacagacaccttcctaccctggcagtgaygcttggaagggaattgaagcacaggcttcattccactgtatcgatctcactaaataaagggttctgaatttattgatcagctcagactaaacccctaactgtttgcaagaccatgcatgatgtgaagccctggttcactgaagaaggaagaactgaaagcacttttgttctcaggcagccacagagcagcaatttacactaagtagtagatgaacatgattaaaataatagacagcattcagttacaggatggcgggaggtgggggagataaaacttatgttaaattcaaagatttctcaattttaagaatgatgtagtaacaagtgaaaggtaaaactatctttaaaagaggaatattttatttgcatgtttctaagcagaaaagcaactcagtctctaacacagttgtttccttcaaaccccgaaaatatgcctgtagtgattttttttttaaggctacacagcagtttcttccccaccctcatcactttcactgactgctaaatgatgcatacagggaggggta

SEQ ID NO: 288111 - DNA, 596 bp, Homo sapiens
tataattatccctgttttagctgctaaagcttgagaaagtagttgctaaggagcagaggtgggatttgcactggtatgtcactgattccaaatcagatgctctcattccatggcaccaggttgtctcctgtagcatgagactataatcgaccaacacaaaaaggagacagggagaggatgccgaccaaactgccaagctaatgcatctgagaagggaatacatacaactagcctgtcctccattcctgggctggacgcttcactaaaccagacgacaaagccttctggaatacctrctgtgagttgggcactgtgaaggcagtatgcccactcccagccctcacagagctcatggtgtaactggggacaacaaagtgtaaacaagtagttaaatgtcacaagataaatgtaggggagacaaagaggtagtaaggcagcatgtcaggaaatggtaaacaacacatcatgtcacaccacgaatcatgagcaatccatcagtggtaggattcgaattaaattacaattcgattttacttatttattatttaggagacattctgtttttcaattttttttcttctccacatcagcccacc

SEQ ID NO: 288112 - DNA, 448 bp, Homo sapiens
tacgaaatatttcaatgaaaactctttcttttgacagaatccagctaaaaatatataaaattatcagtgcttaggcagttttgttttgttttttttttttgcagaatgtacccattaacaaattacactgaaatatcactacctctaattaaattagtctttcagagtacaggtggcgtagaagctcccttttcccaactgtatcattattagtctctgaaatttgatgtaatttagttagctccatatttctggttacttatgtcaacaaagaaagaaatctaattcctaatttttaaaacasgtttttgttaactttgaaagaaaaagaagagtttcaacatgaattttactcataacagacattttgctaattggcattttcaaagataacactctaaaagaaaaaaaaacctaaactaaattaaacctgtttctcaatgaattt

SEQ ID NO: 288113 - DNA, 594 bp, Homo sapiens
gttttgatgttgcagtgtagttattggtctactaaccataacatgtagctatggccaagatgccccagatcacctacagtctgagctctgactatgtatcacactccctctcaaacagcgctggaatttcttgcacaaagaatgaacaaattccaactagcttctcagtaataatatacaaraccaacaacaacagtctggtgttgagccacggttcattcatatatgtattacatcctctcaaaactggggactaggcacaaagaaatttgtgggctcagcatctgaaccatcaattataaccctgcttcaacgagaatgtgtgttgaatgattcataacataagaaaacaaagacaaaggtaaagattgcacccacttcctcatatccaacagcactgggaacaatattacattaacatgttttttacatatgtgtgaattcatctatgtaaatataaaagtgtagcatacagtgctatactctgaacaggataagtaatcaaatattactctcattactactgtttctaagtcatgagttcagaatgtttgtgataaaatatctcatttggatatcatctataatgattca

SEQ ID NO: 288114 - DNA, 594 bp, Homo sapiens
gttttgatgttgcagtgtagttattggtctactaaccataacatgtagctatggccaagatgccccagatcacctacagtctgagctctgactatgtatcacactccctctcaaacagcgctggaatttcttgcacaaagaatgaacaaattccaactagcttctcagtaataatatacaaaaccaacaacaacagtctggtgttgagccacggttcattcatatatgtattacatcctctcaaaactggggactaggcacaaagaaatttgtgggctcagcatctgaaccatcaattataaccctgcttcaacgagaatgtgtgttgaatgattcataacataagaaaacaaagacaaaggtaaagattgcacccacttcctcatatccaacagcactgggaacaatattacattaacatgttttttacatatgtgtgaattcatctatstaaatataaaagtgtagcatacagtgctatactctgaacaggataagtaatcaaatattactctcattactactgtttctaagtcatgagttcagaatgtttgtgataaaatatctcatttggatatcatctataatgattca

SEQ ID NO: 288115 - DNA, 594 bp, Homo sapiens
gttttgatgttgcagtgtagttattggtctactaaccataacatgtagctatggccaagatgccccagatcacctacagtctgagctctgactatgtatcacactccctctcaaacagcgctggaatttcttgcacaaagaatgaacaaattccaactagcttctcagtaataatatacaaaaccaacaacaacagtctggtgttgagccacggttcattcatatatgtattacatcctctcaaaactggggactaggcacaaagaaatttgtgggctcagcatctgaaccatcaattataaccctgcttcaacgagaatgtgtgttgaatgattcataacataagaaaacaaagacaaaggtaaagattgcacccacttcctcatatccaacagcactgggaacaatattacattaacatgttttttacatatgtgtgaattcatctatgtaaatataaaagtgtagcatacagtgctatactctgaacaggataagtaatcaaatattactctcattactactgtttctaagtcatgagttcagaatgtttgtgataaaatatctcattyggatatcatctataatgattca

SEQ ID NO: 288116 - DNA, 507 bp, Homo sapiens
tagtggcacttttgaaacacaggcatcattcaaaaatacacaatataatatacaagatgtgattataaagaaataggattcattccacaagtcacacagaaaaatcagattcattctattacagtcatgccttgtataaattatagtccagccaacaggggcactaaatatgcactttaatttggagtacagtacagaagtaacctcactatctaatgagatgaattattaataaatgctaaaagatactaaaaaaatgcttgtattaaaaaggccaatggtagtcttatgtattttacaagcaatcttcaataagccactatcattttatactcaattgagccatactctcgattagtctgatatactatacttttctttaaattggaagaaattacattgataatcatttttttatcaattctttcyggtttggtgaaaaaaaataaaaagagcaatgaactaaaagccagtaaaccgagttatggtcgtggttgcgctgataat

SEQ ID NO: 288117 - DNA, 520 bp, Homo sapiens
aatgtaatacctccagatttgttcattttgcttagtcttgctttggctatgtaggctcttttttggtcccatgtgaattttagtattggtttttccagttctgtgaagaataatggtggcattttgatgggaattgcattgaatttgtagattgcttttagcagtatggtcmttggtcattttcacgatatcgattccacccatccatgagcatggtatgtgtttccatttgtttgtgtcatctgtgatttttttcagcagtgttttgtagttttccttacagcagtctgttgcctccttttttttttttttgtagctattgtaaaagggggtgagttcttgatttgattctcagcttggtcactgttggtgtataacagaactactgatttgtgtacattaattttgtatcctgaaacattgctgaatttactagttctaggagcttttgggatgagttagagttttctaggtacaatcatgtcttcagcaaacagcgacagtttgacttcctctttat

SEQ ID NO: 288118 - DNA, 589 bp, Homo sapiens
ggaaatgctagggcacagctcagaactaccatctggcatttcatagtatgaaaatgcttttgatataataaaataaaaataaaacttctgtgtttcatgctactgtatttttatcctttaacctaagcaggatataggtttaagtattaggggkttttttttgcctttttggtataattataataactgacctatttcttatcttttacagtgaagtttagcaactgcaatggaaaaagaaaagtacaatatgagagcagtgagcctgcagattttaaggtggatgaagatggcatggtgtatgccgtgagaagctttccactctcttctgagcatgccaagttcctgatgtatgcccaagacaaagagacccaggaaaagtggcaagtggcagtaaaattgagcctgaagccaaccttaactgaggagtcagtgaaggtatagtatccgaatatggctttagggctggttaaaaatcaactttatacagtttgaactaaatatatgctttgcttcagaccacattaatggatggccactatttgcatttgtatcaactttggtcattttaataatattttgttgtgtt

SEQ ID NO: 288119 - DNA, 568 bp, Homo sapiens
taccctcattagtaaatgtccttcagtgcccttttggccaatggggttggttgcagatacggtatcgctttcaatgatctttgtatcaagttctttccatatcagcgtcactaataaaatcagggtgaatgtacaatatagccgatatctcactttccctgggaccatcccctttcagccccaggataggaaagagaaactgttagccttctgctttttaaggcttagacttaattacaaacatttatcaagtgtgtataaatggtgctcagtcagtggtgctcactttaaacctctccctacatcacctgacacaatgcagtttcattctctatactaatagcaaaagctgttatttggtgtaccctgtgttaggcactgtactaagtacattatttcgttattgaaatatacattagttcatttgtccttcacaatagtccagtaaaataggcgtatattgttagaaagtagcaaagtgaagrttaaatctttgtctgcctcagtgcaaagaaaatggtgtctatcatatcttataccatcctttacaaagctcatgttcaaccag

SEQ ID NO: 288120 - DNA, 552 bp, Homo sapiens
catggcctgcattctgacatgacagttgttgggaaytaaacagagattttccctctttaagcaggacaagcatgttccagtatttttattctttgtaccagaccagctttcttgatatatgttatcagcccattcttcatagatacttattttgcaggccctgattgaattatacagtaataagtaagtcttagattaacaaaaacaggtttgtacaaagaggaggtgattttctaagacagttttatattgcttaaatgagagagaaaaaaagagagagagaagtagccacacaaatatgtttagccaaaggtattagttaaaataggctagccgctgtaacagactctaaaatttcagtgacctaagtctagttgaaaatgtatttattggtttcttaacattaactgggtttcaggtcgtgggcatttgggatggagaaaggaggtctgcttctctctacacagtcattcagggacctaagcgccaaagactctcccatctttcacatgtgacttctaggatcaccctacccttaaatccatgcaatca

SEQ ID NO: 288121 - DNA, 545 bp, Homo sapiens
ttttaactaccacttaatagatgtgacatatttgaaactttgctgattggtcaaaacttcacaatatttcyttccacattcgaaccttggtattttactccagtgattatcaatttttttaagggaatctaagaattataaagaatctctaggtcttcctttttgaaacagagttgataacagcaagccaaaggtctatctcattttgtcattgtttatttgtttgtgttgtcttcgtgtgtgaagttttatctagtatctgacagtatgacaggtacttgggcacaaagacttgcatcttgcctctgagtagctcacaagctattcaaccctaaagcccaagttgtgattccgtgacaaaaatatatttttaaagtcggccttctttcccatttggaaaaattccaagctgaactactgggctgtacaatgattatactgtgctcttcagtaaattacttgtggcctctgtattgaagacatcacgattaaattaagcagaaaacattcactattcatctacttttcagtgtagagggaaagat

SEQ ID NO: 288122 - DNA, 545 bp, Homo sapiens
ttttaactaccacttaatagatgtgacatatttgaaactttgctgattggtcaaaacttcacaatatttccttccacattcgaaccttggtattttactccagtgattatcaatttttttaagggaatctaagaattataaagaatctctaggtcttcctttttgaaacagagttgataacagcaagccaarggtctatctcattttgtcattgtttatttgtttgtgttgtcttcgtgtgtgaagttttatctagtatctgacagtatgacaggtacttgggcacaaagacttgcatcttgcctctgagtagctcacaagctattcaaccctaaagcccaagttgtgattccgtgacaaaaatatatttttaaagtcggccttctttcccatttggaaaaattccaagctgaactactgggctgtacaatgattatactgtgctcttcagtaaattacttgtggcctctgtattgaagacatcacgattaaattaagcagaaaacattcactattcatctacttttcagtgtagagggaaagat

SEQ ID NO: 288123 - DNA, 545 bp, Homo sapiens
ttttaactaccacttaatagatgtgacatatttgaaactttgctgattggtcaaaacttcacaatatttccttccacattcgaaccttggtattttactccagtgattatcaatttttttaagggaatctaagaattataaagaatctctaggtcttcctttttgaaacagagttgataacagcaagccaaagktctatctcattttgtcattgtttatttgtttgtgttgtcttcgtgtgtgaagttttatctagtatctgacagtatgacaggtacttgggcacaaagacttgcatcttgcctctgagtagctcacaagctattcaaccctaaagcccaagttgtgattccgtgacaaaaatatatttttaaagtcggccttctttcccatttggaaaaattccaagctgaactactgggctgtacaatgattatactgtgctcttcagtaaattacttgtggcctctgtattgaagacatcacgattaaattaagcagaaaacattcactattcatctacttttcagtgtagagggaaagat

SEQ ID NO: 288124 - DNA, 545 bp, Homo sapiens
ttttaactaccacttaatagatgtgacatatttgaaactttgctgattggtcaaaacttcacaatatttccttccacattcgaaccttggtattttactccagtgattatcaatttttttaagggaatctaagaattataaagaatctctaggtcttcctttttgaaacagagttgataacagcaagccaaaggtctatctcattttgtcattgtttatttgtttgtgttgtcttcgtgtgtkaagttttatctagtatctgacagtatgacaggtacttgggcacaaagacttgcatcttgcctctgagtagctcacaagctattcaaccctaaagcccaagttgtgattccgtgacaaaaatatatttttaaagtcggccttctttcccatttggaaaaattccaagctgaactactgggctgtacaatgattatactgtgctcttcagtaaattacttgtggcctctgtattgaagacatcacgattaaattaagcagaaaacattcactattcatctacttttcagtgtagagggaaagat

SEQ ID NO: 288125 - DNA, 323 bp, Homo sapiens
gggcaaaaattatgaacaattttacacaagtcaaaattccaatagtaaataatattagaaaaagattggtccatgctagtaatcaaagatgtataaattaaagcaaccttgagatgccattttatggctgccaaggargcaagttctttttttttttttttaacataacacacaatgatgaagtaactatggtagagaatactattaattagtaacacatttctggaacgcaatatgaaaatacataacaacaaaaaaagtagtttcatataattccactcttaagaacacattctccaaaaatacaccacaagaaataaaaa

SEQ ID NO: 288126 - DNA, 594 bp, Homo sapiens
ccagggtatgttcacggggcgatgctgccctcccagctggcccatgggtgaccctgggaacattaactgcctcacaacgtttgtgcctcagttacccrtagatgtagtgagggtaacaatacttactctcgttggtgataaggaacagctaacacaacacacagggtttttctgctcccaaaatgggattcttcagtgcaccaaatcgaagaaagcactggagctcacgctggtttctccattgtttctccttaacagtggaaactgtaacttttgttctagtagcatctagcatgctcaataattatttgtaaataaaagttatactttccctccaaaaaaaaaaaaaaaagattcataaaagtgaaacaaaggtacgattttatgtcttttgaatatatttccatatgctttccaataggcttgtaagaatttacacttgtatttcttaatcaaaagaaagatgtatgccctttcctcaggttcaccagttttgtcacatttattctgtctggtctatctacacagtccgtgttcaaatactatatcaatacagtcaattcaaaacaataccaattgttctggtaatgtccc

SEQ ID NO: 288127 - DNA, 1101 bp, Homo sapiens
ccagggtatgttcacggggcgatgctgccctcccagctggcccatgggtgaccctgggaacattaactgcctcacaacgtttgtgcctcagttacccatagatgtagtgagggtaacaatacttactctcgttggtgataaggaacagctaacacaacacacagggtttttctgctcccaaaatgggattcttcagtgcaccaaatcgaagaaagcactggagctcacgctggtttctccattgtttctccttaacagtggaaactgtaacttttgttctagtagcatctagcatgctcaataattatttgtaaataaaagttatactttccctccaaaaaaaaaaaaaaaagattcataaaagtgaaacaaaggtacgattttatgtcttttgaatatatttccatatgctttccaataggcttgtaagaatttacacttgtatttcttaatcaaaagaaagatgtatgccctttcctcaggttcaccagttttgtcacatttattctgtctggtctatctacacagtccrtgttcaaatactatatcaatacagtcaattcaaaacaataccaattgttctggtaatgtcccwtcaaaaaaaaaaaagactttaattcagctattttaaatatgttgaaagagataaaactacatctaatgaagtatgagaatattgtctcaccaaatagatgctatcaatacagatatataaattattttccaagagaaccaaataaaaactatggagttgaaaagtaccacaactgaagtgaaaaattcactagagggctcaagagcagatttgagccggcaaaagaaagaatcagcaaacttaaagataggataattgagwttagtctaaggaacagaaaaaaaaggtaagaaaagtgaacactgatatagggacctagagaacgcaatcaagtatatcagcatataaataatggaagtctcagaggtgaggagagaaagaaaaaaacataaaaatatttgaagaaagaataactgaaaactttcccaaatttgatgaaagacatgaatctacatatccaagaagcccaacaagcaccaagtaggatgaacttgaggaggcaaggt

SEQ ID NO: 288128 - DNA, 506 bp, Homo sapiens
tcaaaaaaaaaaaagactttaattcagctattttaaatatgttgaaagagataaaactacatctaatgaagtatgagaatattgtctcaccaaatagatgctatcaatacagatatataaattattttccaagagaaccaaataaaaactatggagttgaaaagtaccacaactgaagtgaaaaattcactagagggctcaagagcagatttgagccggcaaaagaaagaatcagcaaacttaaagataggataattgagattagtctaaggaacagaaaaaaaaggtaagaaaagtgaacactgatatagggacctagagaacrcaatcaagtatatcagcatataaataatggaagtctcagaggtgaggagagaaagaaaaaaacataaaaatatttgaagaaagaataactgaaaactttcccaaatttgatgaaagacatgaatctacatatccaagaagcccaacaagcaccaagtaggatgaacttgaggaggcaaggt

SEQ ID NO: 288129 - DNA, 442 bp, Homo sapiens
gactatctaggatttggcagtattacctctactagtcagcctggttagcctttctgatgctgaattaagtcctgagacatgcatatctagtggtcctaaatattctagtccagaagaagaggaattttgttccttagctaagaatcatttcagggccaatgcaagtaaaaagtaatttagctcycccctccccccgccccgcccgagagagaaaaatataacacgtcacattcactaatatttaacattaagagcagggaacataaaactttattcactgcaagagctgcggtcctgagggaagaatcctctgaactgagtcagcactgagctgagcgatggagcctcagggatgaaagaataaagcagagagcctggcgtccaggcacagcgagacccaaggggccctcccagtgacaggaagaggtgagacagaggctgc

SEQ ID NO: 288130 - DNA, 442 bp, Homo sapiens
gactatctaggatttggcagtattacctctactagtcagcctggttagcctttctgatgctgaattaagtcctgagacatgcatatctagtggtcctaaatattctagtccagaagaagaggaattttgttccttagctaagaatcatttcagggccaatgcaagtaaaaagtaatttagctccccccyccccccgccccgcccgagagagaaaaatataacacgtcacattcactaatatttaacattaagagcagggaacataaaactttattcactgcaagagctgcggtcctgagggaagaatcctctgaactgagtcagcactgagctgagcgatggagcctcagggatgaaagaataaagcagagagcctggcgtccaggcacagcgagacccaaggggccctcccagtgacaggaagaggtgagacagaggctgc

SEQ ID NO: 288131 - DNA, 621 bp, Homo sapiens
aaagagtaaagacatgaatagaaggcctggagtatgatgcttgctaaattaacaagtcagaaacaaaggagagagtcaaaatggaaaatggtttcaatgaaggtgagggaatgtaaaaacaaagatgcactgctccgttctgctccgraaagtgagaggacacacgcaaaaccaagacaaggttctaataatcaaaagccaaaggatgtcctacctggagtgtccatgatattgaagagcataagattttcctttggtgtctggcaagaccactgtcacaggagtgcttttgatgcctacacctctctgaaaggaacaaagagtggtcaagacctcttcctatgcaagaggggttcattttgtttttggggctccccagttgctagtaaattacactgatgcctctccttatagtgggtgatttttatctaggcctctagccagcatgaccttgaagataaaatatcttggtgttagacaccatttttgggggacttgtttcaaatgtgaaaagatgaaaatgaattactgcaaacaaaacagtattaagccttatcagagaatccagggtcctagaatctcatcctctttatacattagaaacaaaaacaatagctgagc

SEQ ID NO: 288132 - DNA, 518 bp, Homo sapiens
tcatagagctgtggtgggggcacacacctgttccaacccagccccagccctgttccaggtgagccaaggactgacagcctctgctaggtacctgggagggctgtggagtgagggctcaggcaggggaggtaggaggctgctcagagaggaaagaccgagaagagacaggagggaagggccccaggcctgccccttgagcatccctagcagtgaaggtgccatgaaggccaggtacccaacccatctccatcagagatgatggtcatttggatcaagggggcagaagcarctgcaacaacagatcttcccctgcctctaccctcaaatcccccagagaaggtaggaaatggcaagtgaccctatagcctcaggtcagcaagaaaacaccccatttccttcccactcccttaggctgagggtgatgcaaggcagagctgaatcaggatgaaaggacactgactaagggaaaagaggagcaggagaatgagtgtgtagtatacgcagagccacaccaacga

SEQ ID NO: 288133 - DNA, 501 bp, Homo sapiens
ccaccgacctcctcccggggccccaggtaggacagcctggatgctgggcaccgagccaggggcctcggggctgggggcagcttgggtgctagcgagaggaagttcctgggggcgggcatgcggggagacacagcacccctgtggggggggcttctttctccaggctgggccttggcctccagacgcctctctgcccaccaacccctttgtattgagaggggcctcgacccctcctcatcccctcagtgaaaacaataaagacaaatttttgttgcttcagtgacttctgtgggcctgcgggcagggagggaccagtccatggaacgggaagtgggaccctgtagtttctgctgtgagagaaaaagacctcagctgttgggggtcctcccctgcctcccctggcaacccatccaccttcccccackccacccacacatggccttgtgggtctggccctccaccccgtggtagagacacagatacgggtcctggagaagacac

SEQ ID NO: 288134 - DNA, 617 bp, Homo sapiens
gcccttggttctgagccagcccctccagccccaggacagatggctgtgggcgctatttttagagctctcctgagatggggagttcagggctctctgtcaccattttatgggttcaatcacctgcattctccggaaatggctccttatcagccagtcaggccccatgggactccacatcccaggaaacaccagggtgccctgctgagcatgggggtggaagaggacaccaggacaaggggacatagatcctgccgttggagggaggagaaaaatcattcttcttagggagccctcatccagggggcaagacacacccctgcccttcaagaaccccagtctcaaaggaragatatggccatgtcataggggagccccagtatgagcggttcccagaacagatacagagagacagagacagcctttgtcctgtttggaggggagacagcagaaatcaaataattccattcctccatggaaagacaaaagacaggtgctcaccctaggatggagggggcagtgggggctggttaggacatctgtgatcccagggatcagggcctagagaaggaccctgcaggctaacgggggcaaggataccagagagtagggggctattt

SEQ ID NO: 288135 - DNA, 590 bp, Homo sapiens
attaattaaaacccatactttaattcagatttcctctgtttttacctgatgtccttttcctktttctttttggaatatttattattttatttattatatgagatccaggagagaaaggagcaatgtaaaatccagcaatccctagtggtatatatccaaaagaaagaaaattagtcttttgaagagacacccacagttgcatgtttattgtggcaccattcgcaatagccaagacatggaatcaacctaagtgtctatcaacagaggaatggataaagaaaatgtattatgtatacacaacggaacattattcagccacaaaaaagaatgatcctcctgcctcaggaagatcctgtcaattgcaacaacatggatgggattgaaggaacctaatgtcctttctcgattccaggatcccatccaggatgctgcgttacatttaatcatcatgtctccttcggccccttttgtctgcgacagtgtctccggtgttccttgtttttcatgaccttaacagttttaaggagtactggtcaggtattttgtagaatgttcctcaactgggattcatctgatagtcttctcatgtt

SEQ ID NO: 288136 - DNA, 590 bp, Homo sapiens
attaattaaaacccatactttaattcagatttcctctgtttttacctgatgtccttttcctttttctttttggaatatttattattttatttattatatgagatccaggagagaaaggagcaatgtaaaatccagcaatccctagtggtatatatccaaaagaaagaaaattagtcttttgaagagacacccacagttgcatgtttattgtggcaccattcgcaatagccaagacatggaatcarcctaagtgtctatcaacagaggaatggataaagaaaatgtattatgtatacacaacggaacattattcagccacaaaaaagaatgatcctcctgcctcaggaagatcctgtcaattgcaacaacatggatgggattgaaggaacctaatgtcctttctcgattccaggatcccatccaggatgctgcgttacatttaatcatcatgtctccttcggccccttttgtctgcgacagtgtctccggtgttccttgtttttcatgaccttaacagttttaaggagtactggtcaggtattttgtagaatgttcctcaactgggattcatctgatagtcttctcatgtt

SEQ ID NO: 288137 - DNA, 1624 bp, Homo sapiens
caggccacagggcccaggtgcctagcaggctgagtggtgcagaaagcctgagttcctcacttctcatagctgacatttatggaatacctactatatgccccaactgtgctaagccttctcttaacgctgacagctatcttatccagtaggaacttttattaaccctgtttgacagatgaataaacagaggtgcaggctcccatcagctgagmctctcccaggcccgcttccacccacctgggtcaggagggcacagcgtttggggagggggctccaacccttttaatctcagcacagggccaggcacctggaagtcttcagcagatggaaactcttgtcattattcttggcctttagtgtgtagagcttcaggctggggccaacttgcctttcaacccattgtctccttgcttggctctgagagccagggatcccatctccttacctgggggcctcagggcacacctccctcccagcttcttcggaatctgcctttctgcctccatcttggcccttgatcttggaaagatgcctgtagcggcacatgtgtgtatgtgaacatgatcgaggtggagtgggwtagctgggccccttcagcctctgtcctacccctgcgcccaccctatagccatgcagcacacacacggccagttcccaacgtgtgggtgaacattgcgggtttcactgaagtttttgtgggaaaccaggggagcagatggcatcatacagcacactccagcctaatcacagcagccctgggtttctcccttctctccwtcgtcatctctcttccaggcagtgctcttcccctcctctccaatcccagtttctttaacaaaaccaaatcctcattttacatccccaatgaagcaaaacaaagccggataggacacagaccacagggctcctgctccaccggtatctcattcaacctcctttatccccatctttttattatggccaaccattttatcctcacgcaggcctctgtgccctgcacacacaacagcttcctcaagctgccctccatgtgggtgctgtgaggctccgagaggagacaggacttgccccatgccacccagcccctgggcagggctcctccctgccttgcccccagagggcctaggttaggtcccctccccaagcwcaggggagcagtggttctgaaactggagcgcgcctgagaaacgcctcaaggattcctttacacacggattgcaagaatccatccctgggtggtgtctgataatttggatttctgacaggttcccaggtgatcttgatgctagtggttccgggaacacactttggaaatcactgtagtagagacaggatttcctgtagtctccccaccctcwggactcgggaactctgcccttcactgccccctgtctcaagggtcctctaatccaataggggcgggcatagccatctctgccactttactacccacaagtgcactcatctctccaatggtgtgtaagacatgtgcattctctgagcatcatggtgatcccacccctgggcatttctattccaaagagagatggataagtgccaaggacccaattcctggacccctctgtctagatgcagtccctcctgaactggatcctgggggacc

SEQ ID NO: 288138 - DNA, 541 bp, Homo sapiens
gatggattggctgtggggttgagtgagaaagaaaggagtcaagggcgacgaggctcggagaggttagggtgggctgcttctgagtgtgctgtgagccagtgcctttctcttgtacagaacatgtccagactgctgtctccaatagcctataccctccagttcccttctctcctgctccgtggagctctgtggcagccatttctactacagtgtgggccttgcatgggagctgttagggaggcatgtgcacacacacgcacactcacatgtgtgtgtgttcatgggctgcctccaagagcttcgatcctgttttatgtgatggcatgcaggcctccctcctctgttttatgtgattgcatgcaggcctccctcctctgatgaagaattgctaaggaggccaggtgttgtggctcacgcctgtaatcccagcactttgggaggccgaggcgggtggatcacttgaggttaggagttcgagaccagcctggccaacatggygaaaccccgtctctactaaaaatacaaaaattagccgggcata

SEQ ID NO: 288139 - DNA, 606 bp, Homo sapiens
gactgtagggaacaatcttgaaaatcatctttgtacaaagagtcattatctattttactcagcaattatgtattgagtcttgctatgtgctaggcactaggatttaaagagtgaaaagaaagcatgtcagagatgacttttctagagatcctgcccgagctgaggcttaaagagtgaggctagcctaattagaaggggtaggggacaggaaagagtgagagcatgacaggcagcaacaaaaggcagaaagaggcctgaaagagtgtatgtgtttgcctgcagtcgaaggatgggtcagcaggacaggaccagcagttcagtaaggccagagaargggcacacgggggaaagggctaaagatggagagctgagcagaatcacattatgaaagccttacgtataactttaagatgcttggacattaatgttctcaagagtggtccctggtcttatttgcattggtgatagaacactgtcaatgccaaaaccaacatccctagcgaacacatttattaacgcaaggtggtagctcatgtggacacagccaaggagatactatgcagcaaattctcaataagtctcattaattactgacttggaaagtca

SEQ ID NO: 288140 - DNA, 606 bp, Homo sapiens
gactgtagggaacaatcttgaaaatcatctttgtacaaagagtcattatctattttactcagcaattatgtattgagtcttgctatgtgctaggcactaggatttaaagagtgaaaagaaagcatgtcagagatgacttttctagagatcctgcccgagctgaggcttaaagagtgaggctagcctaattagaaggggtaggggacaggaaagagtgagagcatgacaggcagcaacaaaaggcagaaagaggcctgaaagagtgtatgtgtttgcctgcagtcgaaggatgggtcagcaggacaggaccagcagttcagtaaggccagagaaggggcacacrggggaaagggctaaagatggagagctgagcagaatcacattatgaaagccttacgtataactttaagatgcttggacattaatgttctcaagagtggtccctggtcttatttgcattggtgatagaacactgtcaatgccaaaaccaacatccctagcgaacacatttattaacgcaaggtggtagctcatgtggacacagccaaggagatactatgcagcaaattctcaataagtctcattaattactgacttggaaagtca

SEQ ID NO: 288141 - DNA, 606 bp, Homo sapiens
gactgtagggaacaatcttgaaaatcatctttgtacaaagagtcattatctattttactcagcaattatgtattgagtcttgctatgtgctaggcactaggatttaaagagtgaaaagaaagcatgtcagagatgacttttctagagatcctgcccgagctgaggcttaaagagtgaggctagcctaattagaaggggtaggggacaggaaagagtgagagcatgacaggcagcaacaaaaggcagaaagaggcctgaaagagtgtatgtgtttgcctgcagtcgaaggatgggtcagcaggacaggaccagcagttcagtaaggccagagaaggggcacacgggggaaagggctaaagatggagagctgagcagaatcacattatgaaagccttacgtayaactttaagatgcttggacattaatgttctcaagagtggtccctggtcttatttgcattggtgatagaacactgtcaatgccaaaaccaacatccctagcgaacacatttattaacgcaaggtggtagctcatgtggacacagccaaggagatactatgcagcaaattctcaataagtctcattaattactgacttggaaagtca

SEQ ID NO: 288142 - DNA, 603 bp, Homo sapiens
ctttcccctaattctctgttatctagatgttgctttggttaaaggaagaacacaaatatcctgccaaaaggtattctgttcagtgcaaaaggtgagtaaacacaaagcacattttaccagaaaaagtttttttaagtcagaactatagctctatgcagccaagcagaggcactctaggactgaattctctatgcttctttgttaccttctttgctctctttgttttctggtagctgtgattggcacaggtcatggagagtatcattccctgagagaagtacaacyccagtgtccatcttttctcgttctgttaagttcatctgtcccagttctttggttgctgactgattttcaggcattgatggtgatacagatggacatttatcatcaactttcagattcttggatctctgacaagtctcatcactaagggtcaaattagtaggatgccaatctgaaaaatccgaaaatgaagttttcatttttaggatgtaaataacacaataatttgactaacttgtatacatgctttcttcacagaaacagtcccacatcctgctctctcccacaacacactatgcattcaggattattacattttac

SEQ ID NO: 288143 - DNA, 534 bp, Homo sapiens
atcactacagaaaaccagcaaattgtagaggtaaacaataaaagaggaagataggaacaaatgatagacaaaacaatcactaaacaattaataaaatgaaaggagtaagtcctcacctatcataaaaactttgaatatacatgatttaaattccccaattaaagatatagatagaatgaatggattacaaaaaaagaccaaataatatgctgtctacaagaaactcactttacctgtaaagacacatagactgcaagtgaaaggaaggaaggatattccatgcaaatggaaaccaaaagcacacagragtagctatatttatatcagacaaaatagatcttaagtaaaaaaaaaaaaaaataaataaaagagaaagagaagggcattatataataataacaggatcaattcagcaagaggatacagcagtcataaaggtatatatactcaatacctgagcacacagatatataaggcaaacatcactgaaactaaagagacagatagcctccagtacaataatagatggggact

SEQ ID NO: 288144 - DNA, 595 bp, Homo sapiens
tatcataaaaactttgaatatacatgatttaaattccccaattaaagatatagatagaatgaatggattacaaaaaaagaccaaataatatgctgtctacaagaaactcactttacctgtaaagacacatagactgcaagtgaaaggaaggaaggatattccatgcaaatggaaaccaaaagcacacagaagtagctatatttatatcagacaaaatagatcttaagtaaaaaaaaaaaaaaataaataaaagagaaagagaagggcattatataataataacaggatcaattcagcaagaggatacarcagtcataaaggtatatatactcaatacctgagcacacagatatataaggcaaacatcactgaaactaaagagacagatagcctccagtacaataatagatggggactccatagtctgactttcagcattgaagggatcatctaaacagaaaatcaacaaagaaacatcaaaatgaacctgcactatagaccacatggacctagcagacacttacagaacactgtattaagaagctgcagaatacacattcttctcattagcacatagaacattctccagaataga

SEQ ID NO: 288145 - DNA, 595 bp, Homo sapiens
tatcataaaaactttgaatatacatgatttaaattccccaattaaagatatagatagaatgaatggattacaaaaaaagaccaaataatatgctgtctacaagaaactcactttacctgtaaagacacatagactgcaagtgaaaggaaggaaggatattccatgcaaatggaaaccaaaagcacacagaagtagctatatttatatcagacaaaatagatcttaagtaaaaaaaaaaaaaaataaataaaagagaaagagaagggcattatataataataacaggatcaattcagcaagaggatacagcagtcataaaggtatatatactcaatacctgagcacacagatatataaggcaaacatcactgaaactaaagagacagatagcctccagtacaataatagatggggactccatagtctgactttcagcattgaagggatcatctaaacagaaaatcaacaaagaaacatcaaaatgaacctgcactatagaccacayggacctagcagacacttacagaacactgtattaagaagctgcagaatacacattcttctcattagcacatagaacattctccagaataga

SEQ ID NO: 288146 - DNA, 373 bp, Homo sapiens
aaatgaaaatggggaaaaaaaatcaatccctatagaaagtgacaaaagaagcactaagagggcaatttatagcaattaacagctacatccaaaaaagagaaagacttcaaataaacaacctaacaatacacytgaagaaaccaaaaaagcaagaacagacccaaaactcaaatgtagtagaaggaaagaaatgataaaggcagggcagaactgaacgaggtagactaataaagcaaaactgcaaactacattaacaagaaaaaagagaaaactcaagtaaataaagagggaaacataaaaggagatagcaaagaaatacatggagtcatgagagactattatgaacaactatatgccaacaaactggaaacgt

SEQ ID NO: 288147 - DNA, 747 bp, Homo sapiens
aaatgaaaatggggaaaaaaaatcaatccctatagaaagtgacaaaagaagcactaagagggcaatttatagcaattaacagctacatccaaaaaagagaaagacttcaaataaacaacctaacaatacacctgaagaaaccaaaaaagcaagaacagacccaaaactcaaatgtagtagaaggaaagaaatgataaaggcagggcagaactgaaygaggtagactaataaagcaaaactgcaaactacattaacaagaaaaaagagaaaactcaagtaaataaagagggaaacataaaaggagatagcaaagaaatacatggagtcatgagagactattatgaacaactatatgccaacaaactggaaacgtwaaatgaaaatggggaaaaaaaatcaatccctatagaaagtgacaaaagaagcactaagagggcaatttatagcaattaacagctacatccaaaaaagagaaagacttcaaataaacaacctaacaatacacctgaagaaaccaaaaaagcaagaacagacccaaaactcaaatgtagtagaaggaaagaaatgataaaggcagggcagaactgaacgaggtagactaataaagcaaaactgcaaactacattaacawgaaaaaagagaaaactcaagtaaataaagagggaaacataaaaggagatagcaaagaaatacatggagtcatgagagactattatgaacaactatatgccaacaaactggaaacgt

SEQ ID NO: 288148 - DNA, 284 bp, Homo sapiens
agatagcaaagaaatacatggagtcatgagagactattatgaacaactatatgccaacaaactggaaacgtatggaaaatggatacattcctggaagtgcataaccagcaagaatgaaccaagaagaaaaggaaacctggacagaccartaacggtaatgtaattgaatcagtaataaagtttaccaacaaagaaaggtctaaaactgggtaagttactctgaattctactaaacttttaaggaaaaactaacagcaattttttataaattattccaaaatctt

SEQ ID NO: 288149 - DNA, 284 bp, Homo sapiens
agatagcaaagaaatacatggagtcatgagagactattatgaacaactatatgccaacaaactggaaacgtatggaaaatggatacattcctggaagtgcataaccagcaagaatgaaccaagaagaaaaggaaacctggacagaccaataacggtaatgtaattgaatcagtaataaagtttaccaacaaagaaaggtctaaaactgggtaagttactctgaattctactaaacttttaaggaaaaactaacascaattttttataaattattccaaaatctt

SEQ ID NO: 288150 - DNA, 531 bp, Homo sapiens
ccataggcacccatcccccaaggctctccatcttgctctgagtgactctagctcctgcttactgccaggccagaagacagtagggctgcatttaccatgggactgcagcatatctggtctgtgtaccttcttgtccaccagcccctcccaaggcccctgcctagctactcacgcaagggtaagcacacagcacagcctccactgccccatctgagtgctttgccggaggcctgggagcagttcagcccccaccctcagcacagccaaagctcaaccccatgagaccagaagacaaagtcatgaacctggtctcaatacccccmggattcaagcacactgctcaagtatactgagctggtatctgtggcctgagctcaagaagaggagtagctttctctctcacaatgccgagaagagagggcccaagttcatatgccagtgtgggagccgggtgtgctccctctgcaacagcagtccccaacctttttggcaccaggtgctggcattgtggaaaacaatttttccacagac

SEQ ID NO: 288151 - DNA, 531 bp, Homo sapiens
ccataggcacccatcccccaaggctctccatcttgctctgagtgactctagctcctgcttactgccaggccagaagacagtagggctgcatttaccatgggactgcagcatatctggtctgtgtaccttcttgtccaccagcccctcccaaggcccctgcctagctactcacgcaagggtaagcacacagcacagcctccactgccccatctgagtgctttgccggaggcctgggagcagttcagcccccaccctcagcacagccaaagctcaaccccatgagaccagaagacaaagtcatgaacctggtctcaatacccccaggattcaagcacactgctcaagtatactgagctggtrtctgtggcctgagctcaagaagaggagtagctttctctctcacaatgccgagaagagagggcccaagttcatatgccagtgtgggagccgggtgtgctccctctgcaacagcagtccccaacctttttggcaccaggtgctggcattgtggaaaacaatttttccacagac

SEQ ID NO: 288152 - DNA, 531 bp, Homo sapiens
ccataggcacccatcccccaaggctctccatcttgctctgagtgactctagctcctgcttactgccaggccagaagacagtagggctgcatttaccatgggactgcagcatatctggtctgtgtaccttcttgtccaccagcccctcccaaggcccctgcctagctactcacgcaagggtaagcacacagcacagcctccactgccccatctgagtgctttgccggaggcctgggagcagttcagcccccaccctcagcacagccaaagctcaaccccatgagaccagaagacaaagtcatgaacctggtctcaatacccccaggattcaagcacactgctcaagtatactgagctggtatctgtggcctgagctcaagaagaggagtagctttctctctcacaatgccgagaagagagggcccaagttcatatgccagtgtgggagccgggtgtgctccctctgcaacagcagtccccaacctttytggcaccaggtgctggcattgtggaaaacaatttttccacagac

SEQ ID NO: 288153 - DNA, 575 bp, Homo sapiens
tagagtgtggcggaaacaggaggatctgcaaggcagaaggttcgggaactggtcctgagaagagggaagaggcagagtgagtcactgcacgcacctggcctccatggacgagcgagggcatcccagaaacgtgtaaatgaccccgagtgtgactgggaaggagaacttattccttaccaggaaactggaagctaaaactacagagggtgacatagaaacacgcagaaaccattctaaagaaagtagtgatcttgtattaaattgagcagaattctcacagattttaccattcctgttataaactagtatttgttgtttagccaaaacagaaaatgatttccactggacagtagaaaaatatgtgtaaaatagggaagaaagttagtattggatcagtgtgagtcctgaagcactttcagtgctgtgagaacgacatccactttgggtttcattcgtttgtaagcagaggagctgtcagtcactcgtgcttctcgktggcctctgagccatggtgtcgagtgaagagtagttcttgtttgttacaacctttgtgagtcagccatgcctgcaaagtg

SEQ ID NO: 288154 - DNA, 410 bp, Homo sapiens
cattaacagacacttctcaaaaaaagacataaaagtggagagcaaacatatgaaaaaatgctcatcatcactgatcatcagagaaaagcaaatcaaagccacaatgacataccatctcacaccagacataatggctattactaraaagtcaaaaaataagcaacaacaacccagattttggcagagctgctacagcaaaaagggaattctaatacacttttgggagaaaatggtaaattcgttcagccactgtggaaagcagtttggaggtttctctcacggaactaaaagtagaactgccattcaacccagcaatcccattagttggttaaatatccacttcccaccaccaaaaaatcattctaccaaaaagacacatgcacccaatgttcactgcagcactattcaca

SEQ ID NO: 288155 - DNA, 410 bp, Homo sapiens
cattaacagacacttctcaaaaaaagacataaaagtggagagcaaacatatgaaaaaatgctcatcatcactgatcatcagagaaaagcaaatcaaagccacaatgacataccatctcacaccagacataatggctattactaaaaagtcaaaaaataagcaacaacaacccagattttggcagagctgctacagyaaaaagggaattctaatacacttttgggagaaaatggtaaattcgttcagccactgtggaaagcagtttggaggtttctctcacggaactaaaagtagaactgccattcaacccagcaatcccattagttggttaaatatccacttcccaccaccaaaaaatcattctaccaaaaagacacatgcacccaatgttcactgcagcactattcaca

SEQ ID NO: 288156 - DNA, 410 bp, Homo sapiens
cattaacagacacttctcaaaaaaagacataaaagtggagagcaaacatatgaaaaaatgctcatcatcactgatcatcagagaaaagcaaatcaaagccacaatgacataccatctcacaccagacataatggctattactaaaaagtcaaaaaataagcaacaacaacccagattttggcagagctgctacagcraaaagggaattctaatacacttttgggagaaaatggtaaattcgttcagccactgtggaaagcagtttggaggtttctctcacggaactaaaagtagaactgccattcaacccagcaatcccattagttggttaaatatccacttcccaccaccaaaaaatcattctaccaaaaagacacatgcacccaatgttcactgcagcactattcaca

SEQ ID NO: 288157 - DNA, 410 bp, Homo sapiens
cattaacagacacttctcaaaaaaagacataaaagtggagagcaaacatatgaaaaaatgctcatcatcactgatcatcagagaaaagcaaatcaaagccacaatgacataccatctcacaccagacataatggctattactaaaaagtcaaaaaataagcaacaacaacccagattttggcagagctgctacagcaaaaagggaattctaatacacttttgggagaaaatggtaaattcgttcagccactgtggaaagcagtttggaggtttctctcacggaactaaaagtagaactgccattcaacccagcaatcccattagttggttaaatatccacttcycaccaccaaaaaatcattctaccaaaaagacacatgcacccaatgttcactgcagcactattcaca

SEQ ID NO: 288158 - DNA, 521 bp, Homo sapiens
gagtagaactgtgggtattagaggctgagaaaggtaaaggggagtagaagatggggagaggctggttaatggatacaagattacagttacataggaggaatgaattctagtgttctgttgcattgtagggtgaatatggttaactaatatttttttttttttgagacagagtcttgctctgtcacccaggcttggcgtgcagtggtgcaatctcagctcactgcaatctccgcctccggggttcaagccattctcctgcctcagcctcccaaacagctgggattacaggtgtgtgccactacacctggcttggctagctaatatttaaaaagctagaggrgaggattttgaaagttcacaacacaaagaaatggtaaatgtttgaggtgatggaatatattaattagcctgatttgaccattatacattgtttacacatatcaaaatatcactgtgtataccataaatatgtacaattatacaggtccacaaaaaatcaaaggaagccaggtgtggtgtca

SEQ ID NO: 288159 - DNA, 564 bp, Homo sapiens
aaatgcaatttcccctttaccttacttcaagctcatttgtatggagaagrgaagagcatctcatctttatgttgtatcaaaatgcttctccatatcatacaaattggctctgaaattttgaaattcatacaactaattcaaccatttgtttctgataaatgcctggacatgacctgatttccagttgctgcactcctggaagttgttctttgaatgggttgaagtatttattcaatgaattatgtattgaactataaaagcatagctatgcatctctatttaagcaaaaggaggtaaatgcagggaactctggtttctgagaatgtagtatctgtgccaagaagaggattcagctccgggagtgtacaagagaaccgggtgctgggtcaaaagagtatctaactgtaaactgcaacatgatgaattagctcaatttccaatgaggaaagatgacagcctagacttaatcttgcccttcatagatagttaaaatctacacatgactctatgacttacaatgagttaataaaaacataatgcagtaaatagtagacggagtcagca

SEQ ID NO: 288160 - DNA, 564 bp, Homo sapiens
aaatgcaatttcccctttaccttacttcaagctcatttgtatggagaagggaagagcatctcatctttatgttgtatcaaaatgcttctccatatcatamaaattggctctgaaattttgaaattcatacaactaattcaaccatttgtttctgataaatgcctggacatgacctgatttccagttgctgcactcctggaagttgttctttgaatgggttgaagtatttattcaatgaattatgtattgaactataaaagcatagctatgcatctctatttaagcaaaaggaggtaaatgcagggaactctggtttctgagaatgtagtatctgtgccaagaagaggattcagctccgggagtgtacaagagaaccgggtgctgggtcaaaagagtatctaactgtaaactgcaacatgatgaattagctcaatttccaatgaggaaagatgacagcctagacttaatcttgcccttcatagatagttaaaatctacacatgactctatgacttacaatgagttaataaaaacataatgcagtaaatagtagacggagtcagca

SEQ ID NO: 288161 - DNA, 564 bp, Homo sapiens
aaatgcaatttcccctttaccttacttcaagctcatttgtatggagaagggaagagcatctcatctttatgttgtatcaaaatgcttctccatatcatacaaattggctctgaaattttgaaattcatacaactaattcaaccatttgtttctgataaatgcctggacatgacctgatttccagttgctgyactcctggaagttgttctttgaatgggttgaagtatttattcaatgaattatgtattgaactataaaagcatagctatgcatctctatttaagcaaaaggaggtaaatgcagggaactctggtttctgagaatgtagtatctgtgccaagaagaggattcagctccgggagtgtacaagagaaccgggtgctgggtcaaaagagtatctaactgtaaactgcaacatgatgaattagctcaatttccaatgaggaaagatgacagcctagacttaatcttgcccttcatagatagttaaaatctacacatgactctatgacttacaatgagttaataaaaacataatgcagtaaatagtagacggagtcagca

SEQ ID NO: 288162 - DNA, 564 bp, Homo sapiens
aaatgcaatttcccctttaccttacttcaagctcatttgtatggagaagggaagagcatctcatctttatgttgtatcaaaatgcttctccatatcatacaaattggctctgaaattttgaaattcatacaactaattcaaccatttgtttctgataaatgcctggacatgacctgatttccagttgctgcactcctggaagttgttctttgaatgggttgaagtatttattcaatgaattatgtattgaactataaaagcatagctatgcatctctatttaagcaaaaggaggtaaatgcagggaactctggtttctgagaatgtagtatctgtgccaagaagaggattcagctccgggagtgtacaagagaaccrggtgctgggtcaaaagagtatctaactgtaaactgcaacatgatgaattagctcaatttccaatgaggaaagatgacagcctagacttaatcttgcccttcatagatagttaaaatctacacatgactctatgacttacaatgagttaataaaaacataatgcagtaaatagtagacggagtcagca

SEQ ID NO: 288163 - DNA, 580 bp, Homo sapiens
aaaacatagccataaatctttgtgactgcaaaacaaacaaacaaaaaattaactggacttcatcaaaatgtgaaacttctgtgcttgaacagagaccatcaagaaagtgaaaaggaggctgggcatggtggcttacacctataatcccaacacttgggaggccgaggtgggaggattgcttgagctcaggagttcaaaaccagcctggacaacatagtgagaccttctctctacaatttaaaattatataaattttaaaaacataataaatcataaaaaagaaaataaaaaggaaagccattgaaaatatttggaaacatatctgataagggacttacacctagggtatataaagaactcttaaaattcagaaatttaggacaacccaattttaatgtgggcaaaagatttgaacagatatttctccaragaagatatacaagtggctcataagcacataaaaagaggcttaaagtcattcatcattagggaaatgtgaatcaaaaccacaatgaggtaccacttcatacctctaggttggaatcctttttcaatcaaaaatatgaaaaatgttggcaag

SEQ ID NO: 288164 - DNA, 620 bp, Homo sapiens
tatatacccaagagaaaggaatacatatacaaacacaaaaacttgtaaataaaagttcacagcagcatgattaataatagccaaaacatggaaacaacccaaaggtccatcaactgatgaatggctaaataaattagtggtatgtccatacagtggaaaattactcagcaataagatgaaattaaatactgatacatgttacaacacaatgaaccttaaaaatgttatgctaagtagaagaagccagtcacaaaagaccaccacacattgtgtgatccaattgatacgtggtgtccagaatgggctratctatggaaacaaaatagattgctgattcttttcagggtcatgaaaatgtcctacaattgatgatggtgatggttatgcaactctgtgaatatattaagagaccatgaattgtacacgttcaatgggtaaactgtatggtatgagaattctctctcagtaaacttgtttttaaaaattcagtggtagaatctagatatatctcttaattctctactttggatgtacatactatacatgatttgtaaaaaagcacaatatatttaaaatgaaaggaaaataaaggaagtacctaacatttcaagtagtttgta

SEQ ID NO: 288165 - DNA, 497 bp, Homo sapiens
aaactatgaactagctgtgatgccccaaattataagccacaaagaatagaactaataaaactagaacttaataacagttttggaaaactgcaacatttgaatattagaacctctggaaaaaatacacattgggttttatttgtgattccaaaaccatttccgcaataaagctcaagaacaaattatttcattgcttcactgttyctctgagcatttacaaaacgttttcttgttaaatctttaacaacctagtgaaataaggcagtaaaatccgtgctttttagaagaatacattgagcctaagagaagcaacttgtcagagaataaatagctgctggtaatagagctaggatgctttccattatgccaagctaatgtgagttaatttactgaactatactcccttcaattcatgagtacttcatctttttttcttcttcagaagcttaaagagaagttggtagaactcacaaattgaagtatatgggataattaaa

SEQ ID NO: 288166 - DNA, 557 bp, Homo sapiens
cctatagtaaaagctgtagctttgcatatatctggacagaggaaatgttccaacgttcttgaagttctttttttcctgagaatattctatagctatttatttttctaacatttttctcatcrgttatataagaattacatttattcataaatgctaaatctaagcattatattaggctttttttttttttcgagatagggtctccactccatcactcaggttagagggcagtgacgcaatcaagactcactgtagccttggcctcccgggctcaggtgatcctcccacttcggcctcctgggtagctgaactagaggcacacacccccacacgcagctaaatgtatttgtactttttgtagagatggggtttcgccatgctgcccaggctggtctggaactcctgggctcaagtgatccacccacctcggcctcccaaagtgctgggattacaggcgtgagccgctgcacctggccttgtaccaagcacttgtacatgtatcactgaactcatttatatcacaattctgaaaggagaggtcaaaaaatatgcaagtt

SEQ ID NO: 288167 - DNA, 546 bp, Homo sapiens
ctcaaatcttaattgcatacatgacagctaaatctgtcaaagaggaaaaacagttcttaactacgagaagatacagcattgtgaaataaaatttctttcaaaacatttaactagtgtccttatagtttcaaagctatttagcctgtattttaacataaaaaatgtgtaaatgaacagctatattagtaattaaactcaacttatcctccaytctaaaaacacagactgagcatctattagatgacaaggtttacagtaaataattttatctataaatgtcatagttcattcttaagaggaaataacagttttggtttattttaaacctaaatgatatacatgaaggcaaaaaattataagtaataccgatgaaacataaagttagaaaaatgaagtttacaccaaagattaatttaccagatccaagttatttcttactgtcctcaattccttaacaagtcttctcagattccatttaagttgttgctttgtttcaaccactttcccacactcctcttcttttattcttaactgttcactatcttt

SEQ ID NO: 288168 - DNA, 497 bp, Homo sapiens
aaactatgaactagctgtgatgccccaaattataagccacaaagaatagaactaataaaactagaacttaataacagttttggaaaactgcaacatttgaatattagaacctctggaaaaaatacacattgggttttatttgtgattccaaaaccatttccgcaataaagctcaagaacaaattatttcattgcttcactgtttctctgagcatttacaaaacgttttcttgttaaatctttaacaacctagtgaaataaggcagtaaaatccktgctttttagaagaatacattgagcctaagagaagcaacttgtcagagaataaatagctgctggtaatagagctaggatgctttccattatgccaagctaatgtgagttaatttactgaactatactcccttcaattcatgagtacttcatctttttttcttcttcagaagcttaaagagaagttggtagaactcacaaattgaagtatatgggataattaaa

SEQ ID NO: 288169 - DNA, 555 bp, Homo sapiens
ataaaaaggcaagaacctactccatgcttcctattaaaaaaagcactttaaatgtaaaaacataaattgttcaaaagaatggaaaaagatatatcaggctaagagttgacaaaagaagcctgagaagaaatggctatgttaataccaaagtagatttcacaccaaaaaaaaaaaaaaaaattaccagctataaacagtcatttcctaatgacttttaaaagttcagttaatcggctgggcgcggtggctcatgcctgtaatcctagcactttgggaggccgaggcaggtggatcacgaggtcaggaaatcgagaccatcctggctaacatggtgaaatcccgtctctactaaaaatmcaaaaaaaaaaaaaaaaaattcagttaatcaagaacgtgtaatctcaaatgtttgtgcacctaataacagcttcaaaatatatgaggcaaaaatcaatagacgaaatagacaaattcacaagtacatctgagatttgaatatcacttactcaataagtgataaaacaagggagctgcaaatcagcaagaatggagcac

SEQ ID NO: 288170 - DNA, 1217 bp, Homo sapiens
ctaacactactgttttatcatataaaatgtctgcatttgtgttacttctattcatcaagtgtataggtaatttttttacaggtaatgtaaaatgcagtaattttctacaayggacattaaactataaacagaaacagcaacattaagggataaagaaatttactactactaatataattacaaagaattaaatttaggtcaagatttctcatagtaaaaccaaaagaaaaaaatatgttacctgcattacgtgataaaaataaatataccagggtcttctcattgttgtccttttcaataaaaacaagcttttacgggcactaaaacctatttggaaaatattactcacattcttatataagggaaacccttttttaatgatgatattagtaagctttttctggacttactatgcaggtactgtgcatcattctgagcactgtccatgtgtcaaactcatataatcctcataacaattctgtgaggtcagtaacatattaagaattttataaagaaagaaaataggcacagaagggccaagtgactgtcctcagcccatacagctggtcagtagcagatccagaactcaaacccaagaattctgcctcwctaacactactgttttatcatataaaatgtctgcatttgtgttacttctattcatcaagtgtataggtaatttttttacaggtaatgtaaaatgcagtaattttctacaacggacattaaactataaacagaaacagcaacattaagggataaagaaatttactactactaatwtaattacaaagaattaaatttaggtcaagatttctcatagtaaaaccaaaagaaaaaaatatgttacctgcattacgtgataaaaataaatataccagggtcttctcattgttgtccttttcaataaaaacaagcttttacgggcactaaaacctatttggaaaatattactcacattcttatataagggaaacccttttttaatgatgatattagtaagctttttctggacttactatgcaggtactgtgcatcattctgagcactgtccatgtgtcaaactcatataatcctcataacaattctgtgaggtcagtaacatattaagaattttataaagaaagaaaataggcacagaagggccaagtgactgtcctcagcccatacagctggtcagtagcagatccagaactcaaacccaagaattctgcctc

SEQ ID NO: 288171 - DNA, 608 bp, Homo sapiens
ctaacactactgttttatcatataaaatgtctgcatttgtgttacttctattcatcaagtgtataggtaatttttttacaggtaatgtaaaatgcagtaattttctacaacggacattaaactataaacagaaacagcaacattaagggataaagaaatttactactactaatataattacaaagaattaaatttaggtcaagatttctcatagtaaaaccaaaagaaaaaaayatgttacctgcattacgtgataaaaataaatataccagggtcttctcattgttgtccttttcaataaaaacaagcttttacgggcactaaaacctatttggaaaatattactcacattcttatataagggaaacccttttttaatgatgatattagtaagctttttctggacttactatgcaggtactgtgcatcattctgagcactgtccatgtgtcaaactcatataatcctcataacaattctgtgaggtcagtaacatattaagaattttataaagaaagaaaataggcacagaagggccaagtgactgtcctcagcccatacagctggtcagtagcagatccagaactcaaacccaagaattctgcctc

SEQ ID NO: 288172 - DNA, 608 bp, Homo sapiens
ctaacactactgttttatcatataaaatgtctgcatttgtgttacttctattcatcaagtgtataggtaatttttttacaggtaatgtaaaatgcagtaattttctacaacggacattaaactataaacagaaacagcaacattaagggataaagaaatttactactactaatataattacaaagaattaaatttaggtcaagatttctcatagtaaaaccaaaagaaaaaaatatgttacctgcattacgtgataaaaataaatataccagggtcttctcattgttgtccttttcaataaaaacaagcttttacgggcactaaaacctatttggaaaatattactcacattcttatataagggaaacccttttttaatgatgatattagtaagctttttctggacttactatgcaggtactgtgcatcattctgagcactgtccatgtgtcaaactcatataatcctcataacaattctgtgaggtcagtaacatattaagaattttataaagaaagaaaataggcacagaagggccaagtgactgtcctcagcccatayagctggtcagtagcagatccagaactcaaacccaagaattctgcctc

SEQ ID NO: 288173 - DNA, 497 bp, Homo sapiens
aaactatgaactagctgtgatgccccaaattataagccacaaagaatagaactaataaaactagaacttaataacagttttggaaaactgcaacatttgaatattagaacctctggaaaaaatacacattgggttttatttgtgattccaaaaccatttccgcaataaagctcaagaacaaattatttcattgcttcactgtttctctgagcatttacaaaacgttttcttgttaaatctttaacaacctagtgaaataaggcagtaaaatccgtgctttttagaagaatacattgagcctaagagaagcaacttgtcagagaataaatagctgctggtaatagagctaggatgctttccattatgccaagctaatgtgagttaatttactgarctatactcccttcaattcatgagtacttcatctttttttcttcttcagaagcttaaagagaagttggtagaactcacaaattgaagtatatgggataattaaa

SEQ ID NO: 288174 - DNA, 540 bp, Homo sapiens
taaaaaaaaaacaacagaccaattaacagtctattacatgcrtctagagagcagatggtggtgggttggaaatggaagatatgactggcttctggatatattcttcaggtactcctgacaagatctgctgacagattagatgtgaggtgtcagagagagaggggagtcaatgatgacaccttagtttctagcagagcaactgcaagagttgccattaatgcaagtaggaaagaccatgtgaggggtaggtatgagaaagaatatcggtaccccaatcttggacctggtaagtttgtgatacccaacagttcgtgaccaatcaaacagagatgtcaagtaggcaggttggtatagaagtctggaattaaggagagagatctaggctggagacacgcatttggaaatcattagcacacacaaggtagtaaaagtcatgagaaagaagattgaggactgagtcctgggacatatcagtcctgggacatatcaatgtgtaaaaggtgggatatgagaagaaagcaaaacagactatgacagatg

SEQ ID NO: 288175 - DNA, 567 bp, Homo sapiens
acagggcatattgtgtgttgccttctaggtatgaggaggaaccctgacacatactcagagtgaaatgggaggcaatcagatggatctgagcagaagaatgacatcatctgacttatgttttaagtatggccactgagttaaggattaatgaaaagaggtttctttaaaaaaaaaacaacagaccaattaacagtctattacatgcatctagagagcagatggtggtggsttggaaatggaagatatgactggcttctggatatattcttcaggtactcctgacaagatctgctgacagattagatgtgaggtgtcagagagagaggggagtcaatgatgacaccttagtttctagcagagcaactgcaagagttgccattaatgcaagtaggaaagaccatgtgaggggtaggtatgagaaagaatatcggtaccccaatcttggacctggtaagtttgtgatacccaacagttcgtgaccaatcaaacagagatgtcaagtaggcaggttggtatagaagtctggaattaaggagagagatctaggctggagacacgcatttggaa

SEQ ID NO: 288176 - DNA, 293 bp, Homo sapiens
ccagagcctctgcttcgggagatggtctctcttgggggcgctttcctgcagggaaacagcatcgattgttttctttaaaagatcccctactcckttttggctaacttcctttctgattgctttagtttctttaccgtccctctccccagatggggcatttccctgggcttacctttgtccatgtggtcaaatgaagcctgggcatggtcacttagctctgggtgtaggaagggcaagatttaggctttggggcccacgaccccgcaatctgacttctcccatttctgggcctc

SEQ ID NO: 288177 - DNA, 536 bp, Homo sapiens
ttttcttttttttcttttttttttttttttttggggatgtgtctctggctttggtatccgggtaatattggccttataggatgagttaagaagtattctgtcttctgtatatttttcagagcagttcgaatagaaatggtattagttcttctttaaatgtttggtggaattcaacagtgaaaacattgggtcctgggcttttctttctgggagatatttttattatgactttgatctcattgcttgttactgatctgttcagggtttggatttcttcatggtgtagtcttgataggttgtatgtgtccaggartctgtacttttttttctagatttttgaatttattggcatattgttgcttatagcagccactaatgatcctttgttgtaattgccttcggcatttttgtcataaaatatttgccagttactgtgtccagagtggtattgcctaggttttcttccagaatttttagttttgggttttgcatttaagtctttaatccatcctgagttgagttttatgtatggtgaa

SEQ ID NO: 288178 - DNA, 536 bp, Homo sapiens
ttttcttttttttcttttttttttttttttttggggatgtgtctctggctttggtatccgggtaatattggccttataggatgagttaagaagtattctgtcttctgtatatttttcagagcagttcgaatagaaatggtattagttcttctttaaatgtttggtggaattcaacagtgaaaacattgggtcctgggcttttctttctgggagatatttttattatgactttgatctcattgcttgttactgatctgttcagggtttggatttcttcatggtgtagtcttgataggttgtatgtgtccaggagtctgtacttttttttctagatttttsaatttattggcatattgttgcttatagcagccactaatgatcctttgttgtaattgccttcggcatttttgtcataaaatatttgccagttactgtgtccagagtggtattgcctaggttttcttccagaatttttagttttgggttttgcatttaagtctttaatccatcctgagttgagttttatgtatggtgaa

SEQ ID NO: 288179 - DNA, 1103 bp, Homo sapiens
ttttcttttttttcttttttttttttttttttggggatgtgtctctggctttggtatccgggtaatattggccttataggatgagttaagaagtattctgtcttctgtatatttttcagagcagttcgaatagaaatggtattagttcttctttaaatgtttggtggaattcaacagtgaaaacattgggtcctgggcttttctttctgggagatatttttattatgactttgatctcattgcttgttactgatctgttcagggtttggatttcttcatggtgtagtcttgataggttgtatgtgtccaggagtctgtacttttttttctagatttttgaatttattggcatattgttgcttatagcagccactaatgatcctttgttgtaattgccttcggcatytttgtcataaaatatttgccagttactgtgtccagagtggtattgcctaggttttcttccagaatttttagttttgggttttgcatttaagtctttaatccatcctgagttgagttttatgtatggtgaawtcccacccacacagaaagaagggtaagaaatctaagatttcctgcattaccaaaaaaaaaaaaagaaaaagaaacaggactaatgtgcatctagccagtctctcctttaacatactcctgactatattagactatattacctctagtgtttcgcatccatacatttgcactttatacacattttataaacatatgtgatttatgaaagaatggaactgtatgaatggaattgtctatttattttaaatatcacatgtttattccacctggaaattggttttgtwtatagaagtatgtgcaatgtgaaacaggcatccacttaaatttgtttgaaaaaattatacatgtatagagtaatattttcttttactaaccaaattataaggttttatttatcatttattaacaaatgaaatacaatgctaattatatgtcaggtaatttctttcttaatactttggaaagttaagctaatttttcctcaaacaaccttatgaaatattaatcttattattttcagtgtaaagaccagaaaaattgaaggttctaaaggttaatgaattgcc

SEQ ID NO: 288180 - DNA, 536 bp, Homo sapiens
cactctgtgtaacagtaacatatatcctaccattttaacttatttttctcttttggtccctgctccctcttttttttcttagagactttctgtctttgtttgccttgaagtgctataacaaaatttcattgactggtggcttacaaacaacagaaatgtatttcttaccattccaggtgctgggaagtcaaacattgaagtgccaacagatttggtgtctgtcgagcgctcacttcctagatggcagtccttttgttgtaacttcacatggttggaagaagcaacgttctcactggagcctcttttataaggggactaatcacattcaagaagattccaccctcatgacctactcacctcccaaaggctccacctcccaataccatcactttgtggattaagatttcaatatatgaattttagggaaacacaaacatttagactatagtcatttttgtgaggctgtttttttgtctctcactcttttatctctgggctkttgatgccaagatttttgtctccggtgaagtcaattt

SEQ ID NO: 288181 - DNA, 536 bp, Homo sapiens
cactctgtgtaacagtaacatatatcctaccattttaacttatttttctcttttggtccctgctccctcttttttttcttagagactttctgtctttgtttgccttgaagtgctataacaaaatttcattgactggtggcttacaaacaacagaaatgtatttcttaccattccaggtgctgggaagtcaaacattgaagtgccaacagatttggtgtctgtcgagcgctcacttcctagatggcagtccttttgttgtaacttcacatggttggaagaagcaacgttctcactggagcctcttttataaggggactaatcacattcaagaagattccaccctcatgacctactcacctcccaaaggctccacctcccaataccatcactttgtggattaagatttcaatatatgaattttagggaaacacaaacatttagactatagtcatttttgtgaggctgtttttttgtctctcactcttttatctctgggcttktgatgccaagatttttgtctccggtgaagtcaattt

SEQ ID NO: 288182 - DNA, 580 bp, Homo sapiens
cacatagcaaggatttctcctagaaattctgattaactttgtctgcaaggggcagtctgagcattaggatttttacttctcccagataatgataatatgcagccagtattgagaactgtgtagttttcccgtttccagtctgcttattccaagggactttatatttttttgtggataaaataatcagatctgttgtttcactatgttctctaactggctcttttttgtatacaaagaaagctattgatttctgcatataatgtataagtagatatcttattgaatagttttatctctaagagatttttaatattaataatcttatcctttccagacatatataaacatatctgcattggtttcctattgctgctataataaatcatcataaacttagtattaaagcaacatacattattttgcagttttagaggtcagaagtctaaaatkgatccatgaggctgcatttcttttagtggctctagggaaaattaaggttccttgtcttttccagcttttagaaaccacctacattcttttgcttgcagcttcttcctccatcttcaaagttagcagtata

SEQ ID NO: 288183 - DNA, 580 bp, Homo sapiens
cacatagcaaggatttctcctagaaattctgattaactttgtctgcaaggggcagtctgagcattaggatttttacttctcccagataatgataatatgcagccagtattgagaactgtgtagttttcccgtttccagtctgcttattccaagggactttatatttttttgtggataaaataatcagatctgttgtttcactatgttctctaactggctcttttttgtatacaaagaaagctattgatttctgcatataatgtataagtagatatcttattgaatagttttatctctaagagatttttaatattaataatcttatcctttccagacatatataaacatatctgcattggtttcctattgctgctataataaatcatcataaacttagtattaaagcaacatacattattttgcagttttagaggtcagaagtctaaaattgatccatgargctgcatttcttttagtggctctagggaaaattaaggttccttgtcttttccagcttttagaaaccacctacattcttttgcttgcagcttcttcctccatcttcaaagttagcagtata

SEQ ID NO: 288184 - DNA, 546 bp, Homo sapiens
ccagacaaaaactaacatctacaagcatcaagacaatacaggaaaatggcctcaccaaatgaactaaataaggcaccagagattgatcttggaaaaatgaagatatgttacctttcagagaattcaaaatagctgttttgatgatatttaaagatattcaagataacacagtgaaggaattcagaattctatcaaataaatttaataaagagattgaaagaattaaaaagaatcaagcagaaatcttgagttgaaaaattcaattgacctactgaagaatgcatcagagcctctaaatagyacaattgatcaagcaaaagaaaacattagtaagcttgaagacaggctatttgaaaatacacagtcagaggagacaaaagaaaaaaagaattaaaaataatgaagcacacctacaagatctagaaaataaccttaaaggggaaaatctaagagttattggctttaaagaggaggtggagaaagagataagggtagaaagcttattcaaagagataatatcagagaacttctcaaatgtagagaaag

SEQ ID NO: 288185 - DNA, 545 bp, Homo sapiens
tctggcaaacatgtttttctttgctattttattagatgtgattattagtcagtggtttatccctttggtagattgattttcaaccagtgtttgttcccagtaagcttcatcttcctaatctagggtttgcctttctggccagcagtcaatgagtattagagcaatacagaccttcttgaataccagcatgaacaaaatacactacaacagtaattttgctgagtcccagaaatcatccaattgccattcaaagcccacaagattgtttgctctgaccttttcaataatctttattgtgaatcatccatgtgtatatttgagaattgattctgctacacagtcttccaaggatgatatagcctatggcaatctatccatattctgatctctaagacaaactattttctgtactttgcatgtgaagaatggaacatagttttcattttttgatgcataattgtttcattcaacttcagtttcaactaggtgctacagactgagtacacttaggattcaaarctattttcagggtactattagtcatg

SEQ ID NO: 288186 - DNA, 520 bp, Homo sapiens
gtgtttgctttctcagattgatcatactgcagatgcacagaactttctctsctatcataggtgccacttccattgctacatctgatgaaatatgttaatgttgccttcattgttgatgaaagcaacaaacttatccaccatttagaggtggcataaaaacaaattcaaataaatataaatgtgtagtctgatgtacatgaccctagcctcttaagaaggtgtggctttatgtttttaagaaatggaaagcttttgtttttgcttcttgctttttttttggcaacatctgttggcttatacttggcatcttttgtaatgcacctgtgtaggaaacagcaaattcaatggagaaggaggaaaggtgtacaggaatagaggatatgtgggaaaggcatttaaaatgttatcaagttatgaatgccaacatttcactttttcatgctaaataaagaagtactgctgatgcatgtgtgaacatgtccacatgtattgtctttgatgctcttggtcttataattag

SEQ ID NO: 288187 - DNA, 521 bp, Homo sapiens
atcgcaatttgactgaggatatagtagaagtatttggggagaaaaaaacaaaacaggcttagaacactatatttgtgtaatgcatattgtgatataaatttcagaagcatataggtagagagataaactactcaatatcttttcaggtaataaatttaccttttacaccttayattttggttgctaaccttttgcagcacacactaggacaatttgagaacatcaaccactcctcaatcatagttcaatcagggtttgagtttcaaatcaatatcatattgaaattatgtgaagacaatgaagtggctgaccagcaaattgcgcctcaaaattggactacaaaagctttaaatggcttcattaagaaaagtgggcgcctaaatacccaatatagggctcctttgagatatgggtgattttaggcctggggcagagaaggtacaaagtaagcctagccatttgggggtgcctgaaagtaaggaattgttcaaaaactactgggagtgagtcaagcgggcatg

SEQ ID NO: 288188 - DNA, 521 bp, Homo sapiens
atcgcaatttgactgaggatatagtagaagtatttggggagaaaaaaacaaaacaggcttagaacactatatttgtgtaatgcatattgtgatataaatttcagaagcatataggtagagagataaactactcaatatcttttcaggtaataaatttaccttttacaccttacattttggttgctaaccttttgcagcacacactaggacaatttgagaacatcaaccactcctcaatcatagttcaatcagggtttgagtttcaaatcaatatcatattgaaattatgtgaagacaatgaagtggctgaccagcaaattgcgcctcaaaattggactacaaaagctttaaatggcttcattaagaaaagtgggcscctaaatacccaatatagggctcctttgagatatgggtgattttaggcctggggcagagaaggtacaaagtaagcctagccatttgggggtgcctgaaagtaaggaattgttcaaaaactactgggagtgagtcaagcgggcatg

SEQ ID NO: 288189 - DNA, 538 bp, Homo sapiens
tgctttatagaagaataccagctaacatatgtagaagaaagaatagtgttggaataaaaccattctgataccaactatatgataattaattcaggtaaggatcatcaatggaagtcaaaattacttggtgaaagaggacaaataccttggtgttaggagacaagatacttgcatggtcttaaaatatccccctactgattgcttattaaattacagggaaaagttagttttataatgaaacgatctggcagataccagcttaatcaaatagtcaaacttatcctccatcagcagaacaaattaataaaccctgccatctattgtgattcagaggaaattatacatcatctttgcaatattcttgccaaaaacatttaacctgaatttaattataaaggagcaatgaaaaaaatacagaatatgggacaatstaatagtcaagtagcctagactattaaaaatgtcaataacatgaaggattgttctagattaaagaagattcatctggtttaaagggaaatggagagacacagacaat

SEQ ID NO: 288190 - DNA, 529 bp, Homo sapiens
gtggttatctacaagcgaggatgagaggtctcaccagaaaccaatcctggtaacacattgattttggacttctagccttcagaatggtgagaaaataaaattctgttggtagagacacatagtctgtggtattttgttatggtttccctagcagaccaatacagtagatgttcaaaactgttggtaaaatatgttagytcatttacctcccaccccactaaaaaacttcccctgatcctgtgggtattgttatatgcttctgaaagataagggaaataagattcctggaatactatttatttaagtgggagacctggaccaccttcattagaatattttggggtgcctatgaaaaactagatttccaccaaaaaagtcagattccagagattccccctaaccaagaatctctgttgttggcacctgaaaatacacatttaagtatctcaggtgattcttatccacttcacatttgagaactactccagagagaagtaagttgcttagggtcagagtagcagagctatca

SEQ ID NO: 288191 - DNA, 615 bp, Homo sapiens
acataaggcatgttaatacagtttctcaagggttcatgaatcaattccaaggtcccaggttccttcttctttagcacatatattagtgtccacaggctgctgtaaccagttaccaggaacttggtggcttaaaataacatgcagttactcccttacagttctggaagtcagaaatctggaatcaatttcactgggccaaaatccagatgttggcaggaccacgctccctttaggggctctgagggagaktctctttccttgccttttccagcatctagagctacattctatgaactcatcagctcatgacccattcctccttcaaaaccagcaatgtagcatcttcttccagtgatcacattgcctccttctcttgtagtcaaatctccctccgcccctctgcataaggatacttgttactacatttagggctcacctagatgatccaagataaccctcctatctcaagatcctaacttaatcatgtctataaagtcccattttccatgtaagctaacattcataggttccaggggttaggaactagatacctttgggagcttttattcagcctactgtagcacggaagtatggaattccatgggttggagaaag

SEQ ID NO: 288192 - DNA, 572 bp, Homo sapiens
ggttgctactgcggagcatgatgcataggacacaccacatactcaggcattgggggttttcctgccactctctggaggtctccctcttctgggttgacttgtcctgtcccaccagtaggctgtagccaactattcttttttatgaggtggagctttgctcttgtagcccaggctggagtgcaatggtgcgatcttggttcactgcagcctccgcctcccagttcaagcgatcctcctgcctcagcytcctgagtggctgggattacaggagcccacaaccatgcctggctaatttttttttaattttaatttttagtagagatggagtttccccatgttggtcaggctagactcgaactcctggcctcaggtgatccactcgcctcggcctcccatggtgctgggattacaggcgtgagccactgctcctggcctgtatccaattagtctaatgattggatcgtttcaaaatgcctgaattttcttttccagttggatggatggaagcaaagtggattacgtgtcttgggccacaggtgaacccaattttgcaaatgaagatgaaaactgtg

SEQ ID NO: 288193 - DNA, 532 bp, Homo sapiens
ataaaatcgcctcctccctttacatccacaattccaatcacttagaaataggccaagtccatgtttttgcctcatcaccgcatagctttcatagcacgcttgccttgaaaggccacataagctgtctgactttatgactctataaaaaatggtatttaaaacatacctgaacgaattcagtcatcaagagctttggcctttgtttttggcatagtttatttagcaggtgtgacttggaagttaaattcgtgaaaacatccttacctgataggcggagkgtattcgtacgattcaaggaactgaaaatatattctgtaaagtagtctggggaaggcaagtttccttgtcccagacaaacaccctggagggacaaagtaatgatcatggctgccaactgaggaagcgtactttcattagcaccttcactgctcactattccagattttttctgcagcgttttggtttccatacactgaaatcagatacaaaataaagagaaaattgtaacatctgaagttattttgattctaac

SEQ ID NO: 288194 - DNA, 618 bp, Homo sapiens
ggaactcctgctcttattgtttaacatccttaaaactggtgggttgtttctctccccgytttaagtgcaaacctgcaggagaatgattttcaagctgacattccctaccctgacttcacacaggctctgctgccttgcgtcatcacagggcccctctacttctcatctgcctctggtcccaagctcagtgtgtactcattgcatgtcaaatctggtacactgtccatgttctttgaactcccagaggacacaggacctttttcaaatatgtatatcaattttcctcaattaaattataagcatgtgaaaagctctaattttgctttatatcccattcatattcccattcagacatttgagtgcctacaatgtgccaggcactgtactaagcccatttcatatgaagtgaaggagaaaataaattcatcaaaagagagatccagggaaggttatcgtgtcaaggttgcattctaatggcttaggacaaggagaaaaagtgcccattgaacttatttttttaaagtctgtaattgaagagcttggcaggaacatatttacaaccatggtccagagcagagtggaaggctaagaatcagttaccaaaattttgataaattt

SEQ ID NO: 288195 - DNA, 1299 bp, Homo sapiens
tggtccagcatctcactcaacttctgcccctgtgattttatgtcaatttcaccaaattctttcccacaatcttccaggtcttcttgttcccctcatttttcaggtttcagcctaaattgtcaccctctcacaacaccttcctaaagattcccaacctgcgttccctagtacagaactatctgatagaaatacaaggaacactgcaaatatgagccacatatgtcatttgaagttctttagcagcaagattttaaaaagtaaaaacagctaaaagtaacttttgtaatattttaaccttatgtatccaagattaaattattttaccatgtaatcaaaatttttaaaaattaagatattttatatttttcttcttgaacaaagtctttgaaaactggygtgcattttatgcttaccagcacatctcaatttggatgagccacgaatcaagtgcccaacagttacaagcgggctagtggttactgtgctggacagcacaattctggaatacaccatttaaaaatttttcttcatagcactcgtattgtaaaattgctttgtttacttgtttattctctctcttctctatgagaacctgtggtccactaacagcagatttcgtctgctttttgcgtagttctatccttagcatwtggtccagcatctcactcaacttctgcccctgtgattttatgtcaatttcaccaaattctttcccacaatcttccaggtcttcttgttcccctcatttttcaggtttcagcctaaattgtcaccctctcacaacaccttcctaaagattcccaacctgcgttccctagtacagaactatctgatagaaatacaaggaacactgcaaatatgagccacatatgtcatttgaagttctttagcagcaagattttaaaaagtaaaaacagctaaaagtaacttttgtaatattttaaccttatgtatccaagattaaattattttaccatgtaatcaaaatttttaaaaattaagatattttatatttttcttcttgaacaaagtctttgaaaactggcgtgcattttatgcttaccagcacatctcaatttggatgagccacgaatcaagtgcccaacagttacawgcgggctagtggttactgtgctggacagcacaattctggaatacaccatttaaaaatttttcttcatagcactcgtattgtaaaattgctttgtttacttgtttattctctctcttctctatgagaacctgtggtccactaacagcagatttcgtctgctttttgcgtagttctatccttagcat

SEQ ID NO: 288196 - DNA, 1129 bp, Homo sapiens
tctctggtcccactatcacctacgttaacttgccaaaaaaaatcacacaaatttagaaaatagactttatttcttataaatgggttacagcctgctaggcggccactctgayaggctgggaatcacagccttggccatccagcatttgcaggcacttcacaggaggaggcactggggcaggagacttacgctctgaacatgttggcaaaacatacatattcaataggttacaggaggtgctatgaatattcattaaaggtcatcctgatgcatgtgtattgaacatgcatctaacacacaacccatgttcaccttgaggtggagacttaaagtttaaatgtattacaattaggtcctatatgtcaaaaggtgaaggagacacacagaggtattcagtatgtagcttctgaaaaccggctagaaccagtccatggccagtggtctccaatcaggagaaagttactgaaatcagtctctcgtccaatcaaagctgtagttctggctggtagaatgaggtgtcagtcagtgcctgcaggctggawatctcacctgttgatctcaaagagaagaattgggagacttcatcaaatacagttcatttcaccttgttttgaaatctatgctagatttccatwtactgaattgtaaggttataccagcttcctgggatagggatttgtctgccaggattctcacacaaaacaataaaggtctctgtttaaagtttcagttctcagagtatccctgatgtgttgggtactatattcaaaagcagatgttgtggctactcttaaacatgatttactaaatatgctacttgcattgttactatatacttgctgttgcattgactttgtcaacatccttgagaggattagccaacatctctttgtaaagtttgacaagtggattgaaattattttgggttggagagattttttatgactgtaccttgagtcatgaggtatttgcaatattgctgtccttgtgacagtgattttaacatctacattaacacccacttttcctgtttttgatttaataacatcggcttaaaaatactatctcagttacagcttatgatattccatactagcataaaaattcattagaggtttctcaacagtag

SEQ ID NO: 288197 - DNA, 581 bp, Homo sapiens
tccactaagaaatggataaggcatagctgctgaaagtcttcttcagtaggctgagttgaagatattgagacagttttagttctgggagcacagcatgctgcccatctagctctcccattagctttttctcctccatttatttttatttttatttttgagacagagtctcactctgtcacccmggctggagtgcagtggtgtgatctccactcactgcaacctctgcctcccaggttcaagcaattctcctgcctcagcctcccaagtagctgggattacaggtgcccgccagctccccggccgatttttttgtatttttagtagaaatggggtttcattatgttggccaggctgatctcgaattcctgacctcagttgatccatccgcctcagcctcccaaagtgctgggattacaggcgtgagccaccgtgccctgccctaataatgtttagtgtggcaggtttggaacatcatgtattctttctttttaataaattctacttgtagattcagagatacatgtacacggttgttacatacctaggtaaattgcatgttgctgaggtttgggatataaatg

SEQ ID NO: 288198 - DNA, 581 bp, Homo sapiens
tccactaagaaatggataaggcatagctgctgaaagtcttcttcagtaggctgagttgaagatattgagacagttttagttctgggagcacagcatgctgcccatctagctctcccattagctttttctcctccatttatttttatttttatttttgagacagagtctcactctgtcaccccggctggagtgcagtggtgtgatctccactcactgcaacctctgcctcccaggttcaagcaattctcctgcctcagcctcccaagtagctgggattacaggtgcccgccagctccccggccgatttttttgtatttttagtagaaatggggtttcattatgttggccaggctgatctcgaattcctgacctcagttgatccatccgcctcagcctcccaaagtgctgggattacaggcgtgagccaccgtgccctgccctaataatgtttartgtggcaggtttggaacatcatgtattctttctttttaataaattctacttgtagattcagagatacatgtacacggttgttacatacctaggtaaattgcatgttgctgaggtttgggatataaatg

SEQ ID NO: 288199 - DNA, 461 bp, Homo sapiens
cataatttaaaaaaattatttttattgaatcaggatcaaaataaagtccataaaatgcaaattgttggtttgtccaagtttcttttatacrtgtcacacttcttccatcttttctattttgttgcaagtttttttttgttgaaaaacaaagggggttggttttcatatggagtttgctgattgcagtcctagtcatctatcacgcatttctatgtactgtgtttcttgtgtaggggctgttatatgtagaggcttgacaaggttgcttagctgttttatgttagtaccttccattaggaagcatgtaacacctagtcatctctttttcagaagttaaaagctattgatgatagttgcctagattgattaattatttagggcttataaaatggtgatcttctaacactcatttcttccttactagcgtaataatcctataatagaaaaacttcccctcgtca

SEQ ID NO: 288200 - DNA, 400 bp, Homo sapiens
ttttatctttgactttcagcagtttgactgtaatgtgtctgggtgtgaatctttttgtatttatcttacttgatgtttgatatgcttcttgaacacgtatgttcaggcttttacatcagattttgaaagttttggccattatttcctctagtattttttctaatcctttctctttctcctttctctgactgctaatatatatacattggtatacttgctcttgttacaagtctstgaacacttgttctttttcttttttctttctgttctttagaatgaattatttctgttaatctatactcatgttcagtgatttttttcttctgccctctcaaatatgctgttgagttcctgtagtgaactttttgtttcacttattgtctcgatattcttaaactcc

SEQ ID NO: 288201 - DNA, 598 bp, Homo sapiens
ttgaatgctcacaaggtgcctctatctggaatttaaaaatattttgttgatatgtcatgtcacataatatccctcccaatacattactgattagataatagaggttttttgtttgttggtttgtttgagacagaatcttgctctgccaccaggctggagtgcaatggtgcgatctcggctcactgcaacctccacctcctgggttcaagcgattctcctgcctcagcctcccgagtagctgggattacaggagcatgccatcatgcccggctaatttttgtatttttagtagagacggggtagagtttaccattttagaatttggcgggtctttaggcttctctaactgttctaagacacaccacatcctctggtrcaatgttggagttgttttattttttttgttttgtttttgtttttgagacagagtctcactctgttgcccactctgttgccagtggcgtgatcttggctcactgcaacctccacctcctgggttcaagccattctcctgcctcagcctcccaagtagctgggattacaggcgcacgccactatgcccagctaatttttgtatttttaatagagatggggtttc

SEQ ID NO: 288202 - DNA, 598 bp, Homo sapiens
ttgaatgctcacaaggtgcctctatctggaatttaaaaatattttgttgatatgtcatgtcacataatatccctcccaatacattactgattagataatagaggttttttgtttgttggtttgtttgagacagaatcttgctctgccaccaggctggagtgcaatggtgcgatctcggctcactgcaacctccacctcctgggttcaagcgattctcctgcctcagcctcccgagtagctgggattacaggagcatgccatcatgcccggctaatttttgtatttttagtagagacggggtagagtttaccattttagaatttggcgggtctttaggcttctctaactgttctaagacacaccacatcctctggtacaatgttggagttgttttatttkttttgttttgtttttgtttttgagacagagtctcactctgttgcccactctgttgccagtggcgtgatcttggctcactgcaacctccacctcctgggttcaagccattctcctgcctcagcctcccaagtagctgggattacaggcgcacgccactatgcccagctaatttttgtatttttaatagagatggggtttc

SEQ ID NO: 288203 - DNA, 504 bp, Homo sapiens
cttcttaccacattctagaggacctgtstcacctgctcctggcctgccacatgcctactttctatgctttggccacactggtcctccctcagcatctcaaaccagttgagctcttaccccagggcctttgcccatgctgttttcactcttggaaacccttttcatctctcaggtcatttttcctaaggcggcctcctaccctgttgttcaactcagctgcctgattattttcatcataacactggtcagaattctttaattcatttttttttctgctctgttcctttcccctgcaatataatgtaaattccatgaaggcaagagccaggtctagttaggttaattagtgaaacgtctggagcctttgacagtgcccagtgcatgatggtgcttgatagtatttgtcgactccactgagtcaatgaaagaattggaataaaaaagagggctttagacagaatctaggagagcattaacataaccgtttgagaggcaggaaaaaaa

SEQ ID NO: 288204 - DNA, 504 bp, Homo sapiens
cttcttaccacattctagaggacctgtctcacctgctcctggcctgccacatgcctactttctatgctttggccacactggtcctccctcagcatctcaaaccagttgagctcttaccccagggcctttgcccatgctgttttcactcttggaaacccttttcatctctcaggtcatttttcctaaggcggcctcctaccctgttgttcaactcagctgcctgattattttcatcataacactggtcagaattctttaattcatttttttttctgctctgttcctttcccctgcaatataatgtaaattccatgaaggcaagarccaggtctagttaggttaattagtgaaacgtctggagcctttgacagtgcccagtgcatgatggtgcttgatagtatttgtcgactccactgagtcaatgaaagaattggaataaaaaagagggctttagacagaatctaggagagcattaacataaccgtttgagaggcaggaaaaaaa

SEQ ID NO: 288205 - DNA, 504 bp, Homo sapiens
cttcttaccacattctagaggacctgtctcacctgctcctggcctgccacatgcctactttctatgctttggccacactggtcctccctcagcatctcaaaccagttgagctcttaccccagggcctttgcccatgctgttttcactcttggaaacccttttcatctctcaggtcatttttcctaaggcggcctcctaccctgttgttcaactcagctgcctgattattttcatcataacactggtcagaattctttaattcatttttttttctgctctgttcctttcccctgcaatataatgtaaattccatgaaggcaagagccaggtctagttaggttaattagtgaaaygtctggagcctttgacagtgcccagtgcatgatggtgcttgatagtatttgtcgactccactgagtcaatgaaagaattggaataaaaaagagggctttagacagaatctaggagagcattaacataaccgtttgagaggcaggaaaaaaa

SEQ ID NO: 288206 - DNA, 491 bp, Homo sapiens
ccttatctgtacagaataaatcaggctaggagagaaaactaagagtgcctactgatgggttcaggagtagagatttttaaaaatacatataccaatatgtgaaagaaatggtgctgagaactgtacatggtttatctcatcacatttcaacagtaacttatgatatacatactgtttcatagatttttaaaactgggtctttatactctgcccaagttcatgcagctagtrcatggtagagacaggctttcaacccaagtctgtgtccacgttctggttacgtaaccactactctatgatgccctctgttgactggccagctgggactcaacatcttttttggagtttgaacatagcaagaaagaactggagctaagtggctataatggtgcagcatgggggtgtagctcggtagcctcctgttgaggaagaccctgatagggctttggttttccctttctcaggcctgagggttcagtgctttcattttt

SEQ ID NO: 288207 - DNA, 491 bp, Homo sapiens
ccttatctgtacagaataaatcaggctaggagagaaaactaagagtgcctactgatgggttcaggagtagagatttttaaaaatacatataccaatatgtgaaagaaatggtgctgagaactgtacatggtttatctcatcacatttcaacagtaacttatgatatacatactgtttcatagatttttaaaactgggtctttatactctgcccaagttcatgcagctagtgcatggtagagacaggctttcaacccaagtctgtgtccacgttctggttacgtaaccactactctatgatrccctctgttgactggccagctgggactcaacatcttttttggagtttgaacatagcaagaaagaactggagctaagtggctataatggtgcagcatgggggtgtagctcggtagcctcctgttgaggaagaccctgatagggctttggttttccctttctcaggcctgagggttcagtgctttcattttt

SEQ ID NO: 288208 - DNA, 418 bp, Homo sapiens
taaaattatgctggaaggtgaaggggaagcaaggaccttctttacatggtgaggagagacacgtgcaagcatggaaatgccagatgcttataaaaccatcagatctcatgaraactcactatcatgagaacagcatggggggaaactgcccccagatccaattacctccctccctcgacacatgggaattacaatttgagatgagatttgggtagggacacagagccaaaccatatcaaatgcgaaatattacgtatccctaaagagaagcttaagtttccagaagttctaatataataggatgctgagttttaataatattacattggtgtgattattaattttagtgtcaactgggccacagggtgcccagataattggtgaaatgttatttctgcgtgtgtgtgtaagggtgatt

SEQ ID NO: 288209 - DNA, 569 bp, Homo sapiens
ccataggctctcctgggtctcagctttcacattgtagatcctgggaaatttcagcatctatggtcttaagagccaattccttataataaatctttatttctgtatgtctatttgtgtctatatctatatttacttctcctattcctctggataaccctaactaatacaattggattggccctcccaaagtgcatgctggaacactgcatcacatatctctaggggtgctacatacatcrtggactacgtgaatgacatctagtagagttgtgcggtctattaggctagttacttttactctcatgaatctaggctcttgactagtagttatgggatcccagtgagatccctccttataatatacaatatcctccagttcgaggaagatctgatctgggtttttatagtaggaatgtgggagacaaaggctatttaaacaaaagtgcttagtttagcaagtgaggcacagccattagctggagctacttattcttttcagaagagggggattgtgagtaaaacaagagatgaaggcatagctctcatgtcaccattttctctattcagca

SEQ ID NO: 288210 - DNA, 497 bp, Homo sapiens
ccctaggtctgtcagactcgtactttaaaaaaaaaaaaaaaaaaaaaaaaaaacctggtaatagtctatgtctaatggagttaagtgtccatattaaagttgactaatagtggccattatttccaattcatggatacttactagccacaaaatacagtactagattccaggggacacaaagatgcctgagacccatgccccagtaatggctgagatataggtatgaacatgtaaattacaccatgggacaggtaggattaaaaacaaaatattatggagcacagaattcttacagccygttttaagaactttagaaaccctctggcccagtcgtttttgtggagttctagaaaataaaatacttcccaggacacaataattgttatcaaatttatatattagagttcttttcaagatgtcttttaaaagaagagttttgatgctaaaacaaattaggcaaataaatatcagtgattttggataattatcttttaaaa

SEQ ID NO: 288211 - DNA, 497 bp, Homo sapiens
ccctaggtctgtcagactcgtactttaaaaaaaaaaaaaaaaaaaaaaaaaaacctggtaatagtctatgtctaatggagttaagtgtccatattaaagttgactaatagtggccattatttccaattcatggatacttactagccacaaaatacagtactagattccaggggacacaaagatgcctgagacccatgccccagtaatggctgagatataggtatgaacatgtaaattacaccatgggacaggtaggattaaaaacaaaatattatggagcacagaattcttacagcctgttttaagaactttaraaaccctctggcccagtcgtttttgtggagttctagaaaataaaatacttcccaggacacaataattgttatcaaatttatatattagagttcttttcaagatgtcttttaaaagaagagttttgatgctaaaacaaattaggcaaataaatatcagtgattttggataattatcttttaaaa

SEQ ID NO: 288212 - DNA, 497 bp, Homo sapiens
ccctaggtctgtcagactcgtactttaaaaaaaaaaaaaaaaaaaaaaaaaaacctggtaatagtctatgtctaatggagttaagtgtccatattaaagttgactaatagtggccattatttccaattcatggatacttactagccacaaaatacagtactagattccaggggacacaaagatgcctgagacccatgccccagtaatggctgagatataggtatgaacatgtaaattacaccatgggacaggtaggattaaaaacaaaatattatggagcacagaattcttacagcctgttttaagaactttagaaaccctctggcccagtcgtttttgtggagttctagaaaataaaatacttcccaggacacaataattgttmtcaaatttatatattagagttcttttcaagatgtcttttaaaagaagagttttgatgctaaaacaaattaggcaaataaatatcagtgattttggataattatcttttaaaa

SEQ ID NO: 288213 - DNA, 497 bp, Homo sapiens
ccctaggtctgtcagactcgtactttaaaaaaaaaaaaaaaaaaaaaaaaaaacctggtaatagtctatgtctaatggagttaagtgtccatattaaagttgactaatagtggccattatttccaattcatggatacttactagccacaaaatacagtactagattccaggggacacaaagatgcctgagacccatgccccagtaatggctgagatataggtatgaacatgtaaattacaccatgggacaggtaggattaaaaacaaaatattatggagcacagaattcttacagcctgttttaagaactttagaaaccctctggcccagtcgtttttgtggagttctagaaaataaaatacttcccaggacacaataattgttatcaaatttatatattaragttcttttcaagatgtcttttaaaagaagagttttgatgctaaaacaaattaggcaaataaatatcagtgattttggataattatcttttaaaa

SEQ ID NO: 288214 - DNA, 601 bp, Homo sapiens
ataccaaaatgcacatctattgcataagtcttctatttagctgttaaatctctttacttgtgtactattaatttacgttttggaggtaactttcaaatgtggttagtcctcataagttactgaacttgcttcatgcaatagcatatgctttctttatgttttggatttcatagagctagtggaagctaccacaaactgttttggttgggattgacatatggaagcccttcagaaggttttacytggagtgatggttctcctgtgagtaattttacttactatataactttcttactttatcgtgtatttattttgatgttgtctttttttttaatgcaaacttttaataagacagttcattatgatagccactatcctgccatgcaaaattgatgtgcaggtaaacttcctaaaacttgcgtgttttataccctcttttagatcaatagaaatggaaacatttttgatattcccactaataatgattaggcttcgtcagacttctccatttccaggaatgaagaagtgagagattctggcacgtgctggcaatatttagaagccctagtcgtcacaagaagtgattttgtataatttcagt

SEQ ID NO: 288215 - DNA, 575 bp, Homo sapiens
aacttttctgtcattaactccttagtccttacaatgtcaaaaatcatatttggagttttgtcattagaaaacagaactgaaacattgtttggacattttgtagacaattgtggtcatcctctaattttctgggcacttggataatatgtgtgaaagagagagacagagagagatcttacatrtgtgtgtgtgtgtgtgtgtgtgtgtgtgtgtgtgtgtgtgtgtgtatgtatatatatcctaagactatagctagaagaaactttagattttatagacaactttcacacttaatagaggaagaatcagagtcagacagatgacttactgaagaatattttaccattaggagacagatgtggactaataatccttttgactccagtgggattcagtgcactttcctagacagtacacatactagtaggggctagagactgggacaaatagtcccagttaatagttctttcagaaaacgaggcattatgttgcttgaaggagttggtaagctggcattctttcttatagacaaaagaatagataagatgatttaaatgccatttcaaatctacttt

SEQ ID NO: 288216 - DNA, 575 bp, Homo sapiens
aacttttctgtcattaactccttagtccttacaatgtcaaaaatcatatttggagttttgtcattagaaaacagaactgaaacattgtttggacattttgtagacaattgtggtcatcctctaattttctgggcacttggataatatgtgtgaaagagagagacagagagagatcttacatatgtgtgtgtgtgtgtgtgtgtgtgtgtgtgtgtgtgtgtgtgtgtatgtatatatatcctaagactatagctagaagaaactttagattttatagacaactttcacacttaatagaggaagaatcagagtcagacagatgacttactgaagaatattttaccattaggagacagatgtggactaataatccttttgactccagtgggattcagtgcactttcctakacagtacacatactagtaggggctagagactgggacaaatagtcccagttaatagttctttcagaaaacgaggcattatgttgcttgaaggagttggtaagctggcattctttcttatagacaaaagaatagataagatgatttaaatgccatttcaaatctacttt

SEQ ID NO: 288217 - DNA, 575 bp, Homo sapiens
ggtgtggctccccacattcagcaactggctttgtctcttgtttcctggtgctcccctcccmcagcccaggcaatgccttgttcctgacagagtgttgactgacagactggctggagttgaagctcagccttaatacttcttccatctcttttcttgattaatttgatgtgtttggcatcacctctgctgctggaggggtattttctaggaggcagaagagtgtcggaggccttgctccttttccttcccttcccagatagactagtatttcaacctgacagctcccagctggtcctctggctatggagcattgagtgtttattttcctgatgtttttattccaaagtctttgccagggtcatgttgttgaaatccaccaagtgacagcagcccctgaccctgctactgaatccgaacacattttacaggtacagctgttgtcagaaaattacagaagccaaaggcaaaaaaaagaggccttgagaggtcatcttggatatgcccctgtttccagtctagtttctgctcaggtaaattagaaaagactagtttcaaagtgctacacaagggaaatg

SEQ ID NO: 288218 - DNA, 169 bp, Homo sapiens
acaatctggtaaaatgtgccactggacacagaagccagtaaaatccatgaaggcagaagaattgcctggcccttcaaccccaaataaaataaacatatttyacatcttattaattccaaaactggattcaattttttaaagtgccgcattctggtgagatcagaagaca

SEQ ID NO: 288219 - DNA, 363 bp, Homo sapiens
agaggtaccgttctacagccacactcactactttatccatgtctgtgtgcagtgagcatttttctgttcttctagtttcactggagttttattttatgcacccttcccctgccccatttcttgagaccagctggaccgcatgctggaaaaacaaaacaggagagaggggaaggtccctcagattccaaagcaraacacaaccaaggcttcctaagtaaatgaaaaggacttggagaagacataacacttcagtgtagacacttaagttgaaatttctgccctgtcgttccaatgccatgatggagaaggacccctaaaatcgcctttggcgtgtgcagctcgagcgttacaacgatgcaaagt

SEQ ID NO: 288220 - DNA, 1079 bp, Homo sapiens
aatccgggtcctagctcgccacatgaacgcccagagaacgctggaaaaacctgagcgggtgccggggcagcacccggctcgggtcagccactgccccacaccgggcccaccaagccccgcccctcgcggccaccgggscttccttgctcttcttatcatctccatctttatgatgaggcttgttaacaagaccagagagctggccaagcacctctatctcagccgcgcccgctcagccgagcagcggtcggtggggggactgggaggcgctaattaattgattcctttggactgtaaaatatggcggcgtctacacggaacccatggactcataaacaatatatctgttgggcgtgagtgcactgtctctcaaataatttttccataggcaaatgtcagagggttctggatttttagttgctaaggaaagatccaaatgggaccaattttaggaggcccaaacagagtccgttcagtgwattctttctcattcagttttctcaactccatttgttgaagagataatcctttcaccwttatgtgtcttggcacttttgtcaaagatcatttgacctttaatttatttatttatttttttagcttgactgctctggccaggaattccagggctatgttgaatagaagtggcaagagcaggcatccttgctttgttcctgcttttagagagaaagctttcaatgtttcactactgagtataaggttatctgtgtccagaagttcttaaatatgtattctagagaaaattttgtaaatatatttctagagacatgtacaacaatatttataacagtatcgtttataaaaaacaaagacctaaaaacaactggactaactattgacaggagaatggccaaacaaattgtggtgtgtttatttatttaagtataatacagcagtaaaaatgaaataaagctatatccagcaatagggacgagtatcataacataatgttgagagaaaaaagcaggttgccacataattcatatattatgacagaacttttacacacagtaaaacacatcagaaactaaataatatattgtaaagaatctatatgt

SEQ ID NO: 288221 - DNA, 600 bp, Homo sapiens
attctttctcattcagttttctcaactccatttgttgaagagataatcctttcacctttatgtgtcttggcacttttgtcaaagatcatttgacctttaatttatttatttatttttttagcttgactgctctggccaggaattccagggctatgttgaatagaagtggcaagagcaggcatccttgctttgttcctgcttttagagagaaagctttcaatgtttcactactgagtataargttatctgtgtccagaagttcttaaatatgtattctagagaaaattttgtaaatatatttctagagacatgtacaacaatatttataacagtatcgtttataaaaaacaaagacctaaaaacaactggactaactattgacaggagaatggccaaacaaattgtggtgtgtttatttatttaagtataatacagcagtaaaaatgaaataaagctatatccagcaatagggacgagtatcataacataatgttgagagaaaaaagcaggttgccacataattcatatattatgacagaacttttacacacagtaaaacacatcagaaactaaataatatattgtaaagaatctatatgt

SEQ ID NO: 288222 - DNA, 608 bp, Homo sapiens
cttacatacagtttttattatttttaaaagtccagaaaagaaggctggatgcagtggctcatacctataatcccagcactttgggaggtagaagcagacagattgcttaagctcaggagttcaggaccagcctgggcaacatggcaaaaccttgtctctacaaaaaacacaaaaattagctaggagttgtggagtatgcctgtaatcccagctacttgggaggctgaggtgggaggattgcttgagcccaggaggacgaggctgcagtgagtcatgactgcaccactgcactccagcctgggcaacagagcgakaccctgtctcaaaaaactaaaaaagttcagaaaagaagaaaataaactatattgtttaagaatgcgtattaattgttaggaatgtggtagaacttttttttttttaaagcaaagacatgattcccataaatgtcagggttatggttacctttagtgaaaaggaagagagctgtgatcagtaaggggtgcgtggaaggcacttggagtctggcaacattttatttcttgatcggtaactcagctacagtaattatttcaataatacatttatgttttatgtgcttttatatatgt

SEQ ID NO: 288223 - DNA, 512 bp, Homo sapiens
cttcacaaaaaagatatgcaaatgtttaataaatgcataaaaagttgctcactacctttagtcatcagggaaatgcaaattaaagtcacactragataccactacacaccactagaatggctcaaaataaaaagactgacaataacacatgtcgatgaaaatatggagcaactgaaactctcatacacttctgatgggaatggaaaatggtacaatcactttggaaaatagtttagcagtttcttgttaagttaaacatacacttgttgtaaaaatccagcaattggcttcctaggtttttacccaagataaatgaacacatatgttcccacaaagacttgtacacaggatgttcatagcaactttattcacagtagttaaaaactagagacaacccatatatccatcagctggtgaatgattatacaaagggtggtaggtacatataaaggaatacttttgagcaataaaaataataaattaccaatacatgcaactttagaacactggag

SEQ ID NO: 288224 - DNA, 609 bp, Homo sapiens
cagaaacaaaaacccacctttaccctactgtattcttctccagggaaaaggaggtgttttaaagctggattgtattagctggcctatttccattttaaaacttactgtatcattttaagagtcagaaagtctggctttaaaatctggttctgccacttaagttattttacccactctgagcctcagattcctratcttgtaaaatgagtttaacaaaataatcctgaaaaaatgttctgaggattaaaaacaacaataacaacaacaaaagcaacaaactcatggtatcactacatatcctcttcattctattcttgtcaacaaatcgtcaatttcccaaatcatggttacctctgtaagagtaaaacaaatttgagaactgagagatttaaagataatggtcgtgttcaaaaacaaatcctttttaacctaaaggatccatactgtttaaataaagttattttgttttttagatttttttaaatcatagtttattctcacagaggcagagaaaaatgccaggtccaacagttttcctgagaaatggtcaccagaagacagtcaaatgaggccattggaccccgtctcccattttcttcctgagcattt

SEQ ID NO: 288225 - DNA, 609 bp, Homo sapiens
cagaaacaaaaacccacctttaccctactgtattcttctccagggaaaaggaggtgttttaaagctggattgtattagctggcctatttccattttaaaacttactgtatcattttaagagtcagaaagtctggctttaaaatctggttctgccacttaagttattttacccactctgagcctcagattcctaatcttgtaaaatgagtttaacaaaataatcctgaaaaaatgttctgaggattaaaaacaacaataacaacaacaaaagcaacaaactcatggtatcactacrtatcctcttcattctattcttgtcaacaaatcgtcaatttcccaaatcatggttacctctgtaagagtaaaacaaatttgagaactgagagatttaaagataatggtcgtgttcaaaaacaaatcctttttaacctaaaggatccatactgtttaaataaagttattttgttttttagatttttttaaatcatagtttattctcacagaggcagagaaaaatgccaggtccaacagttttcctgagaaatggtcaccagaagacagtcaaatgaggccattggaccccgtctcccattttcttcctgagcattt

SEQ ID NO: 288226 - DNA, 409 bp, Homo sapiens
gaccccaattcctagagtgtggacctccaagcaggctggcttcacctggacacttatcttctatctgtgcctcacatccctaacgtagggccagtgtccaaaggcgtgaagactcatctggtggtctgggcccactgaagctgaccccctgcctgccatgccctccctgaaatatacaacagaatgtcttcctctggcaacggggcagaatataaactaataaggacccaagcgatctaactgcaggaaggagggatttttytgaatatctgaaattctgcaagcatggcaggccaggctggaatttggagggtcccttctaaatatacaaggatcctaatattgagtgctgtgaagagccatattggggcctgaaacaaaagaaaatcagtaataccgaacccatgtt

SEQ ID NO: 288227 - DNA, 581 bp, Homo sapiens
gctcccagctgggtagattccaaacccttgttttgctccacttaagtttttgggttatctatactatctatataggagaaaactttccatcctgatgtccaactcagatgagtgtttgttgaggaaggaaagacgtaattggtgactgaaaggcctggaggcagtgacaaaaatacattgatggtyacttcggttaataattggggctcagatctggttctgggtactgagaaagtagcatcccagctgggaactggatgaggtaaatgcggcagccggtggcagtgaggaattaaccttaggctcctggtgctctattgccccagagggccccgaataccttcagccagttcaggactggagttggggctgggatggggtcagcacagcctgccaggggcagcctgaagctcagcttttcctggctgcacttttttcttccccccacttaacctatgtagagaggctgagctgctaggacccctttggcccccagtttgccaaaccaatcccacttttactctctgtattcctgggaaccccagtcttctaggcaatgaggagcctatgtagatgctgcc

SEQ ID NO: 288228 - DNA, 581 bp, Homo sapiens
gctcccagctgggtagattccaaacccttgttttgctccacttaagtttttgggttatctatactatctatataggagaaaactttccatcctgatgtccaactcagatgagtgtttgttgaggaaggaaagacgtaattggtgactgaaaggcctggaggcagtgacaaaaatacattgatggttacttcggttaataattggggctcagatctggttctgggtactgagaaagtagcatcccagctgggaactggatgaggtaaatgcggcagccggtggcagtgaggaattaaccttaggctcctggtgctctattgccccagagggccccgaataccttcagccagttcaggactggagttggggctgggatggggtcagcacagcctgccaggggcagcytgaagctcagcttttcctggctgcacttttttcttccccccacttaacctatgtagagaggctgagctgctaggacccctttggcccccagtttgccaaaccaatcccacttttactctctgtattcctgggaaccccagtcttctaggcaatgaggagcctatgtagatgctgcc

SEQ ID NO: 288229 - DNA, 535 bp, Homo sapiens
ggcatcttgccatccgcttgcttcagacagagccaacctccagccattattcacagtctctgatagatgatcatttccctgggatctcaggtacaatagaagacaaagtataaatttttaaaatcaaactcttggccttagtgagtctcactggcagggtttttcctccttaattctgaactaattctctcctgcacctccagccactctgtccatgggagagggacaaaagagctttccttgccctcttyacatagcatatctgcccctccccattactgagtaaccacatacccctacgggattactcaaatcctttcagctttctcttctttcctcctttttggtcatgaattttgtccttggctgtaactcctggtgactgatctcccattaatgatgctgacatacaggacccagataaagtgctatataaatgctaagtaatcacagccaggcttgactttgtgatacaggttatctcaggctgctgtgatatgagatcagccccctgttgacattcaaggtgaagttt

SEQ ID NO: 288230 - DNA, 536 bp, Homo sapiens
tggccatgtttatattgggtaatctttaaatgactttatttgcaagtctgagtaatatactcatagaaacaagaatcacagttaagggaagggaaactaatatttgagcttgagacactttccatatccaagtccaattgaatcctcccaatcacccaataaagagatcttattattcccattttatatgttaaacaaccaaaactcagagaggttaattaatactctcaaaatcactcttctaggggtggtggagcctaagtttgaatgcagctctggctcccaaacctgtccattttctactatgtcatgctcaaaggcatattctgcttttgtccattgtcagcctatgtgcatttaagtttcccacacaaattcaagaagaattttatccatcaattcacatgaccttgagtattaatttagtttaaaaatctttccccttatgatttaaaaaatattcactttaagaaattayctgccatgtgcaggattatcataagattaaaaaaaaaaaaaagaaattagcagccggt

SEQ ID NO: 288231 - DNA, 434 bp, Homo sapiens
tctttggggactctatgagatagttcatctcttagtcatgtctctaatatgtctttctctccaaggccagcctcctagtgtttgtgttamaagtaagactaagtgtgaaggcaaatatgaggataccgggggtacagggtgatctgaattgctggtgaaacctctgtgaggaaacgcagacacacagaggggctgagactcctgctatctttctcataatctgatggtactccccacttcccctatctccctaggccagagctgggaggcccaggcagccaagggcctcacaggactctccatctagtggtcactctccggggctgccagagagggcttcaagagattctttgctgagcttgggggaaaaacccttccccacccacatcttagtctccagacagaggcccagcagaatgggcctttcagccagc

SEQ ID NO: 288232 - DNA, 434 bp, Homo sapiens
tctttggggactctatgagatagttcatctcttagtcatgtctctaatatgtctttctctccaaggccagcctcctagtgtttgtgttaaaagtaagactaagtgtgaaggcaaatatgaggataccgggggtacagggtgatctgaattgctggtgaaacctctgtgaggaaacgcagacacacagaggggctgagactcctgctatctttctcataatctgatggyactccccacttcccctatctccctaggccagagctgggaggcccaggcagccaagggcctcacaggactctccatctagtggtcactctccggggctgccagagagggcttcaagagattctttgctgagcttgggggaaaaacccttccccacccacatcttagtctccagacagaggcccagcagaatgggcctttcagccagc

SEQ ID NO: 288233 - DNA, 546 bp, Homo sapiens
aactgattctgtatagagccagatagtaaatactttcagttttgcaggccataagggctgtctcaactactctgctactgcaaaagcagcctcagatgttactaaatgaacaggcatggctgtgttccaatgaaactttatttatggactctgaaattgaaattttgtatcatttttacatgctacaaaaatgttactcttcttttgattttttttttcaacgatttaaaaatatgaaaacccttcttagctagcaggccatacaaatcaggtagcaggctaattttgtcccacaggctgcagcttgccaacccctggtctagaaggtatgaaaaagaaggggttcctcctctatgatatgtattttttaatttctgcacatgtgtgagatattttaatatcttttaaaatagttatgtctatttccaaaaacargtaataatacagatatactggcataaactgatatatttcctgtagagaaaaaaaccctgtaaggtatttcaacttctatcaggggtattattaaatgccaatgacataaag

SEQ ID NO: 288234 - DNA, 658 bp, Homo sapiens
tcaagaaaatccccataaaatatacaagacttcaacaggaccatgggcatctttcctgacacagaggaagactcgacgtaggaaaagtaatttgccatacacagtgctgggtgttttaactcagtgcttctcaatctttaatgcgtaacagcagcagccagggatctcgttcaagctcaggtttggattgaggaggtctggggcagggccagagactttgcatttctaacaatctcccacgagatgttgatgttgctggtacctgcaccaggtgcgaacgagcacaatactcttcccttgcttcatttaggtctctgctcagatgtcaccttctcagagaatcctttcctgactactttatctaaaatgtgattagtggaataagggcaggaatattgttttgttctttgctgtgtcaccagagcacctggcgcagagcaagccctcaaatatttgttcattagagagctgmcaatttgacaggtgaggaagacggaactcaggaaacctaagtcatttgctcaaggtcacacagcttgctaaagccattgcaaatgccagccctgctctgtctggacttcaaagccccaccacgtcagagagaagcaaagtttgtttacaacgtacttcctccctagaactttagtgccgtcatgcc

SEQ ID NO: 288235 - DNA, 609 bp, Homo sapiens
cactaatataatgtgtagcatccattgaagtgatcttgtttgcttatttatttgtcctcacccaaactcaagttgcacaacagaaaggacattgtcttcttggtctcagttgccctagagcctgtagcaatgcttgcctctagtaggttctctataaatatttcttgaaagaagacgttcttcccattgtcaaaaaagataactgtccaaacttagtgttttacagatgaracactgaactttgatgaagaaaaggtgtttgcctggagtggcacagcaaatgagtggcaaggccaaaccacctacaccccaaattcaaaagaatagggggccacaactcagacacacccagtgtatcagtgtcagctgattgtcctcatgcctagacagtaaagtttggtttggtttctgggccggaattagggtgaggcaaagaaggcctttactttaggagcaaaatgtactgggatgctaagaaactcagtaaccaagataaaccatgtttttattcaatattctaaagaatcaaagttaacagcaaaaaaaactccatgatgaacagaatatcattttaaacaaagacaggattctaccccatgcttatataac

SEQ ID NO: 288236 - DNA, 579 bp, Homo sapiens
aggtacacatcattggtggattgaataaggaaaatgtggtacatatacaccatggaatactccacggccataaaaaagaacgaaatcatgtccttctcagtaatgtagatgtagctggaggccattatcctaagtgaattaacacaggaacagaaaaacaaatattgcatgttctcacttataagtgggagttaaatattgggtactcatggatgtaaatatggcaaaaatggacgctggggactaccggaagggggaggaagggaggaagcatgggctaaaaaactacttattagatactatgctcactacctgggtgacaggatcattcatacttcaaatattagcatcaggcaacatacccatgtagcaaacctgcacatgcaccctctgaatctaaaataaaaattgaaattatttgttaaaaattaccataggatgcagyaatatatgtccttcttatacattagtatatagggtaaatggatatacatacacactgtataacttagtatatagtatacgttatataggatatcagttatatgtattataaaacattatcacataacatataac

SEQ ID NO: 288237 - DNA, 579 bp, Homo sapiens
aggtacacatcattggtggattgaataaggaaaatgtggtacatatacaccatggaatactccacggccataaaaaagaacgaaatcatgtccttctcagtaatgtagatgtagctggaggccattatcctaagtgaattaacacaggaacagaaaaacaaatattgcatgttctcacttataagtgggagttaaatattgggtactcatggatgtaaatatggcaaaaatggacgctggggactaccggaagggggaggaagggaggaagcatgggctaaaaaactacttattagatactatgctcactacctgggtgacaggatcattcatacttcaaatattagcatcaggcaacatacccatgtagcaaacctgcacatgcaccctctgaatctaaaataaaaattgaaattatttgttaaaaattaccataggatgcagtaatatatgtcctycttatacattagtatatagggtaaatggatatacatacacactgtataacttagtatatagtatacgttatataggatatcagttatatgtattataaaacattatcacataacatataac

SEQ ID NO: 288238 - DNA, 545 bp, Homo sapiens
tggctctttcggcaagattgtgacaggagagttcccattgaatcaactcatccctgtgggaaagacagtgagagagaattaataatttagatatgcatggacacttttgcctggcattctactcaaggtgcctagccccagcgtgagtaagacagaaaggacatgactttccaagttctagttgatttcagttttttaatgcctctggtggtgtcggcttcttgccatgctaagtgagatgttagtgtttaaagatacatattttttaatgcactatggccctttagtgcaagccagcaactttctttagttttcaactgaagcagtagcatctgtttcaacaytggagaaaaacctgctgggatagaccaggagaggtggttatcactctgcaagatggcataagtggatcatgaggaatatttacaaaatcatttctgaaatggatcattaaggggaatgttctctctacaccagagtttctgaacctcagcactattgacactttgagtcaggtaattcttattgtgggagcattcttgtgc

SEQ ID NO: 288239 - DNA, 575 bp, Homo sapiens
attcattctggctcaagagcttggcctggccttccagagctttcccattgacacccatgtgcctgattagagtacacttgtaaaaattaaataagatgacctatgcagtgtgccycacatatgctccataaatgtcagttcacatttcttgttaaacttttataaggttgatcttaagagacgacaattgagtctgtctaagtgaaccatctggggggtgagcatgttgatgtatcttccacagctttagttttccaggaagcacatgggatatagtcaaatcaagagacaggatggtactgatagtttctttagtctcttgcttgcttgcagttaagctagttagcctgaatgcactccttctctcatagcagtctccagagtgactctgttagctcacctggctagcatgctgtggcctccttgaggcgtctaaagttggctgtcactgcctgagatactggtgcctcaagcttagaaaactcactttaccaaagtcagccttcacgaacatgttattcctggtatgaaagtccctagtctttaaataacaattgcctctgttacctttagac

SEQ ID NO: 288240 - DNA, 575 bp, Homo sapiens
attcattctggctcaagagcttggcctggccttccagagctttcccattgacacccatgtgcctgattagagtacacttgtaaaaattaaataagatgacctatgcagtgtgccccacatatgctccataaatgtcagttcacatttcttgttaaacttttataaggttgatcttaagagacgacaattgagtctgtctaagtgaaccatctggggggtgagcatgttgatgtatcttccacagctttagttttccaggaagcacatgggatatagtcaaatcaagagacaggatggtactgatagtttctttagtctcttgcttgcttgcagttaagctagttagcctgaatgcactccttctctcatagcagtctccagagtgactctgttagctcacctgrctagcatgctgtggcctccttgaggcgtctaaagttggctgtcactgcctgagatactggtgcctcaagcttagaaaactcactttaccaaagtcagccttcacgaacatgttattcctggtatgaaagtccctagtctttaaataacaattgcctctgttacctttagac

SEQ ID NO: 288241 - DNA, 595 bp, Homo sapiens
acaattgcctctgttacctttagactatattttggctcattaaatttttttttagtatgcatcatcttccaagagtgcattgagaaatttctagatttaagacctcctttcttcccagaccctattgctcaactcgtaataaacaaaagattttacttaaataatttcagagaaaactacctttatttctttgacttatatagaatcttagatatcggaatactcttgggaagtacctggtatatccaatraagaaaattgatttatagggagagtaagtgacttttcctaaggaaacatatttggtggcatagctgagaccagaatctgggtctaatgtggtatttttcaaactaagtgtataagtcttctaaaaatttaagaaattattttaaaatattaatattttaaaaattattttactagttataaatataaaacttctattttataatgggcagttcagaactgataaatgttttaattgcataagattttggttacctacatttctctcaaactaagccctaacccatagagactggcaggtggtggtgagagggttgagcagatgagggcaccgtgtgagaccttt

SEQ ID NO: 288242 - DNA, 561 bp, Homo sapiens
ctggttccagcgtttctttttatgagtgaatcctcccctcccagataaccttgcctggcaaagatgctattttgtgagaggaagcagcaggagctgttaagctgagatgatgattcattatctgttaatggtttccccctgtggtttttctctgtccttcaaccccctaccccttttagtggagttttctttgtgctagaaaattcatctctgtaaaatctccagaattcttaagtcttctggacttttcttgacccatggaacatggaaacttctacactaatccgcaaccagtgacagttaagctatgcctgatttgtggctgtttgtgatggttaattttatgtgtcatcttggctgggccttgaggtgcccggatatttggtcctatattattctgggtgctcctggatgagaygaacatgtaaatcagtggacttgagtgaagcagatcgccctccaccatgtaggtaggcctcatccaatcagttgaaggcctgattagaacaaaaagactgaccctctcctcggtaagagagaattccgcagctgtgactgcct

SEQ ID NO: 288243 - DNA, 559 bp, Homo sapiens
cactaacaaaatgtctccattttttgctccctgaattggaggaatctagagtatatgaaaaaaaaaaaaagaattacaataggcacagcagtccgagaatggaaaagcctagctcttgaggaagagaattttccatctctgcaagtgttcaagtaatcacctattgtgacattgaggagggaatgcaggagctgtagggaagtgggttcctcaacctggctgagcatcaaaagaatcacagctttcacaacccacagccccaggccccttctatttctgtcatgttgtggagcactgaccttttacaaaagctctccaggggattcagagctttgggaaccaatgatgccaagagctgggcaacgtgatctctactgctgcttccaagcctgacagcattatcctccacgarcctctcctttgtaaaagcataacatcataggagtatttagccaaagcacattctgttaaaagggaagtgtgcttaaaggatctctcaaataagtaaagagaaatagaaggaacaaagtcactgtgaagttacatcctgcttcttttt

SEQ ID NO: 288244 - DNA, 583 bp, Homo sapiens
gccaggtggaaaaacaaaaatagagaagaggttctcagaccagtcacaaaaattattctagaatccaggtaattgtggttgagagctgtatctggaaaacggtgagtraattacacttttgtaaatgcagccatatgtggaaagctgtgaggcagctccttatgaaaaaggctaagttagaggaaactttctataaaccgagtggatatcaagatttttatctttaaggttttcccctgaattgcaaaagtaatatgtctattttagaaaatatgggacacacacttagaaaaacagaaaaaaaaacttaaagtacacataattccatcactgcaagaaaacaattttaaatattttggggtatagccttccagatgaacacatatatacacacatatatacctataaatatgtacatgtaataaacctttttcaaaaaattgggatccaactatacctatttctttgcaacctgctttttccccccacttcatctgtcatgattattttctcacaccacaaatacttttccacagcagtttccaaaggctgcataaaattctatcccattaaaccccattgt

SEQ ID NO: 288245 - DNA, 583 bp, Homo sapiens
gccaggtggaaaaacaaaaatagagaagaggttctcagaccagtcacaaaaattattctagaatccaggtaattgtggttgagagctgtatctggaaaacggtgagtaaattacacttttgtaaatgcagccatatgtggaaagctgtgaggcagctccttatgaaaaaggctaagttagaggaaactttctataaaccgagtggatatcaagatttttatctttaaggttttcccctgaattgcaaaagtaatatgtctattttagaaaatatgggacacacacttagaaaaacagaaaaaaaaacttaaagtacacataattccatcactgcaagaaaacaattttaaatattttggggtatagccttccagatgaacacatatatacacacatatatacmtataaatatgtacatgtaataaacctttttcaaaaaattgggatccaactatacctatttctttgcaacctgctttttccccccacttcatctgtcatgattattttctcacaccacaaatacttttccacagcagtttccaaaggctgcataaaattctatcccattaaaccccattgt

SEQ ID NO: 288246 - DNA, 534 bp, Homo sapiens
taggccaccattctctggctcactgtggttcctgggcaagggatgtagctgtgtcacctgctggcccatgyagcattgaatctgtaacctagaccctaatgtataaactgatttttataaataaaaatacatacatgcatacacacggagaataaatgtatgtgtgtgtatgtgtgtgtgtgtatgtattccttaagtcccatgtctctttgcttcattatttcaacatcttttctttttaaaaaaattcactttgattccagattcatgactttggtgtctgattcaacaaaactggtctaaaagccctattgcaccatacaccctagaaatgtggatgaaactacaattcccctagtttaacctctcattttactcatgaggcaatacggctaatacgtggctaaaaattttagccttgaaaggggcctcagaaattagctagtctttgtaaaaccctcgttgttgctagaaacctcagagatttaggaaacctttttgttatttgatttgatttttacaaaaacaaaaaac

SEQ ID NO: 288247 - DNA, 1139 bp, Homo sapiens
tggctgactgtatttttccacgtgactcatgtatcaactggaatacaccagcaacacatctcagaaatgtccaccttttgccatctagactgctcttcccaggatgtgtttttcagctggaagaacataaaaatcctagtcgagcctactgtgggttttagagcatatggccactgtctctctaatttaccaggactagcatggtctcttattacatcagtcaccctgattcttccttgctcctcctgtccatgctatttgtgttgccctcccactctgactccgagctcacccatggccatgggactgctttggtcaataggatatcagcaaacctgaggcaaacagaggcttgaggaagtgcagacatacttctgctctcgctcttccactcccccatcatcacaagaaagatgtgcctagtgagctgaccattccagggaaagaatgagaggcacacrcagtagagcagagtagaccggccagactgagccgtagtcagccaacccccaggtgtgtgagggcatgcagcctagataggctgaactctgtagatgcatggaaaataawtggctgactgtatttttccacgtgactcatgtatcaactggaatacaccagcaacacatctcagaaatgtccaccttttgccatctagactgctcttcccaggatgtgtttttcagctggaagaacataaaaatcctagtcgagcctactgtgggttttagagcatatggccactgtctctctaatttaccaggactagcatggtctcttattacatcagtcaccctgattcttccttgctcctcctgtccatgctatttgtgttgccctcccactctgactccgagctcacccatggccatgggactgctttggtcaataggatatcagcaaacctgaggcaaacagaggcttgaggaagtgcagacatacttctgctctcgctcttccactcccccatcatcacaagaaagatgtgcctagtgagctgaccattccagggaaagaatgagaggcacacgcagtagagcagagtagaccggccagactgagccgtagtcagccaacccccaggwgtgtgagggcatgcagcctagataggctgaactctgtagatgcatggaaaataa

SEQ ID NO: 288248 - DNA, 589 bp, Homo sapiens
cctcttctcttcactgcatagtgaacattttcttgccaatcctcctcctaatcagtgttcaaagaggggagaaggcaaaaccaggacatcaccagaaccctccgcgaacaccttcctcatcaagagaaaactactatgtgccatttggaaaggggccaggcctggcatctccatcttttcctcccagactgtattgcttagaacatttcttcccaagcccagtcactcatggccccctccttgcctctggccrtgtctaaggacctttcctattgcagagaggagcttctgtgttgtgcttctgttaggagctctggctcggagctcagactgcataggtttctagcccaaatctactcctgagcccctgtgtgtttttgggcaagttgtttcacctctccaggcctcagtgtcactttccttatctacaaagcagggattggaatagtaccttccttagggggttgctaggaggactgagtgagtcaatacacgaaccgtgttgagagcagtgtgtgacacgtaataagcattcagcaagcattggctatcaaaattagtgattgttgacttagcattttctttaaaa

SEQ ID NO: 288249 - DNA, 589 bp, Homo sapiens
cctcttctcttcactgcatagtgaacattttcttgccaatcctcctcctaatcagtgttcaaagaggggagaaggcaaaaccaggacatcaccagaaccctccgcgaacaccttcctcatcaagagaaaactactatgtgccatttggaaaggggccaggcctggcatctccatcttttcctcccagactgtattgcttagaacatttcttcccaagcccagtcactcatggccccctccttgcctctggccatgtctaaggacctttcctattgcagagaggagcttctgtgttgtgcttctgttaggakctctggctcggagctcagactgcataggtttctagcccaaatctactcctgagcccctgtgtgtttttgggcaagttgtttcacctctccaggcctcagtgtcactttccttatctacaaagcagggattggaatagtaccttccttagggggttgctaggaggactgagtgagtcaatacacgaaccgtgttgagagcagtgtgtgacacgtaataagcattcagcaagcattggctatcaaaattagtgattgttgacttagcattttctttaaaa

SEQ ID NO: 288250 - DNA, 553 bp, Homo sapiens
tcagtttacaatggggttatgtctcaataaacacatcgcaagttggaaatatcattaagtcaagaatgcatttaatatatctaactttctgaacatcacagcctaggctagcctaccttaaatgtattcagaacacttgcattagcctatagcagggcaaaatcatctaacacaaagcctattttataataaagtgttgaatattttgtgtaattgattgaatactgtacttagtgaaaaacagaacggctgtatcggtacctgaagtagggtttctaccgagcgtgttytgcttttgaaccatggtgaagttgaaaaatcaagtggaaccgtcgtaagtcagggaccatctgcacagcacagtgtttctcaagctgtactgtgcccatcaccacctgagacactgttcagctgtagactctgactcactagggtctgggacccagaacctgcatttccaacgggcccccaggtgacactgatgcactgcgtagaccacaccttaaccacccagattttagagggtgaaaaacttattattgtagaccctgtg

SEQ ID NO: 288251 - DNA, 585 bp, Homo sapiens
gctctcacactttaatcacgtgtaaacactgcaccctaggtttatttcctaaatggtcttcctgacactacaaaatggcttaagtgggaaagcacattcgtttgctccttcagcaccactaccacagtaataaagacaagaacgaaagaaagaaataaaaattcatctcccaacccatctgtagaaccttaccggcgacttcttgatgtcagagacagcataattcccttgtgatatccatctggcagattcagttaaagacaagccggttccataaaggttgatgctaaaacgaccctggaaaacacgaccaacaaaagagattttcagtccatgtgatgtccycaaaaaagcaaaggcaaaggtgatacaataaaaggtactttggaaaagagaaggatgttgattaattgtgatagctactaattattgatagtatttagttttgtttgttcagggccagccattcttcatgcatcatgttagtcatcctcgaaagagctctacgaaggaggttttctttacagatagggaaactgaggcttagcggaagtgattaacttctccaggatacggtaggagtcc

SEQ ID NO: 288252 - DNA, 596 bp, Homo sapiens
gctacctaacctccctgagtccccatacttaaaaagtggaagataaaagacacgcctcaggaaactgttttgagtatgaaatgaagtgattcctgaaagaaatcaagcacacagcaggccctcaataatgtctgctcctcctttactgtatctcccagaaagggagggcttagctgctgagacgacttgcttagcacagctgcccctgccaggtagtgactttatgmcaccccaccattcatttcatccttccagtcatgtacactcactcactggtttctttcaaatcagtagtcacaaaatctgatgtctgcagtggccgatgagtaatgtaaatgagcaaggcaggccaggtgtaagacaatagggaatggtggaaactgtaaaaaagttgaacacgtctcatcttaaaggaaaagaagaaatattaggctacttttgccagatagtgtcatctttccagagaaagcccaaatctgaatttttacacaatatcttaaatgttggccactaatttaaaatttaaagcctgtgcaatgctaacaaaatacacctataggccagatctaatctcaggagtttccagagtgtgatct

SEQ ID NO: 288253 - DNA, 596 bp, Homo sapiens
gctacctaacctccctgagtccccatacttaaaaagtggaagataaaagacacgcctcaggaaactgttttgagtatgaaatgaagtgattcctgaaagaaatcaagcacacagcaggccctcaataatgtctgctcctcctttactgtatctcccagaaagggagggcttagctgctgagacgacttgcttagcacagctgcccctgccaggtagtgactttatgccaccccaccattcatttcatccttccagtcatgtacactcactcactggtttctttcaaatcagtagtcacaaaatctgatgtctgcagtggccgatgagtaatgtaaatgagcaaggcaggccaggtgtaagacaatagggaatggtggaaactgtraaaaagttgaacacgtctcatcttaaaggaaaagaagaaatattaggctacttttgccagatagtgtcatctttccagagaaagcccaaatctgaatttttacacaatatcttaaatgttggccactaatttaaaatttaaagcctgtgcaatgctaacaaaatacacctataggccagatctaatctcaggagtttccagagtgtgatct

SEQ ID NO: 288254 - DNA, 429 bp, Homo sapiens
tatgtcaggtttggttttcagggggctgataggaaagaaaaagaaatgcttcatggaaattgcaggtaagacaggccaattggttgaaaccttgacaaatcagaccatttgatcaaattgttcccaaaatatgaaaactctgtctcaaccgaaataatcacttagctctgggactctaaagcaayctgtttgtctgttgggaagctagggtaaatgtgagaagtgaaatccatgccattttttggaactggagactttttaataatttcattaacattgtcagtttggttgtcctctgtgatcagaagctgtcgaatgatgttcatttgagtacagaagccagccctttctgtagcattaaccaggcctcagtccagtggatctctacagggtgccacgagcccagcacaagtgctccaacacattctg

SEQ ID NO: 288255 - DNA, 538 bp, Homo sapiens
gttatttttgttaatttgcaatgaaggtgccacacagcctagtggcaaccctgtagtcagaacacacagtaggttgatagtaatggagctacattttaacatgtacatttcttgtctcctgtaaagacaatgaagataagagaagagacccattatgcagactgactagctctcctgcactgtttctttctatagttagaaagtgaagctgggtgcagtggttggcagttgtaatcccagctagtcaggaggctgaggcaggagcatcacttgcacccaggagtacgagtccagcccaggcaatatggtgagtctccatctctaaaaaaaatgttttttaaagcgagatgttcttgcatcactggtattagtacagagctgaggcaggcttgaggaaaacygtcccttactttgtacactgagcaattggacaaatttcaagtcttggagtgaagccattagtacttttcataattaaattcataataaaataccttctgggaattcaatatctttttaaattaactattcttattaa

SEQ ID NO: 288256 - DNA, 574 bp, Homo sapiens
gtaaatgtttatctgttaatgctgacgtgaaatgagatattatgtatttcaatctttctaaatgcctttctacatgcattgatattgccaaacactgatatctgtccataaccatataatgttaattaagcatattcatggcttggcaggcaagtaaagaattctatcagagttttctcttgatagttgccttttagcatgtcactacattgcatattaatcacttgcaattgaaaatgagattgaagctcctcaattgctagttaaatggattttgacataaaaagatttcctttgcatttatatcaaagtctgaaaaacagtgctggaactgcagtttaagctcagaaaatatatccactttaaatttgtgtgtaatagagaagacatttcctgttttaacttttgacagcatgggaagtgtataaaacaatctaacgttacttgtgatccaaacagtattatcartgaaattactttatcactgtataagttttgcctataagaacagttttgccttgtaattttaggtacaatccattgagaaacatgatcaactctgaagcaaaagcta

SEQ ID NO: 288257 - DNA, 571 bp, Homo sapiens
tccagttggttatagatgtatagctttatttctgggttccttattctgttccattaatttttgtgtctattttagtaccagtaccatgctgttttggttacctttagtttgctgccttggagtagagtttgaagtccggtaatatgatacctctggcttcgttctttttgcttaggattgctttcgcttttaggctctgctttggttccatatcaattttagaatagttcttcttctaacactgtaaagaataacattggtaatttgatgggaattttgttgaatctgtgtatttctttgggcagtatggacattttaatgctattgattcttccaatagatgagcatggaacgtttttctatttgtgtcatctatgatttccttaagcaatgtttataattctccttgtagagctcttttacctgcttgrttagatgtattcctaggtattttattctttttgtggtgactgtaaattggattgcattcttgatttggttctcagcttgaatgttatttgtgtatagaaatgcttctgatttttgtacatttattttgcaccctgaaaat

SEQ ID NO: 288258 - DNA, 536 bp, Homo sapiens
ctggcctccttgctgctcctttaaaatgccaactgtggggctggcaagatggctcatgcctataattccagcagtttgggaggccaaggcaagtaaatcacttgaggtcagtagtttgagaccaccctggccaatacggcaaaactctgtctctactaaaaacacaaagattagctgggtatggtggctggcacctgtgatcccagcttcctgggaggctgaggcaggaggatcrcttgagcccaggaggtggagattgtggtgagccaagatcacacaactgcactccagcctgggcaacacagcaagactctgtattaaaaaaaaagaaaagccaagcatactccttccacagggcctttgcatctcctgttccctccacctagaacactattaccccagacaccagcataggcccatcactttcatcattcaggatctaaccccatggccacctttgagtaccctatataacagtgcctttcctgtcactctctgatccctctgctttagttttcttcttttcatattgcatg

SEQ ID NO: 288259 - DNA, 536 bp, Homo sapiens
ctggcctccttgctgctcctttaaaatgccaactgtggggctggcaagatggctcatgcctataattccagcagtttgggaggccaaggcaagtaaatcacttgaggtcagtagtttgagaccaccctggccaatacggcaaaactctgtctctactaaaaacacaaagattagctgggtatggtggctggcacctgtgatcccagcttcctgggaggctgaggcaggaggatcacttgagcccaggaggtggagattgtggtgagccaagatcacacaactgcactccagcctgggcaacacagcaagactctgtattaaaaaaaaagaaaagccaagcatactccttccayagggcctttgcatctcctgttccctccacctagaacactattaccccagacaccagcataggcccatcactttcatcattcaggatctaaccccatggccacctttgagtaccctatataacagtgcctttcctgtcactctctgatccctctgctttagttttcttcttttcatattgcatg

SEQ ID NO: 288260 - DNA, 531 bp, Homo sapiens
agcatggatgtacaagattttttatgcatggctttacctacccggcatagccaatattcytaaacaggaatctcacaccagagaagcaaaaggcttggtgaatgaggagtgaggacctgtgacttgctcctcatcaacaaaacacagcaatgatgacggaaggccattcctgggtaggttatataagacttcatcttagttaactgtaaagggcttatccagctgagtctgaagaagtaagctgccatgctatgagagggcctgtgagagggacgcaaggcaggaactctaggcagcctctaggagctgagagcagccccagctgacagctagcaagaaaatggggacctcagccctacaaccacaaggaattgaatttggccaacaatcacgtaagctgggaagaggacctcttcctgtagaaagctctagaaatgaacacggccagttgaccctttgactgcagccttgtggctgacgtcagagaagatgacttaaataagtcacacctggactcttggcccactgcaa

SEQ ID NO: 288261 - DNA, 531 bp, Homo sapiens
agcatggatgtacaagattttttatgcatggctttacctacccggcatagccaatattcctaaacaggaatctcacaccagagaagcaaaaggyttggtgaatgaggagtgaggacctgtgacttgctcctcatcaacaaaacacagcaatgatgacggaaggccattcctgggtaggttatataagacttcatcttagttaactgtaaagggcttatccagctgagtctgaagaagtaagctgccatgctatgagagggcctgtgagagggacgcaaggcaggaactctaggcagcctctaggagctgagagcagccccagctgacagctagcaagaaaatggggacctcagccctacaaccacaaggaattgaatttggccaacaatcacgtaagctgggaagaggacctcttcctgtagaaagctctagaaatgaacacggccagttgaccctttgactgcagccttgtggctgacgtcagagaagatgacttaaataagtcacacctggactcttggcccactgcaa

SEQ ID NO: 288262 - DNA, 581 bp, Homo sapiens
ctggctgggtgccaggactcaaaccggctgccaaagcttatttaacttcatctagatgtcaaggcagctgccacttaattccagtcaggctcctaaattcctccatgctttttacctcttcctttttttggagcttaacggtaccacccaccctacctcacccccacaaaaatagcccccagcctggttatacaaccccaagggaagccactcacactgtaggctgcacaggctataaatgttgtgcacattgtggtagagaatacacatttgacatcaagcagactcaaactggaaaactgtttccaaaaatatataaacattacaacctggagcaagttgaatgaccccaagctttaatttcaccttcagtaaaacaaaaaactgatgcctcattaggcaagtctgaggcctycatgagttaattatggagaatgacagatatgtaatagccaaccaataacttagttttttcatcccatcgctgagtagctagttttgatctgagtgtctacatgcacattgtctatcactatgaaatataaccttttgttttcaagcatactgacaactttcaccag

SEQ ID NO: 288263 - DNA, 1218 bp, Homo sapiens
ctgtgctgtccaatatattagtctccagtcatatatgactagtggcttctgtattggaccatgtagatatagaacatgtccctcaacagaaaatgttctattagacaacactctatctagactaaggatagtatgaataaaattacggaaaggtgaaggaggaagtagtttactaggaatatatgaccaagataggtgaccaaaatatagactgtgatcaaattacaaaaagctttagaagcattgatccattaattgtagcatttaaaaaatagacattgttcaatgggaacttactattttaagggctcaccctaaaagtatatgtaaaagttggagtacctcgtttgcaatcctgtatggcctccatacctggccttatactaggtttctttgtacctttagttgaagacattgtctcttatttggtcttctgaccactcttttcctttacctggcctcttcttcagccattactccatcactcgttccattgcctcctctcttagatctaggcttgaatctttaatcctgattcygcagagtttagatttcctacctagcgttttgaatttcctactctttcttatcaactttctcccacttagtcccaattgcatataaatccccacttgtatgwtgatagtgtgatccgtgctattgaacttcccaagggacaacctgaaagaaaaaatgaaatatttatgtgaaattatagctagctcatccttggagtgctagagagactatattgtcagggaatgttgatctcagcatttcccatgwaaccagcacagttctggcaactcacttagtaatatccagaaagtcttacagttttaaaaccaaataataaatataccaaaattcaataaatatggctgtaatcagttaacttttgctgtgtaacaaactaccttaaaacttagcaacttaaaataacagtcatttaccaggctttcttcatgggccgctattctgggctaggctcagctgggcagttctcatcttgctggtctttgctagtgttacgggctgaattacatctcttccttttcaaaaatatgtatatgctggagtcttaatccccagtacctcagattgatacagtatttgagataggatctctacagaagaaattaagtgaaaataaagtcattacggtgaacactaatccaatatgactgatgttcttctaaaaagaggaaacttgagcac

SEQ ID NO: 288264 - DNA, 578 bp, Homo sapiens
tgatagtgtgatccgtgctattgaacttcccaagggacaacctgaaagaaaaaatgaaatatttatgtgaaattatagctagctcatccttggagtgctagagagactatattgtcagggaatgttgatctcagcatttcccatgaaaccagcacagttctggcaactcacttagtaatatccagaaagtcttacagttttaaaaccaaataataaatataccaaaattcaataaatatggctgtaatcagttaacttttgctgtgtaacaaactaccttaaaacttagcaacttaaaataacagtcatttaccrggctttcttcatgggccgctattctgggctaggctcagctgggcagttctcatcttgctggtctttgctagtgttacgggctgaattacatctcttccttttcaaaaatatgtatatgctggagtcttaatccccagtacctcagattgatacagtatttgagataggatctctacagaagaaattaagtgaaaataaagtcattacggtgaacactaatccaatatgactgatgttcttctaaaaagaggaaacttgagcac

SEQ ID NO: 288265 - DNA, 539 bp, Homo sapiens
gctgaataaatgcatgcatggattatagaattaaaatagcattttgtattacattgtgaaatkctgggagaccttgcctttttcaatttctactccacagtgttgaataaaagtctgctggttgaatgaataatttggttagtgaatgaatacttaaatgaaggattacagcaggctagaagccctgcatgtggcagttttccttttgtcttttacaagggttgggagcaagagataaaaactcatacaagggcccaaaagtttgtctcatctcttttaactgaagactgaatggagctaatctaattataagatcaaaagaaatgaaaatattaaaatctaggaagaatttcattgtatcatttatttattcattcattcacttgctcacttacacttacaaattgacaaagcatctgacagctgagtaatgactccactttttttatttttttaattattggaagtctgatctcggggaagccaattgggccattggttgaatctcagagacagccagcatagtaattgccttcggg

SEQ ID NO: 288266 - DNA, 560 bp, Homo sapiens
atctttccataaatttttaygtttctcaataaagcttttatacacttttgttagagttagctctagatacatatttccgtgctttttgtaaatggcatttttatgcctatgtatcaactatgtttctggtatttaaaaatacactaagttattgtattattaatcttacatccacaactatactaaactctctatttgaatcttttttttaacttttattttaggtccatgtatacatgtgcaggtttgttatataagtaaattgtgagtcacaggggtttggtgtacagattatctcatcatccaggtaataagcatagtacctgataggtagttttttgatcctctccctcctgctatcctccaccctcaagtaggtcctggtgcctattattcccttctttgtgtccatatatactcaatatttagctcccacttataagtgagaacatgcagtatttggttttctgttcctgtgttagttctcttagaataatgccctccagctccaaccatgttgctgcgaagtacatgatttcattactttttatgtttgtgta

SEQ ID NO: 288267 - DNA, 1121 bp, Homo sapiens
atctttccataaatttttacgtttctcaataaagcttttatacacttttgttagagttagctctagatacatatttccgtgctttttgtaaatggcatttttatgcctatgtatcaactatgtttctggtatttaaaaatacactaagttattgtattattaatcttacayccacaactatactaaactctctatttgaatcttttttttaacttttattttaggtccatgtatacatgtgcaggtttgttatataagtaaattgtgagtcacaggggtttggtgtacagattatctcatcatccaggtaataagcatagtacctgataggtagttttttgatcctctccctcctgctatcctccaccctcaagtaggtcctggtgcctattattcccttctttgtgtccatatatactcaatatttagctcccacttataagtgagaacatgcagtatttggttttctgttcctgtgttagttctcttagaataatgccctccagctccaaccatgttgctgcgaagtacatgatttcattactttttatgtttgtgtawatctttccataaatttttacgtttctcaataaagcttttatacacttttgttagagttagctctagatacatatttccgtgctttttgtaaatggcatttttatgcctatgtatcaactatgtttctggtatttaaaaatacactaagttattgtattattaatcttacatccacaactatactaaactctctatttgawtcttttttttaacttttattttaggtccatgtatacatgtgcaggtttgttatataagtaaattgtgagtcacaggggtttggtgtacagattatctcatcatccaggtaataagcatagtacctgataggtagttttttgatcctctccctcctgctatcctccaccctcaagtaggtcctggtgcctattattcccttctttgtgtccatatatactcaatatttagctcccacttataagtgagaacatgcagtatttggttttctgttcctgtgttagttctcttagaataatgccctccagctccaaccatgttgctgcgaagtacatgatttcattactttttatgtttgtgta

SEQ ID NO: 288268 - DNA, 560 bp, Homo sapiens
atctttccataaatttttacgtttctcaataaagcttttatacacttttgttagagttagctctagatacatatttccgtgctttttgtaaatggcatttttatgcctatgtatcaactatgtttctggtatttaaaaatacactaagttattgtattattaatcttacatccacaactatactaaactctctatttgaatcttttttttaacttttattttaggtccatgtatacatgtgcaggtttgttatataagtaaattgtgagtcacaggggtttggtgtacagattatctcatcatccaggtaataagcatagtacctgataggtagttttttgatcctctccctcctgctatcctccaccctcaagtaggtcctggtgcctattattcccttctttgtgtccatatatactcaatrtttagctcccacttataagtgagaacatgcagtatttggttttctgttcctgtgttagttctcttagaataatgccctccagctccaaccatgttgctgcgaagtacatgatttcattactttttatgtttgtgta

SEQ ID NO: 288269 - DNA, 575 bp, Homo sapiens
tcaccacagggagagagggatggtctgtaaggcacaacatttttaggtaagcttagtattagcctctgtctaaaattatttgaaatgcttagcaatatttatttttaaaatatatttgtctttatatcygtatattatacatataatagccctgagaaattggtagggcagatattattatccctaatttactaagatagaatctgaagtcacgttccgtccccttgaagcctagctgcattttgagcactgtccttttgaccttgtattccaagtgcattccagcaggtgtgggcttaaacacccgagggatggtctgtgcactttgcaagctgagaggaaataatattgctctaccacttcagaaaactgctgagtgccctgatctcctgagaaattctcccaagtgtttagcagaaatgccccacccgtgagtgcagaatggagccatgtgcccccgactcacactgtggccctgcttgctcttgcaccacccatccatctgggtggtcttcaggggaagccctcagaggaagactgattgaaaccagagttgctgtgccacccacaccaat

SEQ ID NO: 288270 - DNA, 575 bp, Homo sapiens
tcaccacagggagagagggatggtctgtaaggcacaacatttttaggtaagcttagtattagcctctgtctaaaattatttgaaatgcttagcaatatttatttttaaaatatatttgtctttatatccgtatattatacatataatagccctgagaaattggtagggcagatattattatccctaatttactaagatagaatctgaagtcacsttccgtccccttgaagcctagctgcattttgagcactgtccttttgaccttgtattccaagtgcattccagcaggtgtgggcttaaacacccgagggatggtctgtgcactttgcaagctgagaggaaataatattgctctaccacttcagaaaactgctgagtgccctgatctcctgagaaattctcccaagtgtttagcagaaatgccccacccgtgagtgcagaatggagccatgtgcccccgactcacactgtggccctgcttgctcttgcaccacccatccatctgggtggtcttcaggggaagccctcagaggaagactgattgaaaccagagttgctgtgccacccacaccaat

SEQ ID NO: 288271 - DNA, 575 bp, Homo sapiens
tcaccacagggagagagggatggtctgtaaggcacaacatttttaggtaagcttagtattagcctctgtctaaaattatttgaaatgcttagcaatatttatttttaaaatatatttgtctttatatccgtatattatacatataatagccctgagaaattggtagggcagatattattatccctaatttactaagatagaatctgaagtcacgttccgtccccttgaagcctagctgcattttgagcactgtccttttgaccttgtattccaagtgcattccagcaggtgtgggcttaaacacccgagggatggtctgtgcactttgcaagctgagaggaaataatattgctctaccacttcagaaaactgytgagtgccctgatctcctgagaaattctcccaagtgtttagcagaaatgccccacccgtgagtgcagaatggagccatgtgcccccgactcacactgtggccctgcttgctcttgcaccacccatccatctgggtggtcttcaggggaagccctcagaggaagactgattgaaaccagagttgctgtgccacccacaccaat

SEQ ID NO: 288272 - DNA, 551 bp, Homo sapiens
acgtgcgcctgtttgagctctgggagggaaggcgaagtggagagagcctgcagtgaaaacagactggaaggatggaggaaagggaggggaaggaaaaaatgaacacctccctgaactttcctctcccctcgtcccacacacttgaaatagaaataataacatgaacaaaaatgcttacaaccacgatgttatcgccctacttaagttgcctcactmtggagggtatggggtataaagtgcagactgcggctgtgtcgggagtaaaggttcgggctagtgtgggtgcgggcgcgggtgaccccacctttagggaagccggcgcccaactatccaggcagtagccccggctgaccccctccctcctccttccctcctctcttccctccctccctgcgtgtctcctctgcaccggcccccgccgcggagccaggcggcagcaccgacgccgccgcagctcctgcccgcatcgcgctaacccgcgcccccggctcacacgtagccggagcgactgagccggcagccccgggcccacgctgcgcaccgtgtgcacg

SEQ ID NO: 288273 - DNA, 551 bp, Homo sapiens
acgtgcgcctgtttgagctctgggagggaaggcgaagtggagagagcctgcagtgaaaacagactggaaggatggaggaaagggaggggaaggaaaaaatgaacacctccctgaactttcctctcccctcgtcccacacacttgaaatagaaataataacatgaacaaaaatgcttacaaccacgatgttatcgccctacttaagttgcctcactctggagggtatggggtataaagtgcagactgcggctgtgtcgggagtaaaggttcgggctagtgtgsgtgcgggcgcgggtgaccccacctttagggaagccggcgcccaactatccaggcagtagccccggctgaccccctccctcctccttccctcctctcttccctccctccctgcgtgtctcctctgcaccggcccccgccgcggagccaggcggcagcaccgacgccgccgcagctcctgcccgcatcgcgctaacccgcgcccccggctcacacgtagccggagcgactgagccggcagccccgggcccacgctgcgcaccgtgtgcacg

SEQ ID NO: 288274 - DNA, 516 bp, Homo sapiens
aaagatggcagtagttatccaagcactgatttaacaagccaaaacctgaaggtttgaaccgccacatttgaatatttaatacatcagagaggatgtcttttttttattattatactttaagttctagggtacatgtgcacaacgtgcaggtktgttacgtatctatacatgtgccatgttggtgtgctgcacccattaactcatcatttacattaggcatatctcctaatgctatccctccccgctccccccaccccacaacaggccgtcttatgaaggttatcaatggctctaaaggccagctttaaaaattcacagaactgaaaaagtacatgtcagattactgcaaaaggataaagcatggtttgaggttctgtggaaaccagtgaaatcaatgtccattacccaaaaagtaaaatataatatgagggttaagaatttgaggatattcaaaggaaaattatatttaaaataaatatatattaattaaacctgaaatagaatactttttcacag

SEQ ID NO: 288275 - DNA, 602 bp, Homo sapiens
atttccagcatgagacaaatcactttgagattgattattataactacatctactaaaacacagataaaaagcaaagcactataaagaaaaatttgaaagtctggaaagggacctttgtggcctcctgagagaagcttttgcaagtaccacattgttctctaaatttctatatttttctgggcaaagaaataattatgtacctgtgtttcttaatgtcatttattccattcttcagatttcccagcctttctgttggattttgcctaaaacaataatttgtaaaaggcaatttataataattatatttataataattataattcagaaaattttaaattaaaacttaacatctatttgttaattaattmattcattcattcattaaaaaacatgcatgaagttgctactgtagaccagacatctgagtttagggaggtgaaaagacacgacctcctccctggaggagccacagttaaattagacttcggagtgtatatatatatatgtgtgtataaggtatgaataaatactttaaagaacaagcaggcactatcttgccaactgtgctgagaaaaccggggcaagctttagagaatcattta

SEQ ID NO: 288276 - DNA, 602 bp, Homo sapiens
atttccagcatgagacaaatcactttgagattgattattataactacatctactaaaacacagataaaaagcaaagcactataaagaaaaatttgaaagtctggaaagggacctttgtggcctcctgagagaagcttttgcaagtaccacattgttctctaaatttctatatttttctgggcaaagaaataattatgtacctgtgtttcttaatgtcatttattccattcttcagatttcccagcctttctgttggattttgcctaaaacaataatttgtaaaaggcaatttataataattatatttataataattataattcagaaaattttaaattaaaacttaacatctatttgttaattaattaattcattcattcattaaaaaacatgcatgaagttgctactgtagaccagacatctgagtttagggaggtgaaaagacacgacctcctccctggaggagccacagttaaattagacttyggagtgtatatatatatatgtgtgtataaggtatgaataaatactttaaagaacaagcaggcactatcttgccaactgtgctgagaaaaccggggcaagctttagagaatcattta

SEQ ID NO: 288277 - DNA, 599 bp, Homo sapiens
cagtgtaccaactttttactaaactatatttcacttgtaaagaaaatgaggcaggaaaccaaaaacattgttatgatatattcaacttatttatatattaacactattggttttttttttttttttaattttcatttccctcctatgctctggagttcagggcatttaaagttaacctttctcatgccctacccagaaaatcatttacaggtcaaacaaaacaattgttacaaaaacagtttcttggcctagtgtgatggctcacacttgtaatctcagcacttttggaagctgagatgagtggactgcttgagcccaggagcttgagcccagcctgggtaacacagtaagatmccatttctgcaaaaaaattttaaaaattagctgggcatggtggcatgtgcctgtagtcccatctactctggaggctgaagcaagaggattgcttgggcccagaaggtggaggctgcagtgaccagtgatcacaccacttcattgcagcctgggtgacagagtgacaccgtgtctcaacaaacaaaacaaaacaatttctcaacttctttatgacctactccttctaatatgttattccagctggt

SEQ ID NO: 288278 - DNA, 558 bp, Homo sapiens
aagaaaaaaaaagccactaaaaaagtaaataaagtttctgcacagaaaagaaaacaaaagagtaaagagataatctgcagaatgggagaaaatatttgcaaattatttatccagtaagagattaatatccagaatatataaagagctcaacagcaaaaacccaaataatctgatcaaaaatgggcaaataaactgaatagacatctctcaaaagaagacatataaaaggccarcaggtatattaaaaaatgctcaacattactaaccatcaggaaaatgcaaacaaattataatgtgatattatttcatgccagttagaacggctgttatcaaaaagacaaaataaggatgcaaggatgcagagaaggagaattcttatacactgttggtaagaatataaattagtacagccattatgaaaaagagtatagaggttccccaaaaaactaaaaatagaactattatatgatccaacaatcacactaccgggtatacatattcaaaagaaaggaaaacagaatgtcaaagaaatgtctgtactcccacatttataacagc

SEQ ID NO: 288279 - DNA, 558 bp, Homo sapiens
aagaaaaaaaaagccactaaaaaagtaaataaagtttctgcacagaaaagaaaacaaaagagtaaagagataatctgcagaatgggagaaaatatttgcaaattatttatccagtaagagattaatatccagaatatataaagagctcaacagcaaaaacccaaataatctgatcaaaaatgggcaaataaactgaatagacatctctcaaaagaagacatataaaaggccagcaggtatattaaaaaatgctcaacattactaaccatcaggaaaatgcaaacaaattataatgtgatattatttcatgccagttagaacggctgttatcaaaaagacaaaataaggatgcaaggatgcagagaaggagaattcttatacrctgttggtaagaatataaattagtacagccattatgaaaaagagtatagaggttccccaaaaaactaaaaatagaactattatatgatccaacaatcacactaccgggtatacatattcaaaagaaaggaaaacagaatgtcaaagaaatgtctgtactcccacatttataacagc

SEQ ID NO: 288280 - DNA, 558 bp, Homo sapiens
aagaaaaaaaaagccactaaaaaagtaaataaagtttctgcacagaaaagaaaacaaaagagtaaagagataatctgcagaatgggagaaaatatttgcaaattatttatccagtaagagattaatatccagaatatataaagagctcaacagcaaaaacccaaataatctgatcaaaaatgggcaaataaactgaatagacatctctcaaaagaagacatataaaaggccagcaggtatattaaaaaatgctcaacattactaaccatcaggaaaatgcaaacaaattataatgtgatattatttcatgccagttagaacggctgttatcaaaaagacaaaataaggatgcaaggatgcagagaaggagaattcttatacactgttggtaagaatataaattagtacagccattatgaaaaagagtatagaggttcccyaaaaaactaaaaatagaactattatatgatccaacaatcacactaccgggtatacatattcaaaagaaaggaaaacagaatgtcaaagaaatgtctgtactcccacatttataacagc

SEQ ID NO: 288281 - DNA, 565 bp, Homo sapiens
gcctggtaaaatgtcctgtaagtagtaccaaccaatcttccccagtaaaaggagaccacaaacaatgttaacaactatgctcggcagagccttgatctgtagatgcagacgaggaaaaaaaaaacaaagatcgaatatagcccctggaagcaaattttccgtctttcccggttaagatgtccattccattcttgtccccttttattagtggtgctatccattattaagatggggtcaaaggcagatcaataggaggtagagttctcagacattctttctttttcacatcatatccaatcagctgtcagcttgtctactatgtgatcggtcttatatccattccaactttagaatctctactgtctattttctagtttaacaaagtatattgaaaatattgggtactttgttgacactcagtcaaggacacaaattctaacaatgctatttactaattgcragacctctagcaagtctcttaacctcactgagtcttatttgtctcatctgttaaaaggggaatctaatgcctaatgcatagcactgctgtaaagattaaatgaga

SEQ ID NO: 288282 - DNA, 505 bp, Homo sapiens
gcggcgcagggccacccggatggcccatgcgctcccaggacgagcccggagcaggagcttcccgcggctgccgccccgccgccgccacgtgtgcccaggtccgcttccaccggcgcccaaactttccagtcagcggacgcgcgagcctgcgaggctgagcggccaggagtggggtcttgcaaactcagtagcccgcgggcgcaggcggcctctgcagctctgcgggacttgagagaggcgcaargcgcgcaggcctcgccccctcccgggagctccgggcccggcaacgcgctgcactgtaagatcccttttctgcgaggcccggagggggatgcgaacgtgagtgtgggcaagggcaccctggagcggaacaatacccctgttgtgggctgggtgaacatgagccagagcaccgtggtgctggccacggatggaatcacgtccgtgctcccgggcagcgtggccaccgttgccacccaggtaagcaggttgcattacggcccgc

SEQ ID NO: 288283 - DNA, 505 bp, Homo sapiens
gcggcgcagggccacccggatggcccatgcgctcccaggacgagcccggagcaggagcttcccgcggctgccgccccgccgccgccacgtgtgcccaggtccgcttccaccggcgcccaaactttccagtcagcggacgcgcgagcctgcgaggctgagcggccaggagtggggtcttgcaaactcagtagcccgcgggcgcaggcggcctctgcagctctgcgggacttgagagaggcgcaaggcgcgcaggcctcgccccctcccgggagctccgggcccggcaacgcgctgcactgtaagatcccttytctgcgaggcccggagggggatgcgaacgtgagtgtgggcaagggcaccctggagcggaacaatacccctgttgtgggctgggtgaacatgagccagagcaccgtggtgctggccacggatggaatcacgtccgtgctcccgggcagcgtggccaccgttgccacccaggtaagcaggttgcattacggcccgc

SEQ ID NO: 288284 - DNA, 505 bp, Homo sapiens
gcggcgcagggccacccggatggcccatgcgctcccaggacgagcccggagcaggagcttcccgcggctgccgccccgccgccgccacgtgtgcccaggtccgcttccaccggcgcccaaactttccagtcagcggacgcgcgagcctgcgaggctgagcggccaggagtggggtcttgcaaactcagtagcccgcgggcgcaggcggcctctgcagctctgcgggacttgagagaggcgcaaggcgcgcaggcctcgccccctcccgggagctccgggcccggcaacgcgctgcactgtaagatcccttttctgcgaggcccggagggggatgcgaacgtgagtgtgggcaagggcaccctggagcggaacaatacccctgttgtgggctgggtgaacatgagccagagcaccgtggtgctggscacggatggaatcacgtccgtgctcccgggcagcgtggccaccgttgccacccaggtaagcaggttgcattacggcccgc

SEQ ID NO: 288285 - DNA, 543 bp, Homo sapiens
tggaaactgtgtgttggcctgagtgcctggaaagctttgtgcagtgtctaggtgtcctgaacattttcagagtttatttggggtggtctccccccatttttcctgcttactagtgaggcattccaggaccaggcactgccccaagaaagcatcttcgtgtgagcttgaagaaatgagcytcaaagattcatagactgctggagctggcaagggcttcaggggacagtcattctaagcctcttttacagatgagacacggaggttcagagagagcaagtggcttgcctggggttatccagctggttagtagcaaaatttagaccagaactcaaggtcgtagatggcttgtctcttcccatatcaaccttttttgtttgtttgttttccgtcttgtttcaccttcaaatatccctcctgcccatctcccttgcattagtcttgaaggatgccttcttaaattagttgaccaggcaggttctggtttggtcaagaaagtaaggcaggggctctggctggcttcggcattgcagctctctttctggt

SEQ ID NO: 288286 - DNA, 543 bp, Homo sapiens
tggaaactgtgtgttggcctgagtgcctggaaagctttgtgcagtgtctaggtgtcctgaacattttcagagtttatttggggtggtctccccccatttttcctgcttactagtgaggcattccaggaccaggcactgccccaagaaagcatcttcgtgtgagcttgaagaaatgagcttcaaagattcatagactgctggagctggcaagggcttcaggggacagtcattctaagcctcttttacagatgagacacggaggttcagagagagcaagtggcttgcctggggttatccagctggttagtagcaaaatttagaccagaactcaaggtcgtagatggcttgtctcttcccatatcaaccttttttgtttgtttgttttccgtcttgtttcaccttcaaatmtccctcctgcccatctcccttgcattagtcttgaaggatgccttcttaaattagttgaccaggcaggttctggtttggtcaagaaagtaaggcaggggctctggctggcttcggcattgcagctctctttctggt

SEQ ID NO: 288287 - DNA, 435 bp, Homo sapiens
ctgatcatctctgtcctaatagccatatactacaatgtgattatttgctatacacttttctacctgtttgcctcctttgtgtctgtactaccctggggctcctgcaacaacccttggaatacrccagaatgcaaagataaaaccaaacttttattaggtaagtttggaaatacctgctttaggtgtgtgtattctaaactatccatttattcagcaaaataattgaacatatattatgcatgctaggacctatactaggttctgggaacacagagattacatcaaactatcaaatatacttaattctaacataaaacttaaggagctcctggcccagaggaaagcttaatcaaatttttgtttgcttatgaatagctgaaatctttgttaaaaatgcaggttcacaggcccacaagatagtctgatttatagatt

SEQ ID NO: 288288 - DNA, 548 bp, Homo sapiens
tgaacccaggtctatctggctttgaagcctagacttttttatttttatttatatttattttttatttttttattgagatggagtctcgctttgtcacccaggctggagtgcagtggtgccatcttggctcactgcaacctccacctcctgggttcaagtgattgtyctgcctcagactcctgagtagctgggattacaggagcccaccaccacgcccagctaattttttttgtatttttagtagagacaggatttcaccgtgttggccaggctagtcttgacctcttgatctcaggtgatccccctaccttagcctcccaaggtgctaggattacaggtgtgagttatcgtgcccagctggcctagactttttctaatacaagacattctctcccaagaaggagttattaagaatagatagtaaatgaggaattgtggagtcatcattttcatatagtgggggaaaaaatccccccacagtaaatcagaatctgcatttctacccagtctctgctgtcttgctgtgtgactttgggcaagtcacagga

SEQ ID NO: 288289 - DNA, 531 bp, Homo sapiens
atgaccttgggcaaattacttaccttttctgaacttcatctgtgagtaaggaaaatgcgcttacctcatagcaatattttgtgaccattaagtgagataaatcatgtaaagaccttagagtagagcytagcacaaagtaagtgttgaataaatataagcatgaattatctaatgattaacctgaactccataaagtttgtagaactatctgactggtaatctttattatgtccactattggtgaacatgtcatatgagatagttttatatcattttcttaatatagaggaataggtcagatataaaagctaaagccaaatatacacattaacatatatacctacacaaaaattgttatattttgttgaatggattgcaccttgggccacattatttcttctattatttaactccttaattatgtgttaaactgtgagtctcaccttttttgcaaagatgtagagaaggtatcagtaatggaatctttatattctgaaaataaatataacaggtggttatgttttacttgtg

SEQ ID NO: 288290 - DNA, 531 bp, Homo sapiens
atgaccttgggcaaattacttaccttttctgaacttcatctgtgagtaaggaaaatgcgcttacctcatagcaatattttgtgaccattaagtgagataaatcatgtaaagaccttagagtagagcctagcacaaagtaagtgttgaataaatataagcatraattatctaatgattaacctgaactccataaagtttgtagaactatctgactggtaatctttattatgtccactattggtgaacatgtcatatgagatagttttatatcattttcttaatatagaggaataggtcagatataaaagctaaagccaaatatacacattaacatatatacctacacaaaaattgttatattttgttgaatggattgcaccttgggccacattatttcttctattatttaactccttaattatgtgttaaactgtgagtctcaccttttttgcaaagatgtagagaaggtatcagtaatggaatctttatattctgaaaataaatataacaggtggttatgttttacttgtg

SEQ ID NO: 288291 - DNA, 610 bp, Homo sapiens
tctggcagcacagtgataatgtcatcattacaatttcttctgtctttttttcttctgattacaatgttcctctcccctgctccccgaattccattgttccttgtgcacctggctaatacagggcatacatgccctgtattaggtaggtgtacaaaggggactactagggtgctgagatgttttgtttcttcatctgggtgtgggtttcacagctgtattcagtttgaagatttaccaattatagaaattatctactagtctacttagctcttctttaaaggtaattccagcaccatagttccaccaactttgagatttttctttggtttctgtagttttactaggatatgtctaggtgtgggtttctcttccctcatttaaactgaggtataattcacataccraaaaatttacccatttaaattgtacaattcaacattctttagtatactcagagttgtgtaaccatcattacaatctaattttaaaaacatttcatttcccccaaaagaaatcttccatccattctcttcttgcccagtctgtgtctacaaatatacctattctggatatttcatctaaatggaatcatataagagatggtcttttg

SEQ ID NO: 288292 - DNA, 631 bp, Homo sapiens
cactacaaatactgcaatcccaaggcactactgttaacactatgatgaatatctttgcaggcatttctgtatgcatgtgcagacacatgtgtgtgcatatattaggttayattcagctctaagtgacagaaaaccaaaacaacaatgatgtcaccatgatagaagctcattcctctttcacatggaagtctgggtgggaggctcaggcctggcaaggcactccataatgtcagtctcctagactccttctgtcttgttgctaaattgtaggtagcctccacctcatggtccacaggacagaatttgccgtctaggaaagagaaaggaacaaaacaagagaaaggggtgggggtggggcaacaggaatacgtgttgctcttgaggaagcttccacatatttctgcttacatcccattggcctgaaccaagttacatggtcatacccagatgcacaggacttgggaaatgtagccatgtgcccagttaaaaatcctattagtgtgaaagaagagaggagtagatatccaggggtgtctggcagtctctgtcacaatcacagtgtctatgcaatattacataataggatcacagagacagtataatagtgataaagattagaagtctggagata

SEQ ID NO: 288293 - DNA, 592 bp, Homo sapiens
tgctgctgctttaatactttyagaggccctcaaaatcacaaactttatcagtcctccaggcccaagttgactctttagctgcagttgtcctccaaaaccgccgaggccttgacttacttactgctgaaaaaggaggactctgcatattcttaaatgaggagtgttgtttttacctaaatcagtctggcctggtgtatgacaacataaaaaaactcaaggatagagcccaaaaacttgccaaccaagcaagtaattacgctgaaccaccttgggcactctctaattggatgtcctgggtcctcccaattcttagtcctttaatacccatttttctcctctttttattctgaccttgtatcttccatttagcttctcaattcattcaaaaccgtctccaggccatcaccaatcattctatacgacaaatgtttcttctaacatccccacaatatcaccccttaccacaagacctcccttcagcttaatctttcccactttaggttcccacgccgcccctaatcccacttgaagcagccctgagaaacatcgcccattctctctccatatcaccccccaaaaattttcgccaccc

SEQ ID NO: 288294 - DNA, 606 bp, Homo sapiens
gggtgcctaaaggtagaaatatccctgatgatagccagagacaaaaagggactaccatccccaccccaagaaactacactctgtaacttggctaaaggagatgccaaatcagagtggctattcagcagtatcatgctataggaggtttcttctacaggtcccctggacaggaaaccctaatcagccttctgactctaccaggatatctcctttgcaacctcctcctttagatatgggcaatacactgaccatttactagaactgggataaactgggcttaaggtaccatctagtgctataaagraggcagcacctactggggaaaaaatattaaaaaagaaaatcagcatgtaaatttcaaagaatctctcagcaaatgtatctaatgaaaaccaaaacaaaccagacagagaagactggaaaaaataaataatccttcaatacaaagacatagacatacatccacaagaagcaacagaaaatggggaaacatgtcctcctcaagtggacaaagcagggaaccagtcactgaccctaaaatagatgttgacatgtgaactctttgaccaataatttaaaatagcacttttaaggaaattcagtgat

SEQ ID NO: 288295 - DNA, 606 bp, Homo sapiens
gggtgcctaaaggtagaaatatccctgatgatagccagagacaaaaagggactaccatccccaccccaagaaactacactctgtaacttggctaaaggagatgccaaatcagagtggctattcagcagtatcatgctataggaggtttcttctacaggtcccctggacaggaaaccctaatcagccttctgactctaccaggatatctcctttgcaacctcctcctttagatatgggcaatacactgaccatttactagaactgggataaactgggcttaaggtaccatctagtgctataaagaaggcagcacctactggggaaaaaatattaaaaaagaaaatcagcatgtaaatttcaaagaatctctcagcaaatgtatctaatgaaaaccaaaacaaaccagacagagaagactggaaaaaataaataatccttcaatacaaagacatagacatacatccacaagaagcaacagaaaatggggaaacatgtcctcctcaagtggacaaagcaggraaccagtcactgaccctaaaatagatgttgacatgtgaactctttgaccaataatttaaaatagcacttttaaggaaattcagtgat

SEQ ID NO: 288296 - DNA, 1127 bp, Homo sapiens
tgaaaactcatatattaattgcaatttcctttgaaaacaagttcaaggaaaatattgcttatgaaaatgaagataaattatgaaatcagagaacatgctgtaccataggaaatatgaaaacagctctcagctacattgtacttagaaatgttttgtaaaattatcacagtcatatctttgaagtaggtaaccatttcaccaacaaaaaaccaataccatttcctattcaaaagagaaaacacaggtgatytaacttttacaaactataaactactaagacagtaaaagctttaacattaaattttaatgaaataattattaagaaatgcttttttatttcaaagaggctacaccagacatggagaatgtgtactaaatttacaaaacatacttccctcagtttcctcgtctgtaaaatgatcctatgcaagtatatgccatgagaattaaatgtgataatacatatgaaacatcctatataaaggtcctaagttgtagtacctaaaacaaatttgggggtaattttcattgagtcacttcctgcagaaccaacaattattatgwtgaaaactcatatattaattgcaatttcctttgaaaacaagttcaaggaaaatattgcttatgaaaatgaagataaattatgaaatcagagaacatgctgtaccataggaaatatgaaaacagctctcagctacattgtacttagaaatgttttgtaaaattatcacagtcatatctttgaagtaggtaaccatttcaccaacaaaaaaccaataccatttcctattcaaaagagaaaacacaggtgatttaacttttacaaactataaactactaagacagtaaaagctttaacattaaattttaatgaaataattattaagaaatgcttttttatttcaaagaggctacaccagacatggagaatgtgtactaaatttacaaaacatwcttccctcagtttcctcgtctgtaaaatgatcctatgcaagtatatgccatgagaattaaatgtgataatacatatgaaacatcctatataaaggtcctaagttgtagtacctaaaacaaatttgggggtaattttcattgagtcacttcctgcagaaccaacaattattatg

SEQ ID NO: 288297 - DNA, 609 bp, Homo sapiens
attataagtagttactggagatttctagatgaaactatcatccatactttgtggatttaatatactccttaaaatttagcatatatccatagaaaactattcccaaactgtttttaagcagcagtttagggataccactgtgagaagaatacaaatttaatgtcatattttagattgaaaacctactgtagatgatagacactgtaataaataatctaaacacttcctagataaggtttaacccttcttggagagggcaagcacacaacaaaaacaagtagtgctctttctctactctcttaagtccccaaaacctaaattacacccagaattaggtttaaaaacccccaaaacagacagtaaagaaaaataatartggagtcaatagataacaatatgccatgtaggaaaaaataaacaactgattaagtggaaaatacatagtgcagttttgaatctgcgtccaattgcttaccacttatggtaggacttcctttgtacatagctattcaagttgactttccaacaaaggtgctatattcagaaaaatctattctcacttaatagcagtcaaacaaagacttgagcagataatagcacaaaaagaat

SEQ ID NO: 288298 - DNA, 648 bp, Homo sapiens
gttacaccatataccaaaattaattcaaaatagatcaaataactaaattaagtgattaaaattattttaaaataatttttattaaagattatttacaatgtatacttttttataaaaatattagaaaacttgggtttaaatctttgtaatttgaaacagaaaactgcttcttaaatagggcacaggctgggtgtggtggctcatacctgtaatcccagcattttgggaggccaaggcaggaggatcacaaggtgaggagattaagaccattcttgctaatacagtgaaaccctgtctctactaaaaatacaaaaaatcagccaggtgtggtggcacgcgtytgtagtcccagctgctcagaaggctgaggcaggagaattgcttgaatccaggaggcggaggttgcagtgagctgagatcacgccattgcactccagcctgggtgacagagagagactctgtctcaaacaaacaaataaacaaacaaaacaaataaacaaaaaggcacccaaagcacaaacaacaaaagaaaaattgataaactgggaataatcagaatttaaaacttttgtgcttcaaaggacactacaaaaaagcaaaagggcaacccacaggagaaaatttttgtaagtaatatacttgataagg

SEQ ID NO: 288299 - DNA, 596 bp, Homo sapiens
ttctttttgagaatgcacatctaaataacagctaagacataacacttctactatgtgtcaggcactgtctcatatgtttttacctattaactcattatacagaaatgcttatgaaatatatattaccatccccattttacacgaggaaactgaagcacaaagagattatgacctgccaaaggccacaaaactaatatgaagaggaatgagtaattcgaatctagaaattctactgactgagtttgtgctttcagtcttcatgctagatttccyggggatttagagagcaatgagaaattccataattcaatcatatgacaatcataaaacttgccagctagcagtattttaaaatactaattcctctaccaacccacttgggacaggggatggtattaattcaacaaactcctaagttactaagctttttttttttttttttttttttttttttgaggcagtctcgctctatcctccaggctggagtacagtggcacaatcttggctcactgcaacctcctcctccagggttcaagcaatactccggcctcagcctcccgagtagctgggactacaggggtgcaccaccattatct

SEQ ID NO: 288300 - DNA, 596 bp, Homo sapiens
ttctttttgagaatgcacatctaaataacagctaagacataacacttctactatgtgtcaggcactgtctcatatgtttttacctattaactcattatacagaaatgcttatgaaatatatattaccatccccattttacacgaggaaactgaagcacaaagagattatgacctgccaaaggccacaaaactaatatgaagaggaatgagtaattcgaatctagaaattctactgactgagtttgtgctttcagtcttcatgctagatttcccggggatttagagagcaatgagaaattccataattcaatcatatgacaatcataaaacttgccagctagcagtattttaaaatactaattcctctaccaacccacttgggacaggggatggtattaattcaacaaactcctaagttactaagctttttttttttttttttttttttttttttgaggcagtctcgctctrtcctccaggctggagtacagtggcacaatcttggctcactgcaacctcctcctccagggttcaagcaatactccggcctcagcctcccgagtagctgggactacaggggtgcaccaccattatct

SEQ ID NO: 288301 - DNA, 1161 bp, Homo sapiens
aatgaagactttttccttcattagaatgcctagcacattgcctggcacatagtaagtgctcaataaataagtactgactcaatgaatgtgttcaatagaataagccaaactagatgttttaactccctaagttttatttactttaaagctctcaatttttgcctagactggacggttataaatatcccctctgtcctaagcaaatctctgatgattaatcaatttttgttcataataaggaaataaacacaagatttttttttccactctgctctaaatagtttggcttcgaccaatattggctcaaaccaaacgtaattctgttttcgttgcttgccttaatgtgacctgacaaatacaattttgtttttaaaatatgcttcagaataatgcttgttaggtaaattaactgccttagactctttcattatttaatacttatgataataggcattcggcattcagagatcagcagaaatctacaaacctaagtgcataggaaactacactrgctgggaacaaattgaaaacagtaatwagagaaattactgtactattttgatttttatgtttcttwaacatggtgacttaagttgttgttttaacataatatttttaaaccatctattcctactactaatccacatgtgttgcaaaaatgtttgtatacagaatggggttccaaagagaaacagattgtgagttaacaccacacacatagagttttgttagatttaacgtataattatatatagcatagataataaatctgcataggcacatgtgttcaataagtatgaatattatcatacatatacacttctatttcttatgttatttcttttttttccaggagaaataactttgtttggactgagagctggagaacgagaataggacctgagacagcatattgggctaaggaggagaggtgagtttcctaaatggcagtcaaagctcatcgaccgaacggactctacttcccagcaaccttgcagttagtgcaaccaacaaaaggcctgctgaggaatgtatttgccactaaattccccaaatatgccaacactacaaaaaagacggaggctttttgttataattaaatttccacaaacctccccaatcacaagtattataagaggaagtaaaaaaatcacattttac

SEQ ID NO: 288302 - DNA, 516 bp, Homo sapiens
tatatatagcatagataataaatctgcataggcacatgtgttcaataagtatgaatattatcatacatatacacttctatttcttatgttatttcttttttttccaggagaaataactttgtttggactgagagctggagaacgagaataggacctgagacagcatattgggctaaggaggagaggtgagtttcctaaatggcagtcaaagctcatcgaccgaacrgactctacttcccagcaaccttgcagttagtgcaaccaacaaaaggcctgctgaggaatgtatttgccactaaattccccaaatatgccaacactacaaaaaagacggaggctttttgttataattaaatttccacaaacctccccaatcacaagtattataagaggaagtaaaaaaatcacattttacagatctcaagcttgtcttcaacatttagttcatcatcttaaagaaataactcccctgctaaactcattagctataggatctatccaagcagcaagaagatg

SEQ ID NO: 288303 - DNA, 579 bp, Homo sapiens
aaacaaacaaaaaacctaggttgaatttgtgtctacacaggtttgcaaccttggagccatagacaatatcatagagcctaggtgtgtagtaggctctaccatctaggtttgtgtaagtatactctaagaagttcacacaatgatgaaatcacctaaggatgcatttcttagaatgtattctccttgttaaatgacacataactatttgaaattgtccaagtgagtaggtcttaattgttctctcacacacacaaaaaaacaatggggtggataaataygtgagatgatgtataggttagttagcttgattgaaggaatcatctcgcaatatatacatctattgaaacgtcataagtatgcacaatgtttatgtgttaactatacctcaaaagcttgggagaaaaaagtaaatgtaattattgactcagaggaggaggcacccgccatttggctctggtggtgtctctgagcctggaacttaaatctctgggattctgaggtctctaaggtcactgaagccaattcttcaagagatagaaaaactataagctggttttagctgctgctacaggaaggcac

SEQ ID NO: 288304 - DNA, 474 bp, Homo sapiens
cataactatttgaaattgtccaagtgagtaggtcttaattgttctctcacacacacaaaaaaacaatggggtggataaatatgtgagatgatgtataggttagttagcttgattgaaggaatcatctcgcaatatatacatctattgaaacgtcataagtatgcayaatgtttatgtgttaactatacctcaaaagcttgggagaaaaaagtaaatgtaattattgactcagaggaggaggcacccgccatttggctctggtggtgtctctgagcctggaacttaaatctctgggattctgaggtctctaaggtcactgaagccaattcttcaagagatagaaaaactataagctggttttagctgctgctacaggaaggcactttgagaagcatcactggggtaatgctcaaaggaactaccaggagaaagaaattctatagaaagcccacagggaacaaataagaagaagca

SEQ ID NO: 288305 - DNA, 538 bp, Homo sapiens
gcttttttaatattgcttagtcctggttgggtataatcaagaaaaacatcagagaccaaagaaaaagagggtttcattgaaggaaatgtgataaaaatgctataatacatctctgtcctggaggcacttgctatctagataggtagcataatcatactcaaagaaaatacattatttaacaaaaatgtacagctacaaaatacaaagtaaatacttataataccattgggagggagagataaagaaaattaatttattcacatcaataggaatatcaaaatacaagaactttccactcatatacttgttcaccaaataatcttacttaaatctgattttaatttaaacattttttctaatatacattaatattagagtttcaccttgcattcttcatttgcaatgttaattatttatttttcacttattggaacactatgcccycataatcaagtaatctgttggtaagtttcactatttatttctgaaatcagtggattggccttatgtttatcagttcttcacgtgagaaagagga

SEQ ID NO: 288306 - DNA, 621 bp, Homo sapiens
agtttttttctctcttgtttcagtttctactttgttgtgtccactgtatgaagagtggcttgagttattcccaccattgccagtgcacctcctgtgtgaagacaaatacccacaccaggattagaagggggaaatctactgaaatggcagtggggagggatggaaagaacatacccaggaaggctggagaagaggcagaagatgaaagcggagyctgtatcctgtctcaagtgaggagacaggtttatgagatggagagagcacagaaggtgttttgagagaattgtattgtgcatgggagaccaagagtcactgaaaacaactcaaatttttgttgtaatttctaaaagaatgttaaggggatacctatttttaacccatgtcaacatttcttaaatttctctttctcagagcatttcttttttttattgaggataacaatcttttgtcacatagatgttgtaaatatgtttacatgagttttatatgatataagcataccttaattgtatcatatgaaattgtttatattcataagttttataatttttgataatcaaaccttttaattttctattatattttagtatgaagcttacaaatatgttccttttgccaaaa

SEQ ID NO: 288307 - DNA, 600 bp, Homo sapiens
tactcagccacaaaaatcaatgaattaatggcatttgcagcgacctggctgagattggagactattattctaagtgaagtaactcaggaatggaaaaccaaacatcgtatgttctcactgataggtgggagctaagctataaggatacaaaggcataagaatgatayagtggactttggggacttggggagaagcatggaaagggggtgaaggataaaagactacaaatatggtgcagtgtatactgctgggtgcaccaaaatctcacaaatcaccactaaagggcttactcatataaccaaataccacctgtaccccaataacttatggaaaaatttttaaaaaagaaatgacttttagaatctcatccagtttagatcagggaagtaaatagataagaatgattgctttggaagtggaatcaagagagaaaaagggaagagaaaatgaggagaaaaatcaatagcacttgtttaaagtgtcccttttttgtgtgtctgtattcactaacacacataggaagtaatatattaagtagaactgtagtaatatgtgtcttccagattcttctggtgccattagaagttgcaaacaactggt

SEQ ID NO: 288308 - DNA, 1168 bp, Homo sapiens
ttggaaaaatgatttttaaattttaaatctgctatttagctgaattgtaatttatgtaagtataaatctttggaagaagcataaagtcagtacttctctctgaaatcactattatgtatcaaaagtactacataaaaggtataatcataagaatttttctacccaattcagtgcaccaaagcaagcaaaaatatttataaatttagaactaaaattatatttccttaactcagatgaagtagaacagtaaacacatctaagacaaaaagataatttcttcttttgcattatctttttttctcactccttctctctcatgcacaaacacacacacacaatacatagacaaacatacttcctatttaaagatacatttgctgattgtgatgtgtattctttttcactacatcccatatgtagtttttataaggcagcattccatcaggagatgcttcataggaagaaacaaagaatgctagaatcacataagtttgacaagcactatttgccayatcacattcttggaaattcacagtgcatgttagtgtagtgaagwagagataaatattattactcaataaatattgattatttagaggccttccatctgcacaatttacaagcccaaagagtaatcccaatcagaaagctgagattaaaccagtttgcttctgttaggttaatcagtcaatctactctaaaaatgaaacttccagatatgaggatttatatttcttttctttttttgtgggggtgggggggatggagtcttgctctgtcacccaggctggagtgcagtggcatgatcttaactcattgaaacctccatctgcaaggttcaagcgattctcctgcctcagcctccaagtagctgggactacaggcgcaagtcaccatgcccagctaatttttgtatttttttttttagtaaagtcaggtttcactatgttggccaggctggtctcaaactcctgacctcaggtgatctgcctgcctcagcctcccatagtgtwgggattataggcatgaggtactgtgcccagccaagaagatttatttctgatcattaatattattcacacctacataagcagaatctgagtttctttctgttcattttaacacaaagatgctctccagtatgtgacagcagccaaatccagctatc

SEQ ID NO: 288309 - DNA, 578 bp, Homo sapiens
tcgccatctaagaagaatgactgttctccatggtactaacccattctcttcagtaaaagcatagtcagcctgacctatggaaggaagagttgctcaatgatgtctgtacattttcaattcattaaagctctacattatgaacataatcatttccctccttaatacatgataaatgatgtctctagagttcagggaaatattaataatgagctgacaccatatttttttgcctgataagtccatgtatcattgtaccgctgtctttargaatcccacctcctacccctcaaagtcaggcagaaccttctgtctagccaaagacatgccctgttggaatatacttttgtttttccagaaaatgaccattctgaatctaagaaatacagtgtaaatcaccaggagggttaatgcttactaattgcccatgactaaagctctacataatgtctagtgacacagagaattccaaatcattatttgttcatctctcagtgaacaatacactcatcaaacatacattaaagaaggcctgcttttaagagcactagggctggcatcaagtgctgctgaggaggctc

SEQ ID NO: 288310 - DNA, 976 bp, Homo sapiens
agggtggctgcaaaagcccacagcccactaaactacaaaaaaaaccaaacccacataccgagcaataccgcaaacagagccttggttttttctctccaaccaaaacaacccactacttgtttgagtggtcttgtgaccataattgctgggtggataatagtattattgtctttagacacaataaacacctcctttcctagccaatagtaaatttcaatctaaacataaaaatactcttgatctacctttcactgygttcccctgaatctgcttgcctttaattgtggtgttagtcctctgaaagctcaggttagcaacttcactgaacagaaaataaacacaaaggattgttgtctatttaacttcatcagtagctttggcttgtacwcttctcctaatgcctcaattagcagaaaaaaaaaatagagaagttgaacgtcacacctaacatgaagcaagttggtgacagaactaagactgaggcctccaaagctcgccactgggtccacagatgttaatgttattctaggctttcatgcctagcaatgcaggctgagccctgcctggtaccagggagagcccctcacatagaccacgatgtgattagtatgcccatggatgcatgtgccatgctgaagaacaccctccagggttgtcaagggtcaactctgggcagtggagcatgattggtggtggcgagcaaaggaaaacatttactttttacttttaaaactagatattggtwaaacttttataaatgtgtattattttcctatccaaagcaaaatgtaaagagaaaaagagttcttttggatgtaacctatgagaatcccattcattgcagcagaatatttgaaagagtagagagcattgcaataggcctcaaacaatgaggccagaacaaactataaatagaaatatcacattcttcttcttaaatatagacagtttttgttcatagatcatacttcattaa

SEQ ID NO: 288311 - DNA, 564 bp, Homo sapiens
aagccattggaagacagaaagtctcagataagcatggaacaatatcatcctaataataatttatcaattattaattatcataacctcatatgactgtgtactctggaacaaagaacaaaggaaaagctatttaagttgcaaattttgagctgggctacctgccctttggccgcaaaatgtacagaagatctttgatgaactagctaacaccctttacgcattagtaataaagggttttggcatcctgaaccaaagttttctatacattttgaagcaaggctgaaaaaaaaagatgaaaacattaatttccagcacagacttattccagtagtgcaggagcctaaatatgctttctcagccactagatttccaagttcaaaatgcagtgtgtgatggcatctgtccttccytgagcttctgagacctccttaaaactattataaaaagccctactggtaaagcctctttattttaaaattacattatgtatgccaccaaagttacttctcagatgaccttgccacatctctcttcctttttctcctagccttatcataaattcgc

SEQ ID NO: 288312 - DNA, 911 bp, Homo sapiens
gcacacaagaatgatcggtcactctattactactccagtaactaagtccagaacaatgatgctttctctttctcctatttcttgctgtatatcccactctctctgcctaggattttgttctctctcttcccttaattctttcttaaagatttattaaattatctttcctaagctatagtttataaaatgcatgtttcgctgagaggcagttcatccctctataaatagaattttactctaggcagggagagaaaacagcagccttacataacctttcacaaaagcyctactcatttactaccagggccagagaagggcctacagttcatgagctaagcagaaacttctctccccaggaggaacactagtgattttcattcagattgatccaatcwcttcaaaaccctgcactgagctttctgcctgtaaagctttactcttcttcaaaaacctctgttacaccccttctgccctgccacagaggctcaggcaaatgagcacttggtctgtttcatgccctgaagaccatccccaatcaaaaggcgaggttcagtatggggtagcccccgtcagggtctcactttgagcatgtgtgtgctctcagcatcagacttgggacacagaggagggagggaggaggagggcccagggcctcwgtgtcccttttatgtgtctttctttttccctgggtctgagcatttttaaggaggaaagagagttgaaggaggggaaactatggaatgaaaaccagcagaccattgtaaaatatgcgttcttatatgagtattgatgagaaaagaagggaaaaggcagatggaacacacaaagagcattttcaagggcttgtaatctcaaggaaaatgaaacgtgtcatggtctccatgaaatatatttgccgctaaaccacaaac

SEQ ID NO: 288313 - DNA, 540 bp, Homo sapiens
acattaaccaagcaagtattagcttctaggtgtgcctgctgagtagatgacgggtctgtagaaaatggacatggtcaaccagggaagagttaataggggaggatggtttggatggaaaatccacaggaagtgtgtcatacgctgccaagtttgatcagtattgcactatgtcagatctaacttagctggacctatgagcctctaaatcaagcaaaggcatgggaccagggtccactaaaccatgatgtgattgatttcaaaattgccattggagtctgactaccttaatttatatttaagtctctaaaatcacaacaataaaattgaggcaggttctagaagggctggcctgtgcctgtgaaattttctatttgtaaagactayctcgggataaatgtagcccatactaacataatactaacaatagctagcatttatgaaatacttattataagtcaggcattggaatagatattgtatatagctaactactggagtaatttttacccccaatttagagttgggaagcagaggttgatt

SEQ ID NO: 288314 - DNA, 628 bp, Homo sapiens
tgtccattttataggtgggaaagttgaggtccagtggtttaaggatctcaatcaaacccaatagctgggatgctttttccccctaggctatgccccctcttatcgagaccaaagaccacagggctgtgtagcaacaatctttgcaacatccagtggtagatggtaggttgattcaagtggtacagtagttccaggtccrgtgacatggaaaggttacaagctcaatgacttctaaatgaactgtaactgaaagcaaagagaacattcgtttatgtttttaagaaatagtaatagggacaaaatgcatagaaaaggatcatattgagaaaataatctataaaaactccaaaaaaaatttaggtttaggtttactaaacacgttcaggcacacattttgaaggaggccccagaacaaggaatgtccatggcaattctatttttatagaaaaggtgaagttttgtttccctctgttcagtgatagctttcaaaggagaaatgacttattaccaagttaattgataattacttggatttttctagctctgtacacttttcaaagtccctctctcggttgcatacatatgtccgtaacacctcataatgtatctctaaacatataggatagat

SEQ ID NO: 288315 - DNA, 524 bp, Homo sapiens
ctatggctgtacaataagctaaagatgatgctgaatttgtattttataatatgactctggagagcttacttagaagagcacatcagagttaggccccttgattacaagaaagatataaacaaactagagggagttaaagtaagaagactaaacatgattaagcttctggagtggtatgaggaaaaatcaaatgaattaaatatttataatctggttaagtaaagaccaaatggggaggcragagtgatttatagctcgaattattgaacacatttcagcccagaagaggcagtgtcactgaaaagggtatgcaggaatcaagagccagatgacaagggtaatggaaagaacatttagaacaggactatctcagatgaattgtaaaataaacttttaacagtaaaactgatatgctgctgaaaacttccccaagggaaacagtcaccaaaccatccctggagatgcctcaaaccagagagagaaaataaccagaaattgtcctgcagggaacagctctgcccaga

SEQ ID NO: 288316 - DNA, 569 bp, Homo sapiens
cagaatcatagaattgtcttgctgacatcacaaatagctaacaaattaatggaaaaaatgttcagacttataagcaatcaggaaaatgcgaattaaacccacaatgagaagttaccagatgcgggcaaattaagcatatgaaaataccaagtgttggcagaggcatgaagcaaagaggcctttcatctgcccctggtgggggtttcagtaactgcaacatgtctttgcctcccggatgaaaagatacccttctatgactcagcaattccactcctaggtatgcaccctaaacatggtggcaaatttgtgctggtggacatgcaccagaatgtttatgccaactttactagcaatagcaaaaaactgaatttcaaaatccatcaacartagattagataaactatggttaattaatatcatgaagtattatacaccagagaaagtgactgaaatacagcaatatgaatccacatagatgaaactcagatacttaacgttcagcaaaattgcaagtcagagaatatacacattatatttattttattactgttaagaacagccaagtaaag

SEQ ID NO: 288317 - DNA, 621 bp, Homo sapiens
gtagacaaaatatattttatagccagagataaaactcaacaatagtaacagtccatggtcaattgatgggaaaaataaacagttctgtatgatgcaatgccttcaaaaattatccctataaaatcacataatactataatgaagtcatagtgatgtattgtatctattaagaacaggttaaattatgttctacatacttttaaagaggcagctaagtgagtggagaaatatttctaaaagactatagaaaaataagtaaaatctaaaaatgtgatttgagttaaaaacatttatattaactgcttaacttcttttttctcttgtcaaaatgtaaacacagatttaagaacattgtagatggcccagaataatgttgtattgacaagtcctcttatcagaacacaattcactaaccagttggtattttcatcagataacatcctaaagattcagttaattcagtggaacatgtttgtcctagatactcttaggagtagccttcaggcaagaascaatatttaaaggatgaaccaggaagaaatctccaaattgcaataaatactcctgttaagtttcatcatcataaccacaaatggttttaaagggtcttcctccctggag

SEQ ID NO: 288318 - DNA, 438 bp, Homo sapiens
aaagttaaaatatgaagtgcctgtgttcactaaagcaaaaccttctgaaatagcttacatggatggattctttagaattggatgaaactctttggttacccccaaatttcttgaaacactcaaaacttccattagctgaggtgaagcctctagtggttcaggactgggttctacagcaagggttcttaactcagtccatgaatcttcccaggaagtctccaccaacaaaattcaggaagtttgtgaatatcctgaaattttatgaaaagtgattggcttgtgtgaacatgctstttaactgggaagggaatctttagctttcagtaaatgtataaggtgagttcaagcctgcctccctgccaaaatgatgtaaagaaccattgcataagatagtaggtatgagggaagagttgcaacttcttctcaagactaatgaag

SEQ ID NO: 288319 - DNA, 560 bp, Homo sapiens
ttaggctcctatccctttcaatacaacatatatttgtcgagaatccaattagtgccacggactgtgctaagtgtagcatattcaaaaggggaaaaattctgtggattttctgtgttctcaaaagaagaagaaaaaaatgaagaaaaagaaaaaagtattgttcgtcttaaaggtaaataatatgttgtgcttttgaagaattagatgggcttggctgtttatggttccaatgccagatgaaatgctcagtgaacacccctgcaacaagtacagtgaagggtcgtagctccactcagcctggccatgcatcctaaattccgaggccacaaatgttccagagacactagccttttttcacgaggcataatcaccacttatcaagtgtctcaccaataagcttcatgtaacagaaatgtcaagccccatttgattcatcttgcactgcccattctctctgaaggggatggctttcaggccctccatccatctcgcctgatgatcccttggagctcaactagagaaatcatccctcagactctracacctttgaaacccaagag

SEQ ID NO: 288320 - DNA, 589 bp, Homo sapiens
catttagagattttagattaatttcattgttctattctgctgaaatctttttgaattttaatggtgctgacaattataatagttattccttctagttttctatcaccaactaatttattctgcatgttaatatctccatgccaggtatcagtttaaaaatatttgctatggggacgaggggaagcagagcactatgataagtcacaggagaataatcttttaactgggcgttaattgatattgaccaattaatacacactctggtagtagggattcaccacacttcattatagtttggatcatatttaacttaggtatttacaagaataccatgagtataatacaaaacacttgtaaaaatccagatatgattttttttgtgttaattttcagtcatttcaatctgcaataatttattctaagtgaacccatgctggctcccagtggccttacatcctttcytaagtgtttataaatcatgtcttaaataattaatttttatctccagtctgagagagatttcaagctcacttgactgtagttagaaataactatagccttccattaaaaaaaatcaaggaaacctatt

SEQ ID NO: 288321 - DNA, 548 bp, Homo sapiens
gtccactcagacttttgccctcatcttgattggctttgatatcttggctcctctcatagtaaagagattcacaatcctaaagtcactgacttctmattttttgtctctatagaactcaagactatatataactaaaaatctgggtttatttttaataagagtcctaacacattcttttgtcaaaaggcaaccacgtaccacaaagggggatcaagaagaccaaaaaagccccatggcgctccttcagcctttcagccatgtatcagattgttaaatcgagggatggcaatgacatgtagacaagtcaatgttctgggtcagtgacatggcattggacagaggtcaatggctgggaaatcaatattgagaaggagaaaaaaaggagtgtaacacatttgtttctacctttcaacttcccttctctcatacaaaactcatcatctgctgtgtgaaatgaacattttaggtaacaagccatttcatgtattaatctttctagaccagaacaaaagattggctctgactaaagactaatgggtccagtagag

SEQ ID NO: 288322 - DNA, 607 bp, Homo sapiens
  misc_feature (1)...(607): n = A,T,C or G
nnnnnnnnnnnnnnnnnnnnnnnnnnnnnnnnnnnnnnnnnnnnnnntcgccatccttagtgttctgtttcatcttaagtctatctttgtagcctcgagatggctgcaactgttactgatgtcaggtgcagctaccccaacatccttaaaaaaaaaaacactgtccctcccttgtgttcttcttgatcccatkagggctggaatttgtttgtctcttttattcactgcagtctgcccagcacccggagcagtggatggtacattgcagtgctcagcaaatattagttgaatgaattattttgccaggattctatagcatgcccatgcttgcaccaaagcaaagtttatgggaataggtgtgagggctttgaacaatcaacactcctaaggccttagcaccaaagaggcaaaagctttgttgcagagacaaaaaaaaaaaaaaaaaaaaaaaaaatcagtccaattaaaaaggaaaaaatagcaggggaaatggttattggataacttatttcaatgttttacaaaagaatgtgtcaactaagttttggtatacacagaattgattattttcaggtttctgatatgactcaatgacacttaaagagaa

SEQ ID NO: 288323 - DNA, 519 bp, Homo sapiens
caaatcaacttaataaacatacacagaacatttaatccaacagcagtagaatgcacatttttccgaagtgcatgcagaaaattctccaggactgatcatatgttaggtcacaaaacaagtatttagaatttttaaatattagaacatatcaaatatgtctcccaaccacaatgatatgaaactagaaatcaataataggaggaaagctagaaaatttacaaataagtggaaatcaatcatcacactcttgaataattaatgggtmaaagaaggaatcaaaagacaaaaaaatgttgagacacatgaaaatggaaacacaacatatcaaaatatttgggatgtagcctttatacctcaaggaactagaaaaagaagaaaaagctaagcccaaagccagcagaaaaaagaaaataacaaagatccagaacagaagcaaaggaaatacagacatgaaaagcagtagaaaagattagcaaaactaagagctggttttttgaaaagacaaaatctacaaagctt

SEQ ID NO: 288324 - DNA, 608 bp, Homo sapiens
caactcatggttcatttggtgtatatgagttagcaaaataacatcaagccatgcataattagcaaccaattactggaatagaagacacaattattccaatcaatgtggtctttagtgccttgggacttcagaggtatggatgagaatgtgtgtcatgacctaaatgaagagaatagatgtgagccagcccttggacagttattctggtcttgacactgtttaatgagcacaacactcaaccctttggaggaaatttagaagccacatgaaygagctgtggtgatactggttccttccctgcacaccattgctaattcatgagtaactcacagctcttagaatatggtagcaatttgagtaggaaacatgctattactagaatgatatgtctcaaactttgacttgcatagccatcacctggggatcttgttaaaatgtagattcgaattcagtaaattttggatgaagcctgagtttctgcatttctaatatgctctcatgtgatatggaggttggctggcccacaggctgcactttagaggcaaggttcaagagggcagttgaacattttggaggcgttggaactgacacttttagaagacaggcat

SEQ ID NO: 288325 - DNA, 531 bp, Homo sapiens
gccttgggacttcagaggtatggatgagaatgtgtgtcatgacctaaatgaagagaatagatgtgagccagcccttggacagttattctggtcttgacactgtttaatgagcacaacactcaaccctttggaggaaatttagaagccacatgaacgagctgtggtgatactggttccttccctgcacaccattgctaattcatgagtaactcacagctcttagaatatggtagcaatttgagtaggaaacatgctattactagaatgatatgtctcaaactttgacttgcatagccatcacctggggatcttgttaaaatgtagattcgaattcagtaaattttggatgaagcctgagtttctgcatttctaatatgctctcatgtgatatggargttggctggcccacaggctgcactttagaggcaaggttcaagagggcagttgaacattttggaggcgttggaactgacacttttagaagacaggcatgcctagcacgtgtctctcttggaaggtgatctgtcttat

SEQ ID NO: 288326 - DNA, 558 bp, Homo sapiens
ccaaaatgctaagagtgcccaaaaatgtcaataatgcccactttgrgaaaccctgattgagataaaatgttaaattgctacaattatccataaaattcaacttcctacaaaactatttttgagaaaatatactgataaaacagtggtgatatgctgcataaactatttttggtaattaaatttgttctccatttcacttttgcttatgtgtcaatgctaataaaccagcagtttttaatttttcttttttttttttaaaccagagaccctttggaaatgcaaaatagtttagggtacttggaaccatttggttattatttgctatttcctagatgtatcactataaatttctcttcaagattatgcccttttattttattaacactgttacatactagacacctagtcactgccccacacctccccacgcccgtccctctggaggcctccctgattctgcagtttcgataacattgtctgtacccccagaccacagcatatattcctcataccagtaaatctttgttgtacacatatgtcctgtagattgcaatgttt

SEQ ID NO: 288327 - DNA, 558 bp, Homo sapiens
ccaaaatgctaagagtgcccaaaaatgtcaataatgcccactttgagaaaccctgattgagataaaatgttaaattgctacaattatccataaaattcaacttcctacaaaactatttttgagaaaatatactgataaaacagtggtgatatgctgcataaactatttttggtaattaaatttgttctccatttcacttttgcttatgtgtcaatgctaataaaccagcagtttttaatttttcttttttttttttaaaccagagaccctttggaaatgcaaaatagtttagggyacttggaaccatttggttattatttgctatttcctagatgtatcactataaatttctcttcaagattatgcccttttattttattaacactgttacatactagacacctagtcactgccccacacctccccacgcccgtccctctggaggcctccctgattctgcagtttcgataacattgtctgtacccccagaccacagcatatattcctcataccagtaaatctttgttgtacacatatgtcctgtagattgcaatgttt

SEQ ID NO: 288328 - DNA, 589 bp, Homo sapiens
ttcttactgattggcagcttgctccccatcctcccattcaatatacacacacaattttcaccactccactgggttctcaactgggttctcgacatctgcagtgttgtagatgggcaattgtaactttgagatgtgcaaaagcattttgaaaatcaaggaattctgtcactctggtcggtctcctggctttaatcaagaacatcctaaagcactatttctctatgtggtgtttcaacagatgttatgttgggttactaagagtgctgtaaaatggagagtttcagttctattgacccacctggaaccatgaaagaagtttattaatttttcacattaacatartctacttagctcatagagtatcttcccattgggaaattctgcaaaattttatcactaattgttccaaacaaaagttttaaaattatgtgaaagtagaatcttttaaaagttatatttgagcacttatataaacaagaaactctttaaaaaccaattctttatatagcttgagacataaattaaaatacttttttcacatctaaatagaatgaggctaccataataaagcagtgctatgtatgtactt

SEQ ID NO: 288329 - DNA, 573 bp, Homo sapiens
agggctctgaggactgccagcacgctgtcacctctcactaattacataataatgggatctcctcttcagaaggacactgggagatttgatctaatctcaacttctctgaatatttactttgagtccttgttgcttgtgtcatcctgttatgtattggcttttctcggcagagccaatcttcttttcttgtctcaatactgatgatggtgtttgtgttttgtctttggctggtttagctaatctagtgcctaagtatggctgtttctcccagttagcaaaggttacctctracaactttgatggggtgcagagaatctgaagcagtcctttgaatgagaataagcaggaaactcgcactgagggaagaagttgaaattggctgtacataggcaagtctgcaagtgtgatggtgtactgtgggaattataggtattctttctgcaattgaggcccttccatgctgctcagagtcacagaggtattgatcagaaaggctttgtacctgcttcctttttgtttggaggggttgttccagtccagatagtgacatctgtgaactcactaataagcaaa

SEQ ID NO: 288330 - DNA, 620 bp, Homo sapiens
taatttaaaaataacaaaagtaggtaggttatctgaagattgtacatctatacaatggactaaggtgtaagccttaaaaatgatgctatagaaaaatgatgtgttgacatacttcgtaacatcttaaatgaaaaagtgaaaaactattcaagtatcatacattgtatgatcctacttttataattaatatgcacacacacacacaaatctgacatagtagaaagggcaggggctttaagatcagctaaacctaagttcaaatcaattatctgtgctatatgactttagtcaagttaaaatctctgtgcctccatttcttcctttgtaaacgggaacttaaatatgctccaagagccactgtgcttccaacttgtactctatacaatctcttctcaatatagccagatgatttctttttaagtgtaagtcagatcagatcactctgctcaaaatctttcagtggttctacatcttactcctctccctcaagttcaatttcatctccctcaaaactaaaattctttacagtgccccatgatgaatacaaacacycacaggacctgctcctccctctctttcactctgaatttgactcctgtgtgtccccactcagtttactt

SEQ ID NO: 288331 - DNA, 544 bp, Homo sapiens
ccctttttattgtctataaatttgttctgactacaaggcatccctggagtctctctgaatmtgctgtgattctgggggctgcctgaatcgcaaatcattcattgctcaatgaaactcctttaaatttaatttggctaaagttcttctctaaccctttttgaagaaatgcctatttcttcattgcacacaggagctttggaaagagaaggtcctatgatccatgattcaggggcccagccatctttcagtcttgtctcagcaaacagttgttacaccaagaacaggtcaagtcagaaagaacagttctagtgtagcatcctgtgccaaagacatgtcttggcattgagacttggcacagtgcagttcaaatcaatatgtggaggtcattcatcaccaaatattgggcagaggatgtgactggaccggaaggtaggaatctacttctgagattaggtataggctggggggactcacacaagagagaaatgggaatgattacataaaatatgatgctttttgttctcacttttaagtgggagccaaa

SEQ ID NO: 288332 - DNA, 544 bp, Homo sapiens
ccctttttattgtctataaatttgttctgactacaaggcatccctggagtctctctgaatatgctgtgattctgggggctgcctgaatcgcaaatcattcattgctcaatgaaactcctttaaatttaatttggctaaagttcttctctaaccctttttgaagaaatgmctatttcttcattgcacacaggagctttggaaagagaaggtcctatgatccatgattcaggggcccagccatctttcagtcttgtctcagcaaacagttgttacaccaagaacaggtcaagtcagaaagaacagttctagtgtagcatcctgtgccaaagacatgtcttggcattgagacttggcacagtgcagttcaaatcaatatgtggaggtcattcatcaccaaatattgggcagaggatgtgactggaccggaaggtaggaatctacttctgagattaggtataggctggggggactcacacaagagagaaatgggaatgattacataaaatatgatgctttttgttctcacttttaagtgggagccaaa

SEQ ID NO: 288333 - DNA, 634 bp, Homo sapiens
ttaacatcagcatctgcattcttcacaggaattgtttcctagtcacgtgttccacagttttccagaacacatcaccttctcattctactatgttgagatacagccattttgaatctataccccaaactacaagttgccattttcacaaaatgtgrcaattttatttctccattctttccatagctgtagaactggtgtcttcaaagcctaactgctttcagtattatttttgtaaaatgatcattaaaaatcttgttacgatgacctcaaatacttgcaatcttggggtcatatccttaagaataattactaaattcataccaattttttttaccttaaataaaactacattaggtgacccatgtaaacatacaaaactgttatgaattgagatcaacacaaagctatttttttctgaagggtgctttgttattgacaataaagaaatagaataaatgactcctagtatctccaaatactggataagaaataaccttctaagggaaaagacatcttaacttgaggcatatgtaatattttggggtaggattacaaacagctaaaaaaattgctgtgtctatattcatagcaattctgacaacaaatgtgtgggttttccatactaagcaattct

SEQ ID NO: 288334 - DNA, 620 bp, Homo sapiens
tggtggtggagaagtgaaaggtggattacagatcagaggggaaaagcagaatgtgccaarctgagggactagcattcgcaaaagcacaggtcagggaagcattgcatcttttatggtaaaaccccgatctttctcctaaaagatcagactttttttgattgtttggttggttgccattgttaatatattttaatatttccctgtgttgagagctgctgaggacactgttggccaaatggtcccaatttttccaggccccagggttttccaggacaatatggcatttccctgccagatggggaaatgctagaaataagcggcattaataaaaagggccaagttcatgatcattttaaaagcatatgaaataccaagatgcaaaattcattttaaagagccatgttacttaagccttgccagttccgctcttgagcaagagatgcccccacccctggctctgcccacaggtctgtactggtaatagctcaggacacatctgcttaatgggagctgagatgtacttcccaaattggcactctcattcaaaaatattttttgagtttttactgtatatagagaatgatgctagatgtatataagattcaaaatcaaacatatca

SEQ ID NO: 288335 - DNA, 630 bp, Homo sapiens
gagaagaaatcaagtaaaacccacaattgtagtgtgattaccaataaattgttttttagactttggtagatctaatttgtttaaaaaatacaaatagaaggggtcagaagttgaaatgactggatgcaaagcccctggcttagagctcttcaaatcctttctgccttaggacagaattggccccagagtctggggcagatgagaccttcaggtttttgctgagtagctctaattctcaaggctgaagagttgcaagtgcacaatcccacactgattaatgagtaatttccttaaaaaacaaatatgayctgagacagaggaagaggagctgaccagggagtctagagatctgggatttggtccactttgaccttgggcaaagtaatttataaaataagagaactgaccacatcagtgatttcagaactgggtttcccattagagtcattggagatgttaacaatgcagattcatgggctctatcccatccttactgaatcattatcttactgaatattatctaaatattttcatacttactgaatcattatgtccatgaggtgacatcagagcacccacactttcatcaagcttccccaatacttttataaaggaaacctattacagggc

SEQ ID NO: 288336 - DNA, 531 bp, Homo sapiens
aaagtaatttataaaataagagaactgaccacatcagtgatttcagaactgggtttcccattagagtcattggagatgttaacaatgcagattcatgggctctatcccatccttactgaatcattatcttactgaatattatctaaatattttcatacttactgaatcattatgtccatgaggtgacatcagagcacccrcactttcatcaagcttccccaatacttttataaaggaaacctattacagggccattggccaatggttggaaataactgaattagatgatctctagcaattttacatttttcacattctgtaatcgttcacgattttttgtaagtatgcctaagtggaggcttaataaggactggtttactggttgatcaaaaagcacctgagttggtaattatttctgaaacagtgaagccagacatgccgaaaattaaccttgactttcacaactagatgaataaatgccttagtgagatagacgtggttctcatcatcgttatgtagctcccaggctgg

SEQ ID NO: 288337 - DNA, 531 bp, Homo sapiens
aaagtaatttataaaataagagaactgaccacatcagtgatttcagaactgggtttcccattagagtcattggagatgttaacaatgcagattcatgggctctatcccatccttactgaatcattatcttactgaatattatctaaatattttcatacttactgaatcattatgtccatgaggtgacatcagagcacccacactttcatcaagcttccccaatacttttataaaggaaacctattacagggccattggccaatggttggaaataactgaattagatgatctctagcaattttacatttttcacattctgtaatcgttcacgattttttgtaagtatgcctaagtggaggcttaataaggactggtttactggttgatcaaaaarcacctgagttggtaattatttctgaaacagtgaagccagacatgccgaaaattaaccttgactttcacaactagatgaataaatgccttagtgagatagacgtggttctcatcatcgttatgtagctcccaggctgg

SEQ ID NO: 288338 - DNA, 550 bp, Homo sapiens
ttctgcattattctcatgagcggttattttatatgtatgttgcttgcacactaaatacagtgtgacccttctagttcagactctgaggaagtctgtgcacagaacatgagtgagatttgtaccttaggcaaagtccccagaggccactctctgtggggcctcagcctccttgtggggccctcacgtgtactcctgatagcatcttttctggctctattgtgctaaaactgctaaaatgcatttataaatacatgcaattttgtcccccaggggacattccatgatactcggagacatttttgtgstactggcatccggtggccagccgtgctggtaagcattctccaatacacatcacagcccctggagagcaacaaattatctagcccaaaatgtcagccgtgaggagactgagaaatcctgctctaaatggagcttcagtgtgtctcttgcctttgggtcactgaaataaagtatctgtggcctctagagttaactcaggctccagtgggaaattctctctagtgggcctccagagcccagagctata

SEQ ID NO: 288339 - DNA, 513 bp, Homo sapiens
caatttgagaaatgaaagaaaatctaatagttaatacaatgatgagttaagctgaaaatgcttagggtatgaaattatattttttccagtaccatatgcttaataaatccagagttttctggagctatagatgcttgatgcttcagaggaatataaaataacaaactatacatccaaactgcattaatgtgcagtcaacttttgcatatgaactaaatatctaaaaacctggggtgtaattacttataaattaatttgtaggcctgagttgttttatggtccacatcaggaattgtctttgccaayaggggctgataaaaacttatctcatatttctaaaatgaaattcaaaatgtataatttcagttcataattcttcatgcatcctgaattcagcatttgtcattgtagatattctttaagaaaatttaataaaaatttttaaaaagactttcctccatgaaaaaagcttaaaaaaattaaaatgtcttctaactacattttatataaaaa

SEQ ID NO: 288340 - DNA, 635 bp, Homo sapiens
gtagatacaaagtttgcctgagtcagttayacttaagtcttaaccacattaaccaattaaactaagagaatgaaaatcaacaggctagtattggatggagtaaggcaagaggcaaaataactaaaggaattttttgattatctcattgctttccatatatggcctccacagaaatgtaggccatgggtattttggtacaaaatatttggagagggaagctgtacacagaaaaaactgctagcttagaaatagagaatgtacttttctataaatgtattatgattttagagaacactttgaaatctctgctttccaacctaaccattcattcattcatttcttcaacaagcttcatattgaagatgcattgtgtagatagatggaagaagatgcaagaacaccagaagaaaaggagtttctatcccaaagagttggcttttttttcaatctaattgaaatagaacataaaaagttgaaacaattaaagaataattttaagaggcccttatataagggcgtgaatgtttggagatattcagataatcaatatcaaggaagtaattggagtatgaccaggttattaatttattttgagttgggtcttgaagaccaagacctcttttggacctggacaa

SEQ ID NO: 288341 - DNA, 635 bp, Homo sapiens
gtagatacaaagtttgcctgagtcagttatacttaagtcttaaccacattaaccaattaaactaagagaatgaaaatcaacaggctagtattggatggagtaaggcaagaggcaaaataactaaaggaattttttgattatctcattgctttccatatatggcctccacagaaatgtaggccatgggtattttggtacaaaatatttggagagggaagctgtacacagaaaaaactgctagmttagaaatagagaatgtacttttctataaatgtattatgattttagagaacactttgaaatctctgctttccaacctaaccattcattcattcatttcttcaacaagcttcatattgaagatgcattgtgtagatagatggaagaagatgcaagaacaccagaagaaaaggagtttctatcccaaagagttggcttttttttcaatctaattgaaatagaacataaaaagttgaaacaattaaagaataattttaagaggcccttatataagggcgtgaatgtttggagatattcagataatcaatatcaaggaagtaattggagtatgaccaggttattaatttattttgagttgggtcttgaagaccaagacctcttttggacctggacaa

SEQ ID NO: 288342 - DNA, 563 bp, Homo sapiens
aaacaccactatgattctccctttgagagtttggggaaggacaggaatgagaacaataagaaactatttgccaaggtggaaggattcaaaatgctatgcagcaattccctctattactcagataaagaaattgctttttcatggcccttgtcaaagatcaaggaaactcaatacaatcttcaaaaacgaaggtgcagccacttgtcctgaactyaccagtggtcacactggtctgtgttcactgtagagacaaatctaattcaagatggcgtagcataagtggttaagaatacagatattggagccagactacctgagttcaaatcccacttctagcacatatgggcttggtgaccttaacttccccgtgcctctgtgtgctgacttgtaaaatggggctaatgttcctattaattttacaaaatgttgtgaggattaaatgacaaaatacacgtaaaattcaaagaacatcttccggcatctatatatactaagtccttggtatatgtgtattgagccaaaagcagggtgaacatgcattaccacaaactccagttgagtct

SEQ ID NO: 288343 - DNA, 987 bp, Homo sapiens
gcaattctactcctaggtatatacaaaagaaaaattaagagatacatccagggttgtctgtagcagctcacacctgtaaccccagaactttgtggggccaaggcaggaggatcgtttgaggacaagagttcaagaccaacctgggcaacataataagatcctgtctccacacacaaaaaatttttttaattagccaggtatggtggcacacacctgtagtgctagctacttgggaggccaaaggtgagaggatcgtttsagcccaggagttcaaggttacagtgaacaatgattgcaccactgcctgtgtgcacaggcagtaaacaaacctgtgtaacacagtttatctcttaaaaaacaaacaaagatacatccacacactgaaacttgaatattcatagcagtattatctaccatagccaaaaatataagtaactcaaatatcctccaaccaataaatggataaataaaatgtggtatgcccattcagcagwgcaattctactcctaggtatatacaaaagaaaaattaagagatacatccagggttgtctgtagcagctcacacctgtaaccccagaactttgtggggccaaggcaggaggatcgtttgaggacaagagttcaagaccaacctgggcaacataataagatcctgtctccacacacaaaaaatttttttaattagccaggtatggtggcacacacctgtagtgctagctacttgggaggccaaaggtgagaggatcgtttgagcccaggagttcaaggttacagtgaacaatgattgcaccactgcctgtgtgcacaggcagtaaacaaacctgtgtaacacagtttatctcttaaaaaacaaacaaagatacatccacacactgaaacttgaatattcatagcagtattatctaccatagccaaaaatataagtaactcaaatatccwccaaccaataaatggataaataaaatgtggtatgcccattcagcag

SEQ ID NO: 288344 - DNA, 577 bp, Homo sapiens
agccagcattattctaaagtattcaaacattttgtatattacaaatgaatccagaatgttctatcaaatatcatgtcaaacgaacagatgaatgtagattatctgaaacaaacctgtgtaactttcatcatcatcagataaaggcacctctctttttagtagcaactccaactcctctgtttctgctacatccactggacgctccccatgtttattagcttgaaatggatttccaccgtgacgaagtaacagctttactatctgcaacaayaaaaagcaggaagacttagtcccttcacagattgttatcactgcacccattctcttgataatactcatagtatccttctgagtgttacctcatttactctgcatccattcctcaccatctactctaaatcgttattctcttcaagatccattttcactgacactcccctatctgataacctcaactactacaaaaaaatttcctccttaaaatttaaactgggttattttagcaattaatctcatcattttttcatcctgttccatcataaagtcaaatatttattgagaacctataatatctaca

SEQ ID NO: 288345 - DNA, 594 bp, Homo sapiens
tgacacaatgaactctcagaatcgaaatcatacgagtactaggaactactcttttcttggtaacactcttcacaaagttctctgaaattttgttytaaagtatgtcaattgcttgttgctgtcattctggattttttttaatcaaaatcttgagttagagctgggcacagtagcacacatctatagtcccagctactcaggaagcttcaacaggaagatctcttgagcccatcagttcaagaccagcctgggcaatatagcaagacctcatctcaaaaaaaagagttaagtctccatgttgtttagttttatattttgtgtcactaaaaagcaatatatttgaataattttccagaaaaagaatagaaagtatatccaaggatgtttttagcctttttacctgattgatggttggctgatgatagcattctaggtttaaaataattccctttgatctaaaagtaagtctttcttcagttaagagacactttcattcattcatttttttgagacggaatttcgctcttgttgtccaggttggagcgcagtggtgcgacctcggctcactgtaacctccgcctcccaggttccagt

SEQ ID NO: 288346 - DNA, 650 bp, Homo sapiens
attttcttaatcagctgtatcctcagtacctaagcaatgcctaacctataatgagtgctcaaaaacagctgttgaataattgaaagaaagaaaaggaagaagaggagtttagatgactctcgagtgtatgacttatatgtgcagatgaatgatgttacactaattaagatagaacacgaagaggagtgtaatggtggggggtatgctgatttttgagattttgctgaggaaatccaggtggaaatattcagagaacagccaaatatgtaagtttgaagcttaagagaaatgtctgagatagatgtattttaaaatcattacataaatggtagtaaaaactctaagtgtgggtgaaatttacttgagagagtatgcagcatgagaagagggtccagaaagtaaaaatcttgagaaaaccaacacaggggtgtttatgsaaaggaaatgaggaagttacgaagacaagaatctaggaggaaattgagaaggaagagtctggggagctggacgaaagccaaggagaactttgtcccaagaaccaaggcaagagaattttaggaagaatatggtcaacagtgtcaaattctatggagaatttcaaaggataaggactgaaataccactgaggggtctggcagtgacagcatgtg

SEQ ID NO: 288347 - DNA, 622 bp, Homo sapiens
catatctcttctcacctgagggctccccactgtaggataacataaaaactccaacaatgataaagaactctcaaaatctggaccatcatctccactattaccaccattttcttttaaggctagtcaagtgaagtagtgggaatggaacagcaacaaagacacctgtaactagttgtaatcaattagttgtaaagaccaatggactcagaacagccactaccactatttattaagccctattattagctgagcaaataatatttggtctttacaacaggtgttattatccccatttaagagacaaactgagctactaagcagtttttccaaggccatctactaagagatgcagcccagagtatttctgtctgatttcacagtgtgttataccatgactcccctctttcattgcttcttgctacacacattagccataatagtggagtacttcctcttccccaaaattccatgcatatttatrtgggttctaatcagcttctctttattattttccaactttttaggagatatttcagattaatggtcagggagaggagcagttcaggaatttatacctatgttagtccaagtgcaatggtgtttacaactaattgatcacacc

SEQ ID NO: 288348 - DNA, 495 bp, Homo sapiens
tatgtgtgtgaaatatagtaaacatacagaacattgtatttttacattcaattgtattcagtagtatttacctatacatgtatttaaaagtgcttatccttgggaagtaggagtggggggccaaggcagaatgtttaactttttattttgaaagtttttrtactgttgaattttttataagcagcagcattttttttttgtttttaataagaagtaggttttataagaagaaacattctccaagatgtgttaagtaaaaaaagtcaggttcaaaattatgtttatagaatgctatcatttgtgtgttagaaagaaaacttacgtgtgtaggaagaaacacctgtcagcccttctctgaccagttaactcatttttaacttttaaaaccccagttcaagtatcccctttccttggaaaccttccttatttgactgagataaaggatcctctatgcttctgagagatcatttattgcatgctcctataattgttgtt

SEQ ID NO: 288349 - DNA, 401 bp, Homo sapiens
ggtgcagtggtgccatctcaggtcactgcagctttgacctcccaggttcaagcagtcttcctgcctcagccccttaagtagctgggactgcaggtgcacgccaccatgcccagctaatttttgtattttttttagaggcaaggttttactatattgcccaggctgatcttgaactcctgagctcaagtgatccatccgcctcggcctctcaaagtgataagattacaggcgtgagccactgtgcctggccccatrttaattgtttctgatgtcctttattcttttgtatagatccagattctcatctggtgtaattttccttttgctggaatggtttgctttattatttcctatagtgcatgtctgctgttgatgatgtcagtttttgtgtggctgaaaaa

SEQ ID NO: 288350 - DNA, 565 bp, Homo sapiens
aaccatggaggcaccccataagatgaatgaaatgagcagaggccagaccaggaaggcatgaagagacagaagagccacaggggcagtgggataacaaaacagaagaaagaaacaggaaaacatgccgtctacactggagaagagcgggggaatgacagtgtgaagacagaaaatcagaaaggagtggggaaagctgggtgaggcaacaggagaggaagcatggggaagaaaggaccaggcagggcaaggatggggagaggcacagaaacgaaaggccaaatgacccaacacgcagaaagatgtgatccacgagggaaaaagatacaagccttcaatgacgttattagtttcctttgaaatcctgacatgcacacattcagagacccctccttggttcttaaagcaaaaaatgtgtcaggtgcaagagcaacatcaggctctctatcagccccattctragaagacacgcgtaaggcagcaaatgcactttgggactaatggaggagaaatgaggggatgtcctcaaagtactgggtggggaggagaagggaggagagagacctca

SEQ ID NO: 288351 - DNA, 687 bp, Homo sapiens
aaaaactaaaaataagttcttttcttcaattttctgcctggatctcaggattattttgaggacccaaatgagtttacacgcagacaggtgttagtgtattacaactctagattagaaagacctggtccatgacgaaaggtttacatgtcttcacgacctctaaagaatggmctgagaaaatgttcaagggggagtgaggggtcctgggcaagagggcaggaagggctgtgcaaaaccagcatctgctgaaaaccttcatcactactggaaactgctttgtacacatatagattaataaaaaccacccttgcaggtgaaggacacgggtcttatttcataagctattaataaaataaatatttccccacaaaatgcctacccaaccagggaaaataaactatttaacagtaaaattattctaacatcacaaagattcactaaccaaatagtgtcctgattccaggataaagtaagtttcagtaaaaagctcaaagtcacaacagttctatctgtgtcatctccttcttgacagcgcagtgtagaaagctgcagggcaataaatggtcactgaagacaagaggggtcagaaaagactcagcaagagaaaaagaaaggcattaagggaccgactgtgaaaacaactaccaacaccatcattcaaatctaatgagaaaaaattcaaagatc

SEQ ID NO: 288352 - DNA, 644 bp, Homo sapiens
tcactgacttaatcaaattaccccttgctcaagaataacataattatgtgtttttaaaagatctctgtaaaaagtccctaaatgaatttctcttttagtctttgttcctgaaaaagtcaaagacccattgtttttagaaaatggaacaaggtaacctttattgggtacttatgtgccagaaacttttccattgagtactcacaaatgttctgtgagggagatattttctccatttccaagatggggaacacttatgggtacttggctagtaagtgtaagaaaaagaacaaactccagtatatccagttccaaacaccaggctcggtttacgaagccacagtgcctctccccagtcttcccaccatctgtgcctttccttatctcttcatcccacttgcagtggctcccctgggtctgcctgcgggaattttcaaggcatttctcaaatgctgttccttccatgaagcttctgtagattcgctcaccttgtggttaggccttctcatatcacaacggccacagcacttgatgcaacagaacttgatgttattgcctcacacacaccakatactcattatcatcattaaattcatattacttacaattattaaaaccacacacctatccttaaagactgttcattt

SEQ ID NO: 288353 - DNA, 513 bp, Homo sapiens
tggaaagcatagttttagatataaaatattaatgctcctttaggatttaaatttaatgaacatcaaaatttcaaaataattcattattatgaaatcctgataagaaagctcataaaatattacctgtaaagctttcattttaagaacaaactattgccttctttaaaatctttatttgcatgcttcccccattaacttagagattcaggaaaaaataagctaaggaagagctatcatcaaaaccatttaaggcttccagttcacaatgctgttgtaccatacatcaccttggtacagagcctgttttgcaattctgtgccctcacagcagttcccaaagccaattaggtattagcacaggtattctccaaaggagagaagataaacaccatttctatggctacagaaagctctctcctatgggaagaacaaaattgcttgagacatgttttaggaaggcactgataagcatgaagtcttyaggtctttgctgcacacaatgactaaaatccag

SEQ ID NO: 288354 - DNA, 584 bp, Homo sapiens
ggtcttcaaccatcaatgtttgcaccacagggtaccgactcctcaacccccatttctgactggttccctggtccctctggcagccatcctggaagcctgagttccccaacaggagtgacatctgctaygcaggccagggttatgggaactccagtgggcatacttgggccagaggtgcctgggggtcagaataggagcactgaagttcagaaggctcatggaagccccaggtgccaggcagtaatgccagttcttgatcacaagtgacatcagagttgggagacgggagtaataatgggcctggctggcccagcagaggtgtcctgactacctggctgccaccagcaaggatcagggtagaaatctgagctctgtgtctaaagaatgcagtgggcatcagggaatttccctagagggggatcagggaagcacagcagaaaagaatggccaagaagatcctgggagatgaataaactgggtccagcacaacatatacattaatatacataatacatatttatcatatatatctatacatatatgtatatctaatacacatattaaacagttggcgtcagctttag

SEQ ID NO: 288355 - DNA, 618 bp, Homo sapiens
aaacccctgaatctgcacacagtccaccatgggagcagaatttctactagctctggtcttcaaccatcaatgtttgcaccacagggtaccgactcctcaacccccatttctgactggttccctggtccctctggcagccatcctggaagcctgagttccccaacaggagtgacatctgctatgcaggccagggttatgggaactccagtgggcatacttgggccagaggtgcctgggggtcagaataggagcactgaagttcagaaggctcatggaagccccaggygccaggcagtaatgccagttcttgatcacaagtgacatcagagttgggagacgggagtaataatgggcctggctggcccagcagaggtgtcctgactacctggctgccaccagcaaggatcagggtagaaatctgagctctgtgtctaaagaatgcagtgggcatcagggaatttccctagagggggatcagggaagcacagcagaaaagaatggccaagaagatcctgggagatgaataaactgggtccagcacaacatatacattaatatacataatacatatttatcatatatatctatacatatatgtatatctaatacacatattaa

SEQ ID NO: 288356 - DNA, 556 bp, Homo sapiens
ccccaacaggagtgacatctgctatgcaggccagggttatgggaactccagtgggcatacttgggccagaggtgcctgggggtcagaataggagcactgaagttcagaaggctcatggaagccccaggtgccaggcagtaatgccagttcttgatcacaagtgacatcagagttgggagacgggagtaataatgggcctggctggcccagcagaggtgtcctgactacctggctgccaccagcaaggatcagggtagaaatctgagctctgtgtctaaagaatgcagtgggcatcagggaatttccctagagggggatcagggaagcacagcagaaaagratggccaagaagatcctgggagatgaataaactgggtccagcacaacatatacattaatatacataatacatatttatcatatatatctatacatatatgtatatctaatacacatattaaacagttggcgtcagctttagatagaactcattttgtagacgtttacacaaaactgggaatatcagtagaaattaggttataagtgaagctgctca

SEQ ID NO: 288357 - DNA, 588 bp, Homo sapiens
aatgatagggaaataaaaggagagggagcaggaaagcattctgaagccacaggtcctctgaaaactagtttcaggagcgagggcaagagacatcagccaggagataatgctcccattttgctcttatctgtgagtcatttataagtcagatgtttttgaggtgagtaccgcctctgcatcagcacagggamtactgatactgcctcttattgtctgcatatacaccatctgtctacagcttagatatggagataacagtagtgtcattcaaagcaggcacactcttgatgactttttttttttttgagacagggtcttgctctgttgcccaggctggagtgcagtggcatgatcatggctcaccacagcctagacctcctgggctcaagtgatactcttgcctcagcctccagagtaggtgggaccatagacatgtgccaccacatccaggtagttttcttttttttttttctgcaaagacagggtctcactatgttgccaacattggtcttgaactcctgggctcaagcaatcctcctgtctcagccctccgtgctgggattataggcatgagccatggcacccggc

SEQ ID NO: 288358 - DNA, 594 bp, Homo sapiens
ctgttgcccaggctggagtgcagtggcatgatcatggctcaccacagcctagacctcctgggctcaagtgatactcttgcctcagcctccagagtaggtgggaccatagacatgtgccaccacatccaggtagttttcttttttttttttctgcaaagacaggktctcactatgttgccaacattggtcttgaactcctgggctcaagcaatcctcctgtctcagccctccgtgctgggattataggcatgagccatggcacccggcctgctgtccttttcaactggtctaatgtgggtatcaataaacaaaagtagagacgggtgactaggtaaaatttatgcagacatgggcattactcaaaacattttttaatttcctctgttcaaactgctatcatagttgcattccatgtctatgaatatgtatgtataaagtgtgactatgccttgtttataaatctttgcaatcaagacaggtaactatggttttcaaggacagcatgatataagcaagcaaagataagaacaaaacaggcttcagaagcctcttccattcccatggaaaatagaagggaatctagaatgctggatc

SEQ ID NO: 288359 - DNA, 594 bp, Homo sapiens
ctgttgcccaggctggagtgcagtggcatgatcatggctcaccacagcctagacctcctgggctcaagtgatactcttgcctcagcctccagagtaggtgggaccatagacatgtgccaccacatccaggtagttttcttttttttttttctgcaaagacagggtctcactatgttgccaacattggtcttgaactcctgggctcaagcaatcctcctgtctcagccctccgtgctgggattataggcatgagccatggcacccggcctgctgtccttttcaactggtctaatgtgggtatcaataaacaaaagtagagacgrgtgactaggtaaaatttatgcagacatgggcattactcaaaacattttttaatttcctctgttcaaactgctatcatagttgcattccatgtctatgaatatgtatgtataaagtgtgactatgccttgtttataaatctttgcaatcaagacaggtaactatggttttcaaggacagcatgatataagcaagcaaagataagaacaaaacaggcttcagaagcctcttccattcccatggaaaatagaagggaatctagaatgctggatc

SEQ ID NO: 288360 - DNA, 1112 bp, Homo sapiens
ctgttgcccaggctggagtgcagtggcatgatcatggctcaccacagcctagacctcctgggctcaagtgatactcttgcctcagcctccagagtaggtgggaccatagacatgtgccaccacatccaggtagttttcttttttttttttctgcaaagacagggtctcactatgttgccaacattggtcttgaactcctgggctcaagcaatcctcctgtctcagccctccgtgctgggattataggcatgagccatggcacccggcctgctgtccttttcaactggtctaatgtgggtatcaataaacaaaagtagagacgggtgactaggtaaaatttatgcagacatgggcattactcaaaacattttttaatttcctctgttcaaaytgctatcatagttgcattccatgtctatgaatatgtatgtataaagtgtgactatgccttgtttataaatctttgcaatcaagacaggtaactatggttttcaaggacagcatgatataagcaagcaaagataagaacaaaacaggcttcagaagcctcttccattcccatggaaaatagaagggaatctagaatgctggatcwctcccaggcttatgggctcaagcaatcctcccacctctgcattctgagtagctgaaaatacaagtgcatgccaccatccacagttgtttcttttcttttttttatttttgagagggagtctcgctctgtcgcccaggctggagtgcagtggcacgatcttggctcactgcaagctccgtctcccaggttcacattctcctgcctcagccttccaagcagctagaactacaggcgcccgccactatgcccagctaatttttttgtatttttagtagagatgtggtttcaccgtgttagccaggatggtctcgatcttctgacctcatgatctgccagtctcggcctcccaaagttgtttcttttctaaaaaaaawttttttgtagagacaggatccagctttgttgcccaggatggtcttgaactcctggcctctagcgatcctcccacctcggcctcctaaaacactggaattacaagtatgagctaccatgcccagctgatataaccttttattgc

SEQ ID NO: 288361 - DNA, 517 bp, Homo sapiens
ctcccaggcttatgggctcaagcaatcctcccacctctgcattctgagtagctgaaaatacaagtgcatgccaccatccacagttgtttcttttcttttttttatttttgagagggagtctcgctctgtcgcccaggctggagtgcagtggcacgatcttggctcactgcaagctccgtctcccaggttcacattctcctgcctcagccttccaagcagctagaactacaggcgcccgccactatgcccagctaatttttttgtatttttagtagagatgtggtttcaccgtgttagccaggatggtctcgatcttctgacctcatgatctgccagtctcggcctcccaaagttgtttcttttctaaaaaaaatttttttgtagagacaggatccagctttgttgcccaggatggtcttgaactcctggcctctagygatcctcccacctcggcctcctaaaacactggaattacaagtatgagctaccatgcccagctgatataaccttttattgc

SEQ ID NO: 288362 - DNA, 625 bp, Homo sapiens
agctagcagaggcacaggctrggaacagattacttctttctagtgcttgcatgatcagaagcttggcttcagtcactgtgagaaatcacttctcagattcactcttattcctacagtgaaaccctttgaggtcccaataaaagcttgagctattttccagagctcctcctccttagcaaaatatgaatttcacagctctttgagttttccaaaaactccactcagcttttcagcttcccagatgagacttttaattcagcaaatgcctgaatgggaaaagttgctccttttctgggttaccttctccctggaatattggccccacaaattcttgctatcttgtagatctcaatactttcaaattgatatccctccccacttccagattttctatttgttctaaatggagaatggtctgaaacaagcacattaaccattactgaaaacagaattactagactgttatttaaaagctcaagaacaaagcccagaatcttaaggcactatttcattttctcccaaataacatatatcttcaaatacaccttgggacaaaattgttgtaaacatgcatatacaatataagttcttattcaagactgacatattggtacatgaatcaccc

SEQ ID NO: 288363 - DNA, 376 bp, Homo sapiens
atacaatataagttcttattcaagactgacatattggtacatgaatcacccacatctgaagatcacctaagttcaaatcttggctgttagactctggacaagttactcaatctgtgcatccatttcatgattgtaaaacagggatagttttactaccaatgtcataggtgtctttgaggaaataaataaaacacatgaatgtgtttaggaaagttaacatgttacaaatacatgttagcaaactattatkattactagtattaaaataaatgtcaacgtaagtagcatcttacataccatgctgtttggaagatagttatgtgtcttatactggtggtttttctggagttgctcacttctggtgactgcctccccc

SEQ ID NO: 288364 - DNA, 659 bp, Homo sapiens
gttatgtgtcttatactggtggtttttctggagttgctcacttctggtgactgcctccccctctcatatgttgttctcaacctttgctaagtaaagacacatctcactgctaatttctgcagcacaactggtccattcttttaagttatttctgcatagttttcaacagctccttattattttaaagtatttccaaaaagtatacatatcatagctgcaaagaaacatattaacagacagcccaattccaatcatttcatttaaactgaaagacayatgtttaaaaagtgcctcactgttagtactggcatccccagaaaaagacatttactcctcattccccacttaagaattggagctagagttaacatctattttttagagatccactttcatctgaattttccagctatactttatctctacaactctaaaagagacccatctaggattcattctctttgctaaagattgccagggcagggaatgagcacagggtataggaaggagccatgtggagaagtcattaagccacacaccagccttctccaggagaaaaacactttcttgataacctgaaacattctgaatccccaatgaaacttgagacattttacctgcagtcatagacataggaatttaacccaaagtgaaatgag

SEQ ID NO: 288365 - DNA, 589 bp, Homo sapiens
caccagctggcaaaggagaattctccacccttggtaacagtgaatacatcatttgggtttggatgggtgaccctctctataagatgtgtaatatagatgctgagagagagtgggaaggtccttcctttttaatctttagttgtagggggataagcttgagcctgtcatctcttatgttataggagaaactctgcctcagaatgaagccacagcacagtgagaagtgagctgagctctggaaagggagacagagcccrgttgtcattgagctgctggatccagctatgcctgaaaccaaactctattcctccactcccaactacacaagccaataaatccccatttatgattaagctagatttgtggacaggcatgggggctcacacctgtaatcccaatactttaggaggctgaggcgggtggattgcttaagcccaggagtttgagaccagcctgggcaacatggttaaaacctgtctctaccaaaaatacaaaaattagccaggtgtggtggcacatgcctgtagtcacggctacgcaggaggctgaggtgggagaatcgattgagcttgggtggctgaggctgcag

SEQ ID NO: 288366 - DNA, 626 bp, Homo sapiens
tctaaagactcaatctccttgccctgactcaggacaactctgaaagaacagccaagcttcagctgtttcaaatagggtcagcagaggcctttgctgagcctgtattacaggattgggcagagggggaagtaaggctgcttccttcccttccctccactagacactgaccccaagagcaacccttaagagtcatcctgtatgctaatctgcaccttggagttggcttcccagggaatcccacctgcaaaactgcactattatgtatggacacggaggaccaccacagagactctggaaagaaagataaggaagtcttatttctaaatttcctccattgaaatacgaagggcaaaaataaaaagacactgtcaaacttagaataacagggaatgttgtccataaaygtgaaaaggagaaatcaacagcaacagaaaaacatttctaatcagactgtttcatttgtcctataggatatttaggtttcagtgtatcgaaaaatttttacaatgtaaaatatttgatcataagaaaatcctgcaggaactttgcggtcatgaaagagtgagatgcttttcacataaattattactagtatggttacactgcttcacaaaaaaagtgactga

SEQ ID NO: 288367 - DNA, 569 bp, Homo sapiens
cacaggtcttcagactaagatctatatttgagaagctgtgcaaatccacaatgaaaatatctcttccatatttgaacctgatttaagggctgagatcctagactttgatctgacatcccaatgaggataagatttatagatcttaaggggaagaagtgagtgtattttacatgtaggaagcatatgatgtgaattcttatggtaagaggatactgacattgtatttcgcaatcatggccacacttatatcctgttacacatgctcttcttaaaaagttacagacactcctctactgagtggtggggtctacattcccttcacatgaacttggtggggtctttacaactttgggctaagtgctgctgcatgatatccaaggctgggtcatgaacggcagtgcagcagtgaccacctgccccctcagggtgcttgccattggaatcaagtcatcatgttgtsaggaatcccagaccacatgaagaggccatatgtatgttatcccagcagcagccccaggtggtccacacctgacagtcaacattaatttctagacttgtgagtgaacaag

SEQ ID NO: 288368 - DNA, 615 bp, Homo sapiens
ataatccattcccattgtgtcctatctgaatgtcagacaacagaaactgagaggcataacaatgattgttgttttgagccatgcagcaatagatgacaaatacatatgttatatagtgcctcaaaatactaatgttatacaaaaattccatattccagtgtaacatgaaaatgaaagttgcaatgttgttcatgcaacagcccattcaagcaggtttgggaaaygctagcctagagtatcacatctgaattagcactaactcatgatgacaatgataatatattagtagtctgggagtaggtcttcccctaaaacacctatcagaaattctaaaactgcacagaaatattccttcacatgccctgaataaactatctataagggcaattaaagaatgcagaatcttgaccagaaatgcctgtggtcccctgtaatagtgatacaaaataatcacaaaactttgcttcagggtcctaagttaaagaaaacagccagctgcttaacaatggagactctcaggagagacagggccagttgaatgaaaaatcataaaagctttctcttgatgttgttttgtttctgtttttaagaggcaataaagcttaacagtaaaac

SEQ ID NO: 288369 - DNA, 570 bp, Homo sapiens
tttcccttcctctacagtctcccaattggtgtatctatgcagcctcataattaaccacgaatgcatacaaggcaagcgggacaaagcctgccacaaaacacaagcccagcaaatgctcctgactttcattatgatgactttagctccacaaccctcctaaatgtatggctttttaaaattatgtggctcttttttagagacagggtctcactctgtcccccaggctggagtgcagtggcagagtcacggctcatagcagcctcgacctcctgggctcaagtgatcctcccatttcagcctccygagtagctgggatcataggtgtgcatcaccacaccctgctaattttttttattttttattttgtagagagagggtcttactatgttgcccaggctggtctctaactccaagattaaagcaatcttcctgcctcaccctcccaaatgttaggattacaggtgtgagccactgtgcccagctggaattctttaccatttatctctatttccccctgttcacctcacaactctcctggtcctactataattcacctaagtggtaattttt

SEQ ID NO: 288370 - DNA, 569 bp, Homo sapiens
gtataagccaggtttctccagaggaacagaatcaatagtagatatatgagaaacataaaggcactacatgaatctccagaggaacctggctcatataatctctctctctctctctctctctctctctctctatatatatatatatatacacacacacacacacacacatatgagaaacatatatatatatacacacgagaaacatatatatatatatgtttctctctctctctctctmtatatatatatacatatatatatacacacacacacacataaacatatgtacagaaagccagagagagagattgattgagattttaagaaactgtctcatgtaagtggtggggctggcaagtccaaattaagcaggctggaaactcaggcagggtttctatgttacaatcttgaaaattccttcttccttaggaaaactctgtctcttttctaaaagctttcaattgattgaatgaggctcacccatattatggtgggtaatttgctttactcaaagtctacttatctaaatgttaatctcaactcaagcccactgatttaaatggttaatc

SEQ ID NO: 288371 - DNA, 588 bp, Homo sapiens
tgagaaacataaaggcactacatgaatctccagaggaacctggctcatataatctctctctctctctctctctctctctctctctatatatatatatatatacacacacacacacacacacatatgagaaacatatatatatatacacacgagaaacatatatatatatatgtttctctctctctctctctatatatatatatacatatatatatacacacacacacacataaacatatgtacagaaagccagagagagagattgattgagattttaagaaactgtctcatgtaagtgktggggctggcaagtccaaattaagcaggctggaaactcaggcagggtttctatgttacaatcttgaaaattccttcttccttaggaaaactctgtctcttttctaaaagctttcaattgattgaatgaggctcacccatattatggtgggtaatttgctttactcaaagtctacttatctaaatgttaatctcaactcaagcccactgatttaaatggttaatctcatctaaaaatatcttcacggcaacgtctggacttctgtttgaccaaacaactaggcaccacta

SEQ ID NO: 288372 - DNA, 539 bp, Homo sapiens
tcacttgatggtgaccaatatgccatttaggctttctttttaaaattatttttttcattcatttatgtctgactgggttatttcaaaagacctatctttaactttagtcattctttcttctgcttgacctaatccactgytgaaggtgtcaactgtattgttatttcattcattaaatttttcagtgccaggaatccttttttacgatatgtcattaatgtttttttaattgtgtggtggtaggatggtaacagatgctcattataactttgtttgtaaatatgtattctttgatttaacccaccaatactactactactactgccatcattcactgattcaccaaaaattgaataaataattgtcttacttgtttttattaatctttcttacatttacacatagctcacatttgtttcaatatttaacattagaaggtttttgggtctttattttgaaggttggtgatgttttcttgaccagaaatatcacatagtaacttaactcatttatattaattagcctatggtaaaattggt

SEQ ID NO: 288373 - DNA, 1079 bp, Homo sapiens
tcacttgatggtgaccaatatgccatttaggctttctttttaaaattatttttttcattcatttatgtctgactgggttatttcaaaagacctatctttaactttagtcattctttcttctgcttgacctaatccactgctgaaggtgtcaactgtattgttatttcattcattaaatttttcagtgccaggaatccttttttaygatatgtcattaatgtttttttaattgtgtggtggtaggatggtaacagatgctcattataactttgtttgtaaatatgtattctttgatttaacccaccaatactactactactactgccatcattcactgattcaccaaaaattgaataaataattgtcttacttgtttttattaatctttcttacatttacacatagctcacatttgtttcaatatttaacattagaaggtttttgggtctttattttgaaggttggtgatgttttcttgaccagaaatatcacatagtaacttaactcatttatattaattagcctatggtaaaattggtwtcacttgatggtgaccaatatgccatttaggctttctttttaaaattatttttttcattcatttatgtctgactgggttatttcaaaagacctatctttaactttagtcattctttcttctgcttgacctaatccactgctgaaggtgtcaactgtattgttatttcattcattaaatttttcagtgccaggaatccttttttacgatatgtcattaatgtttttttaattgtgtggtggtaggatggtaacagatgctcatwataactttgtttgtaaatatgtattctttgatttaacccaccaatactactactactactgccatcattcactgattcaccaaaaattgaataaataattgtcttacttgtttttattaatctttcttacatttacacatagctcacatttgtttcaatatttaacattagaaggtttttgggtctttattttgaaggttggtgatgttttcttgaccagaaatatcacatagtaacttaactcatttatattaattagcctatggtaaaattggt

SEQ ID NO: 288374 - DNA, 487 bp, Homo sapiens
tagcattattcaaaataatcaaaaggtagaagcacaccaaaatgcccttcaacaggtgaaaaaaataaacaaaatgtggtatatccatccaatggaatatgactcagccactaaaagtaaggaaattttaatatatgctaccaacatgaatagttcttgaaaatatcatgcttgttgaaataagtcagacacgtggaaaaccatggtatgattccacttktatgagatacccagaatatgcatattcacagagaaagaaaatagaataaaagttgtctgggactaggtggaggggaggagtggaggttgtcgttttaagtacagggctttagtaagggatgataccaatgttttggatatagatcgtggtgacagttacacaatattatgaatgcatttaatggcactgaattgtacatttacaatggttaaactgataaatatttttatgtatactttattacaataaaaaataaaaaattttaaa

SEQ ID NO: 288375 - DNA, 433 bp, Homo sapiens
gtcactaataattgcaacacatccacaaccacagcataacartgtctcatatgtaaatgaagtatttgcagttattctatttttttgccaccctgcagaacagggaccctgggtcactatgctattttctatcccgaccacaccttaaggaggcaaaacaaaaagttttcccaggttccagtgaacatgtgatcatttctttttcttggcactaccttgaagatacatacatattttttgttttgcttaaactgcaacttgtatatgtgtcaaatgcaacccaatccattcagcttaaaagtcctattgaaagatttcaccataggagtgtgtttcccttgtggtaacaaaacataattttgtatcagcatttaatagtaaacctacttaggattcattcgggagccaccaggtgaccaaagtactctgctaa

SEQ ID NO: 288376 - DNA, 433 bp, Homo sapiens
gtcactaataattgcaacacatccacaaccacagcataacagtgtctcatatgtaaatgaagtatttgcagttattctayttttttgccaccctgcagaacagggaccctgggtcactatgctattttctatcccgaccacaccttaaggaggcaaaacaaaaagttttcccaggttccagtgaacatgtgatcatttctttttcttggcactaccttgaagatacatacatattttttgttttgcttaaactgcaacttgtatatgtgtcaaatgcaacccaatccattcagcttaaaagtcctattgaaagatttcaccataggagtgtgtttcccttgtggtaacaaaacataattttgtatcagcatttaatagtaaacctacttaggattcattcgggagccaccaggtgaccaaagtactctgctaa

SEQ ID NO: 288377 - DNA, 220 bp, Homo sapiens
cgtacaattccagtaaacacactgagcgtgcggcccctcccaaattctggcaggccactgcacatgcggacagcccagcccaagggcagaatcaggggagaaggaatgcaagaccctcagaagtatgccagcgtataaaatcccaagtcagaaggtcaaaccgaacacttgatctctgaagtcgcccrcttggccctcttccaagtgtacttcctttcat

SEQ ID NO: 288378 - DNA, 633 bp, Homo sapiens
tttgtgtgtcttcttttgataaatatctacttatgtcctttgtccactttttaatggaattgtctgtttgttttactgttgagttgttttaattccttgtatattctggattttagttccttgtcagatgaatagtttgmaaatattttcttttattctacaggttgtctcttcactctgttgattgtttcctttgctgtgcagaagctttttagtttaatagagtcccatttgtctacttttgcttttgttgtctgtgcttttgaggccttagccttaaaatcttttccaagattaatgttctgaagtgttttccctatcttttcttctagtagtgttatagctttgggtcttatgtttaagtctttaatctatcttgagttgcttattgtatatggtgagagataggcgtctagtttcattatttggcatatggatatccagttttcccagcaccatttgttgaagagggtgtcctttcccccatgtatattattgatgcctttgtcaaaaattggttggctgtaggtaagtatagttatttctgggctctgtattgtgctccattggtgtatgtgtctgtttttataccactatcgtacagttttggttataatagccttgtaatatatt

SEQ ID NO: 288379 - DNA, 620 bp, Homo sapiens
ctgctgcttctagataggctctcactctgtcacccaggctggagtgcagtggcatgatcatggctcactgtagcctcaacctcctgggctcaagtgatcctcccacctcagcctcccaagtagctgggacarcaggtgtgtgccaccatgcctggctaattttttaaattttttttttttttaatagagacaaagtttcactatgttgccctggctggtctcttaaactcctgggctcaagcaatcctcctgcctcggcctcccaaagtgccaggattacaggcatgagacactgtgtctggcctcactgagcttctttaatatcattactttgaattattttcccagcatttcatacatttctttttcattggaatctgttgctggagaattattgtggtactttggaggtgtcatatttccttgcttttcgatttctcttattacagtacctgtgcatctggtgtaacagtctcttcttccaattttttggattggctttcataggggaatacattttcctaaagctgtatctatggtgttggtcaggagggcattttagctttgattctgggtgtgcatagtagtgttgtctctgtacaatttcttcagctgtaaac

SEQ ID NO: 288380 - DNA, 1217 bp, Homo sapiens
ctgctgcttctagataggctctcactctgtcacccaggctggagtgcagtggcatgatcatggctcactgtagcctcaacctcctgggctcaagtgatcctcccacctcagcctcccaagtagctgggacagcaggtgtgtgccaccatgcctggctaattttttaaattttttttttttttaatagagacaaagtttcactatgttgccctggctggtctcttaaactcctgggctcaagcaatcctcctgcctcggcctcccaaagtgccaggattacaggcatgagacactgtgyctggcctcactgagcttctttaatatcattactttgaattattttcccagcatttcatacatttctttttcattggaatctgttgctggagaattattgtggtactttggaggtgtcatatttccttgcttttcgatttctcttattacagtacctgtgcatctggtgtaacagtctcttcttccaattttttggattggctttcataggggaatacattttcctaaagctgtatctatggtgttggtcaggagggcattttagctttgattctgggtgtgcatagtagtgttgtctctgtacaatttcttcagctgtaaacwcttttttttttattttacacggtcataggtgaaaggaacttgagccatgtctcagatgagacttcagacccagacatttgagttaatgctggattaagttaacactttgggggactattgggaagacatgattgtgttttgaaatgtgagaaggacatgagatttgggaggggctggtgtggaatgacatgacttggctctgtgtccctacccaaacctcatggtgaattgttwttcccagtgttgggggagagacctggtgggaggtgattggatcatgggggcagatttcccccttgctgttcccatgatagtgagtgagttcttacaagatctgatggtttaaaagtgcatggcacttacctctttgctttctgtctctcctgctgccatatgaagatgtgccttgtgccatgatcataagtttcctgaggcctcccaaccatggttcctgtacagctgtggaactgtgagtcaattaaacctattttcttcataaattacccaatctaaagtagttctttgtatcagtgtgagaacaaactaatgtagggagggactcaacatacagctgacaattaagcagagaagggatc

SEQ ID NO: 288381 - DNA, 596 bp, Homo sapiens
cttttttttttattttacacggtcataggtgaaaggaacttgagccatgtctcagatgagacttcagacccagacatttgagttaatgctggattaagttaacactttgggggactattgggaagacatgattgtgttttgaaatgtgagaaggacatgagatttgggaggggctggtgtggaatgacatgacttggctctgtgtccctacccaaacctcatggtgaattgttattcccagtgttgggggagagacctggtgggaggtgattggatcatgggggcagatttcccccttgctgttcccatgatagtgagtgagttcttacaagatctgatggtttaaaagtgcatggcacttmcctctttgctttctgtctctcctgctgccatatgaagatgtgccttgtgccatgatcataagtttcctgaggcctcccaaccatggttcctgtacagctgtggaactgtgagtcaattaaacctattttcttcataaattacccaatctaaagtagttctttgtatcagtgtgagaacaaactaatgtagggagggactcaacatacagctgacaattaagcagagaagggatc

SEQ ID NO: 288382 - DNA, 635 bp, Homo sapiens
tgaaaagagaggggtgtggaatgcaacatggtaggaagaatcagttaaggaaaagctcatggaaataaaaattaaactatatgcatatgtaaagtgcttgamaaatgtcctagaaggaataaccccaaaaagaacaataggaaagtagagataaaacaaattactattccaggagcctgacatctaatcgccactctagagagagacaaaagagaaaacactaaggaggaacttatcaactagtacatgaatattgaccagaaaggaagtacataagtgtcagattaaaaatacctagcacaataaatgggaaaaaaatccatatcaaggcatgtcattgtgaaatttcataacagcagaaataaaaatgtaatcctaaaatctatcagagagagaaagagaaaaaatatgggaacaacaacaacaggcagaagaggtcagatacaaagcctcaggaaagagcctggcatgatgaggcttcccaacagcaacattggaagctaagggacatgggacactttcttttcaaaattctgggagaaaattgtctcttatcttgaattctattcccacacattattaattgagtatgaaacacaatcaagacattttagatatgacattttttttttttg

SEQ ID NO: 288383 - DNA, 579 bp, Homo sapiens
cttattcactataatgagaacagcacaagaaagacttgtccccatgatttaattacctcccactgggtccctcccacaacatgtgggaattcaagatgasatttgggtggggacacagccaaactgtatcaggtgtccaaaagtatttggagaatttggctaattacagtcccgagcaatcaatttaaattctaagctgaaaactgcaagagaatcttagtctataaatagcataggcacatttaaaagaacttcatcattgtatttataaacttgatttaggagatttgtaagaatcactttagtacttggaaaagttggttagctagacaactgaattattttaaaaagggaatttattatgttgggtttataaatacagataaaatattccaaggaattaagttatacaaatcttcttaaaattattgtgaaatttgaaagatttataaattgaatactatgtctaaattgaacttaaaaacatagggaaaactaagcctttgaatttgtttctgtaataattggctttaaataccaaagtaaattctgaagattatttttcatgcacaaaaaaag

SEQ ID NO: 288384 - DNA, 560 bp, Homo sapiens
tggtgtctggtgagggcttgctttctggctgataaacagtgccttctcagtgtgtcctcacatggtggaaggagccaggggtctctctcaggcctctctaataagggyactaatctcatttatgagggctctgcctccatgatgtagtcgtctcccatagacctcatttctaacaccatcaccttgggggttagaatttcaccatatataggacgtcaacattcagaccatagcagccttccatgccttgtgtctgcttccccagaggccactctcctttccttggccccaaccaggtgtcaccctgagcttcccattctgtgtcccccaacctgaagaccaagcccctgcttcccttcagtccactgtggacttcatgagtgctggccagggaccctctgggtatctgccttgcaggcagacagtcccagggtctccagttctgctctcacttccctctcagcagagtagaggccattttctgtcctgtcctgagacttggccctctccccgaccctccccttgacactagttcagtgggtatttttcaatatcttctt

SEQ ID NO: 288385 - DNA, 1108 bp, Homo sapiens
acaaatttaaacatccatatcaccattagcaaaatatagaatatttcctttgtagtacacatacaccacctcatactctcagtcccaagcaaccattaatttgctctttataactataaattagttttgcttgttttacactcttttgtatctggtttctttatcaatcttgttacatgtagccatattttattctattttttaaccaagtagtattccattatatggctatgccacaattagtttatttatacagtttttggtggacatttgatccctgtccagttttgggatattacaaataatactgctataattattcaccaatgggtcattgggaacatatgcttttaattctctttttaagtacataggagtggaattcctatgtcagatagtaagtgtatgtttataagaaattgccaaactgttttgcaaaatggttgtatcgttttatgttttcagaagcaatgtttgagagttccagttgcttcccatccacatgaacacttgctatctcagtctttttatattttctaaygcgtatgtagtgttatcagaatttaatttacactctcctgatgaataaacaaaatatcttttcatgtacttatttgctctttgcatgtatctattwttgacaaatttgatttcattaatattaaaagcttttgctctgtaaaagatccttttaataggataaataagacaagactgctgaatgtctggggaaagaaaagaaaaaaccatttwaaaaaaaaaagataagctatagtctaggaaaaaaaccacgtatcggacaaagaagtactgtctagaatacataaagaatccttaaaacttaacagctaaaaaaaaaaaaaggcaaaaacttagcagctaaaacaagctaaattctaaaaatctaattagaaatgggcaaaagatataaagagacatttcaccaaagaaaatgtacagatggaaaataagcacatgaaaagttgctcaacatcaccagccattaggtaaatgccaattaagcccatgatgagatatcacagcacgcctattagaacagctaaaaataaaaacaaaacaaaacaaaacaataacgccactaccaaaa

SEQ ID NO: 288386 - DNA, 624 bp, Homo sapiens
ggctattctgaatcttttgtggttccatacaaattttaagattgttttttcttttcttttcttattttcttttatttcattttattttgagacagggtctcactcagttgtccagcctggagtgtatgttgcccaaggtggaatgcagttacaggatctcagctccccgcaacctctgcctcccaggttaggttcaagcagttctcctgcctcagcctcccaagtagctgggaccacaggtgtgtactgccaccctcagctaatttttgtatttttaatagagacggggtttccctatgttgcccaggctggtgtcgaactcctagtctcaagtgatccacccaccttggcctcccaaagttctgggattayaggcatgagcaactgttttttctgtttctgtgaagaatgttattggtattttcatagggattgcgttttgtctgtagattgctttgggtagtatagaagttttaataatattgattcttccaatccaagaacatggaatatgtttcaattttttgatgtcctcttcaatttctttcatcaatgttttatggttttcattgtagagatctttcacttctttggttaattcctaggtaattttatttatggcta

SEQ ID NO: 288387 - DNA, 624 bp, Homo sapiens
ggctattctgaatcttttgtggttccatacaaattttaagattgttttttcttttcttttcttattttcttttatttcattttattttgagacagggtctcactcagttgtccagcctggagtgtatgttgcccaaggtggaatgcagttacaggatctcagctccccgcaacctctgcctcccaggttaggttcaagcagttctcctgcctcagcctcccaagtagctgggaccacaggtgtgtactgccaccctcagctaatttttgtatttttaatagagacggggtttccctatgttgcccaggctggtgtcgaactcctagtctcaagtgatccacccaccttggcctcccaaagttctgggattataggcatgagcaactgttttttctgtttctgtgaagaatgttattggtattttcatagggattgcrttttgtctgtagattgctttgggtagtatagaagttttaataatattgattcttccaatccaagaacatggaatatgtttcaattttttgatgtcctcttcaatttctttcatcaatgttttatggttttcattgtagagatctttcacttctttggttaattcctaggtaattttatttatggcta

SEQ ID NO: 288388 - DNA, 624 bp, Homo sapiens
ggctattctgaatcttttgtggttccatacaaattttaagattgttttttcttttcttttcttattttcttttatttcattttattttgagacagggtctcactcagttgtccagcctggagtgtatgttgcccaaggtggaatgcagttacaggatctcagctccccgcaacctctgcctcccaggttaggttcaagcagttctcctgcctcagcctcccaagtagctgggaccacaggtgtgtactgccaccctcagctaatttttgtatttttaatagagacggggtttccctatgttgcccaggctggtgtcgaactcctagtctcaagtgatccacccaccttggcctcccaaagttctgggattataggcatgagcaactgttttttctgtttctgtgaagaatgttattggtattttcatagggattgcgttttgtctgtagattgctttgggtagtatagaagttttaataatattgattcttccaatccaagaacatggaatatgtttcaattttttgatgtcctcttcaatttctttcatcartgttttatggttttcattgtagagatctttcacttctttggttaattcctaggtaattttatttatggcta

SEQ ID NO: 288389 - DNA, 607 bp, Homo sapiens
atccatcaactgacatcacagacaatatagcacatcattatttaccgtgctaacctttagtggtttcattctacctaagtttttttttgcaattggattacaagttgagcacccctaatttgaaaatctgaaatctgaaatgctccaaaatctgaagctttttgagcacccacatgatgacataagtggaaaatttcacacctgacctcatgtaaggggtcacagtcaaaacacaagcaaacaacacatatttattcagcatccccaaggggaaaataaaattaccttcgaggtaatgaaatataaataaattctgtgtttagacttgggtcscctccccaagatattgcattatgtatatgcaagtattccaaaatccaaaaaaaaaatctgaaatcctagacatctctggtcccaagcatttcagataagggatacttgacttgtataagctccttgaagggagggctcaggcttcaataaagagttaaccttccaggatcattgtatccacccctgtatctcccacaatactgcgcacacagcaggggctcaagcaataactctgcctacatgttagttttctggtgggtagaaactaatttgt

SEQ ID NO: 288390 - DNA, 591 bp, Homo sapiens
acctttagtggtttcattctacctaagtttttttttgcaattggattacaagttgagcacccctaatttgaaaatctgaaatctgaaatgctccaaaatctgaagctttttgagcacccacatgatgacataagtggaaaatttcacacctgacctcatgtaaggggtcacagtcaaaacacaagcaaacaacacatatttattcagcatccccaaggggaaaataaaattaccttcgaggtaatgaaatataaataaattctgtgtttagacttgggtcccctccccaagatattgcattatgtatatgcaagtattccaaaatccaaaaaaaaaatctgaaatcctagacatctctggtcccaagcatttcagataagggatacttgacttgtataagctccttgaagggagggctcaggcttcaataaagagttaaccttccaggatcattgtatccacccctgtatctcccacaatactgcgcacacagcaggggctcaagcaataactctgcytacatgttagttttctggtgggtagaaactaatttgtagaaacaaaaaaatctacatgtatggaccaatagtg

SEQ ID NO: 288391 - DNA, 485 bp, Homo sapiens
cccagtgaaattattaaaaagcattaaaagtattaaaaagcaatgacttgaagcctctgaaaatggtcctcagggcaaataacaaacaatgaaacagttatcatatggccccatttttacaaaagtatttcctcctctctaggtatttctttaatcacatacgtgattttaaaaaatgttctgtcaaatggtgctcaactaataactacgattaattctcagcaatgggatgtggtgtgatttttattttcatttttgcatttttatgcactctgagtttttatttgtaagcatctatcattttaataaggaagtaaatcagcatgaatttttataaagaaggaagtttgggctgggtgcagtggctcacacctgtaaccccagcactttgggaggctgaggcaagtrgatcacttgaggctagcagttcaagaccagcctggtcaatacagtgagacccaatttctacaaaaaacaaaatttaa

SEQ ID NO: 288392 - DNA, 545 bp, Homo sapiens
accccatctgtacaaaattttttttaaaattagatgagcataatggcatgtgcctgtagtcccagatactcagaggctcaggtgggagaataacttaagcctcggagttcaaggctgtagtgagctatgattgtgccactgcactccagcctgggtgatacactgagactctgtcttcaaaaaaataaaaaagaaattgctacagccaccccaacccttggaaaccaccacccttggatgatgakgtgagcagccatcagcatcaaagcaagaccctctgccagaaaaatgattgacttgctaataatcagaggattgttagcatttgttagcaagaaagtattttaaaattaaggtatgtacattgtttttaagacataatgctattgcacattcaatagattccaatatcgtgtaaacgtaacttttatatgcaatgggaaaccaaaaattttgtgtgattcactttaatgtgatattcactttattgtggtagtctggaacaaaacccacaatacctatgaggtaggcctatattgtttaag

SEQ ID NO: 288393 - DNA, 545 bp, Homo sapiens
accccatctgtacaaaattttttttaaaattagatgagcataatggcatgtgcctgtagtcccagatactcagaggctcaggtgggagaataacttaagcctcggagttcaaggctgtagtgagctatgattgtgccactgcactccagcctgggtgatacactgagactctgtcttcaaaaaaataaaaaagaaattgctacagccaccccaacccttggaaaccaccacccttggatgatgatgtgagcagccatcagcatcaaagcaagaccctctgccagaaaaatgaytgacttgctaataatcagaggattgttagcatttgttagcaagaaagtattttaaaattaaggtatgtacattgtttttaagacataatgctattgcacattcaatagattccaatatcgtgtaaacgtaacttttatatgcaatgggaaaccaaaaattttgtgtgattcactttaatgtgatattcactttattgtggtagtctggaacaaaacccacaatacctatgaggtaggcctatattgtttaag

SEQ ID NO: 288394 - DNA, 305 bp, Homo sapiens
ttcataattctatatttaaaattataaaatttcacaatagactcaaataaatcacaatcagaattccagtatacgctttttatcaaaattgacaacattctggaatttatatacaaattcaaaatggctacatctagttaagataaacttggaaaaaaaaagttgggagagttatattactatttatgttggagttcaggatctagarcaaagtctggtgaattataaggaatctttttgggggagtgagagggaggatctatagtccttgagaattgggctctgctggtgagtttaaagagagg

SEQ ID NO: 288395 - DNA, 590 bp, Homo sapiens
ttatagccataatatataaagccgtgccatattcaataagaaagcaatcacaagctgacagagaaaacagtcaaattataccaacaggcagttcaccaaaaaatacatgcatattgccaataaataactaaaactatttctatctcatttgtaataaaacataatttcagayaaggtattattctttccccatcagattggcaaaaagtttacaagattgataccagccagggttggtgagggtgtggggagagagacattctcaggctgtccactcttttcagagacgagtttggcaatatgcattaaacatgaagggtgggcatgaaccttgaccagttccactgctaggcatgtaccccacagaaatatcagtatcaccatatatgcacaaagatgttacatacaaagaagttcctttcagttatactaacaaaattcgagccagtctaaatgtctatgagggatgtagttaaagtacagcacatccaggccaggcatggtggctcacacctgtaatcccagcactttgagaagccaaggcaagaggatcactttaagcccaggagtttgagatcagcctggacaat

SEQ ID NO: 288396 - DNA, 518 bp, Homo sapiens
tattcctgaaagaaatagccataatgaataaatactagtacttcaggcctgttacctgttaacactctccaaataaataataactcaggtcttcaattctaatgaaagaccaacactcttaaagaagagaaattcaggctctattgccaaacttaaaatgaatcattgctttattttcacctgaagaaataccagaattctatgattttggagtatcagcttattaagaacttttttaaacattgcacctgggaaagtgtcagattgcttcttgcaacgtgttcaacagayggtgaggaactgaagccatcagtccaacaactcatgaagaactgaattctaccaagagccacttaggcttgaaagtagatctcttcctttttaagtttaaagattactacagcccagatggcagcttgattatagcctgtgggaaactctgaagtagaggctccagttaattgtacccagattactgaccaatattaactgtgagataataaacatgttttgtttaa

SEQ ID NO: 288397 - DNA, 464 bp, Homo sapiens
caccttgagatttgccaaagttggcctggttctatggtgacagctacaggaggaacccttctgactccagarcaaactcttgcactgagcctgccctagaccaccacacctctaacagaccctcttcctggacacaggtagctctgctactgggctgaagtctggagtcctccaggctggaggtaccactcagctgtgagccctgggggcagtgaagctgtggcttgcgctacgttggtgttttcttgccgagaactgttttaggttatgactgtccataatgggattgaattgtaatgatttggtattgaattccccttaacattcaagggaaatggatcctgactgtttgtaaatgtgtttgcaaatagtggaatgatcagactagacctgtgtgtgcaactcctttcttggtatgccaaaagcaggggtggtcgggatgctgagcagagaggaggaggtga

SEQ ID NO: 288398 - DNA, 484 bp, Homo sapiens
aattttctgtgtcagtctgtttgagttgctataaaggaatacctgagaatgtgagtatataaagaaaaaaaaattataaagaaaataggtttatttggctcatggtttttcaggctggacatgaagcatagtgccagcatctgctttcagtgaaggcttggaagmttttactcatgacaaaagtctaaggggaagtcagcatatcacatgtctagagagagaacaaaagtgagagggagaagatgccaggcccttttaaataactagatctcacatgaatccatgcactgagaactcactcattaacatgaagtcagcacaaaaccatttatgaggaatctgcccttgtgacacaaacaccttccattaggcccaccttcaaatgtgctggtcacattttaacatgagatttggagaggacaaacatttaaactatgttacgctctgagtgccaattctgtacagctgaatgatcactatcata

SEQ ID NO: 288399 - DNA, 560 bp, Homo sapiens
atgacataattgagttgtagggagaagatacagctatgaagctgagaagtggtaagatggtgaacagatttagtagcacyccttgtggtacccttgtgggaaaaacaaatagatgtggcagaaatgagttaatttatgtgatttacaggaagcagataaatagatcaccttgacctaacttaatagctcttatcgtcagggttctgactttgaacttgaactattaagttgtgttattaatgacatataatagcagaaaaagcctgcttataaattttacatgtaaaaaaataaaaacaaatatgctaactaatatattggattaaaacccaatacatttgcacaatcataaaattatcgtcctgtaactatttaaataaaataactgaaaagcagtaaaataaataaatcttgccaaatataagaataccttgagtaaataaactgaggtgttttatttaactttaaacacaccattcttaaagtatgagacctcattaaaaagtcaaatataatcttagatcactttaatatataaaatatataattatattaactaa

SEQ ID NO: 288400 - DNA, 1121 bp, Homo sapiens
atgacataattgagttgtagggagaagatacagctatgaagctgagaagtggtaagatggtgaacagatttagtagcactccttgtggtacccttgtgggaaaaacaaatagatgtggcagaaatgagttaatttatgtgatttacaggaagcagataaatagatcaccttgacctaacttaatagctcttatcgtcagggttctgactttgaacttgaactattaagttgtgttattaatgacatataatagcagaaaaagcmtgcttataaattttacatgtaaaaaaataaaaacaaatatgctaactaatatattggattaaaacccaatacatttgcacaatcataaaattatcgtcctgtaactatttaaataaaataactgaaaagcagtaaaataaataaatcttgccaaatataagaataccttgagtaaataaactgaggtgttttatttaactttaaacacaccattcttaaagtatgagacctcattaaaaagtcaaatataatcttagatcactttaatatataaaatatataattatattaactaawatgacataattgagttgtagggagaagatacagctatgaagctgagaagtggtaagatggtgaacagatttagtagcactccttgtggtacccttgtgggaaaaacaaatagatgtggcagaaatgagttaatttatgtgatttacaggaagcagataaatagatcaccttgacctaacttaatagctcttatcgtcagggttctgactttgaacttgaactattaagttgtgttattaatgacatataatagcagaaaaagcctgcttataaattttacatgtaaaaaaataaaaacaaatatgctaactaatatattggattaaaacccaatacatttgcacaatcataaaattatcgtcctgtaactatttaaataaaataactgaaaagcagtaaaataaataaatcttgccaaatataagaataccttgagtaaatwaactgaggtgttttatttaactttaaacacaccattcttaaagtatgagacctcattaaaaagtcaaatataatcttagatcactttaatatataaaatatataattatattaactaa

SEQ ID NO: 288401 - DNA, 607 bp, Homo sapiens
gaagtagatatataattcatattgcatattgaataccatgtgatttgtactatttgctaggcaagctattgggcttcacataacctcactaacctaactaactttgcataaccctcacgtaatcatctcagagtttgctcccattcagaatttcctttgatgttattattttcaaagtgtcaaaatcaacatttttttattttttaaaaartggtattgttctgcaacaatcccttctgattttgctaattttattgagatgtagtatttacagcaagaaatatccctgtatatctgagtgtttgaaaatggttaagttttcagggaagtctgtcagaatcatacactgtgctttcaatcctatgttccttgagatcaaaaccatcttttttatatgctgaaagaggagaatattgagaaacttttagtgtttcctagataagtgttagtctcctactgcaggggttattaacatttcatatgttgagaagacatcgctcttcagtaaaagccgaacctttggcttgagacagtgtgagacaaattcagccagtgaagtggtgagcaatgttcctcatgagtttcaagcgggagtttcatagctacc

SEQ ID NO: 288402 - DNA, 607 bp, Homo sapiens
gaagtagatatataattcatattgcatattgaataccatgtgatttgtactatttgctaggcaagctattgggcttcacataacctcactaacctaactaactttgcataaccctcacgtaatcatctcagagtttgctcccattcagaatttcctttgatgttattattttcaaagtgtcaaaatcaacatttttttattttttaaaaaatggtattgttctgcaacaatcccttctgattttgctaattttattgagatgtagtmtttacagcaagaaatatccctgtatatctgagtgtttgaaaatggttaagttttcagggaagtctgtcagaatcatacactgtgctttcaatcctatgttccttgagatcaaaaccatcttttttatatgctgaaagaggagaatattgagaaacttttagtgtttcctagataagtgttagtctcctactgcaggggttattaacatttcatatgttgagaagacatcgctcttcagtaaaagccgaacctttggcttgagacagtgtgagacaaattcagccagtgaagtggtgagcaatgttcctcatgagtttcaagcgggagtttcatagctacc

SEQ ID NO: 288403 - DNA, 499 bp, Homo sapiens
gaaaagaaaaaaagacgactacaagtatctaggaaacaaataatagaatggtaggagtaagtcctttcttatcaataataacattgaatataaattgactaaattctctaatgaaaatgtacattgactgaatgaattaaaaattataccaaacaatctgttgcctacaagaaacatacttcccttatraagacccagatagcctgaatataaaggggaaggacaagatacttcatgccaatggaaaccaaaaaaagagcagtagctatacttgtataagacaaaatagatttcagacaaaaacaacaaaaagagacaaagaaggccattatgtaatgataaaggggtcaaatcagcaagacgatttaacaattataaatatatttgcacctaccactggagctcccagatataaaaagcaaaagttattagagctaaagagagagttagacaaaaggaattttggaaaccacacaaacaaatggaaataaaacaaaat

SEQ ID NO: 288404 - DNA, 1074 bp, Homo sapiens
gaaaagaaaaaaagacgactacaagtatctaggaaacaaataatagaatggtaggagtaagtcctttcttatcaataataacattgaatataaattgactaaattctctaatgaaaatgtacattgactgaatgaattaaaaattataccaaacaatctgttgcctacaagaaacatacttcccttatgaagacccagatagcctgaatataaaggggaaggacaagatacttcatgccaatggaaaccaaaaaaagagcagtagctatacttgtataagacaaaatagatttcagacaaaaacaacaaaaagagacaaagaaggccattatgtaatgataaaggggtcaaatcagcaaracgatttaacaattataaatatatttgcacctaccactggagctcccagatataaaaagcaaaagttattagagctaaagagagagttagacaaaaggaattttggaaaccacacaaacaaatggaaataaaacaaaatwgcccgggggttggggactccagtcctaaaggaaagatattgagatattgaagagatatctacacacccatatttattccagtactattcacaatagccaagatttggaagcaatctaagtgtccatcaactgaggaatggattaaaaaatgtgatacatatacacaatggaatactatttagccttaaaaaataacaagatcttgtcattttcaacaacatgattggaactagaggtcattaatttaaatgaaataagccagtcatagacagaaaaactgcatgttatcacttatttgtgaaagctaaatattgaaacaattgaactcatggagatagaaaaatgatagttaccagagactgggaagtgtagtggggattggaggagaagtagggatgtttaatgggtacaaaaaatagttaaaataatgaataagattcagtattcgatagcataacaaggtgactatagtcaawaataatttaattgtgcatttaaaaataactaggccaggcgcagtggctcatacctgtaatcccagcactttgggaggctcaggtgggtggatcacctg

SEQ ID NO: 288405 - DNA, 473 bp, Homo sapiens
tttattaaggagttgtttgagctcctgatacattcttcttactaatccgttgtcacatagatagtttgcaaatatttctctcattcagtaggttgtctcttcactttgttgattgtttcttttgccttgaagaagcttgttaacttcatgtgattccatttgtctatttttgctttggtcacttgtgtttgtagggtattactcaagaaacctttgccaagtccaatgtcctggataatttccccaaagttttcttytagtagtttaatagtttaaggtcttagatttaagcctttaattcattttgatttgatttttgtaaatagcaagagataggggtctagtttcattcttctgcatatgaatatccagttttccaagcactatttattgaagaaactgtcaaaaagagactcaatacagtgtttcctcattgtatactcttggcactttgttgcaaatagtttcattgt

SEQ ID NO: 288406 - DNA, 673 bp, Homo sapiens
atcaacaatttagcaagtaaatttaatgggatgttcttttctcccctggcactcagtttaccagtctcaggcaatggtttcccaaatatacaagccttcacaccaggtctgtaamatccccaatccaggaacctctttgctaattatagagagggcattaaagagaccaagcttccagtccagtggttctcaacttctgttgcctaggttaaattctatatccattaaataagaatctttgaaaaaaagatggaaacagcaataattttaaagcttcagaggtattaaaatgtgtgcttaagttgaaagccactcttgatgaggatttcttcaattgtgaactatagacattttaggacagttaattctttgttgggtgttgggtgctgtgttatacattgcagaatgtttagcagtattcttgacctctacacattagtggtcagtatcatccacaccttcccactgttaataaccaaaaatgtgttcagatattaccaaatgtcttctggggagcaaaatagcctctcattgagaaccactcttctagaccaaggtctgctataggatctcaaacatcatcctattgagtggttctcatactcagcatgtatcaacatcaccaggaagggttgctcaaactcagattgctagattctacactgaaagtgga

SEQ ID NO: 288407 - DNA, 673 bp, Homo sapiens
atcaacaatttagcaagtaaatttaatgggatgttcttttctcccctggcactcagtttaccagtctcaggcaatggtttcccaaatatacaagccttcacaccaggtctgtaacatccccaatmcaggaacctctttgctaattatagagagggcattaaagagaccaagcttccagtccagtggttctcaacttctgttgcctaggttaaattctatatccattaaataagaatctttgaaaaaaagatggaaacagcaataattttaaagcttcagaggtattaaaatgtgtgcttaagttgaaagccactcttgatgaggatttcttcaattgtgaactatagacattttaggacagttaattctttgttgggtgttgggtgctgtgttatacattgcagaatgtttagcagtattcttgacctctacacattagtggtcagtatcatccacaccttcccactgttaataaccaaaaatgtgttcagatattaccaaatgtcttctggggagcaaaatagcctctcattgagaaccactcttctagaccaaggtctgctataggatctcaaacatcatcctattgagtggttctcatactcagcatgtatcaacatcaccaggaagggttgctcaaactcagattgctagattctacactgaaagtgga

SEQ ID NO: 288408 - DNA, 560 bp, Homo sapiens
ggaagcctggtgaactcagatatatcttttgtttatgatattctcatgtgcttctggtgctcatcacagtttgtgaatagaactgattgccctcaagtgccatttcttctgctttctgatgctattacagtctttttagaacactggccataggtatcaatttttggtgtgaatattgtggttactgattgtaaaaggtatttgctgtgattcttagtgacccaatagtcttcatgaaatacacataaatgcctagacattgctataaaaacacatagtgaattaacatttggggatatatttttaattaagtttggmtatgtagaaaattattaatatttttaggaaacaagtatttgaagaattgtccatataagtctcccaaccctaatccttcctcatcgtcataaccaacctactcaactccctccataataaaagcatatatatggtaagtgacatatttacttttttgttctttgaatttcatacaaccaatgatcgattttttcttgagccagtgactaggagaattatttctttaatcagccatgtgggta

SEQ ID NO: 288409 - DNA, 560 bp, Homo sapiens
ggaagcctggtgaactcagatatatcttttgtttatgatattctcatgtgcttctggtgctcatcacagtttgtgaatagaactgattgccctcaagtgccatttcttctgctttctgatgctattacagtctttttagaacactggccataggtatcaatttttggtgtgaatattgtggttactgattgtaaaaggtatttgctgtgattcttagtgacccaatagtcttcatgaaatacacataaatgcctagacattgctataaaaacacatagtgaattaacatttggggatatatttttaattaagtttggctatgtagaaaattattaatatttttaggaaacaagtatttgaagaattgtccatataagtctcccaaccctaatcmttcctcatcgtcataaccaacctactcaactccctccataataaaagcatatatatggtaagtgacatatttacttttttgttctttgaatttcatacaaccaatgatcgattttttcttgagccagtgactaggagaattatttctttaatcagccatgtgggta

SEQ ID NO: 288410 - DNA, 596 bp, Homo sapiens
tcaaaaggcaaaaaatgccatgtttgtgtggacatgaggagattcatttataatgtctagtcagaataaagccacacaaggatacattgaaagagtggcattttggggtgtttgtgaaaccaggtattgaactgtggsagagaattctgggctgtacagctggaaggaaatgtagaaatattggactcttgggagctagaggcaagagtgggccagagagtgggagaaaagagggaagcatatcgccttaaaaaccaatttctctgaaggctcaactgacacttttgccctcaccaaaggtgaatctatctaccttatatacattgagggagaaaaataattttcttactaaaaatgtaggaaaaaaagttttccaatgagaattttctgttaaaacatgaaaaggatcactttaacatgatccagtggttggaaattaatttatttccacattagatatgtttaaggttcattttatgtgcatttgcaatgttttataacaatatcaaatttcaaagtaaagtgtaaagaaaatacttagttttgaaaggctcagttatttaaaaattatttttagccagaacgttacagcataa

SEQ ID NO: 288411 - DNA, 642 bp, Homo sapiens
taggtcaaatgacattttggaaataaacttaattagaatgagagacaagagctttcaakgggagttgctatctcataatccagatatttgggttggatttattaaactttgagaaaagaaaaataagaaaaaacacaattgatgatagctggcctaattccaaaactataaggactatctcttctagacaaaagattttctatctattaacatattaacattttttgagatttttaatttgaatgcaaactttacttttttttatcaaacaagattaagtcaaggaagcggattcggtaggattattgatagcattaagagatttattatagtaaatagacattacatggttctgggaagagatgaggatgtaaaatccccagaattccagagagctggaaaatcaaagagaaggtcacattaaccagcctgactgaagcactggcttgggtaggcagttgaagcttgcagggaaatgctgtgaagctaatgactttcagcctccaaagtaagcccgtgactgggaaacttggggagaggtctatgggaagctattacctctatgtagctacagcttctgtgggtctgttgccaagccttagcaggaggctgccatttgtcaagcatacactagaaaaaaat

SEQ ID NO: 288412 - DNA, 642 bp, Homo sapiens
taggtcaaatgacattttggaaataaacttaattagaatgagagacaagagctttcaaggggagttgctatctcataatccagatatttgggttggatttattaaactttgagaaaagaaaaataagaaaaaacacaattgatgatagctggcctaattccaaaactataaggactatctcttctagacaaaagattttctatctattaacatattaacattttttgagatttttaatttgaatgcaaactttacttttttttatcaaacaagattaagtcaaggaagcggattcrgtaggattattgatagcattaagagatttattatagtaaatagacattacatggttctgggaagagatgaggatgtaaaatccccagaattccagagagctggaaaatcaaagagaaggtcacattaaccagcctgactgaagcactggcttgggtaggcagttgaagcttgcagggaaatgctgtgaagctaatgactttcagcctccaaagtaagcccgtgactgggaaacttggggagaggtctatgggaagctattacctctatgtagctacagcttctgtgggtctgttgccaagccttagcaggaggctgccatttgtcaagcatacactagaaaaaaat

SEQ ID NO: 288413 - DNA, 412 bp, Homo sapiens
ggttttctgaagcatgtattatgtaacatttcacagagcatgcttatttgaacattagattaaacttattatttaaacaacattcttgacacttttacttgtttaacaccaaccttgcaagaactgatacatttggaatacttagaataatctgactttatgttgtttttatatttcctagtatgccctattatacctaatttactgaagtaatggtgtcaaaccaaatgtagaccttgaaatcatttgtagaactttttctaatatgtagccaagggaactatcttargtctggcctctggaggacagaatctgcacacatttttaaaaacaatcaaacaaaaaacacaacctaaactattactatcacaacccccaaaaaactccctgagttatttctgtaattctgatg

SEQ ID NO: 288414 - DNA, 519 bp, Homo sapiens
tctgcgtgaacatcactaacctgtcccagcagcttgccctrtgcagtacaaagactaatgaagggtagctacaggcaccaacagacataagcaagtcaccaaggaatagctccaggataacaccacaccacatcccagtgacagtgccggcttgggagccagactgcttggctggttcaaatcctgcttctatcccctgccagtggtgtgacctcgggagagttcgttacgtttcccatacctcagtgtcttcatcttaaaaatggggatgattatcataaagtacacatgaagctgaataaacacatagtaagcctgtgtaagtgttagctatgattccatttatattgagctcaataatgtgcaaaaataaacaacctgttgttaggaacacaatcgtgcatggtaaaactatatcgaggagtgtgaatgctatacccagaagtcagcacagggcttctctgttaggggagaactgaaaggaagacagatacccggggtcctcccagctcctataat

SEQ ID NO: 288415 - DNA, 604 bp, Homo sapiens
agcatgggttgttgaccacattagtagtatgagcctcagaggaatgaagtgaaaatggtagcactgagcaatyatagccaagaagaaatagcttataattctctacatatttctttttgttattttagtacaaacacattaggtaaatgaagtattaatatataagaccattaaacaaacccttgtatcttgcattagtctctagaggaaatatattatcccttcccttcccttctcctttcttccttccttctttccttccttccttccttcttcattccttccttcttgtctttctgccttactttagcaactatatttaaagtcctattccagagaacaggaaaatacaaaagaatgagacaacattgattttacaatattatttggttaaaaggctaataatcagtaaatggagaaaaagtgttgttcacaccaattccttcagtgacatagactatgagacatatgtctaggtgggagacatgagatatggaggtaattagtgagaactaaggccaaaagattaacagaatactggttatgttaaattagattttatcctgaaaaccacaggtagtcattgaaggatctggagacaaag

SEQ ID NO: 288416 - DNA, 566 bp, Homo sapiens
acatggttgtacaactgcacccagtctcctttcttccctaagggagcacctggaatggggatctgtctcccagatcagaatgacatatccccaagggcaggattttggtctcattttttccatcacgggctccctgaaggaagatgggaggctggccctctctgatcacacttggggtttcatcaaggaatggacagagggcaggagccacatcttgttataacagcaagggcagggacagcatggataaagaatgtgctgcatacggaaataagtgctgacagatgtgcttacctgggtaggggtggatgccattggcgaacacagcttccgcagcaggttgcccattggcctgtggggggaggccggtgaagccattcaccccaatgggggatgggatgctaggcacrgctggtgcagtgatgcccggaggggtgctgccacctggttccaggcatacagaagggtggaggaggaggggaggcaagcagaacaaaggtgaggaaggcccacccataaagcttcactcaactgtttccaaggacctgcggatagacttggacctc

SEQ ID NO: 288417 - DNA, 557 bp, Homo sapiens
cctcagtcagggtcctggtgggggcaaggatgtagaaagaagagtaggggcccctcccctggggcgtttcctggcatgctgcctgtcctacacttagatacgagctggagagagrtgtccagaccctgaatgccagggtgggagggaaaagcattccgaaggaggaagaacaccacgcaggacttggagaggggcggcaggcctctggagaggagagcccagacagctgcacaccagctgcatgccttcacccagtcctggcctgggacagaccttctcaatcttcactatcccacctccttcccttcccctgccctcagctctgcagtctggtctaggaacgggcaactctttcccagggcccccacctctctccactgctgagacaggagggctgccaagtgaggggcagggaagctgcaaggttcagatgcctggaggagagaagacaaggccccagaaacaagggtcattgactgcctgtcagtctgtgtccccctgtgggagatggggaaatggcttcggtccccacctgtctcctctgaaggagggtatgg

SEQ ID NO: 288418 - DNA, 1158 bp, Homo sapiens
cctcagtcagggtcctggtgggggcaaggatgtagaaagaagagtaggggcccctcccctggggcgtttcctggcatgctgcctgtcctacacttagatacgagctggagagaggtgtccagaccctgaatgccagggtgggagggaaaagcattccgaaggaggaagaacaccacgcaggacttggagaggggcggcaggcctctggagaggagagcccaracagctgcacaccagctgcatgccttcacccagtcctggcctgggacagaccttctcaatcttcactatcccacctccttcccttcccctgccctcagctctgcagtctggtctaggaacgggcaactctttcccagggcccccacctctctccactgctgagacaggagggctgccaagtgaggggcagggaagctgcaaggttcagatgcctggaggagagaagacaaggccccagaaacaagggtcattgactgcctgtcagtctgtgtccccctgtgggagatggggaaatggcttcggtccccacctgtctcctctgaaggagggtatggwgctgggttttgtttttccttttgttttattttttgcctgtaagcactttaaagatgttattccactgcwtgtggcctccaaagataagaagtgcatactcattctaccctggaatggaatacatagtttttctctgagtgcagtcaaaattttctccttatctttggttttgagtagtgcgactatgatgtgcctaattatggttctgtttgaatttatcttgtttcagagttcattatgcttcctgagtctgtgaatttatgtctttggaaagattccaagcattattttttcaaatatttttttcagctccattctttctcctgtccttctgggacttcatttatccatatgttagagcttctgaaattataacacaagtccctgaggcacagttgattttcttcccagtacttattttctctcttctttagattagatggtttctgttgatgtaaattcaagtttaccctctctttcctctgtcatcttcattctactgttgtagaagtcttcatttttaaatttcagctattgtatttttctgtttacttttttttctttctctgctgagtttgcctaccttttcattcattatga

SEQ ID NO: 288419 - DNA, 569 bp, Homo sapiens
caatagaatttcaagatccctctcattttaaatatcaaatactagttacctaagtgattgattattaaatgtttagaattttttttccatttcttccttcactcagcctgcactgtgtccccgttagtgaggcttaacggtggggcagaagcggtgcttccatcccacatgtgtgtaggtggtggagcagcagaggttgccgagcctgattttcatcgcctgcacctctctcatctcaaagggatccaggaggtgcacgtgtgtgtgccagtgggaaagccctggggccctaggccaccacctgacctttgcctgattcgtgagcacagatgccattttagggccgagactctgctgaaccacagcttggtgagtccaagccacacaggcaggttgaagttgggctctgttaacagaaagggatatttcctcaggggaagaaaacaaaacaaaacctgtttccccaagtggctgtgtgtggctagaagggggagagcatcagtaactgcagcagctgtgccctccctccctgccrtgagccatgctgagcgcctccagcggccggggat

SEQ ID NO: 288420 - DNA, 544 bp, Homo sapiens
atgtctgttttcatttatttcaaagaatttttttagaattttttttttatttctgccttaattttattgtttacccaaaagttattagggagcaagttgtttaacttccatattatgtacctttgaggagtcttcttggtattgatttctatttttattccactgcggtccaacagtatgtttggtatgattttgattttcttttaatttattgagacactttatggctgagcatgtggttgatattggagtatgttccatgtgcagatgagaagaatgtatattctgtggttgatgagtggagtattctgtagctgtctattaggtccaattgttgaatttgagtccagaattcctttgtcaattgtgtattctgtggttgrtggagtattctgtagatgtctattaggtccaagtgttgaatttgagtccggaatttgtcagttttctgcctcaatgatctatctaatgctgtcagtgggatgttaaagtcccccactattatcatgtggctagttttatacagttgtaaccaggccttgtc

SEQ ID NO: 288421 - DNA, 989 bp, Homo sapiens
  misc_feature (1)...(989): n = A,T,C or G
atgatttcatgcttaattgtgcagtacccaactgtgtttctaataatgacccaattttataagaacacattctgcttggtaaggtctgctgtttatggcaaggatgtttataatatattttagaaagtggttttttctttttttatccacagaagttttaaaagttttaatgttccagatatttttcctcaacgacttcacttttggacaaagctggataaatagggtattgctgaatgttactgcataaaaattgccactgcctacagaggaggtaggatgtacagttcacgaatttcctttgaagggttagagacgatgatccatatttaacaacagagttcagttcatatgctggtctgtactgccagcaattaagcagtaaaaatacttcagtcaaaatctaaacaggctacttgaaatttctcgaaaaactaaaaggaaaaagaaatctatcctgggagcattattttcactrccagcttcagtgatacaatgcaaatagctctgcctttttaatagtttaaatgaagatgnnnnnnnnnnnnnnnnnnnnnnnnnnnnwgccaagcccagtcaacctccagaatgacaagagataataataaaatgattattgctattttaatccaccaagtttagagtcacaatagagaaccaacagggtttttctgttatctgttaatgcataacagcctaccacaaaacwtattaacttaaaataaccatttgtcctacattatggttttgtggaccaggagttcaggaaggtcttggttaggtgggtcctttctaatccatatatccatatagtgtcagctgtggtgggtgaagatgcaggatgcttcctcagtcacatatttggagccttggtactctttgtggtctctcctctcttcccctccctctccatgtgtcccaccctctgggcctctctacatggttggtacttcccccagagtagctagacttctcacagggcagcagac

SEQ ID NO: 288422 - DNA, 520 bp, Homo sapiens
cctggtcaccccatttaaaattacaacacccttcctctgcagtccaagtcctccttccttgctttagttgtctctatagcatttgccaccatctgacacactacatattttacttatatattgtctgtctcctgaccctaccacatacacttgctcatacactcaagtgtaagttcagggaattttgtctacaaatttctgcatctctgatgtctagaattgttcctagcacatagtaagttctcaataaatatttgtagaatgaatgattgaggmctaattaaaatattactatcttaatgaagcttttctagtgtccccaggcctgactactttcttttctatattcctaatacttaatacacttttcattataacttttatcacattgtatttttatggaaaacacatttaaagctcttaaatttagccagatggtataattcaaaagtacatttttgtttaatagactgaaacctcacattgtacagatttgattgaatgattacagaaatcataa

SEQ ID NO: 288423 - DNA, 1101 bp, Homo sapiens
atgcaactcctcagaatgtagacaataaaacttaccaagcagccatttacccttaggtgacagcctctgcttatgcagtaagcttgttacagtaaagtccccaacgacacacagagaagccacagccaaactattctaaggcttctctgaatcataaagaaaagcttttatctgtatcaaaatggttgaaaaatctagcatgttcttaaaaaaasaggatgcaccaagtatttagaatgtatctattttatacataagcaatctctggtgcatgcttatataagtagtctgtacaatgtaaaagcacaattttttttcttgctaatgtagactgagtcctttcatggtgacaatctactccaggatcactttttccactctaatctggtccctctgtcatacaaaatgtttgggagctgccacttactgctcttactgtataatagttaggacataagctaattttaatattggcctaaggaaattttgggggagagataaatccactaaaaaaataaatcaagtattccaaactcaaaataaaaaaaaattaaggactatcacwcctcctgcaattgcagaatcactcactttgccaaggtgcattagaaactgtcagcaacatgtttgggaccagtgaagcacaggaaataagaaaagtaccgctttcgaataataccattagaagatgcatggatgacaggtcaaatgacccagagaaacccagtctagaggattattacatcaaacaagcttccactgcagattgataagtgctgatgttagtaacggcacttggtgtatggcatgagtttgaatccctcaaaataaatgctttgawcactatttaaggtacaaaaaaaaaaattccctgtcttcaattgtttgccccggtcatagactctgggcgtgaagagtttggagtttaagtttcagtggaactcaacagagacatctgccaggaagtggggaggccaggacagggcagaaggagaagctgtcccacaggatggcagtagctgaggcctcagtcgatcctctggggagctctggaatagaggggtcttaagttgtcctcaactgattcaaaggggactgggc

SEQ ID NO: 288424 - DNA, 567 bp, Homo sapiens
atttatttttataaagctaattaagtccagtatatttattgatataatcaataaatttcacttcasttctgtcatatagctacatatatttgctatatctacatatatttatatgtagatagttgctatatctacatatatttctctacatacatataattacatgtacacttcttgacatatgtaagtgtgtgtgtctttatttggtctgttttctctcttttttgatatgttttagtaatcgggaaggtttttgtacttttgctctaatgtttatacacacataattcagacgtttacatagaaccttagtcctctctttctctggatacaatctattgattctctgttatgagtaacattaccattggctagtaaacttttcctttcctccctaaaaattctgtgataaaagattacagactaataatatggcaaaatatacaagttcaatttataaatattataatttgctgaaataattattttggctttagattttcaattacacagaagccgattttatctgataactgcatgcatatgtgtatgtgtgaggatgtacag

SEQ ID NO: 288425 - DNA, 567 bp, Homo sapiens
atttatttttataaagctaattaagtccagtatatttattgatataatcaataaatttcacttcacttctgtcatatagctacatatatttgctatatctacatatatttatatgtagatagttgctatatctacatatatttctctacatacatataattacatgtacacttcttgacatatgtaagtgtgtgtgtctttatttggtctgttttctctcttttttgatatgttttagtaatcgggaaggtttttgtacttttgctctaatgtttatacacacataattcagaygtttacatagaaccttagtcctctctttctctggatacaatctattgattctctgttatgagtaacattaccattggctagtaaacttttcctttcctccctaaaaattctgtgataaaagattacagactaataatatggcaaaatatacaagttcaatttataaatattataatttgctgaaataattattttggctttagattttcaattacacagaagccgattttatctgataactgcatgcatatgtgtatgtgtgaggatgtacag

SEQ ID NO: 288426 - DNA, 557 bp, Homo sapiens
gccttctctctgctgagagctgcagatgctgggacgaccagccgcagagagaagctactatcctctccagggccttctctctgctgacagctgaacacttgtcgggatgagctgccagcagaggtgtatataacacacctaaattccactccaggcctcctctctgctgagagctgcagagacgatgggacgacttgcctacagagagcagccacccactgcggggctcctctgggctgtcckgacactcaataaagctcctcttcatcttcctcaccctccatttgtctgtgaaccttattcttcctggatacaagacgagaactcggacaaaaccgccaccagccacagaggtttctggctggaaaagcgacactccaaagatcccgtaacaatttccaataagttcaaaaacaagaaaacctaatctatggtgacagaagtcagaagaaggggttagactgactagaaagggccaggaagaactttctggagtattgtaaatgacttgtattttgtttgaggtgtgggctatatggctgtatatatttgtcaaa

SEQ ID NO: 288427 - DNA, 557 bp, Homo sapiens
gccttctctctgctgagagctgcagatgctgggacgaccagccgcagagagaagctactatcctctccagggccttctctctgctgacagctgaacacttgtcgggatgagctgccagcagaggtgtatataacacacctaaattccactccaggcctcctctctgctgagagctgcagagacgatgggacgacttgcctacagagagcagccacccactgcggggctcctctgggctgtccggacactcaataaagctcctcttcatcttcctcaccctccatttgtctgtgaaccttattcttcctggatacaagacgagaactcggacaaaaccgccaccagccacagaggtttctggctggaaaagcgacactccaaagatcccgtaacaatttccaataagttcaaaaacaagaaaacctaatctatggtgacagaagtcagaagaaggggttagamtgactagaaagggccaggaagaactttctggagtattgtaaatgacttgtattttgtttgaggtgtgggctatatggctgtatatatttgtcaaa

SEQ ID NO: 288428 - DNA, 614 bp, Homo sapiens
aatagctgaagcacagggtcttcttctgttttaatgtgaaaatgattcagacttagtcattaaaacaaagatgttattacctaccataagtcttatttgcctgtccaggcatccattaaaaggttggagagtccaggcgcggttgctcacccctgtaatcccaggactttgggaagccaaggcaggcagaccacctgaggtcaggagtttgagaccagcttggcaaacatggtgaaaccctgtctctactaaaaatacaaaaaattagctgggtatggtggtgcatgcctgtaattccagctacttggaggctgaggcatgataattgcttgaacctgggaggcagaggctgcagtgagccaagatcacaccactgcactccagactgggcgacagagcaagactgtctmaaaacaaacaaaaaaaacaaacaaaaaagccagccaggtgcagggggtgcatgcctgtaatcccagcactttgggatgctgcagcaggcagataacctgagttcaggagttcaagaccagcctggccaacatggtgaaaaccctgtctctacttgaaaaaaaaaaaaaatacaaaaattagatgggtgtgttggtgggtgccta

SEQ ID NO: 288429 - DNA, 614 bp, Homo sapiens
aatagctgaagcacagggtcttcttctgttttaatgtgaaaatgattcagacttagtcattaaaacaaagatgttattacctaccataagtcttatttgcctgtccaggcatccattaaaaggttggagagtccaggcgcggttgctcacccctgtaatcccaggactttgggaagccaaggcaggcagaccacctgaggtcaggagtttgagaccagcttggcaaacatggtgaaaccctgtctctactaaaaatacaaaaaattagctgggtatggtggtgcatgcctgtaattccagctacttggaggctgaggcatgataattgcttgaacctgggaggcagaggctgcagtgagccaagatcacaccactgcactccagactgggcgacagagcaagactgtctaaaaacaaacaaaaaaaacaaacaaaaaagccagccaggtgcagggggtgcatgcctgtaatcccagcactttgggatgctgcagcaggcagataacctgagttcaggagttcaagaccagcctggccaacatggygaaaaccctgtctctacttgaaaaaaaaaaaaaatacaaaaattagatgggtgtgttggtgggtgccta

SEQ ID NO: 288430 - DNA, 602 bp, Homo sapiens
attgtatatttcaatataaaagctaaaaataattataagggagtccttaaggacatagaaatattgagaaatattaagttttaaaacactgccttaagcccaggcacagtgtctcacgcctgtaattccagcactttgagaggccgaggcaggtggatcacctgaggtcaggagttcgagaccagcctggccaamatggtgaaaccccatctctactaaaaatacaaacaaacaaacaaacaaaaaattagctgggcatggtggcatgctcctgtaatcccagctgcttgggaagctgaggcaagcgaatcacttgaacttgggaggtgaaggttgcagtgagcagcaatcatgccactacactccagcctgggcaacagagtgagacattgtctcaaaaaaataataacatgataataaaaaataaaacatcgccttaaaacaatatgtagagggtggtcttatgtttgttattctgggtggctcattattttcccttgtttggatggggaaataacggtccccttacaatcttccccccaaatatacgcatgcttctttggtctgggtgcctgctcttgtcacattccaagtatttgggg

SEQ ID NO: 288431 - DNA, 602 bp, Homo sapiens
attgtatatttcaatataaaagctaaaaataattataagggagtccttaaggacatagaaatattgagaaatattaagttttaaaacactgccttaagcccaggcacagtgtctcacgcctgtaattccagcactttgagaggccgaggcaggtggatcacctgaggtcaggagttcgagaccagcctggccaacatggtgaaaccccatctctactaaaaatacaaacaaacaaacaaacaaaaaattagctgggcatggtggcatgctcctgtaatcccagctgcttgggaagctgaggcargcgaatcacttgaacttgggaggtgaaggttgcagtgagcagcaatcatgccactacactccagcctgggcaacagagtgagacattgtctcaaaaaaataataacatgataataaaaaataaaacatcgccttaaaacaatatgtagagggtggtcttatgtttgttattctgggtggctcattattttcccttgtttggatggggaaataacggtccccttacaatcttccccccaaatatacgcatgcttctttggtctgggtgcctgctcttgtcacattccaagtatttgggg

SEQ ID NO: 288432 - DNA, 951 bp, Homo sapiens
ttcatttatcttcatgttgatgcttcrttattctctgtttttttcttaatggaaacagtgtctatccatgcacttttacctggaaaccttgtacagtcatacttttttactctcttcacttctaagtcttaaggcagttttcagtggcacttcatatattgtttatttctgtaacacaaattgacttatattctgtcagtaaacagggaaacataatattcccagcatatttatgttttgtgtcaccaagtggtggtagatgaattcaaaatataggaacacagctgaaagcagcaagctacagaatacggtactgtatactgtccgtttagttcacatccttcctcttgactcatattggctatttatctgtgttggaacaatttattgcacaactcttctagatctttatgcatttttccttgttttaataactttgcttcaaataatccttacatctttttctgttactttcwttcatttatcttcatgttgatgcttcattattctctgtttttttcttaatggaaacagtgtctatccatgcacttttacctggaaaccttgtacagtcatacttttttactctcttcacttctaagtcttaaggcagttttcagtggcacttcatatattgtttatttctgtaacacaaattgacttatattctgtcagtaaacagggaaacataatattcccagcatatttatgttttgtgtcaccaagtggtggtwgatgaattcaaaatataggaacacagctgaaagcagcaagctacagaatacggtactgtatactgtccgtttagttcacatccttcctcttgactcatattggctatttatctgtgttggaacaatttattgcacaactcttctagatctttatgcatttttccttgttttaataactttgcttcaaataatccttacatctttttctgttactttc

SEQ ID NO: 288433 - DNA, 555 bp, Homo sapiens
aatgggattgagtctaacactaagtttactctgtagatgggaaacagcatgcaaacgtctttgattgcatcagtagtcccaaaactacttkctgggaatgcagttaccatgaaccaggtcaaggtatgtgtaacttattttgaaacagaaaatgtacttccctaatactccacttgccttttgatatgatttcagttacatagagccaagatttaagtgccactttgctgctcttccagtaaacaagacagataaccaactcatggtatgtaatatttgacatttatgcaagggaattgtgctttcagaaggcaatcccggggtcatctctccaagcaggcctgcggtttacccctttagtcactggcatacttttgatggggatacacacaaacccaggtatatcatcaagacagtaatgataaatattatcatatggtcaataaaatagaaagagatagaggatgatggaaggtgctgctttataccttagtgaggggagtcttgtgtatatatcatttgcacacagctaagtacatccctaagacaattgtt

SEQ ID NO: 288434 - DNA, 555 bp, Homo sapiens
aatgggattgagtctaacactaagtttactctgtagatgggaaacagcatgcaaacgtctttgattgcatcagtagtcccaaaactactttctgggaatgcagttaccatgaaccaggtcaaggtatgtgtaacttattttgaaacagaaaatgtacttccctaatactccacttgccttttgatatgatttcagttacatagagccaagatttaagtgccactttgctgctcttccagtaaacaagacagataaccaactcatggtatgtaatatttgacatttatgcaagggaattgtgctttcagaaggcaatcccggggtcatctctccaagcaggcctgcggtttacccctttagtcactggcatacttttgatggggatacacacaaacccaggtatatcatcaagacagtaatgataaatattatsatatggtcaataaaatagaaagagatagaggatgatggaaggtgctgctttataccttagtgaggggagtcttgtgtatatatcatttgcacacagctaagtacatccctaagacaattgtt

SEQ ID NO: 288435 - DNA, 595 bp, Homo sapiens
tgtaaatgcatcactctgttgtcacatggctgttttctgtgtgcccttttcttataaggacaccagtcacattggattaagggcccacttgtttcagtatgacctcatcttaactaattatatctacaatgaccctatttccaaataaggatgcattctgaagtgctaagggttaggacttcttttttgggagatctaattcaatttatgacaaaaaaagttaacataaattgttcaaaaaagaatgctatggcgaagtaagtttggaaaacaccattataggactctttactgtagtactctggcggggcgaaggtctttaatttgttcatcatttagaggagttgccaacctgggattattttgtaaagtttctcaaaaacctgtttgatgatggacttctttttacaggctgactgtgagatcagcastcaacgtggaacacctgttctcatgcctgatgtgaggcagtggcaccctagcacatccctccctggttcttctgctttcccctgtgacctgcagcgtcaacttgagacaacttttcttctctgagcctgagtttccttactctaagataaggaaaataatatac

SEQ ID NO: 288436 - DNA, 575 bp, Homo sapiens
ccttacaaatgtagccaacaagggagtcaacatgacagcctgcctgtcctgtcatccgggcaaaagcagtagggatgccaccctcaaaacaggagtgacagcagttggatagcgagccttccatgaatttcatgtatgaaaggcttttgctcacttttctttctctacaaagataaactaagtgacactgcatttcttctttttatcttcatagcagcctgtgaaagaggcagggtggtaattgcagtcctcattttaaggataagaaaattaaggctcagggaatctgagtgatcttaggccaaagttacaactgctctgggctgtcacttttaagtgttctaacccttgcatccaygctcactcagtgaggcatgctgaagcttgaaagacaagtttggtctagtctgcctgtcatcggacatttaaggtcttccatcatgtgtcagtactgctgggtcccagtctctgctacagccttcatctcccagccgaggccacctgactcccccatgaaggctctacccatagaaatgtccaaaacccaccctggccttcaacaagaaggatttaag

SEQ ID NO: 288437 - DNA, 569 bp, Homo sapiens
aatacagaaaatactacgtgttatattgaaggagaaagaaaaatagtctgtggacctcgacccctaagctctgaagacacatgctaataataattggcaaaggtatttgttttactctrtaaagttaagaagttaaacccacatgcaggtgtctaaaattcgatggatatgcaggtgtcatggatgaacgcaggaagcttaaaagctgtccaatctgtcctgccactagtaccacctagtggtagccaagaagatgtgtaagcatctttttaaaaattgctttaaaaaattttaaaagcaagcatcaataaaactcattgtttaaaacaattgaaacatgcacaagaattcagagtaaattgtcaagggtccttcaattccagtctctcccaaccccactgttcttccttattaatagtgcctttcctctgcatttcctcaaatttcagcctctctctgtcccccttttttttctgtctctctctctatgcgcttaacattttgaaaacataaatggaatcatttaatcatatattttatgggtgatgtttttcacttaacaaatatct

SEQ ID NO: 288438 - DNA, 525 bp, Homo sapiens
caaaggttatccaacatgaactaccactgtggataccgggatatccaccacaaactaccactgtggatgatgtgttttgttttgttttgttttgttttgttttgttttgttttgtgacagggtctggctctgtcacccaggctggagtacactggcataatcacagctcactgcagcctctacctctgggctcaagcaatgctcccacctcagtctcactagtagttgggaccacaggtgttcactaccatgcccagccaatttttgaattttttgttttgtagagacagcatttcaccttgttgctcaggctggtctcraactcctgggctcaagcgatctgcccacctcaacctcccaaagtgctgggattacaggagtaagccaccactcctggcctaatgaattctaactatgttttagtctttgcatcatttattcaagattcaaagtcctgaaaaagatccatgctttacatcgtacacaaaaattagctaaaagtgaataatagctctaaatataaat

SEQ ID NO: 288439 - DNA, 508 bp, Homo sapiens
acctggtacagcaaagccaagcactggcattgggattgcagtaagagaaagggaggcaatgattgcagggcacccagcaaggggaattgggcagctcatacttaagactgaattccctcatggcttacagcaagggcttttaaagatggagaggcagaggttacaggcaatgtcataaatcaatacatggaggcaggctgggcaaggtggcacacacctgtgggcctacctacttgggaggcggagcaagaggatcacctgagcctagcaggttgaggctgcaatgagctatgatcatgccactgcacaccagcctgggcaacagagtgagaccctgtctcaaataaacaccaccaccaccaccaccaccaccaccaccaccamcaacaacaacaacaacaacaacaacaccaccaccaacaggctgggcgcggtggctcacgcttgtaatcctagcactttgggaggccgaggcgggtggatcatgaggtcaggagatcgagaccat

SEQ ID NO: 288440 - DNA, 605 bp, Homo sapiens
ctgaaagcgagtggtcccttcatgcctaaccaggtcagggatttggctggtggcaggtagggggtgggggtggtggagtagctgcactgttctacagagaaagatgcaagaatcttccaagyccacagccctacccaaagctgagctcagctagtccatcccgtttgtagtcccctgggtcaccttgaaagtgtggtctggaaacccctcttgcatctgtatcacctagcaaggtgattttaaaaacttcagtttcctggacccttctcccctttccccactatcctgcagacctacagatctaaattgttggcatgtgacctgtaaatccgcattttagtacatgccccaggtcattgatacgcacagaaaagtctgaacatattagatgtaataatgttcacagcgagagaacggtgtccctgaaagccaagggtagcttcttcagtgagtcggggcagctacctaagatcaaacccagcctcaattatgcacacggaagatttagttttgctttggcctgctgtaagcattagggtcattcaccctatttggagcattaagcaggaagcacagacttttccaggcaccagtgagcagaccca

SEQ ID NO: 288441 - DNA, 626 bp, Homo sapiens
agactccccaatgccagcaaggggaaggagggagtkgagagcagatgttcttggcccaggctttagaccagtggttctcaaccccagctgtgcattggaatcatctggggagcttttaaaagcacagatgcccagggcccaccctcaaagtttctgacttaattggcctggggttcagcctgagcacagagatttttaaaacatctccaggtggttccaaagtgcaccagggctgagactcactgaagtgggttcatttttttttttttttttttttttttttggagacagagtctcgctctgtcacccaggctggactgcagtggtgcgatctcagctcactgcaacccccgccttccgggttcaagcaactctcctgcctcagcctcctgagtagctgggactacaggtgtgtgccaccacacctggctaatttttttgtattttagtagagacagggttttaccgtgttgcccaggctcatctcgaactcctgagctcaggcaatccgcctgccacctctcatcggaatctttcccccagatccaagggaagatggttttcttcctgctacactaagggtcagacagagaaggcatgcttgggcatcccttgtaagacaggga

SEQ ID NO: 288442 - DNA, 626 bp, Homo sapiens
agactccccaatgccagcaaggggaaggagggagtggagagcagatgttcttggcccaggctttagaccagtggttctcaaccccagctgtgcattggaatcatctggggagcttttaaaagcacagatgcccagggcccaccctcaaagtttctgacttaattggcctggggttcagcctgagcacagagatttttaaaacatctccaggtggttccaaagtgcaccagggctgagactcactgaagtgggttcatttttttttttttttttttttttttttggagacagagtctcgctctgtcacccaggctggactgcagtggtgcgatctcagctcactgcaacccccgccttccgggttcaagcaactctcctgcctcagcctcctgagtagctgggactacaggtgtgtgccaccacrcctggctaatttttttgtattttagtagagacagggttttaccgtgttgcccaggctcatctcgaactcctgagctcaggcaatccgcctgccacctctcatcggaatctttcccccagatccaagggaagatggttttcttcctgctacactaagggtcagacagagaaggcatgcttgggcatcccttgtaagacaggga

SEQ ID NO: 288443 - DNA, 587 bp, Homo sapiens
tgagctcaggcaatccgcctgccacctctcatcggaatctttcccccagatccaagggaagatggttttcttcctgctacactaagggtcagacagagaaggcatgcttgggcatcccttgyaagacagggactgtattttgtttatcactgtatccccagtggcccacccatgcctggcacagatgaagggctaaatgaacactagtggaatgaaatgtgtgtgaatgagtgaatgaatgaatgaatcccattgcctcccacctctcgagtgccctagaactttcaaagtgtggtctgcaaaccagcagcttttcatgaccagggaacttgttagaaatgcagattatcaggtcctgtcccagatccactgaaagagaatctgcattttcacaagatccccaggtgattcatgtgcacgtgaccatatcatgagttctcccgtatatgagcggttctccaccttcactgcacattacaactacccatgaaagtgtagctagcccacccatgatctctgggaagtgcttgttaagtgctcccaggtgattctgatgtgcagcccaggttcagaacctatgtaccata

SEQ ID NO: 288444 - DNA, 591 bp, Homo sapiens
ttgttaggagactgtgacagtagcccaggagaaaggtcgtggggcctaacctagggcagcagtgatggggtcagagcgaggccacacagatggagtagacgggcagatgaactrgcaactattggagtgacaggaagggagtggggaaagcctctgggtagcctgcggccggcttcctgaagcctccaggaaccccgtgcctggtctgcaggatggagagttgggcatcataacctgtcagaagctcaaggtctctgatgactgggttcaggcctggagggtcttcctggcatccttcctcacagttaggtttccagcaggggtgaggctgtaggggattccagtacacatgggtagcagggagccatctgcttccctacccagtagggctgattgggaagaagtctctgtgaagagtgaaaggcctcagccaagcccatcaccccatgcagctctgagtcccctgtgacccagtagggaaggagaacactccctgctgtggtcccagcaatgggctcctatagctctgggacattcccttggggctctaaggagacccagcaactccactgtgcctgtatgtagctgagt

SEQ ID NO: 288445 - DNA, 411 bp, Homo sapiens
ctatctctttctcctctttcaatcttttatttgtattcttaatagcattatcacgtgtcttttattataaaaaactttaaattcctttaggaagcgactattaattaaaaataaatagaatgttaccattagtgactttactcatctttacttattaattttaaaacactgtctctattatagtacggttttgagaaaccattagaaatatttaaaaatttatgttaaaaatattccaaagacagaaaagtatattcctttaataaacaaatcatcaaaagraaaaacctttatctgtttggaaaaaacaaacagacaacaggaaaggaacaaactacacagtttcattcttccgaaacagaacaaaagaataatactttcttaggaacaaaaagaagttacaagataaca

SEQ ID NO: 288446 - DNA, 555 bp, Homo sapiens
tgctgagaacctaatacgagctttgcactgacttgttacacaactctgcmctccaagaccctctctagctctacaattctcagtgtctagggaaaggggtctaaatcaatgcagcctaggtggtaggaatctggaatgtgggagttattgagtgctaaaacttatttccagaggaaaaaacgaaagagaatatctaagagacaatatctaagagtcaatatctaatctgaaaaagcaagagctagggacaaccaagctgttttgaatataaaccattaaaagaaaagagaaagtaaagacagttccaaggtcagtgccatcaggaattgccatgttggtgagggatgtggctgcaaagtcagcacaatctcaatctcaaatcagtcattactgagcatgaagccaacattaccttttttctccaagttataaatggataataatctactgttactttagcagcaagctatgaagattgcacacacatgaccaaattttagtgttggaaattttagaaacttacagccaaagtaatctgatacaaatttactaata

SEQ ID NO: 288447 - DNA, 658 bp, Homo sapiens
tagcatgctaaaaaacaatctgctatagcattaatccaaatgttcctatagcattaattcaaagttccattcctaaaggaactccttttcacctaaaaatggcataatctactattttcctatttactataggttacagaggaaaatgtttagttaccattaaatacagcaatgaagaaagtaaagtgctctttttgctagagaaattcaaatgtcatcattcaactatgagataaaaataaattttatttggaataaaagtgttaaatttaaatcttaaaaaaaaagaacacttaagagcaactatttatgacaatggaaacgtgaatttaagacaaagttaattcctaacctctaataaaatcatagttctataaamaaaatcacttgttcaacctttcttccttacacaccactaatggcaagtattgaaaaagatgacattgcacgatactgccttaaaaatagagaaaaaagctgtccaaaaaattaaaacggtacaaattccattaactggaagcctagtgtagtgcttcattaagttccaaatacgtcatgtaaacgttagctatatatctttctagtcaggttaaaactattcagctaagcggggaccaaaccaaatgaagccaaccatgcatggaaaacatctgctgat

SEQ ID NO: 288448 - DNA, 2247 bp, Homo sapiens
gacattgtcttcttttgaggaaatcctggaaacagacaggtttcttgaccagccaggagtactgttctgtttcatttcaccactatgacccaagcatggcatatcagtcaaaagagctttgtgaccttggatacagcaatcatttttcatatcattgtttctaaccatggggcagcttccacatgcttgyctccccctatttgttcctggaaactgtctctcatcacgaggcaccaaaatgaaccagcctagatttctgagaataaagcatgtatatctgatcctgggtgttgctttgcattttatagcctgggacatttatagctgagaatacctgaaggcaaggcctatttactactctgttggcttcatgtggtatttttcttggatgcctttctctcttttatgaagaaagtaataattttcagtttctgtaaaacagaatatgctccaggatacttagaaactggctagtcggtaggcctaaaagggtaaagggaaggaaatgaccatatattgggcatctagtatgtacccccwggtttcttcctaaaaatatttaggaaaactgaaaattcctgaaattacctggaaaggtaatcacctcctgactccctgcaaaaaaatgtttttaagatctggcctaccataaacattttgcataaaacctatctgaatgtcattaaawtgactacaaaaacacaacagaacactttaccaaatgcaagaataatgtgcattctgacactaggggcacttccacttttataagaaaagaaaaagtttccatttgtctgagcaacttctgatgcaacattagtaattacagtcctttcctccagtgtaggcctcataaacaaaaactggttgatgtttataaacatttatctcaaatcaagaaagaaattaacacaaaataaaacattaaaaggcttaatctgggcaaattttccagttttacaagccagtgacaaaaagtaaagccttagaaggggcttaattatcaactccaacagtttagagagtaaaaccaaataaacaagtggaatcttctattcagtgagttctgaaagtcttgtctccttttaactccttttccataaatgctttctgtatattcttgcccatgtaagccctaaggacaaaaattacaaccatgtggatgttwttggtctgagaactatttcggggggaagatgaaggagaaaggaaagccctcaataacccacatcacagactagagctaaagcacaacaaagaagtacttctcaaaggcagagaatgatgggaacaactatatgttttgtctgcattttggatagttgaataccgttttgtaattwaaaaggttgcatctaattaaaccatgtgcattaggtaatatctgattcagacccttggccttttttttcttttatattggctaagggaaataagtaaacctgaattttgcaaacagtcacatacagtaaatcaacaaaggagtaagaatgctggtcatggctattatttaataaaaagcccacaaatacagaaagttagagatttttaaatcagttttggtatgtaattggcatagcatacaattcaccwaataaatgaataaagaaataataaaagtggacccaatgagcaaaagagtgtaaacattttggaaagatagattttgctaaattccctttttacatggtttttatagatttgtattctcatcagtagagtataaaaggattccctgaatagtgcttctataacattgaggattagttttaaatcttagacaatctgatwaattaaaaaaattagttattcctttaatgttcatttccttgaaacctgtgaggcaaaataaatttacctttgacaatgtttcttcttttatgatttgtctctgcacaacccaccttttttgtgaatgtctgtcttgggttcacccgaagctgttatgaggctaggatatgaaaataagcagttaatttggttgctaatcctgacaaacgctggtaggagaatggggaaatgaaacgaggacagaagaaatcccctaagtgtgcattttgaacagattgtcagcacagacaggtgaactttaatcccattacagaactgagaaattcagagttatcccatctgcaggactagagagctgggctcattacttactcttgttattccttggctgggggttgcaagaagaggtgacttttaccagatgaaatggagaaagcccttggcgaaagagatgca

SEQ ID NO: 288449 - DNA, 600 bp, Homo sapiens
tttagttaattcaaaataatttctgatttccagtttgatttctttttgrccctttagtttttaagaagtatgttacttaattcctacacgtttgggattatctatatatatttataatattgatttggatgttacatctgttgtggtcataaaaaatactttgcgtgatttgaatgctattaaacttttgagatttgctttatggatcaagatatgacctatattggcagctgtatcaggtgctcttaaaaataatctgtatctggatatggttttatggagagttccataaatgtcaattaggtcaaattattaatagtgttactcaattcttctacatccttatgtctacttgttctgttgcttattgatagaggaatattgtgatctctgaacaaaattttgaatgtgactatttctctttgaatttctatcagacttttctttatgaattttataacagttttattaacattattatgttcatatgtatattattatagtcacataaaatttcatatacataaaatttatttttaagtgtataattcagtcatgttaatatacatttaatatttatatattaaatatatattaaat

SEQ ID NO: 288450 - DNA, 552 bp, Homo sapiens
attttgttttcattctatttctctgttgtaaatgtttacgcaacttttatttagttattttaagtaataagaaccaatactttttccctgtgaaaattatgtacagaatttaaaactaagttcagaatttgtcattttgaaatacagatatgaagtctaatttgacatttactatatgtaataaaaaagaaaataagaataaaaagcataaagaacaagaacatcctcttgaaatctggactaaaaatattctataggtgtcttaattgtgtttatagataattatgcaatatattaatgaaaaaagctgtcttttttctaaatcattttctagtcaatgtttcatttcaaatgyacaaaataaaagtacagatctaaattctcccaaaaatattttaattactttatcctctaaacaaaatattttaaaaataatttacaatggtatctttctgtggttttaacctgaatttccctaatgactatgatattaaacatgttttcttatgctcatttgcaatccatgtatcttctttgttgaagtgtctgtgc

SEQ ID NO: 288451 - DNA, 593 bp, Homo sapiens
gtacttaatgcagaaccacctaacaaattaatattgccctgatctaattagtaatgtataaaactaaaactatctccattttagagactgttctcatttttcttgctgtttctgtgacttgcccttttaagcctttcccttttgaaaagaaaaaamcacccacatgtacttttggtctctgatatctggggtctgattgaaggttgagatattattagcctgagtggtaaaaaaagaaattgaattttatgtcacacttttttcccccaagaaatttaaataatgcttgattatactgatgcttcattgttgagaactgccataaaaccgactagcatgattgtaagaagagaattcacagacattaaaaaaatgactgagaaattacgtgatgattccatggaagaagccagaggccagttactcttgctttaaggctaacagtggtttgagaaaatggaagtccttctcacttatttatcatgtactttattctgtattagaacttacttctgtatttggaagtattttgtgataaaacaagttatgctttgtggcagatcaatgtaaaataatttttaatcttgcaatag

SEQ ID NO: 288452 - DNA, 1129 bp, Homo sapiens
tgagaaaatggaagtccttctcacttatttatcatgtactttattctgtattagaacttacttctgtatttggaagtattttgtgataaaacaagttatgctttgtggcagatcaatgtaaaataatttttaatcttgcaatagtaatcatataaacatgatttgggcaatcatgattatctatgagcttstatgagcttcttcatttgtaaagaaaagaaatagaggaatttcatagctattataataagcataaattctctaatgtagatgactctataaatgacaaattaaatggctaagaatgttatttacaaatagacatatgaattgtgtatctctgtcattaaaaatgacacactaacgttttactattctcaggatgatttgctgcatgcagtaacttcagttttctatgtcaagacttattgtggtcacgaaatagctgtgatatgaaaatatgtgtttgagacgtaaataattagtatgtgtatctactaggtgagaatgaatatgaagcctgaactctctaaatcagtttccttattgatgtgwtttgtgagtcacctagtttacaggcttgatgaaatcagtagggcgatattgaaaggaatgacatattgaatccttttgtaagttgtgtatcaatattttgtaatatacagaattgcccttagcttatatactttttattttttgcatattatgatttccttaatggcaggtacatctaaatatgcttatgattcatcaacatacccagcattcaacttagagagacccttaaagccactggtcactggccttttaaacacagtcaactcwcctatttcatataatggagacttcaagacaaataatttcgtgatactgtcttttcccaaaattcactcaggtgtctctcttgctggcattctaaccattatttttctctttacgtggtcctctgattcctaaacttaatactgggtttgtgatctttgtgatctcttcttttggcctccatctttgatttggcaaccaccttctgtggaggactccccttgtctcttgattcttgtgtgcttttgattcccttgtcttccaaaactggagtacagatgtttcttttttccctttgacagaactt

SEQ ID NO: 288453 - DNA, 586 bp, Homo sapiens
gctaataaaaaagtaacaataaaatttcatttaatcatttagaattataaatatttttgttgctgttattgttttattttgctrtattttaaattgggtccaaaataattttagaaaacagtaggagaagctcttttgcccaatgtaggatagccacaggcttacagatacttctttgagtgagatcgaattttagaattttatggtaaattgtttctcaactaaatatacactttagttccaaaaaataatttttagatatatcactaagtgttaagaagtgcttcatgttttataaggtgaacatttattttaagattaataatagaaaaaataagcatctatattgggtacttttatgagtcttaaagaagtaagacttcattcaaatattcatttattgaccaccatatctgtgcccatttctaatatttattctaccttcctctagctgtcctcagctatgtttaacattccttttataaaagaaaatgtaattatttaaaaatctatgtgctgcagtatgtatgcttcctacatcaaaaagcagagtgaacatacatttacaaacatcattgaatgttaa

SEQ ID NO: 288454 - DNA, 546 bp, Homo sapiens
tgtttccctgaccaaatcctcactggttttgatcttggaattggttaagggagactgaattagtcagggttctctagagggacagaactaataggatagatgtatatataaaggggggtttattaaggaatattgactcacaccatcacatggtkaggtctcataataggccatctgcaggctgaggagcaaggaagccagaccaattcccaaagttgaagaacttggagtccgatgttcaagggaaagaagcatccagtgcgtgagaaagatctaggatgggaggctaaactagtctagtcttttcatgttcttctgcctgcttttattctggccacactagcagctgattagattgtgcccacgcagattgagggtgggtctgcctttcccagtccactgactcaaatgctaacctcctttggcaacaccctacagacacccaagaacaatactttgcatccttcaattcaatcaagttgacactcaatattaatcatcacagagaccaaccttaaagatgagaatctggaattagtttataga

SEQ ID NO: 288455 - DNA, 546 bp, Homo sapiens
tgtttccctgaccaaatcctcactggttttgatcttggaattggttaagggagactgaattagtcagggttctctagagggacagaactaataggatagatgtatatataaaggggggtttattaaggaatattgactcacaccatcacatggtgaggtctcataataggccatctgcaggctgaggagcaaggaagccagaccaattcccaaagttgaagaacttggagtccgatgttcaagggaaagaagcatccagtgsgtgagaaagatctaggatgggaggctaaactagtctagtcttttcatgttcttctgcctgcttttattctggccacactagcagctgattagattgtgcccacgcagattgagggtgggtctgcctttcccagtccactgactcaaatgctaacctcctttggcaacaccctacagacacccaagaacaatactttgcatccttcaattcaatcaagttgacactcaatattaatcatcacagagaccaaccttaaagatgagaatctggaattagtttataga

SEQ ID NO: 288456 - DNA, 497 bp, Homo sapiens
tgcttgtatcataacctttagttgcctgaagtcaaatgcctgcataaggcaaggctttagaagtcaaagtagctgttgcaatggatgtcacttcttataagtacactggagaatttggagaaagaaaatgacaagttcaaggttttaattcccagttcaagtcacagagtagaggaccacagtggttctttgacttctctaacacrtgcttttttgaatctacatcatgaggtttgggaaaactaaaatttgaccctgtaggtggttgagttacaatgcaaactgaattcatagcctttgtatggttcttaatgtaaagttaagggattggcggaaaaagagtgggatgtaataattggaatgagcatacttcaatgaatctagtaaccttagcctcaccctagatttttctgggcttctcttaccaacaaaagcagcttcttcttccctcctctatgtgaaattatcagcctccacttgcttgaagaccatataat

SEQ ID NO: 288457 - DNA, 497 bp, Homo sapiens
tgcttgtatcataacctttagttgcctgaagtcaaatgcctgcataaggcaaggctttagaagtcaaagtagctgttgcaatggatgtcacttcttataagtacactggagaatttggagaaagaaaatgacaagttcaaggttttaattcccagttcaagtcacagagtagaggaccacagtggttctttgacttctctaacacatgcttttttgaatctacatcatgaggtttgggaaaactaaaatttgaccctgtaggtggttgagttacaatgcaaactgaattcatagcctttgtatggttcttaatgtaaagttaagggattggcggraaaagagtgggatgtaataattggaatgagcatacttcaatgaatctagtaaccttagcctcaccctagatttttctgggcttctcttaccaacaaaagcagcttcttcttccctcctctatgtgaaattatcagcctccacttgcttgaagaccatataat

SEQ ID NO: 288458 - DNA, 497 bp, Homo sapiens
tgcttgtatcataacctttagttgcctgaagtcaaatgcctgcataaggcaaggctttagaagtcaaagtagctgttgcaatggatgtcacttcttataagtacactggagaatttggagaaagaaaatgacaagttcaaggttttaattcccagttcaagtcacagagtagaggaccacagtggttctttgacttctctaacacatgcttttttgaatctacatcatgaggtttgggaaaactaaaatttgaccctgtaggtggttgagttacaatgcaaactgaattcatagcctttgtatggttcttaatgtaaagttaagggattggcggaaaaagagtgggatgtaataattggaatgagcatacttcaatgaatctagtaaccttagcctcaccctagatttttytgggcttctcttaccaacaaaagcagcttcttcttccctcctctatgtgaaattatcagcctccacttgcttgaagaccatataat

SEQ ID NO: 288459 - DNA, 587 bp, Homo sapiens
aaaaaagttactttagattatattttaagccaaagttaaggttgaagcaatgatgtaattgaaaatgcatagactttgaatgtggacatctgcgtctgagagttgtacattacttatttactaactgtgataccaaatatgttacttaaatcttgtgaccctcaattttatctgtaaatggatgtcataatactgtcgttgttggattgtactaaggatggaatgggatgatatatggaaagcagcaagtccatggtgtgacacctggataggaactcrataaatcatggggattatgtgttaaatgaaacaaatttaccaaattaatctttctgcaacagatataattttctcctatctctagctgttcacatatatgaatctcattatactaagtgaaagaggccagatatgaaggttacatatcatatgcttccattggtatactatcctggaaaagccaaaactacagagatggagaaaggtaaatgtttattagaagctgatggtgggggtaggagctaacaacagatccatgggggaattttgggaggcgatgaaactattctacaccttgattgtgctgg

SEQ ID NO: 288460 - DNA, 408 bp, Homo sapiens
tattttgaaagtgttttcagattcatcttgtcctcccctttctcttgacatcagtgctgtcctagaggtgatggtgtaagaatatgccatccttgaacatgcatggartttcaaaaagcttataattcttatgtaaaatggtgaaaggtacagtttttctccaatacaaggaaagcgtatatttcgatacaattttgttgtctgaatttaagaaatttgaaagtcttaattacttttgagtatgtgaaaattaatttttagaaattctccatagccacagaaaacacaaatcccacactctaatcccaaccaagttattaatttctcagcaattctagactgtgtcatttaatttctcaaaatcaaaatcatatcttgagcaagttaatgtacctattgattttaggt

SEQ ID NO: 288461 - DNA, 478 bp, Homo sapiens
acccctgtggccaccactgttctgactgcactgggtcagacctgaagccagcacagtacttggtcttgcccaaggcccrctgtgaccactccctggccaccacctatgttcactcaaggccctggggctctacactcagcagatggcaaaaccagacaggtctgtgtcctcccttcagggctggcacaacaatccaggcatatcttcttcccttcagggatttctcccagacccaagtgggtccagaagtgactcagggactaaagtcaaaaaacatctgaagtctgcctgatgttctattatactgcagctaacctggcactcaaactacaagatgaagtccctcccattcttctgtccactttccaaaggcaatggagcctcatcctatagccaccaccaccataagccatggggagtactgccagactagtggtgatgttcccttacagcccaagggacctgacctaggccagag

SEQ ID NO: 288462 - DNA, 596 bp, Homo sapiens
aattgagaaggagttatgattaagatagaagtgaatgttgcagaaaccgagagattattaattgctatcataaatgttgttaaatgtgctttttttaccacagagaagagaacaatcagttttccctaagtgggttagggaaattttcacaamattttgacacacattgaaggattagtattatttcactagagagataaataggggtggaagggaaaacatttcaagtaagaaaaaatagcataagcaaagttccaagagtgtgaaaggcaagatatgcatgtggaagagtccatggagactagggcatgatggagaaataagagaaatattaggtgacatagagagtaaggctggaaattagattggaaaagaaaggtggtgtctaattaagaaggaccttctatgtcctactaatatacctatcagtatgagagcagtatcctgtgataccaatagttggtgtttacagagcctttgcaatgtttctgacatcatgacaagcaatatcacgtattatctgactgaattattaaaaaatttctgagaggtaaatatgtctgtgtttcattttaagaacaaaaacgtataacaag

SEQ ID NO: 288463 - DNA, 596 bp, Homo sapiens
aattgagaaggagttatgattaagatagaagtgaatgttgcagaaaccgagagattattaattgctatcataaatgttgttaaatgtgctttttttaccacagagaagagaacaatcagttttccctaagtgggttagggaaattttcacaacattttgacacacattgaaggattagtattatttcactagagagataaataggggtggaagggaaaacatttcaagtaagaaaaaatagcataagcaaagttcmaagagtgtgaaaggcaagatatgcatgtggaagagtccatggagactagggcatgatggagaaataagagaaatattaggtgacatagagagtaaggctggaaattagattggaaaagaaaggtggtgtctaattaagaaggaccttctatgtcctactaatatacctatcagtatgagagcagtatcctgtgataccaatagttggtgtttacagagcctttgcaatgtttctgacatcatgacaagcaatatcacgtattatctgactgaattattaaaaaatttctgagaggtaaatatgtctgtgtttcattttaagaacaaaaacgtataacaag

SEQ ID NO: 288464 - DNA, 569 bp, Homo sapiens
tctttcttaatttcaggtgactgaattctcattatggatgatatcggttgtgcacagagaggaagagaagttcatggctcagtgtactacagcccagcaatgtcgaggctccgagtgataagtatattttatatttcttgggaaaccaagaaaaactccagtaatagtgctgtagattatgctcctttgtatagtgggtcagtaatagtgggatgggatgcatttcaccatatccmatttagctacgaaatttttattgttttcaaatccttgggtttaacggcaagggtggtattgagctctatggatggaaaagtaactcctaattctaggagaggtaatgagtattttaatcacttgaatttctacagcaaagtatcacaagcttatcctttattttgttatacagataccatataattagttttaatcgcacaataagtgattttactttttggtttttgcaactttttatagtagaattttgaaaagatttttttcatcagcagtgacagaacatcccatcagaatttatcttcctcagggaagcagaggcttatctttaaaca

SEQ ID NO: 288465 - DNA, 569 bp, Homo sapiens
tctttcttaatttcaggtgactgaattctcattatggatgatatcggttgtgcacagagaggaagagaagttcatggctcagtgtactacagcccagcaatgtcgaggctccgagtgataagtatattttatatttcttgggaaaccaagaaaaactccagtaatagtgctgtagattatgctcctttgtatagtgggtcagtaatagtgggatgggatgcatttcaccatatcccatttagctacgaaatttttattgttttcaaatccttgggtttaayggcaagggtggtattgagctctatggatggaaaagtaactcctaattctaggagaggtaatgagtattttaatcacttgaatttctacagcaaagtatcacaagcttatcctttattttgttatacagataccatataattagttttaatcgcacaataagtgattttactttttggtttttgcaactttttatagtagaattttgaaaagatttttttcatcagcagtgacagaacatcccatcagaatttatcttcctcagggaagcagaggcttatctttaaaca

SEQ ID NO: 288466 - DNA, 521 bp, Homo sapiens
gaaagagttctggagtcctgcagagggtttcctttagtcttcaacacaatattgatcagctcatgcatgtaagaaaactgtgagaagaaaaggtaagaaccactagatatacaacagctgatagaattgatcaccagcagaactgtactgcaagacatgctaaargaagtgcttcaggaggagggaaaatgacaccagtgctcagatcttggtttataaataccactctccaatcaaaggaaccaagagttccttacatagatggctgattctaggatagggtgaagaaagtagaagatgaaccttgaacatcttgtagtaccagagactgaggaagtactcaaaaaacagaaggatttcataggaacacaggagccagcctgaataaacttccaaagggaaaaattggaataattcatgcaacacaataatgtagcactgggctataatccaaagtataaaataaacataactaagtccatgactattaaataattgactaaattaataaatgggaggaa

SEQ ID NO: 288467 - DNA, 553 bp, Homo sapiens
acagttaatgtgtgggtcaaatgaattaatataggcagaagtgtatcatgaattctaaattcataaacagcgcatgccatattattacaaatttagagagcattgccaaataaaaatttctaatctgtctacctagactatgttctaccagctccagtagaaaatttcatgtgaaaaatgtattgtgctccatctgttcaggttcagagaattgagcctatgtacctaaagctaatttactaaagtgggagttgaagtgatgtcgtaaaagagaaattttctaagtaagctgtcgttcactggctttcaacacaattgctccagccrtagatcatattttatagaaaaagagtgtcctaattcttgaaggagtgttggatagtataatagcacacatacaaatcatatgatgtgcaatatctatgaagaataatgtcgtgacaagaagttacatctagtgtcatggaattcatttagtattggataaattaccaggctagtctagtttgttcacattctcagagccacctcctttccctggaaagcaacctgg

SEQ ID NO: 288468 - DNA, 468 bp, Homo sapiens
atatatgttttgctgcctccactatttgtagtaacttaaactttaatccaattctctatatagccattttgtaaataaaagttggattcaatttgaataggactagcaaattgacataaatatcagaaatcattttgaaaacatgaaccaagttaattacccagyttgcaaatgagttattataatttgatggctttgctttggaaagcatatacgggatttcaaaataaaagaaagtagacaaactataacccataaaggaaaataaattattttaattagggaaaatggagttaaaatgggaaatgagagaaattatgtttttgatgtatgaaatatttttaattaggatgaagggactagaactaatatttactaaggacacattgagtgtcaagcactgtattatatatttacacatactataagctttatagacttcatatacaataccttgtattttaaaaa

SEQ ID NO: 288469 - DNA, 604 bp, Homo sapiens
tatgtcacaggggtttgatgtgcaggctagtttgtcacttggtgataagcatagtaccagataggtagtttttttatattcaccctcctgccacccttcatcctgaagaaggccctggtatctattgttctcttctttgtgtccatgtctactcaatgtttagttcccacctatcagtgagaacatgtggaatttggctttctgttgctgcattagtttattaaggataatggcctccagctccatccatgttgctgcaaaggacmtgatcttgttcttttttatgccgtgtagtattccatggtgtatatgtgccacaatttctttatccagtctaccattgttgggcatttaggttaattccacatctttgctattgtgaatattgctgcaataaacattcacgtgcatgtatttttatgctggaatgatttatattcctttgggtatatacccagtaataggattgtgttcagcaatatttaaataccaaatgcactgagagagagaaaaaaataatcttcatttataaaatttacttgaatagtatatcattgtctataccatcttaaatttcctttttccaattatttttaagtgattt

SEQ ID NO: 288470 - DNA, 500 bp, Homo sapiens
ctaatttttaatttgaaaataatttattatttttgtgaacataatttacatgaaaacactaattcatggacctatctatgttttttattgcttttttatgcttgaaaacatgttcccgcttgaaatcagggacatgtagtccttcatttcctttgcctatccactcatcktggatgctgaatattggacaccaggtagactgtaacaaaacaaacagtacttccatcttctacgcagaaaccagtgtgatttaagtctctcctttagaggaaagtatacattacttagatttacaggggtttcttccgtgaaaaagggtcttgagaaagaggtccataagatgaaagagagaagagaaatctaggtatcataattcaaagtcttaaaaacatttaaaaacataactagaactgttcccggaccaatgtctaggtttctactaaggagggtccttgacatccaataaatcatttgtacagggttgtgaagagaggctatcc

SEQ ID NO: 288471 - DNA, 500 bp, Homo sapiens
ctaatttttaatttgaaaataatttattatttttgtgaacataatttacatgaaaacactaattcatggacctatctatgttttttattgcttttttatgcttgaaaacatgttcccgcttgaaatcagggacatgtagtccttcatttcctttgcctatccactcatcttggatgctgaatattggacaccaggtagactgtaacaaaacaaacagtacttccatcttctacgcagaaaccagtgtgatttaagtctctcctttrgaggaaagtatacattacttagatttacaggggtttcttccgtgaaaaagggtcttgagaaagaggtccataagatgaaagagagaagagaaatctaggtatcataattcaaagtcttaaaaacatttaaaaacataactagaactgttcccggaccaatgtctaggtttctactaaggagggtccttgacatccaataaatcatttgtacagggttgtgaagagaggctatcc

SEQ ID NO: 288472 - DNA, 500 bp, Homo sapiens
ctaatttttaatttgaaaataatttattatttttgtgaacataatttacatgaaaacactaattcatggacctatctatgttttttattgcttttttatgcttgaaaacatgttcccgcttgaaatcagggacatgtagtccttcatttcctttgcctatccactcatcttggatgctgaatattggacaccaggtagactgtaacaaaacaaacagtacttccatcttctacgcagaaaccagtgtgatttaagtctctcctttagaggaaagtatacattacttagatttacaggggkttcttccgtgaaaaagggtcttgagaaagaggtccataagatgaaagagagaagagaaatctaggtatcataattcaaagtcttaaaaacatttaaaaacataactagaactgttcccggaccaatgtctaggtttctactaaggagggtccttgacatccaataaatcatttgtacagggttgtgaagagaggctatcc

SEQ ID NO: 288473 - DNA, 614 bp, Homo sapiens
tcaataggacttaattaccagctaactgttatcttttagtaaataattgcccctaggaatcatgctaaccatcttagatcaatgaatgagtgtctgaaattgaataaaaccataagtagtaattttgtgaaaaatttaaaacaactaaaataccataataacactgcagtttcctgaagatttatagaaatggagaaaccaatatgaaatatacctctaaartatttgactgcatttgaatagcaggcaatattcatactgatgtaaatcacctcaaaccaccaagcaatatcaataaacacacaggtgttttctaaacaggataatttggtttctctgtataaatcttctttataattttaaacctagtgatcccaatagatctataaagtatgtagattaatttgatcatggaatggcagagaatgaatcagatcaatctcagacactatcacaggcaaatatgagggagtaagacccaacgtcacccaaaggccagaatgagtctcgttactgtgaataagaagacattttcttgttgttataatatttattacatttctctttaggagattgatgaaatttactcttattgtgagagtgtgattagccta

SEQ ID NO: 288474 - DNA, 614 bp, Homo sapiens
tcaataggacttaattaccagctaactgttatcttttagtaaataattgcccctaggaatcatgctaaccatcttagatcaatgaatgagtgtctgaaattgaataaaaccataagtagtaattttgtgaaaaatttaaaacaactaaaataccataataacactgcagtttcctgaagatttatagaaatggagaaaccaatatgaaatatacctctaaaatatttgactgcatttgaatagcaggcaatattcatactgatgtaaatcacctcaaaccaccaagcaatatcaataaacacacaggtgttttctaaacaggataatttggtttctctgtataaatcttctttataattttaaacctagtgatcccaatagatctataaagtatgtagattaatttgatcatggaatgrcagagaatgaatcagatcaatctcagacactatcacaggcaaatatgagggagtaagacccaacgtcacccaaaggccagaatgagtctcgttactgtgaataagaagacattttcttgttgttataatatttattacatttctctttaggagattgatgaaatttactcttattgtgagagtgtgattagccta

SEQ ID NO: 288475 - DNA, 607 bp, Homo sapiens
gtcagatgtattaaaatggtataacctggagaataatgcttttccttattaaaaaaaaagttttcctatttattttacaaagaaaacttggtttttagactcagctatagaaaagatatattttggttttatttctagacttcaaattaaaaacagaaattctatattttcagatttcagtagaaatagaaattgcttattatccttgtttctgttttcattcctttatatttagcattttcagttgctctgaggatatttcactaaaacagcaaaatgattactgaaccacaagtgtgtagtggaatattgtttcatgcctatgcttttccttttacataaaaatgtacctttagaaaattagaacaaacaattgtgtcaactaagaaagtgtaggctatgctattggaaatatttgagaaagtatcatgagtgttacattggtactctgctagaggaaggtgaaacaattggyattcacatcaactctctcttcacatttccaaattctggccacattatattgtatttaagagcaagatctcacctatatactaatttacccatcatggttttcatttagcagtgtttttgtgccagtcactgt

SEQ ID NO: 288476 - DNA, 593 bp, Homo sapiens
cttcacatttccaaattctggccacrttatattgtatttaagagcaagatctcacctatatactaatttacccatcatggttttcatttagcagtgtttttgtgccagtcactgtgccaggccttaggattgcaaaaaggaatgtttaatatgtgaggatatcaccttttttggaagcaatagtttggccaaggaactctgctaataattaaaccagttgctggttcctgaaaattttaagagataagtagtatgctttcctaattctaaaataaacatgtatttcctcagaagtctaaatatttggaacatgtagagggcctgtaggttatcaccctgctttgccagttaatactgtgttcctcccaagatgacatttaaacagccttttttttttttttgcaatgagtctggtgcattttcttaaacagtcttgtgtacaatgttatcaccatttgaaaatctgtttcctgacatgaatctgaatttgcatttctttcagtttctatatatttgccacttaggatcccttaccctctctgctactgaaattcagttttttaaaaacaaacaactaattgtgtgtgtgtgtg

SEQ ID NO: 288477 - DNA, 544 bp, Homo sapiens
gggtcttgctctgtctcccaggctggagtaccatggcaaaatcatggctcaaggtggccttggactcaagcaatcctcccacttcagcgtcctgagtagctgggaccaggcctggataatttttgttagattttctgtagagacraaggtctccctatgttgcccagactggtctggaactcctgggctcaagcaatcctcctgccttagcctcccaaagtggtgggattattggcatgagccaccatgcctagcccaaagtgttagtcttatggctgctaaactgtggaaaggtctggaggtttttagagatggggatggggcaacctgaggagggagtgggcactctctggtttggggcagtagtcatgtaccaactcagtaagaattgtttcctaatattttctaatactgatacagtcataccagccctgtttttctctttaattaattgaactgagcatcatacagctcaccttttaatggagctatcaaggtgagagtgctgaaggacttcagagaacagaaaggttaatgtcaggac

SEQ ID NO: 288478 - DNA, 544 bp, Homo sapiens
gggtcttgctctgtctcccaggctggagtaccatggcaaaatcatggctcaaggtggccttggactcaagcaatcctcccacttcagcgtcctgagtagctgggaccaggcctggataatttttgttagattttctgtagagacaaaggtctccctatgttgcccagactggtctggaactcctgggctcaagcaatcctcctgccttagcctcccaaagtggtgggattattggcatgagccaccatgcctagcccaaagtgttagtcttatggctgctaaactgtggaaaggtctggaggtttttagagatggggatggggcaacctgaggagggagtgggcactctctggtttggggcagtagtcatgtaccaactcagtaagaattgttycctaatattttctaatactgatacagtcataccagccctgtttttctctttaattaattgaactgagcatcatacagctcaccttttaatggagctatcaaggtgagagtgctgaaggacttcagagaacagaaaggttaatgtcaggac

SEQ ID NO: 288479 - DNA, 516 bp, Homo sapiens
atctttctgcagccatttctctgggttaactggagttagaaagaatgttcttcaaaagattaacaggaggccccacgtacatccagaatctcmatctgttcaacttccaagttctaaagactggactttggctgcacacacacctaccacacatgtgccttctgtgattttcaggccgacggatggaactatttttaagacccgttcaacacactggtcccaaagcaacaccctgaaacgtcctttgaaaccttgaaactttccattccaggtggagctcagaccatcccctcactgaattccatactacatttgggtgaacaactggaattagaacaaaccaacccctggctttataggctttttgtagtctttgccaagaaggatttcaagtaagaagtgagcaaatacatttgatctttaaagatggacacaggacgatggtacgtaactcaactttgaagattctcatttgaggcttagaaaaatgtgcttttctgcaacctgccctccaca

SEQ ID NO: 288480 - DNA, 557 bp, Homo sapiens
ccaaccagccataagccacactgcctagaattggctgacagaccactccttgacctcctggacggagtaggtgaggagaggagtggacttcccaccacaagtttgagtgctggacactcaatctctgtgcrtttgagttcagtggcactccctgtcccactgcatcatcaactcaagtcatcaaaagctgacataacctcccctcttttggggtttcaccagtctctggcttattggtggcattcctgcaaattcaaaagctagagtgtttgtgagcgatgctacatgaaggaatttgtgtagttgtgtgttggcaagcatgaaaaaattagtttagaggtccctctaggcagttaaaacttttttactgaaatataatatttatacatatttatggggtacatgtgatattttgatgcatgcatacaatgtgtaatgatcaaatcaggatatttaaaataaccatcatcacaaacatttttcatttctttgtgctaggaacatttcaaatctcttctagctattctgaaatatacattattgccagctatagtaac

SEQ ID NO: 288481 - DNA, 557 bp, Homo sapiens
ccaaccagccataagccacactgcctagaattggctgacagaccactccttgacctcctggacggagtaggtgaggagaggagtggacttcccaccacaagtttgagtgctggacactcaatctctgtgcgtttgagttcagtggcactccctgtcccactgcatcatcaactcaagtcatcaaaagctgacataacctcccctcttttggggtttcaccagtctctggcttattggtggcattcctgcaaattcaaaagctagagtgtttgtgagcgatgctacatgaaggaatttgtgtagttgtgtgttggcaagcatgaaaaaattagtttagaggtccctctaggcagttaaaacttttttactgaaatataatatttatacatatttatggggtacatgtgatattttgatgcatgcatacaatgtgtaatgatcaaatcaggatatttaaaataaccatcaycacaaacatttttcatttctttgtgctaggaacatttcaaatctcttctagctattctgaaatatacattattgccagctatagtaac

SEQ ID NO: 288482 - DNA, 579 bp, Homo sapiens
gttgagaagaaagatctcagagggttattctgttaagagaagaaagcagaattagcacaattagcatgggggatagacaggtattcattctttaaaactttaaacattttgagaaatagaagaccattcagctggtatcagacccaggaaggaatccgtgaaaaattaatctccagctattcctacattctatgtgggaaagttaaagaggacaaaattgtagtataggtaaaacaagcccttacaaacacctaactttgcygcttaaagactacagaaaaggaaaggttattaccttcaactgatgtgatctttaaaaattaaaaatctaaacagaagaatattttatatattttgtaaaaatttcctatacaaatattgtaagacaatagtagctattaaaaataagttattattttccactaaaaaatcctaacttgtagtaatatttattttcaagggaaacgaaaattatgtggttatacaagggtttttggaaagaaacacagacaaaataaagacactgcactaagctggctgcaccaacttaaatttcaagggggctgcatcctaatgaca

SEQ ID NO: 288483 - DNA, 579 bp, Homo sapiens
gttgagaagaaagatctcagagggttattctgttaagagaagaaagcagaattagcacaattagcatgggggatagacaggtattcattctttaaaactttaaacattttgagaaatagaagaccattcagctggtatcagacccaggaaggaatccgtgaaaaattaatctccagctattcctacattctatgtgggaaagttaaagaggacaaaattgtagtataggtaaaacaagcccttacaaacacctaactttgctgcttaaagactacagaaaaggaaaggttattaccttcaactgatgtgatctttaaaaattaaaaatctaaacagaagaatattttatatattttgtaaaaatttcctatacaaatattgtaagacaatagtagctattaaaaataagttaktattttccactaaaaaatcctaacttgtagtaatatttattttcaagggaaacgaaaattatgtggttatacaagggtttttggaaagaaacacagacaaaataaagacactgcactaagctggctgcaccaacttaaatttcaagggggctgcatcctaatgaca

SEQ ID NO: 288484 - DNA, 593 bp, Homo sapiens
atatttgtctcaaagttcaatacatatttttgctatttctttcagacacattggcaaattggtaatcacgactatcttagagacatgacttgtaactttcatagctgtcaagaaaatttgttgacattttcttcctaggaggaaattccattttagagatgatatgggggaaagaggattaatgagaaagctcattaacatatttgsctgtaggaacaaagtgaacatgggagacagccatgactaatgggtgaaacatcacccatgtcctgtggtcatatgaatattctgagttgtgatctggctaaatagcaggtctctttcattgtaacttggtaagaatatctaatttacaaaactgaaacaaaaggacaccactttgtaaggatttgtgtcctaagacagattttagatggaagcatatttactggtgatgtgtgagaatgtaatacaaactgaactcctaaattaaagagttggaagtgtgacattaagaaatttctaaaactgggaaactctcttcttatggtaaaagggagagactcgcagggagtgagaagcactgaaatagggaaatgttttagtacctcaat

SEQ ID NO: 288485 - DNA, 388 bp, Homo sapiens
tcctttctagtaacacaaagggactaagacagggccccactcttctgacttcatctaaccctgattctctcccaaaggcctcatctccaaataccatcacaataggggctagggcttcaatatatgaatttgggtaggggaaccacagttcagttcatagcaagagggttttggtaaactgttggagtcagatgccacacagcagcagtgagctaacgagcaaaggggagatgaagcagagaacatgaacaactcatgagacttggtagtgagaggctgatgttatgagagtagcttatagaaaagaaaataacctmcttgggaaagaaaagatctcatgtttaatttgcttagaaatccttttttattttcttttcacatccagtga

SEQ ID NO: 288486 - DNA, 437 bp, Homo sapiens
catctgacgatggatcactctgccctcttctgaaaataccttctttaactggctttcagaacacaactttccaggccttttctttgctaattcctcctcttccctacatctccccctgcctaccccgccccccacccccacaaaatatgaaaaraataagaaagtaaaacaaattcaggcctgcgttggaaactctccagggagatccagatactcttccagggcttatgaagccctaggtgatctggccagaactgttttcttggacctcatctccttccactctccccctgctcactctgctcccagtcattgctgccttgccactcctgaagcatagcaagagtgccctgggctctgcaccttggccctcactcttcctttctgcctgaaatgattgtcccccatcttcacatgactgtgtccctcatttcaca

SEQ ID NO: 288487 - DNA, 437 bp, Homo sapiens
catctgacgatggatcactctgccctcttctgaaaataccttctttaactggctttcagaacacaactttccaggccttttctttgctaattcctcctcttccctacatctccccctgcctaccccgccccccacccccacaaaatatgaaaagaataagaaagtaaaacaaattcaggcctgcgttsgaaactctccagggagatccagatactcttccagggcttatgaagccctaggtgatctggccagaactgttttcttggacctcatctccttccactctccccctgctcactctgctcccagtcattgctgccttgccactcctgaagcatagcaagagtgccctgggctctgcaccttggccctcactcttcctttctgcctgaaatgattgtcccccatcttcacatgactgtgtccctcatttcaca

SEQ ID NO: 288488 - DNA, 407 bp, Homo sapiens
ctagttcaggatgttacagagtcagtgtcaacattactgtcaaagagtcaatgacttctgtggctaggggacccttacagaaggagtaagcccgcaagtcaacaccaatgagagccattttgtttatgatacccaggataatggcaggtattttcagagttcttcctrcccctgaaatgcctactaaacatcaggctgaaactgaccccacagtgacctctagacagcattgaggctcctgggcaatcagagagatggcactaaaggggccctgaggggttttattagctctgcttccaggtgaggaggaggactcaaccatcaaaagtgaatggcaactttgccctacaagatattaagcgaaaactagtgtttaagagaaaaatgacagggaatagaaacaccaa

SEQ ID NO: 288489 - DNA, 407 bp, Homo sapiens
ctagttcaggatgttacagagtcagtgtcaacattactgtcaaagagtcaatgacttctgtggctaggggacccttacagaaggagtaagcccgcaagtcaacaccaatgagagccattttgtttatgatacccaggataatggcaggtattttcagagttcttcctacccctgaaatgcctastaaacatcaggctgaaactgaccccacagtgacctctagacagcattgaggctcctgggcaatcagagagatggcactaaaggggccctgaggggttttattagctctgcttccaggtgaggaggaggactcaaccatcaaaagtgaatggcaactttgccctacaagatattaagcgaaaactagtgtttaagagaaaaatgacagggaatagaaacaccaa

SEQ ID NO: 288490 - DNA, 587 bp, Homo sapiens
gttatttccggttccacagcaaaagaaaagttaggacacataacataaatcattacatastatttatgtatcatttgggtgctgtcttagtccacttgtgctactataacaaaatacctgagactggataatttataaagaacagaattttactctcacagttctggaggctgggaagtccaagatcaaggtgccaagatcttccagatggtgccctcttgctgtatactctggagaggccaaatgctgtgtcttcatatagcagaagagatggaaggccaaaaggcctaagctagttccctttagctcatttataaggaatcctcattactttatcacttaccaaaaggccctacctcttaattagcaccacgatgggggttaagtttcaatgcgaattttggaggggacatattcaacccatagcaagtgctatatgaagtttataatgaattttcaatagttctcactacactatatggattcagtcattcttaacactctctgtgttatcttcataatcttctatggtaatgaatatattccagtattatgttaaacataaaatggctgaattaaggtagatt

SEQ ID NO: 288491 - DNA, 420 bp, Homo sapiens
gacaggggtcattacccttaattttggtggtattacagagcgatgaaatgattcatctagcaccagaactaaagtagaacccagttcttcccaacactatcttggtcctccttactccattaattcaaatgagagcctttgtgtagtgggcactgtagttggaaccaagggggcaaagatacgtaaaacagagttcagttttttccaaagagctggcatctaggagacacacatacacacaaaaaggttacacatgaatttgggggttagagactttggaatcagacagattygtatttgagaccagacctcactgtttactagttatgcaacggtgggcaaatcattctgcccctttaaaccacagtggtcttacctcacaggattgtcaggagaattgaatgagatggcagaggaaag

SEQ ID NO: 288492 - DNA, 543 bp, Homo sapiens
cctgtgtgttttgttggctgcatgtataccaagatgtacgtgataccaacaacacacaggtaactgtgtgcccaaagatcaggagaaacatcaagctcctagtgcaggcctgaaatcttagtsgtcagattatattacagtagatagagactctgggatgttttctctctctgtcctcaaatgagggggcattttgtagcagacccagtaagcagaagggttgagtgccaatcctgagatcacagagataggaggggtctgtgccttggggctgctgctgtatgaggttaaaggtgtgagagagagagtttaagataggagcctaggctgaggacaaacttggtggagggaagagaagatcaactgtctgcagggtcctagaggtttaagaagagtgctgtcaggaaggaaagagggcctagggtcaaatgccatagaaagagaccaatgacaaaaaaagtcactggatttttcatttaagaaatcattggtgattttcaagaaaggtgtttcagtcagctcaggctgccatgaaaagatacc

SEQ ID NO: 288493 - DNA, 543 bp, Homo sapiens
cctgtgtgttttgttggctgcatgtataccaagatgtacgtgataccaacaacacacaggtaactgtgtgcccaaagatcaggagaaacatcaagctcctagtgcaggcctgaaatcttagtcgtcagattatattacagtagatagagactctgggatgttttctctctctgtcctcaaatgagggggcattttgtagcagacccagtaagcagaagggttgagtgccaatcctgagatcacagagataggaggggtctgtgccttggggctgctgctgtatgaggttaaaggtgtgagagagagagtttargataggagcctaggctgaggacaaacttggtggagggaagagaagatcaactgtctgcagggtcctagaggtttaagaagagtgctgtcaggaaggaaagagggcctagggtcaaatgccatagaaagagaccaatgacaaaaaaagtcactggatttttcatttaagaaatcattggtgattttcaagaaaggtgtttcagtcagctcaggctgccatgaaaagatacc

SEQ ID NO: 288494 - DNA, 543 bp, Homo sapiens
cctgtgtgttttgttggctgcatgtataccaagatgtacgtgataccaacaacacacaggtaactgtgtgcccaaagatcaggagaaacatcaagctcctagtgcaggcctgaaatcttagtcgtcagattatattacagtagatagagactctgggatgttttctctctctgtcctcaaatgagggggcattttgtagcagacccagtaagcagaagggttgagtgccaatcctgagatcacagagataggaggggtctgtgccttggggctgctgctgtatgaggttaaaggtgtgagagagagagtttaagataggagcctaggctgaggacaaacttggtggagggaagagaagatcaacygtctgcagggtcctagaggtttaagaagagtgctgtcaggaaggaaagagggcctagggtcaaatgccatagaaagagaccaatgacaaaaaaagtcactggatttttcatttaagaaatcattggtgattttcaagaaaggtgtttcagtcagctcaggctgccatgaaaagatacc

SEQ ID NO: 288495 - DNA, 605 bp, Homo sapiens
tgtttagggcgtaagctatctattttgggctacccatcacagcttctctcctttggtagaataaagtgaactgaaccaccatgcctaaggtatttgccttatttcttcctcagctggttcatggttacattgtcaaagctggcaaagcattcaagacctgatttctcagaccgagtgtatgtgtgaatataatatactcatttgcacaaatataaaccctctgtcttaactgtgttctgcaaaaggcgtgataaatactttcaagttatatgtmcttatcagtagaactaatggaatacacacagtatattatatggggaatttcagagaaggaaggaaaagtcaaccttttatttggcatcaggatagtagtaaaacattctacttgtgcatcagatagatttttatgacctaacctggacaagtaacttaactcttggtgcctcatgtttgaaagagggataacactctacagggtcattctaagaattaaatattgccaaaacacatgaaaagattctcaaccttgttagtaatcaaggaaatgcaaatgaagatcacaatgaagtcttcttttgtactcaattgattggtgaaaaatgcat

SEQ ID NO: 288496 - DNA, 1165 bp, Homo sapiens
attaacatgttctattttcttttcctcctatcctaccctcctgccttctaccagaaggcaaaggggatctaaagtcttcctgcaaacacagagctgtggtctcttgtgattacagtcccatttctatctctctcatttatcttatcaaaaaaaatcttataatatttacacatactctaagaagccaggtaactgttaagacttaaattcagcagagcttaaacaaaagaagagcaaaaatgatccagaagtcataatttactgttaaaatgctactatctcatgtaccatcccccataccacactcttccatgtctcattcaataccttacagagaccctttaagaacacaggctgtgctttcaggaataactgacatccctgtaaatccatgtaatgttcagaatataaakccagtgctctctgctgtccatatagcaccattaatcttatgaacagtaccacagaacaccctcccccagccccctccatctgctttaagtagggcaagtgttttactcatgttaatggttctgacagatgaggatcaacactgcttwtgtttagggcgtaagctatctattttgggctacccatcacagcttctctcctttggtagaataaagtgaactgaaccaccatgcctaaggtatttgccttatttcttcctcagctggttcatggttacattgtcaaagctggcaaagcattcaagacctgatttctcagaccgagtgtatgtgtgaatataatatactcatttgcacaaatataaaccctctgtcttaactgtgttctgcaaaaggcgtgataaatactttcaagttatatgtccttatcagtagaactaatggaatacacacagtatattwtatggggaatttcagagaaggaaggaaaagtcaaccttttatttggcatcaggatagtagtaaaacattctacttgtgcatcagatagatttttatgacctaacctggacaagtaacttaactcttggtgcctcatgtttgaaagagggataacactctacagggtcattctaagaattaaatattgccaaaacacatgaaaagattctcaaccttgttagtaatcaaggaaatgcaaatgaagatcacaatgaagtcttcttttgtactcaattgattggtgaaaaatgcat

SEQ ID NO: 288497 - DNA, 560 bp, Homo sapiens
tttttttaagcccaaataggcaaacaaagagagaggagataggtgactgcttgggctaggggagaggataggtaggtagcggggaaagaagtgaagaatggctacytatggttatggggtttcttttttaggcagtgaaaaggctgtttgtggtgatggacacacaactctgaacacactaaaaaccactggattgtacatttgaagagggtgaattgtatgctatgtgaattatatctcaaagctgttgaaatcataaagtaaaataagctccctagcacacaggaagcctgatgacagccaatctctttaattttcacctcccactatttcttgggtcgtgggaggccaaaacaacaactactgatggcatcaaatattgaaaacttactatgtagggggccctatgtattaagcactttattccattcaaacctcacagcaaccccacatgggtgaattactatcctcactttatagttgagaagaaaaggaggcagggcataagtaatctgctcaaggtcacaggggaactgtgaagccaggacttgagcccaagg

SEQ ID NO: 288498 - DNA, 560 bp, Homo sapiens
tttttttaagcccaaataggcaaacaaagagagaggagataggtgactgcttgggctaggggagaggataggtaggtagcggggaaagaagtgaagaatggctacctatggttatggggtttcttttttaggcagtgaaaaggctgtttgtggtgatggacacacaactctgaacacactaaaaaccactggattgtacatttgaagagggtgaattgtatgctatgtgaattatatctcaaagctgttgaaatcataaagtaaaataagctccctagcacacaggaagcctgatgacagccaatctctttaattttcacctcccactatttcttgggtcgtgggaggccaaaacaacaactamtgatggcatcaaatattgaaaacttactatgtagggggccctatgtattaagcactttattccattcaaacctcacagcaaccccacatgggtgaattactatcctcactttatagttgagaagaaaaggaggcagggcataagtaatctgctcaaggtcacaggggaactgtgaagccaggacttgagcccaagg

SEQ ID NO: 288499 - DNA, 605 bp, Homo sapiens
tgtttagggcgtaagctatctattttgggctacccatcacagcttctctcctttggtagaataaagtgaactgaaccaccatgcctaaggtatttgccttatttcttcctcagctggttcatggttacattgtcaaagctggcaaagcattcaagacctgatttctcagaccgagtgtatgtgtgaatataatatactcatttgcacaaatataaaccctctgtcttaactgtgttctgcaaaaggcgtgataaatactttcaagttatatgtccttatcagtagaactaatggaatacacacagtatattatatggggaatttcagagaaggaaggaaaagtcaaccttttatttggcatcaggatagtagtaaaacattctacttgtgcatcagatagatttttatgacctaacctggacaagtaacttaactcttggtgcctcatgtttgaaagagggataacactctacagggtcattctaagaattamatattgccaaaacacatgaaaagattctcaaccttgttagtaatcaaggaaatgcaaatgaagatcacaatgaagtcttcttttgtactcaattgattggtgaaaaatgcat

SEQ ID NO: 288500 - DNA, 525 bp, Homo sapiens
cggcactcacctctacccttctgccgttacagggactctgtgacacccttgaaagagaaagcagcaggaagaataaagaggaggccaccatgatgggctgataaaagaaacgtttccttggggtttacgtttattggttgtttctgactttctctaaatggcaggagcacccgacccaatggcaccgtcttccaacctgtaaccacccaaaaaatccatattaggttccagacctaatggtaatagaaacagcttcattgctgagggaggtggggagcttttgggtaatcacaaatagcacacagcttcccagaagtaagacttctttcatcatatatttttgggaatgacayggctttctgcccccaaaacatacattcatttgcaagctaaatttctcctgtgcttattaagaggggtgggagggggcagggaatgaaggctgcatattttcccaagctcatgaagcccagcctaatcattacttcaaacatgccacagcaaaagaagtgacatctaatcctg

SEQ ID NO: 288501 - DNA, 525 bp, Homo sapiens
cggcactcacctctacccttctgccgttacagggactctgtgacacccttgaaagagaaagcagcaggaagaataaagaggaggccaccatgatgggctgataaaagaaacgtttccttggggtttacgtttattggttgtttctgactttctctaaatggcaggagcacccgacccaatggcaccgtcttccaacctgtaaccacccaaaaaatccatattaggttccagacctaatggtaatagaaacagcttcattgctgagggaggtggggagcttttgggtaatcacaaatagcacacagcttcccagaagtaagacttctttcatcatatatttttgggaatgacacggctttctgcccccaaaacatacattcatttgcaagctaaatttctcctgtgcttattaagaggggtgggagggggcrgggaatgaaggctgcatattttcccaagctcatgaagcccagcctaatcattacttcaaacatgccacagcaaaagaagtgacatctaatcctg

SEQ ID NO: 288502 - DNA, 588 bp, Homo sapiens
tttcagtgaccagcatctgcatacccaagcccctttatgtccttgcctacttcttctccctgccatcctgtctttgtatacaggcctcaccaccctaatattgacatatttattttctctcccatggatgtgatccccctctctcccacactacttcgctctcactttcatcttccctcagactcctgagacctgtcacctttcctctcccttctctaataactcctgcccccggtcctagttcagggaagaactgttaagtcaagaaatctgccaaggtggctgaggggacaactggggcagatgcgtagatgctgggcatgaggacaccaggtggccaggctgggtttcccaggcctctgaggcaggagggggtggacctgaactaaaagatggggccaacgaagccgggracagaagccaagtcctgctgctcgacagccggagcgcacacacaagccacccggaaatgctctgtggcctggatgggctctgagagttgccagttggacatactgacctagacaagcaattagctgtgttcaaggtctgctgcacagatcatatactcttgtaaactaggctaaa

SEQ ID NO: 288503 - DNA, 579 bp, Homo sapiens
agttgcagctgagtagtgggatgattggcagaatatttaatttattcaacatataattattgagtacagttgctcaatgataaaatgttgttgctgcatttatatatactatacctatagggttatacatcacaatagctgggaacataartgaccaagttgattctacattacaatttgagaaagtaaattaactaactgtatcaggtacacatagttttggttttcctttgtaaatttaaagaaaatttaagttttatttgccatggattctgctttatagagccagtcttgaatgctgatggttcattggctgacactacttgctgaatcccaacttttccttcatagcatctttttactttgcagtgcaactgtatttcctaatttgtcattgtaattctgttcacattctgaatataaaattattatttgcctatgactaaatcattttatcttgaattcatacacagatgtatgaatagttcctcatagtgtcatttcattgcagtttaatagtttttctattttacagaccatcatctgcatatagcaggtttgtaataaattataatggtc

SEQ ID NO: 288504 - DNA, 567 bp, Homo sapiens
taattatacaggtggtaaagaaatatgccagaaatcatgaatctctctctctgtgtctctttytctctctctcagtctctctctctctctcactcacacacagaccccaaggtttgcaaactctgctacccttctctctccttgatctttcatccccctaactccccaacccctgccttccctgcacccccgcaggctctgtcatttcatcacagagagggttttcattggttcctacaataacaatactaacaataagaatatcactttacatttgcatattcctttataatttcaaaatgcttttttatgtaccatctcatttgtcccagaaataaaagctagtgttctttaaaaaagagagagaaatcctccctccatatgattctgcctttgatacactaaccaacctgcctctctatccatctccagcccattacatcccttaaactcctcttcagcagagattttgaaaggggtataattgaggagggaggaggttctggggaagggcagttctacatccttctcctccaggatccacctctgcaggaaccctctgtgtgg

SEQ ID NO: 288505 - DNA, 269 bp, Homo sapiens
acccgcctcggcctcccaaagtgctgggattacaggygtgagccactgcgcctggcctgctcacctttttaatcccagcctcctcccctgggccagggcaactgttcatctgctttctgcccctctagattagcttctgttttccggaactttagagtaatggaatccttccatatgtgcccctgtttgtctgactccttctgctttttgtgtgtttcaatagcttcttcctcttcatggctgtattgtattccttgccacacatatac

SEQ ID NO: 288506 - DNA, 269 bp, Homo sapiens
acccgcctcggcctcccaaagtgctgggattacaggcgtgagccrctgcgcctggcctgctcacctttttaatcccagcctcctcccctgggccagggcaactgttcatctgctttctgcccctctagattagcttctgttttccggaactttagagtaatggaatccttccatatgtgcccctgtttgtctgactccttctgctttttgtgtgtttcaatagcttcttcctcttcatggctgtattgtattccttgccacacatatac

SEQ ID NO: 288507 - DNA, 269 bp, Homo sapiens
acccgcctcggcctcccaaagtgctgggattacaggcgtgagccactgcgcctggcctgctcacctttttaatcccagcctcctcccctgggccagggcaactgttcatctgctttctgcccctctagattagcttctgttttccggaactttagagtaatggaatccttccatatgtgcccctgtttgtctgactccttctgctttttgtgtgtttcaatagcttcttcctcttcrtggctgtattgtattccttgccacacatatac

SEQ ID NO: 288508 - DNA, 599 bp, Homo sapiens
tgtcttgatgctcaagcagcatggggtgcaaagggccctgcagcagggcccagggctcctggaaaccatggcctgctctgtgacatggcccagagggagctcaggtaccctcttgaaacctgcactcacccggcctggctgactttgacagagggagatagaggtctttggggaacttttgtaagagrgagacattgtgttctctctagaagccaagattatccccaaatcacatgagtttacacacacgcgtgcacacgtgcccttacacacaaacacatacacacgtgtgcacatgtgcacacacattcacctacatgtgcgcacactcccatctattcatcctggagtgccctgggattctggagatgcacaggtgcacgttgtgatgttgactgtggttctcagaagaggcaagaaagagattttggggtgacccaaatcccagcagagcccctagcaatgcacaagggggaagagtatggactggagactgcaagagaacaagaatcaggagaagggattcctgagtgaaagaggtttctggagccacctcgggaggggcagcttacctgcagctggcttctgggcagaacctg

SEQ ID NO: 288509 - DNA, 558 bp, Homo sapiens
ccttggaaagtgtggtgaggtggaggccatgacacagctctgaaaaaactgatcaaaaaatgcaccaggaagatccctggagtccaggccctgcctccctccaccccgacctcatctcaggtggacaggcagattctaacaccctccacatgtgccatatccagaggaaaagaggctcaaaaacccaagagcctttgagacccctccagcccaggtctctgcaagaagaagcaggactgtctttccttttctttcagacagaatctcactctgtcacccaggctggagtgcaatggtgccatcatggctcactgcagcctcaacctcccrgcctcaagccatcctcccacctcagccttctgagcagctgaggctacaggtgcacaccaccatgcctggctaattttttattttttgtagagaaaggatctcactatgcaacatagtgagatcaagaccaggctggtcttgaactcctgggctcaagtaatcctcccacctcgacctcctaaagtagtgggattgcaggcatgggccaccgcacccagtcaagactgt

SEQ ID NO: 288510 - DNA, 578 bp, Homo sapiens
tttcaagatttgtgaggctgttgacacgatctccgggctcactttcttccttagcaacaatgtgtttgtcaggaaatacaggctgtggccactccagaacctctgcagaggacaagcttaagggacttaattcttgcagtgggaagagggcgagtttagcgaacttatcttatggtattcagttaggaagtagcatagacgtgaggcctggaggtgttcactccccttgccagacctcagtttcctcatgggcactgggcattctacgcttttctccagctttaattactctgtgatccttggccaaatgcagagaagactgggtatggaggggaaaatgcaaaggtccagaagacagaagaagaggggaagaggagacaaggactgaagctgaaattctcagactcacagacacacacagacacacacacacacacacacacacacacacacactccaggmtggagaacaaaggctgatttcctcccaggtctggctctgtatcacctgctggccttcctgaaaccccagtaatggctgggtctgtcccagcccctgccccaagtgtgggaagggga

SEQ ID NO: 288511 - DNA, 461 bp, Homo sapiens
ggagaagcgtctgactgcctgagcatggccctcctgttaccacctctgctgcaactggctcagagcaacgcctgaggctgatgcccaagtgaaatgctctcctcccaaggcctcccggcctggtcgcccttcctgggtgatgcattggctcccacgtaccggaatgaatgctgagtcagaaaggcccagtggccttggccaacacccaaggcctctctggacttcatgacaccaactgtaatatgaagatartcataatagtgaccttgtaagaagtttttgaggattaagttaaaaatacatctgaagggtaagaacttattattcttaagcctcagcctgcggtaggaagtgagattgagccctgggggcatgtgaccccaaagaggaggcacatctaggccagggctgcctggacagggcagtggctgtggtggagcatgaggtgctgcctgggataa

SEQ ID NO: 288512 - DNA, 618 bp, Homo sapiens
tcctgtacctcccccgcagcacccagagcatgtgccactggttgtgccgcagttagggtctaggtttgacaaagtccctgtccagctttggcttctctatatgcctctgagtttgcggaagaaaacagggctatggcaaacctattccatagtgagagaccccaccagctcctggagatgtggagaaagaggggtagttaagattscttgtggttcttgggaatggcaggggcaaaggagagttgaagggagaagttcggacagaactgtttagaaggcagagagaaacctggagcctggcatggcttggggaccaggctgtaaccagtaccagtggggcaaagaaagcgcctgctatagaacagggagtctgggagctggggaagcctccaccccaggtcaggaaacacctgacctcatgggctggagtctcacttctttctctttttttttttagagagagggtctcactatgttgccatggctggtcttgaactcctgggctcaagcaatcctcccgcctcagcctcctgagttgctgagattataggcatgagccactgcacccatggtgcctaatttctgcctgatatgctgttggctcttggatccctggcc

SEQ ID NO: 288513 - DNA, 618 bp, Homo sapiens
tcctgtacctcccccgcagcacccagagcatgtgccactggttgtgccgcagttagggtctaggtttgacaaagtccctgtccagctttggcttctctatatgcctctgagtttgcggaagaaaacagggctatggcaaacctattccatagtgagagaccccaccagctcctggagatgtggagaaagaggggtagttaagattgcttgtggttcttgggaatggcaggggcaaaggagagttgaagggagaagttcggacagaactgtttagaaggcagagagaaacctggagcctggcatggcttggggaccaggctgtaaccagtaccagtggggcaaagaaagcgcctgctatrgaacagggagtctgggagctggggaagcctccaccccaggtcaggaaacacctgacctcatgggctggagtctcacttctttctctttttttttttagagagagggtctcactatgttgccatggctggtcttgaactcctgggctcaagcaatcctcccgcctcagcctcctgagttgctgagattataggcatgagccactgcacccatggtgcctaatttctgcctgatatgctgttggctcttggatccctggcc

SEQ ID NO: 288514 - DNA, 426 bp, Homo sapiens
tttttgtttctcagaagccttgttctgtaggaaacatgaggcggtaggatcccagcatggactctgccatattcttatcctggcaacaggccctgcatgtggagcctcagatatcttcaacagcccctctgcggtgctgacaaggggcacacagggctctcagatggtgcttggaaatgcytggcttcctgaacctcttatttggttctttgcagaaggttttccacaagcaagaccgtgggtcaggatacctgaactgggagcagctgcacgctgccatgagggaggcaggtaggcacaggaagagctggagctgtgggcacacacgggcagggtgcacactcatcaggcagaggagaggggatgtgtggcatgctgaagtaactctaatacgcagtgttactctcaaagacgtagatctgcagt

SEQ ID NO: 288515 - DNA, 426 bp, Homo sapiens
tttttgtttctcagaagccttgttctgtaggaaacatgaggcggtaggatcccagcatggactctgccatattcttatcctggcaacaggccctgcatgtggagcctcagatatcttcaacagcccctctgcggtgctgacaaggggcacacagggctctcagatggtgcttggaaatgcctggcttcctgaacctcttatttggttctttgcagaaggttttccacaagcaagaccgtgggtcaggatacctgaactgggagcagctgcacgctgccatgagggaggcaggtaggcacaggaagagctggagctgtgggcacacacgggcagggtgcacactcatcaggcagaggagaggggatgtgtggcatgctgaagtaactctaataygcagtgttactctcaaagacgtagatctgcagt

SEQ ID NO: 288516 - DNA, 618 bp, Homo sapiens
catttagtcccagcatctgcaaattgatagagacataggctaagtttcagctgtttggggatggggtcagggatatagtgggctttcagaaacacagacagtaagagaattggcagagtccaggtggggtgggctggctctggcatctgaggtcatggggtagtcttcttctgacaatatctccrtatgattggatctggggcaacctagtagatttaaaacacctgagttctcaaagggcttcctgcttgtgacaggtgtgtctatttgcttgatatatagactatcagatccatttcaaatctgtccagaaattctctgtctatctacttcaaaggacaaaaacaaacccatgctaaattatagagtcaatcagtgggtggttggtatatctgattttttgaactaccatgaaacaccttgtttatgtcatccctctcaaccaagaatacaggtgcaaaaccagaacaatggcctttttccaaagtctatgcaatttattcataagttagcacctcagagccatttattactacaggttgagcatcccaaatctgaaaaccccaaatctgaaatactccaaaatctaaaatttctgagagtagacatgaaactcaa

SEQ ID NO: 288517 - DNA, 605 bp, Homo sapiens
catctgcaaattgatagagacataggctaagtttcagctgtttggggatggggtcagggatatagtgggctttcagaaacacagacagtaagagaattggcagagtccaggtggggtgggctggctctggcatctgaggtcatggggtagtcttcttctgacaatatctccgtatgattggatctggggcaacctagtagatttaaaacacctgagttctcaaagggcttcctgcttgtgacaggtgtgtctatttgcttgatatatagactatcagatccatttcaaatcygtccagaaattctctgtctatctacttcaaaggacaaaaacaaacccatgctaaattatagagtcaatcagtgggtggttggtatatctgattttttgaactaccatgaaacaccttgtttatgtcatccctctcaaccaagaatacaggtgcaaaaccagaacaatggcctttttccaaagtctatgcaatttattcataagttagcacctcagagccatttattactacaggttgagcatcccaaatctgaaaaccccaaatctgaaatactccaaaatctaaaatttctgagagtagacatgaaactcaa

SEQ ID NO: 288518 - DNA, 451 bp, Homo sapiens
atatgtatttagatttataatgaaggaaaggaggaaatgagtgttgtgggtgatgagtaggtaaaagcgggcatcatggagaagcaggctgtgtatcaagctctcaggatctctgcaaagatggtcctttggggtcactggtctcaggtcctgggttaccatcttttctccagtgtcctgaggacagagaggctaccaaatccaacagaaatgaaagagaagagaggtgagaagatgcactctagctgtgtgacattggacctcagtttattcatttgtaaaatggagcccaaatgcytccattcctgggtcattgtgaagattagataatgccagcaggctgtaggcacccaatgaatgaagctccaatttttcccctgaggtagaacaagtaatttctacagctactattacttatttttattttggtttttagaggacatagtgaaac

SEQ ID NO: 288519 - DNA, 451 bp, Homo sapiens
atatgtatttagatttataatgaaggaaaggaggaaatgagtgttgtgggtgatgagtaggtaaaagcgggcatcatggagaagcaggctgtgtatcaagctctcaggatctctgcaaagatggtcctttggggtcactggtctcaggtcctgggttaccatcttttctccagtgtcctgaggacagagaggctaccaaatccaacagaaatgaaagagaagagaggtgagaagatgcactctagctgtgtgacattggacctcagtttattcatttgtaaaatggagcccaaatgcctccatycctgggtcattgtgaagattagataatgccagcaggctgtaggcacccaatgaatgaagctccaatttttcccctgaggtagaacaagtaatttctacagctactattacttatttttattttggtttttagaggacatagtgaaac

SEQ ID NO: 288520 - DNA, 562 bp, Homo sapiens
aaaggaggaaatgagtgttgtgggtgatgagtaggtaaaagcgggcatcatggagaagcaggctgtgtatcaagctctcaggatctctgcaaagatggtcctttggggtcactggtctcaggtcctgggttaccatcttttctccagtgtcctgaggacagagaggctaccaaatccaacagaaatgaaagagaagagaggtgagaagatgcactctagctgtgtgacattggacctcagtttattcatttgtaaaatggagcccaaatgcctccattcctgggtcattgtgaagattagataatgccagcaggctgyaggcacccaatgaatgaagctccaatttttcccctgaggtagaacaagtaatttctacagctactattacttatttttattttggtttttagaggacatagtgaaacacccatggttttatgctctatttctcttttcctcatcttcttccacatcctctttctgaatgtatcaaactacttccttgaagtggggcaccaggagggccactccagtctccaatgcagggactcaggggcaggga

SEQ ID NO: 288521 - DNA, 574 bp, Homo sapiens
agggaaagtgacccacatctgtcccctcaaacatcagttcctctttccagggagatgggagctgtgcaaacatggaattcccacacctcacaggtctctcctgggtggagacttcaagatggagagagggaagagaggcagcatatgtagaagggcaggaaagtggcatgtgtgtccagtggcagtgaagaaaggggataacagacatctccctttcctataaaataaaaagacaggagcttcacctacctctgctatttccttcccatttctccttcagcttgaagaaaggtgtggagctgagaaatggtccctaacctgcactcggcactcaagggttttctccagagcaggtgagacctctttgcctggcctttgtctgcccttcatttcatgtgaaagagaaatgtgtatttgcagaaggaagcccaggggcttagggaacatcttcactccagagragcagggagcggtggctccaccagctgtgcctgggttggtcactgagcctagacaaactccagcccactgggaagctggttgtggatgctggccattgggtggccccagtgag

SEQ ID NO: 288522 - DNA, 589 bp, Homo sapiens
tgaggcctgccctttccaacaccccaccctacctgtcttgagctatgcggcttctggcataattttcttctgcaagtgggagaaaccatgcaagccmaggcttaaaatggaagataaagacaggagccagcatggggcttaaataccaggcctctcccgagcctgggtctggcccaggaccacccacctcccaccactcactctgtgatttgcgacctgaaagcaaaaggttcaggaacttgacccaatggttgatcctcccaggagaaggaattctgaatgggtaaaagaaagtgatgccctagtatcttgaatttcgggatatgaagaacgtgttcagagggcatctgtgatggtttgaactgcctcttcagtcaggacctgccatttggcatcagaatgactctaaactttaggccaccagagagggaccctttagtgagaagtcacatgtctctttaggcaaaccttatatattgatattttcagttagcaacttgagtagagactgactttttaaatgacaggattcacctgaattactttaaagtcattcattcattaaattggtaaatattaaacatgagct

SEQ ID NO: 288523 - DNA, 589 bp, Homo sapiens
tgaggcctgccctttccaacaccccaccctacctgtcttgagctatgcggcttctggcataattttcttctgcaagtgggagaaaccatgcaagcccaggcttaaaatggaagataaagacaggagccagcatggggcttaaataccaggcctctccygagcctgggtctggcccaggaccacccacctcccaccactcactctgtgatttgcgacctgaaagcaaaaggttcaggaacttgacccaatggttgatcctcccaggagaaggaattctgaatgggtaaaagaaagtgatgccctagtatcttgaatttcgggatatgaagaacgtgttcagagggcatctgtgatggtttgaactgcctcttcagtcaggacctgccatttggcatcagaatgactctaaactttaggccaccagagagggaccctttagtgagaagtcacatgtctctttaggcaaaccttatatattgatattttcagttagcaacttgagtagagactgactttttaaatgacaggattcacctgaattactttaaagtcattcattcattaaattggtaaatattaaacatgagct

SEQ ID NO: 288524 - DNA, 589 bp, Homo sapiens
tgaggcctgccctttccaacaccccaccctacctgtcttgagctatgcggcttctggcataattttcttctgcaagtgggagaaaccatgcaagcccaggcttaaaatggaagataaagacaggagccagcatggggcttaaataccaggcctctcccgagcctgggtctggcscaggaccacccacctcccaccactcactctgtgatttgcgacctgaaagcaaaaggttcaggaacttgacccaatggttgatcctcccaggagaaggaattctgaatgggtaaaagaaagtgatgccctagtatcttgaatttcgggatatgaagaacgtgttcagagggcatctgtgatggtttgaactgcctcttcagtcaggacctgccatttggcatcagaatgactctaaactttaggccaccagagagggaccctttagtgagaagtcacatgtctctttaggcaaaccttatatattgatattttcagttagcaacttgagtagagactgactttttaaatgacaggattcacctgaattactttaaagtcattcattcattaaattggtaaatattaaacatgagct

SEQ ID NO: 288525 - DNA, 521 bp, Homo sapiens
gttagaaatgctctgcgccagacctactgaatcagaaactttggggatagagtccaaccatctgggttttaagaagccctgtgggggattctgatggaggctaagtcaggacccctgttaaagacagtcagagcttcttaagtctgactcactcacaaggcagttgcctgatgatcttgcctggtctctagcctccctctgtgaggcagggcaggctttttcctaatgatttggtttcccattcgatggtggcaatgagctttgggtccccagtgtgtgtcaccttggaacccttgtgctatggggagccaggatggttggtcactttagtacccargaaagggctcctaccttggtgccagaggtatgccacgggggagtggcaaggaggagaggctgagaaccctggctcagactcagaatgggaaagcctaacacctccatcttcatgcgactgctgctgctcatgggctgtgtgcccttcgacaaatcacttgacttctctgagccccacttcctta

SEQ ID NO: 288526 - DNA, 1036 bp, Homo sapiens
agtgagactcgggcctggagctgagcacttgcagtggaaaatcacagccccagagagagctggtagaggagaaagtggctctgcttcttgtacttacaagctgtgagacctagggcaaatcagctaacctctctgtgtctccatttcccgatctgtgaaataaggtcaatagtcatacctatgatagtgggttgaatggtgatcttccctccccaaagaggataygtacacttagaacctgtgaacatgaccctatttggaaaaaggatctttgcaaatgtaattaaagtaaggacctgggtttgagataattatggatcagggtgggccctaaatccaaagacaagtgtcagaagagaaagggagaggacacagagaaggccacgtgaagatggaggcagagaatggagttatgtagaccaagccaawtataccaaattctaacaagaaggaaaaatcatatttwtatatatatatgattttgtgcatacatatatgactttgtgcatatatgtatatatatatatgttggggtgattgttgtaaattgccctaattccttttctttttcctaaaacctttttctttttcctggttcattttttttctaccaggacccgtattttaaaatggtagaacagagtatggtgtagagaatgtaactatggaatggaacttttctccatgaaaagctaaatatctcttaaattgggaaccaaacccatgaccttgactttgttgtcatcatagtttaaaacactgggtctcaaacctagatatacattagaattatctcttgttattgctaagagtcacatgccactgcctcaccctaagcctgctgaaattttatggatgatgtctctaggcacccaagtttgggaaccactgatctaatcaataccttcaagtccaatcagttccacctgtaggcctccctggaaatgggaaagatggcgtaccgtttcaatatttcagtgcaacagacaaatcagactgtcaaaacaaagcaaaggaaaatagaaccttaccagta

SEQ ID NO: 288527 - DNA, 482 bp, Homo sapiens
  misc_feature (1)...(482): n = A,T,C or G
actgtaacactcactaagagccctggctaaaagtggtgcctaagttgagtgactccatgttcaaaagcaagcaagaagagtgaagcaaagtttactgatgccagactgtgtgttaggtacttactagcatgtgtcaggccattcaaatctttccagcagcccccaaataagaagtaacnacagcagctgctgcatctttccagttyacagaggagaaagcacaggctgaagaaggtttctgggattagaattagaactgggtcaacttgattccagagctcatgctcttttctctttaccatcagtatttttttcaacatcttgaggcaggtcagaagctaagctaatgaatccagcagctgctagtgtaggcactaccagctggatgactggcagcctccaggactcctttctcctgtaagaagcatctatccagaagggcagctgatttcacagagttgtaatcatagcacaaataacta

SEQ ID NO: 288528 - DNA, 504 bp, Homo sapiens
actcctctagagtttgaaagataattaaatagtgaatagagctatagtccctacccacatggtgcttattgtttaattgaaaatatagatgatataaataatcacacgatatcagttaactattggccgaaaataatgctgcattgcaaataatcacaaaagtatagtggcacataaaactcaaggattgttactcgttcttctgaggtggtcagagaagtagctttgctgatttcattggactcattcaygtggtaaggaggtggttgggtgtaagatgattcaaggtggctttgtttaggacaactagggtaacttgactttttgttgtttagaacaacttcagggtggctttgtttaggacaagtagggtaatgactttttcccacgtgtcatagcctgggcatagtcttttcgtaatgctagagacacaagagagatcaagggaaaagtgagcattcctctgaagcttagactaaaaaatagctctttgtatcatcattc

SEQ ID NO: 288529 - DNA, 569 bp, Homo sapiens
tatcaatagtgttcacagagatttaggtttttctaagatgattcacaatttctccataattttcctgacttctttctgatactcattgataaaatctttaatgtccaatttttgctatcaacaatcttttcaaggtactctttttctattttattcttccaaattcttccagactctactcattgatcaatttaaaagttacttcaaaattttaggtgttcatcaagtagtaccccaatttcaggcaccaaataaaatctgtgttagttttttttttttargttttatttttctattaattgacagataataattgcagatgtttatggagtacaatgtgatgttttaatatacacatgcattatagaatgatcaaatctagctaattaacatattcatcacctcaaatgtttgtcatttctttgtagtgagaacatttaaaaccgtcttttagctactttgaaatacacaataattattattaatgacagtcatggtcatcatgctgtgcaaataacaccagaactttttactcttatctaaatgaaactttgtaccagttgaccaac

SEQ ID NO: 288530 - DNA, 632 bp, Homo sapiens
taactactctttattaggtgagctacttctggagaggtttataagcattatagttaaaaaaaaaaaaagaaataaaagattaaggaaatgacataaaccttcttcagaaagataaataggtacttggtgggagctaaaacatctagtcagcatatatgatgagtgcatccaactccagttggcaacaggagtgagaattaagaacaatactctaggagtttgaatcagtaaataaaatctatattctgtgcctgagttaggatcagttggacacagacacagtagtcagacagagattaaaaatcaacactgtccctagagtggagaccatagactagaagaataagccccartggatttgctaatatttaatttctgaagtagacacattttcggagatggatggacaactgccctccctaacaggtatattactcagctccacaatacagccagaaaaggactaaactgagcatgttcagtttcttttcccaaactgcaaattagatgaatcattcctactcttacgaggtagaagtgagtaaggggtggagaagtaggtcaggagttctactaggtggatgctcccaacatgaagctcagaaagaaaatcaggtctctactaatataga

SEQ ID NO: 288531 - DNA, 632 bp, Homo sapiens
taactactctttattaggtgagctacttctggagaggtttataagcattatagttaaaaaaaaaaaaagaaataaaagattaaggaaatgacataaaccttcttcagaaagataaataggtacttggtgggagctaaaacatctagtcagcatatatgatgagtgcatccaactccagttggcaacaggagtgagaattaagaacaatactctaggagtttgaatcagtaaataaaatctatattctgtgcctgagttaggatcagttggacacagacacagtagtcagacagagattaaaaatcaacactgtccctagagtggagaccatagactagaagaataagccccagtggatttgctaatatttaatttctgaagtagacacattttcggagatggatggacaactgccctccctaacaggtatattactcagctccacaatacagccrgaaaaggactaaactgagcatgttcagtttcttttcccaaactgcaaattagatgaatcattcctactcttacgaggtagaagtgagtaaggggtggagaagtaggtcaggagttctactaggtggatgctcccaacatgaagctcagaaagaaaatcaggtctctactaatataga

SEQ ID NO: 288532 - DNA, 530 bp, Homo sapiens
aatacaggcatgagccactgtatctgggctattttaaagttcttttcatagatcattgtaaaaccaggacaattccatcacttttttttccatgtggctgttccacataaggcaaatctatccttacaagaaaaggaggaaaaaaagagtccttgatactttccccttcaagtctagagtctgattgcttccatacacatcttgtataaaatgaaaattttttttagaaaagataaatataagaaaacatggagtcaagttacacatgctgctgccaaatcgagaatcagtaattcttgtcgtcctttaggtagcacataattcaacatgycagaaactggtgttttggtatactttcatgtgcttttatctgttggatcttggtgaatcagcccattttagttacatttgcttagttactctgttcaggttcccctttattaaaggtcaaccaagctatgttagtagaggctcactgattgcctgttcctttatcaagatgttgtctcacatatgccctactaagtttt

SEQ ID NO: 288533 - DNA, 543 bp, Homo sapiens
tcagagttctatacttgaccttttattctctttaaccacttttcataagcggagttgagttgaagtattgctatctttaaataagtacccaggaagctgactggatgttatgttttatttgctttagaacatgaaccatttttagttttttttctaytttatccagaaagtgactcaacaactagaatgtcagcagcctccaaatctataaatataaaaccaacgcagcctggaaattcttattacccaacagtatctactatactttctggttaaaatgactggggcctctatttcatacatggtaatagagaaaggcaatttaataacaatttggatcttccaaaagcctgaaatgcagtaaagaagaattgtgtgtgtgtatgtgtgtattgctaagtatactacaaatgtggtatcttttctcaatgagaagggttgtgtagtctgtcccagttaaaagccataaccaatctcctcccttctaggaatatttctgctcactaataacaaatttattgtcatatctcttcagatagcaga

SEQ ID NO: 288534 - DNA, 482 bp, Homo sapiens
gaaagtatattttaatgaactttcaaataattgtcatcaaaatgttagaattaatattttcttactcttgtatatttartatttttatttccatcttttacttttccctttatgaattttaatatgtaatttaaaaatataagttaatttaaattttgctgtttgaaaaactgttacatataatttattacacagcagttatattagggcctttcatattttgagatacattctgaatatatgatttgctctcaaataaacataatttttctatagttaatatcaatttttaaatttatacttaatatggaaaagtattctcctaatatttggttaaatgcctacatcataataatgcaacaatggtaggcaatattcttaaactaatttagtttaaagacaaaacagttgtaactatttaacagttaaattagtataaaaaaattaaaaaaaagaaattgacataaatgaaatggacgact

SEQ ID NO: 288535 - DNA, 604 bp, Homo sapiens
aagtattctcctaatatttggttaaatgcctacatcataataatgcaacaatggtaggcaatattcttaaactaatttagtttaaagacaaaacagttgtaactatttaacagttaaattagtataaaaaaattaaaaaaaagaaattgacataaatgaaatggacgactctctagaaagttatttatttatttatttctctattcattttggctgaatagctgtgtgtgtttttgtagaagcatactgatggcaaagtcattaattaataaattttgccatattaaacataaaaatttcaaggaaaagagtccccattttctatacccctgacagaatcatasagatgagtctttcttaagttgttgtctcttctttgaagtatttcaacattctgcccagccttttgctctgtttttgaagtacacacaatgctttattctgcagtgtcctttagccattttgaaataaatataatgacttgaatttatagtgcctttcaggcacagactccatggtatgccatagatattaattgaatttcatgagccatatagtgatatacactaatcccaaaggacacatactatttttaaacactaga

SEQ ID NO: 288536 - DNA, 590 bp, Homo sapiens
tatccattttttatttgatgggtcatacctttggtgttatatttaaaaaatcatcatcatgctcaaggtcatctaggttttctcctatgttatctctaggagtttcatagttttgcattttacatttaggtctataatctcttgtaagttaatttttgtaaaagatttgagatttgtgtctagattcatttttatgtgttaatgtccggttattccagcagcatttgtttaaaaatctatctttgctccatatatagccattgctccttttcaaagatcagttgattrtacttatgtgggtctatttctggctatttgttccattgttgtgtttgtctattctttcaccaatatcacattgttttgataactgtagcttcatagtaaatcttgtcattggctagtgccagtcctctaactttgttctttttcttcaatattttattggttattctggagttttgcctctaatatgaactttagaattaatttgttagtaaccacaaaatagcttcccgggattataaatgagattacatggaatctatagatcaagttacaaagaactgaaattttgacaatattgaatc

SEQ ID NO: 288537 - DNA, 590 bp, Homo sapiens
tatccattttttatttgatgggtcatacctttggtgttatatttaaaaaatcatcatcatgctcaaggtcatctaggttttctcctatgttatctctaggagtttcatagttttgcattttacatttaggtctataatctcttgtaagttaatttttgtaaaagatttgagatttgtgtctagattcatttttatgtgttaatgtccggttattccagcagcatttgtttaaaaatctatctttgctccatatatagccattgctccttttcaaagatcagttgattgtacttatgtgggtctatttctggctatttgttccattgttgtgtttgtctattctttcaccaatatcacattgtttygataactgtagcttcatagtaaatcttgtcattggctagtgccagtcctctaactttgttctttttcttcaatattttattggttattctggagttttgcctctaatatgaactttagaattaatttgttagtaaccacaaaatagcttcccgggattataaatgagattacatggaatctatagatcaagttacaaagaactgaaattttgacaatattgaatc

SEQ ID NO: 288538 - DNA, 569 bp, Homo sapiens
tgaatgaaggtagtgggtaactggccctttattgtctgtaaatctatatttttttaattcattatattctacctttctgcttttatgtgacctatctaaacagaggggccttttccctaaatgtcctatttattygaagaaataacttcaatacttgttgattctatatataatatattgattctacttcattattatttctaccttaactttcattttttataatttaaattttattttacgtcctggagttacatgtgcagatttgtcacatgggtatattacatgacattgatgtttggggcacagttgatcctgttgccaggtactcagtgtaatatcaaacagtttcccaatacttgtccccttccctccgtaacccttctgggaatccccagtatttattgttgccatatttatgtcaatgactacccaatgtttagctcccaattatataggctgtatttggttttctgttcctgcgataatctgctgaggttaatggcctccagctgcatccacattgctgcaaagagcacaatctcattaatttttatggctgtatgata

SEQ ID NO: 288539 - DNA, 569 bp, Homo sapiens
tgaatgaaggtagtgggtaactggccctttattgtctgtaaatctatatttttttaattcattatattctacctttctgcttttatgtgacctatctaaacagaggggccttttccctaaatgtcctatttatttraagaaataacttcaatacttgttgattctatatataatatattgattctacttcattattatttctaccttaactttcattttttataatttaaattttattttacgtcctggagttacatgtgcagatttgtcacatgggtatattacatgacattgatgtttggggcacagttgatcctgttgccaggtactcagtgtaatatcaaacagtttcccaatacttgtccccttccctccgtaacccttctgggaatccccagtatttattgttgccatatttatgtcaatgactacccaatgtttagctcccaattatataggctgtatttggttttctgttcctgcgataatctgctgaggttaatggcctccagctgcatccacattgctgcaaagagcacaatctcattaatttttatggctgtatgata

SEQ ID NO: 288540 - DNA, 621 bp, Homo sapiens
tctgtggttgatgggtggagtactctgtagatgtctattagatccaactggtaaggtaccaaatttaagttcagaatttctcttagggaatctcagttttcatttttttctcctgggatcatttttctttttctttatgaaaaaccattctttagtgtgagctttcttttaataaattatgttaatcttgctttgtgttttaaaatgtgtttataccaacttaattcttgaaacatattccaactttatatagaattttagtttagcagggttcttttagtttgtttaggtttggcaaggttcttttcttctttattctacccttctgagaaaatattagttcttttttttttctggcttccattttttccattgggaaatcagctttaaatcatggtgttatgscttgaagataatcttttatttcacttcattgctttctgcatttttattacattatactaaatatatattataaaatattgtgtagactagttgtatattaatgttggttgtcatggaaagagctcaaacttctctataatatggaaattaactagtattatgtaaaaataccatagttttatttttttctgttttagatttcccccagaaacagca

SEQ ID NO: 288541 - DNA, 621 bp, Homo sapiens
tctgtggttgatgggtggagtactctgtagatgtctattagatccaactggtaaggtaccaaatttaagttcagaatttctcttagggaatctcagttttcatttttttctcctgggatcatttttctttttctttatgaaaaaccattctttagtgtgagctttcttttaataaattatgttaatcttgctttgtgttttaaaatgtgtttataccaacttaattcttgaaacatattccaactttatatagaattttagtttagcagggttcttttagtttgtttaggtttggcaaggttcttttcttctttattctacccttctgagaaaatattagttcttttttttttctggcttccattttttccattgggaaatcagctttaaatcatggtgttatggcttgaagataatcttttatttcacttcattgctttctgcatttttattacattatactaaatatatattayaaaatattgtgtagactagttgtatattaatgttggttgtcatggaaagagctcaaacttctctataatatggaaattaactagtattatgtaaaaataccatagttttatttttttctgttttagatttcccccagaaacagca

SEQ ID NO: 288542 - DNA, 577 bp, Homo sapiens
gttatgtggagaagaataacatctgattaatgtagtcaatattrggctgaaatttttcattcttttgctttgttagtaatctcttcttcagataaatgtaatattttttataaaagagtcaacaaaagcctcaaaaattaactttacttaatgatcttagaaaaaaaaaggttcaattttctagccattgttacacttagttaaaacaattcttttgatgagtattcaattaaattaacaacttttttgagtctctgtgtattggtcaactgttccatgagttagggagatacaataaaaaatggatactaggctacattttcgtgcttatatgtttttcttatgcttacatgtttctcttatgataaataataataattaaaattaaattatttccattagtgttttatagtaatgtcattttcttgaaaacaaggttgaaaattatttcacaatatagcctacttcttgttcaactctgccatgatagaggtcatatttctacaatgtcggtagcttcttttcatgttggagttttcttaggagcaacttgacagattcagatgaatactgcact

SEQ ID NO: 288543 - DNA, 577 bp, Homo sapiens
gttatgtggagaagaataacatctgattaatgtagtcaatattaggctgaaatttttcattcttttgctttgttagtaatctcttcttcagataaatgtaatattttttataaaagagtcaacaaaagcctcaaaaattaactttacttaatgatcttagaaaaaaaaaggttcaattttctagccattgttacacttagttaaaacaattcttttgatgagtattcaattaaattaacaacttttttgagyctctgtgtattggtcaactgttccatgagttagggagatacaataaaaaatggatactaggctacattttcgtgcttatatgtttttcttatgcttacatgtttctcttatgataaataataataattaaaattaaattatttccattagtgttttatagtaatgtcattttcttgaaaacaaggttgaaaattatttcacaatatagcctacttcttgttcaactctgccatgatagaggtcatatttctacaatgtcggtagcttcttttcatgttggagttttcttaggagcaacttgacagattcagatgaatactgcact

SEQ ID NO: 288544 - DNA, 577 bp, Homo sapiens
gttatgtggagaagaataacatctgattaatgtagtcaatattaggctgaaatttttcattcttttgctttgttagtaatctcttcttcagataaatgtaatattttttataaaagagtcaacaaaagcctcaaaaattaactttacttaatgatcttagaaaaaaaaaggttcaattttctagccattgttacacttagttaaaacaattcttttgatgagtattcaattaaattaacaacttttttgagtctctgtgtattggtcaactgttccatgagttagggagatacaataaaaaatggatactaggctacattttcgtgcttatatgtttttcttatgcttacatgtttytcttatgataaataataataattaaaattaaattatttccattagtgttttatagtaatgtcattttcttgaaaacaaggttgaaaattatttcacaatatagcctacttcttgttcaactctgccatgatagaggtcatatttctacaatgtcggtagcttcttttcatgttggagttttcttaggagcaacttgacagattcagatgaatactgcact

SEQ ID NO: 288545 - DNA, 479 bp, Homo sapiens
tattctactgcagacatgttttctgggtcactttaaagcttgatttttttttcttaccatcctgttcccctcccttccacagacgttaggccaaagatacttcttaaaataattctgaacattaaactctatctgtgaatctacctcccaggagaccctgagtgctaccatattctctcaaacacttgtcaattaactaaatttaaagttttgtctttctttaagaaattcaataataattaattgcattttcctgattactaataatgttgagcaacttttcatttggaattcatgaagttccagtttaagtattttgttcatttatctattgtgttgtcttttttaagttaattggtasagctttttatatatgctagatattgaatctttgttattataggccttaagacatattttcctattcctacttgcattgtcatttgtattattattgacagtggataactgtcaaattt

SEQ ID NO: 288546 - DNA, 1201 bp, Homo sapiens
gaaatcattcattgggaggaaccatcttgaatcttacaaatagtcacactagttatcttgttaactgtcaatagtgtcccagagtcacagagaaaacaagaacaaacaaaatttgcccttttcttgtctaaatgccctatgaaatagacctcttccaagccgagaacaattgaagctagtcaaaattccttcttccacagataagaaaactgaaacctagaaaattgaacttttgtaagctattctaaccccaccaccgtccccacaaaatttgataacactctatatttaggtatcacatacattaactatacttcaaattttgtacaaattctgagttatcarggttagacttaatcagcttttcctctacatattttttcaattgtactagaatataagaaatgaatagtaaactctaaatagtgataaataagccaagaaatagaactattttgtttataattttattttaaacccatttatgcctagtgtcccattattggaacactaagcttgtgggagttatttatatcctactgctcaaggtcatcaccaaggtctgattttccacaaaaawacacaactgcccaacacatgttaagcttaggtcctttaagactttaaaatgaaagcaaataaaatgaagatgccctctaactttggataacctcatgttcttgcttacaaatcgtggtgaacatcattgctgagaatcaggtagggagaactaacatcttatagttctcaaaaataaaactctgaaagctatgttaaatatatttcttactcttgcacatgtgagtaaggtcagatccaggtcagtgtcaagatgtcctggccagaaatctcttttgatctctaaaattgtctgatgaaagttatgttctttctatagttggtaatccccaaatggattttatgtattttagtagtagctagaaatttggtctttaaacatccactcaaagttttgtattgatatcacccttttgacatgctatatcatgaaaatatgtacaaacatggtgaaatttatcaaaattawcattgaactatacagatcatgtaatgtgagtgcagtagttgaacttactactgaagcatgcattcccctatagagttgagattctatcctttcatcagagaagtactgtctgaaaaaaatcaggggaggatcacgtactaaaaaaaccctcct

SEQ ID NO: 288547 - DNA, 556 bp, Homo sapiens
gctgctgcgttgggcactacactggcatctggacaatgggaatgcagtggcacccaaacaaggatgctggtgacccaaaaacccccacccaaacaaggatgccaatgacccaaaaaccccaaagggagtgttacagcatgctaacagacctttcagtcccaccatctgcagcctgatgatcagagggtgtgtggcacccagcagctccctctcccattgctcagcaactggraaggagagtgctacagggttacaactttgtttgctcttgctgatcagcaggtcttgagttcttgtcccatgtccaagaagaatgaggttatgctgacagccaacaggtgagcaaggcaaaaagttttattgagtgacaaaacagctttcagtggagagcgggacccgagttggtctgcccccttacccaaaataaggtagtctccacccccactcaaaatcaggtagtcccaaagcttgcctgagtctggggcttttatgggcacagaatgggggagtgcatgctggttggtttgtgagtatgcaaaaaaggcaccactcaaag

SEQ ID NO: 288548 - DNA, 361 bp, Homo sapiens
tggaacttcctagagacctgtcaaatggttgtggaaaaaaatgctgatagtgatatggacagtgaagtccaggctgaggaggtctcagatgaagatgaggaacttttgtgaactggagtaaaggtcactcttgctatgctttagcaaagagaatggtggcattgtgttcctgctctagggatctgtggaaatttaaacttgggagagatgattcagagtacctcttggaagatatttctagcraccaaatgttcaaggtgtgacctgcttgcttctaacagcatatgctcatatttgtgagcaaagagattatctgaaacaggaatttgttcttaaaaaggaagcagagcataaaagtttg

SEQ ID NO: 288549 - DNA, 1161 bp, Homo sapiens
aacacatgcattttctctggcattttagagtctggagcaaatagtatctataagaaccacagaattatgtggctactgtgaattggcattgatttaatgaagtgaggaaatgatagatcatgttctattaatatacatctaaaagcaatgggagagtcatagggcctgcttggaagcattaaaaatgacygtcatctctggtagtgagagggaaaacagacacaaatttaggcatgggtcttcactgaaagagatgaaaactttgcaaaattctgaatttcaatctagacaaatctcctacttgaaaatcaggaccctaacaatgtagcagtggaaccataaggcttgggatgtaggtatatgtgcagctgcatttaagaaagttaaatgttcagattcccttgtaccaaaaaggaatattattttctaaacagaattttttcagccaaaaagtacttgtataataaaaaataaaagtttttaagctccaagtttgttaaattgtttaaaaaccctatttcaacttccatagtaaaattcagtttactaattacttcagtgacatgggtaatttatgagwtttgcaattcctcattacaccattccagatgtgcttctcctaaatatatcgtgataatataaaaaataaacttaatacttcataaagaaaagcaaatatacaaatatgacttttcaagttaaacaaataccaattgtcttacaagagacacatgtgaaatataattaaatacaaagtttaaaacaaaagcatggacagagattgattcatttcaataaaaagtgatgttattgatatcagagaaattaaattattgaggtttacacaatatgtttgacaaagggtattaatttactattatgtaatgtagtcacaattatatctgattaataaaagcataaaatttatgaaaacaaaaatacttttagaagatttggcaaaaagacattatcataggagagataawaatacaccgctatatataatccaacagataaatatataaagattttgaaatctgaccccccaccccacatcccaaaaatgaactctaggatcaagaggattgattgagagtaaatttaaaaattaccacaataagtaatttgaatgttatgtaagttattaataggacataaaaa

SEQ ID NO: 288550 - DNA, 506 bp, Homo sapiens
atattgtaaaacctctatatgatggtatgcagttagacagttatgccacctatatgcatgtttacacaaacatttaagtaaaaagcaaaatgctaagttatagcttaaaaaagcaggatacaamatttcatgcttagtatgatttcaattttgaaagaagatagggctagaaaaacaccttctaaccctaagttatccatgagtgattgaattataatgctgctcactatttttaaatatttctgcattttcaaaacttttcttaattttgctgtgattcatatattaaatttttttaaagggctggataacaaaaactctgtctagcattctagactccattgtcgcaacacttcttttttgctatgtagtaagtagtttcttaacctggctacatatattaaatacaaaattagggaaaaagttttgccattactttcttttggtctttttactttttatatgtgcaaaaaccttaaaaataatttttaaatagattttcctta

SEQ ID NO: 288551 - DNA, 1122 bp, Homo sapiens
tacacaatgtgattattatgcattgtatgcctgtaacaaaatatatactccataaatatagatacctactatgtacccacaaaaaataaaagacccctaaaaatccttattattccaatttcaattagtttaaattgaagtcctaatttcacatatttaaaaggaggataatcatgacaagattgttacaagcaatataaataacacttgttaaccatctttggttcaaaaatcaataaacacttgctgttattaaaattatatattgaaagttatgaattaaagtttaaatagtgtccctctatatctctatttaatgtaaatgaaatttaaattataaaagaaaaactaartgcccgggacttggaagaaatgcagttctctcattttgcatgtctttatgtagaaacataatttttacagctttgatgaagctacatattttggaaacagagctttgatgacctactttatcaaattgccaaatcacttttataaaattgcaaaaagactctcaacttgattagaaaagcactagagattattttaaatatawccttatgaaaaaccctgtgacattgaacactgtttgaatgcctgatgggccaaattctgtccactgactatttttgtatagcacacaagctaagaactatttttatagacaggaacttacaattgatgtgataatgcagaacactatttttgaaccccaagttttaattcttccaaattcattctaattagtagacttgtataataaaaaagtgttcattattgttattttactatagtttgaatttcatcaatcagaatatatggaaatttgttttctactgtgttatataaataccttaaaatataattttgcttcttgacwtgcaaagcataaaatatttactctccatctctttgtagaaaaaagtatgctaacccctgttacagcaatgatgagtcattggcattctttctaaacaaggggttgattttactagctctgagttttgcaatggtctagatggaaaaaaaatgcataggttctaaccaaagaaagtaaaaagggaaatttaaataagaggaaattgtattaataaatattgaaatacatggtagaaaagttcc

SEQ ID NO: 288552 - DNA, 517 bp, Homo sapiens
ctcttattctcaaatacaatttaatttgctcttttaaataaaggttctctgaaattctcagtattaaccctatctggcttttacctgggaaatcccaggaaacttacccaaaattggccactttttttagaattcctgctgtatttctcttaactaatcttaaacaaagcagaatgattttacattatgaaaattattatggttaaataaattctagaatgatctgacatatcacccctttcagaaatacacaggggagtgtatttctggctaacataaagtacaagctgagcagagcaatcttactgatagaaaaaaaattccaaaatttaattatcagtgtagactttgcgccttgcttctaggtatttgtcaactgcagaagacagatgacataaatacactgttcaaataaaaggtagcaaatgttataatagtggaaggtaaacayggtaaacaaaagctcagagaatgtagtgtctccctgtactggggctgcagggaaactgggaagggg

SEQ ID NO: 288553 - DNA, 538 bp, Homo sapiens
aaatttgaaacagtcatttggtatgtttaaatatagagatggttttgggggtggagattggagagaggtgaaggagggctaggaagctattttaatgataaagtgcctcacacaccatgctaagtattagatcttttcttctgaatataatgacaagccactgaaacttttaacacaagaaagttacataagggtatcagtgtttcacaaagttaactctggtgacaatgaggaatatacattgaagaaaggagaagctggaattagagacaccagttctgagtctatttctgtagtccatagaggtaaagataaaggcctayctgaaggcagtgacagtggaaaaaagaaaagaaaaccagtgtcctaactggtctttcaatcttaattttttgcattcttgaacccaaactgctacatatcaggttaatcttttctaagcagaaattgaatcttgtcatagacatgtatgaaagcatttaataatgttttattacttatcaagttaaatctttgccttcacaagacctaaattcta

SEQ ID NO: 288554 - DNA, 582 bp, Homo sapiens
atgctatcaacatgacttatctctagtgatattagccttgatcactcagttaagataggtttcttaagctgggtttctccactgaaaagttatttttcttccttctcatacctgctttttgacaagtgagtaactaaaaccaactcatacttaaggaggagagaatgagktgttgatctccatttcctagagaaggaagtatgtacacatattatttgaagttttttgcaagaaagatttgtcccttttatttcatgtattcatctagtcagtcattttgatatattaatatggactcatggatgtttctccctggttctcttcactgggaaatggtgttaagaaaccaagatggggtgttaaagaaaatataatttagctgagtatactgtaattgtttctgtcatgataatggggtaattaaagattcccatgcttggagcatctactgtagtagatctgaagtcggttctcagtatttttacttacagttttatttttctgtttgagaagctcaggaattaaaaaaaaatggggtattcattattctctgattatggcttactatcctcttaatatatc

SEQ ID NO: 288555 - DNA, 535 bp, Homo sapiens
atatttcaaattttggtgacccatgatgcagggcacagatgcagtttggttcccagatctaagtgagcacaaaggcaacttgggtcctggagaatgaggcaccatgcagtggtgactctggactctggaatggtgggacattgtagtagcctaggcyctatgcagctggatgttgcagcaacgacccaggaatggtggggcccaagttgttgaggctccaggaggcagggcaacggtttagaagcagtacagctattattataattactccactggctagagtggggaacctcagcagttcagcctctaggggagctattccagggatatagggtgctgtggctgttcagcctggagtttgtgttggcgcagcttagccaaagctttgttttcctgagacttgaagcacttcatttcagctgagccccaggagagacagctgtactgctgggccaagattctctttccctgggaagtgggaagctcaggcttctctactgtttttctaacctttacttcatctatctctgctctg

SEQ ID NO: 288556 - DNA, 466 bp, Homo sapiens
tacaaatacccaatgcctatcactcaataaacatctgagtaacagggtacagttagttcttaatgaactcttaacatagagttttcattctcctgtgatttattgctaaactagcaggaggtataatagtttgcctagattgaagcagcggttttgcttctgtgtcccatctatgtaactttgaggtaagtaccttgtatctttatctacaaaatggaagtatattgcatgtatactttgagtattagaatgtaaatatgggaatcaacaccatttctttcacacagtaaatgtctaattaatattgtcattattatcattattaaagcattaacataccaaacttgtcaaaaaacatgacatattagtgaataaaatgtaccctcatttaataacctcttcygctgccagaacatcttttcggatgctgtggcaagtttctgaaaaatcaaacatgaaaagaaac

SEQ ID NO: 288557 - DNA, 436 bp, Homo sapiens
caatctatttttaattaattccaatttagcttccatagtatgtattaacttcatcttcacccatttaggttttaattgttacaaattatatctttatatattatatacccattaacttagatttataattattgtcttatgtaccaaaaaacatagaaaagaaaaagagaaattgaaataagaaaaaatatttttcttatttattaaataaatatttttcttatttaaaaaaataaaaaaattcttatttattaaataaaattgtttatatttcattaatataaaagttaattttgatatttacattcatatttacctttaccacagctctttatgtsttttcttcgctgtaggttatcatctagtgtcttttcattttagcctgaaggactcccttcattatttatcatagggaaggtttactatcaatgagctt

SEQ ID NO: 288558 - DNA, 504 bp, Homo sapiens
actcctctagagtttgaaagataattaaatagtgaatagagctatagtccctacccacatggtgcttattgtttaattgaaaatatagatgatataaataatcacacgatatmagttaactattggccgaaaataatgctgcattgcaaataatcacaaaagtatagtggcacataaaactcaaggattgttactcgttcttctgaggtggtcagagaagtagctttgctgatttcattggactcattcacgtggtaaggaggtggttgggtgtaagatgattcaaggtggctttgtttaggacaactagggtaacttgactttttgttgtttagaacaacttcagggtggctttgtttaggacaagtagggtaatgactttttcccacgtgtcatagcctgggcatagtcttttcgtaatgctagagacacaagagagatcaagggaaaagtgagcattcctctgaagcttagactaaaaaatagctctttgtatcatcattc

SEQ ID NO: 288559 - DNA, 401 bp, Homo sapiens
agtaacatgccaccagtacttctcaaaacttaccaggaactggcattctgtctaccaakgtaaattctgaatacctaagtgatctctgtgaaggggagtggaggatctttaactagacagaagtgggcccaaaacacagggaagaaaaactgtgaaagctacagttctactctactaacggggctactgccttagcattttgcccactgtggcatattctgttgaatatcctcagtgatttgatacatagtagatgctcaataaaagcttgctgaaatgaaaattaaacacctgcctccaaggttactgtaagcattaaatatactatctgaaaaacacctacaataattatataatcttccagaatgcagtaaagaatatatatgataacaaatataatg

SEQ ID NO: 288560 - DNA, 533 bp, Homo sapiens
tttgaagctttagatttaagtctttaatccatttgatttgacttttgtattggtgagagatacaggtccagtttcattcttttttatatggatatccagtttttccagcaccacttattgaagagactgtcttttcctcagtgtgtgttcttggcacatttgtcgaaaaatgagttcactgtargtgtgtggatttgcttctgagttctctgttctgttccattggtctatgtgtctgtttttatgccagtaccatgctgttttattaccataactagtataatatgaagtcagtaatgtgattcctctggttttgtcctttttgcttaggatagatatggctattctgggtcttttgtggttcaatatgaaatttaggatagttttttttattcctgtgaagaatattgtgaggattaatactgagtgtcaatttgattggtttgaagaatgcaaagtattgattctgggtgtgtctgtgagggtgttgccaaaggagattaacacttgagttggtggacggggaaaggcag

SEQ ID NO: 288561 - DNA, 533 bp, Homo sapiens
tttgaagctttagatttaagtctttaatccatttgatttgacttttgtattggtgagagatacaggtccagtttcattcttttttatatggatatccagtttttccagcaccacttattgaagagactgtcttttcctcagtgtgtgttcttggcacatttgtcgaaaaatgagttcactgtaggtgtgtggatttgcttctgagttctctgttctgttccattggtctatgtgtctgtttttatgccagtaccatgctgttttattaccataactagtataatatgaagtcagtaatgtgattcctctggttttgtcctttttgcttargatagatatggctattctgggtcttttgtggttcaatatgaaatttaggatagttttttttattcctgtgaagaatattgtgaggattaatactgagtgtcaatttgattggtttgaagaatgcaaagtattgattctgggtgtgtctgtgagggtgttgccaaaggagattaacacttgagttggtggacggggaaaggcag

SEQ ID NO: 288562 - DNA, 533 bp, Homo sapiens
tttgaagctttagatttaagtctttaatccatttgatttgacttttgtattggtgagagatacaggtccagtttcattcttttttatatggatatccagtttttccagcaccacttattgaagagactgtcttttcctcagtgtgtgttcttggcacatttgtcgaaaaatgagttcactgtaggtgtgtggatttgcttctgagttctctgttctgttccattggtctatgtgtctgtttttatgccagtaccatgctgttttattaccataactagtataatatgaagtcagtaatgtgattcctctggttttgtcctttttgcttaggatagatatggctattctgggtcttttgtggttcaatatgaaatttargatagttttttttattcctgtgaagaatattgtgaggattaatactgagtgtcaatttgattggtttgaagaatgcaaagtattgattctgggtgtgtctgtgagggtgttgccaaaggagattaacacttgagttggtggacggggaaaggcag

SEQ ID NO: 288563 - DNA, 570 bp, Homo sapiens
aagaagtttcacaattcattttagaaaaccaaggattttggtgttgttttggattttgaccccctgagtgttggttatatatgttgaaatttcttggcatactgccattccccaaaatatgcacagatagaagcttagtaaatgctgcttgaaggtaatgttcttctttctcagggcaggatctgatttttttgaaactccctatatgcctgatacaatagtctgctcacagcaggtacataggaacagttagcaggtaccccggggcaactctgcttccaagatcttaatctcctttctgaccttgccctttctttcctactggagttgctcttggttctcaccatgagcttcattccaaagactatcactacaatgctgggtttactttcctgcttctcagagcagacattcaatgrcacacaaagtagcatactcagatccatcactcccttcaataagcattagcagcaaagcctaagcattacttagaataagatattgcctaagtattacttagaataagattcctaaactattgtgtggggatctatctcatcatattagaat

SEQ ID NO: 288564 - DNA, 548 bp, Homo sapiens
ggttagctgctgtggaagagtgaagcatttctgcttctcccatttatgcctctgtttaaaggcaagagagttgtgtgccacaccacacctctacttcagaggaattttgaagcaagccctttcgacctctcrctttgttcacccctatacttattcctttccataagagaaagggttgcaaacttgatgcattggaatttgagtcgctgtgctaaatcaatgcccttgggtagcatagttttttgactttttacatgctgttggatttaaatgataatcagatagattggtggacatttgtcctcacaataagcagaagcctgtgaagatgaagcagacatatgcttctcattcatgtggctggctgggttagtaaattacatgtctgatttgcacatcatcctttccttcagttatccttccctcccttccaatactcttaagagagtagaggatctcactttaccttttaacttaaactgtattttctaatccacagtttaacattgagatataggacacatacacttgtattaataaaaatgaca

SEQ ID NO: 288565 - DNA, 469 bp, Homo sapiens
ccctttaataggaaattccaatttattatttccttaaataagtgaaggtcacaatgtctactgaaagagagaccctgctgtcaactcaactcctacttgccaactcaaatagaggactgagaagtaaaatacagcagcagcaaaatacatgtgattgctgtagttgctttttgaatcccccaacccctccttcccacatttgaactcttctagatgccaccagtaattcaaattttggagctctatttgcagtccccccttccccccctcccccgacctccccttgggacacagggcaaaaggaaagtcaggggcagggatggtaggatcccagcatccccttattttagttaagaggggyagaggctcaggtgccctttggtctttctcgctgcgcctcctccaagtgagcctgactcccatagtcacttggaaaggtaaatggcaccacagtgggtgtgcaattgag

SEQ ID NO: 288566 - DNA, 523 bp, Homo sapiens
tcactgtctttcatagtaatgccctgaagtcctcctccttctgaaacagaggctgtggcctcctctactgttaaacgtctgtgcacagtatcataagtcttactgttcagtgttccttccaacacaccctgcaatcgaaagtccctgtaggttttctgaagaaagaagataaaatttgcttagctcacttagattatatgygtgtacatagatatatactcagttggcatttcaaaaatgatcttggggaatccactgataggttcatgtggctgtccatgccaatcatcttcttggtgtatttctggggagtaaatggaatgacagactctggctattgcttcaaactacaattactatgactacatcaaaatgttgttactatcagatgacaaattcactttcccctcagaacattactaattgcacacaatttaccttttgaacaacctgtagcaaaaataaaatatgtacctgtgtaagtttttaataagaaattattagtttttttaattgagggggc

SEQ ID NO: 288567 - DNA, 519 bp, Homo sapiens
ctgtatctaattttgctccttcctaatgagcactttcctaatattcaggacatgtaaaaatttcagcagttctataaaacaagacagtcatactccaaaatccttaaaaaagtaaacttccagtaaattcaatactttaactggcacgttaaatctcaaaatcttttatagatactttaatttccgacactaaattctatgctacttatttcaaataatttacagcttcaacttcttgatttctattttaatacaggcactcactcasaagtattggtgatattgaatatgagtacagtcaattgaggcccttctaccacaccacactctagataatttgaaagtgaaaatattgtcataatggatgtgactcttaaaaattacagttattttgcaagggatagtaaatatttctttcttgttgaaggagagaaactatatatattttacgaagcctaacataacatactggttactctgttagactgcacagttactgtaacttggtaagttgtataa

SEQ ID NO: 288568 - DNA, 563 bp, Homo sapiens
acagtcttcatatttaggagggattattccttagaggatgctggctacctgccttttgttctccaatgagagaaaaaagagaaatgggtttaaaaatcagcatgaagaatgtaggtgaggtacgggtgagaactattttttcccctccagtgaaatattttgtccatattaagacagcaaaayttagatgatgtgttatctagggctgtgctaagatcaagaaattcagggttctctcttacaggttaggtgtttatatgaaagcttaaaattattttatatatagtttcctgccaatgcattcaataatcacatgtaatgatagttctgctggttccttacacagattttttttcttggatttagccaacactggtgacctggctgccactgctgtgcccacttgtgaatggtctgaccttgcagaaggcgtgattcacagagggggagtacaaaaggccagcacagaaaatggctttaaagccaccataccatttgtttaagaagttaggatggaagagatggagggtagtagctatctgttctatgaaaacattgcagtg

SEQ ID NO: 288569 - DNA, 621 bp, Homo sapiens
tgcttctactcaatatttaacaacattatctgaataatttattttcttttagaaatgtggcaagagtatcaatgaactagtttcctatgtacagccgaagatgtggattaaatacctttccaaagttatttaacatttggtgtcttctaatagtagaggaggtaatacaatttctccttgctatagatgctgcaaagtcagtactagtaagggatagatgcctgcatggctgttaaagacttttttctaattgatttatgtttagctctttcttgaacttcatatagctggactagataatgaaagcacttacttgtgtcatctacacctgggcttggttcctaatctgtattgagttgttgattagagtatgacattaataagaacaaaatgataactatctatcaytaggtagatctgctaccaattagataggtagatctattaaattagatagatccatcgacctaatgataggtaggtagaactgatgcccaaataagccagttagccttgcatcatttcgtattcacagaacgcatttataacctttgtcagcagactcatttgcaaaagtaaatactataagaaaattaggttaaagaggatatgggtcattta

SEQ ID NO: 288570 - DNA, 633 bp, Homo sapiens
ttctctttgctttagcttgtgagctaagggaggagagacgaaagcattattattattctgacatcaccccccaccccagccttgacattcaagcacatctacactttttcctgtttaatacatagcaccaaaggcaacacactgtacttctagaaggaaaaacacgttttttaattcctctgcgttttctgcttatagtctttatctctggctggtcttttgttatttcttttggtgtgtgatggaggcagggtgacgggatgggacacaaatagcaaaggtctataaggttcaaggaaagagtttctgaatacctcagattacttaatacacaacgggaactaactttccaacacgttagcaaacatattggcaacaagttcaaatttaaggctactagtgtgcttttagttagtttggtagcaaataaagaatttttgctaagttcctaaagcaatgtgaaggacagyatcacaggttataaatgtgggaagggttgattaactcacagagccctcctctctttgggggaagaagtgtgagggtggattatttgtctctagacctttgttgttattatttcttttatattaggatttcatttaaacccagtgaaattatttctctcaaaac

SEQ ID NO: 288571 - DNA, 644 bp, Homo sapiens
cctggatcagggtcctctgtctgttacttgagtatagttggtaaaaggcagaatcctaccttaatgctatgaaggtatctgatatcagaatctattataattaatgctactaaaacttaggtagtcatattacttttattcttaacagtcacatgaatgttcacactatttcttctaagtagttacataatttatacatttataggtctagaaacagttatgtagcattagtatgttacattttattatatcaatggggaaaatcctttcaaagagaagtttcttttaaatattaaaataaatactgaatgatagtttaagatattagcctgaactactcaaggggacaaggtaattttcaattgagatctatgggtttacaatgccttccccatttgggactatgaggatcaagtatcttgctatttctgatctacggttagatcactaacatcccagagtttagaggaatagctgctaatacagtagcaccaaacacaaaatgtgctaatgtgtacactacctatgagctttatactattatattcataagtagcaatcatmatgatgatggttttaaatctctcagttcactagcctttccctcatctacagttgtgtcaattagaaaatactacatgagg

SEQ ID NO: 288572 - DNA, 609 bp, Homo sapiens
ttgttgctactggggcatcactgtttctaggctctctgagctaacagagcaagaaaatgtatgtgagcacattaacgcatgcatatacatatatctaaaaatactgttaaatgtaaccagctctatctgtactaagctaaagacaaattcacactgatatttccaactctaatccattacaggatcattctagtccccttcctttgcttgcctctaacctgactctaacggtgagaaacctggctcctaccaaccaccatccatttacttaattgttcaattccaatacacacgtatagtggcttcaaaattgttaaactgtggagaaaaactttatcaaccagagtacaatgcttatttataagttccatttccccttattcttacagactccactaatttccaaagttactcagatcagcactttcctcgctcctctttcagtgagtttatctcatacattcacaatagaattattttattatagtttcctttccatcctgggattctatgatcacttaattgatttttaaataattgaatatactcaagttcactctttttgctrtaaagtttggttttgacaaatgcacagtgtcatgtatctac

SEQ ID NO: 288573 - DNA, 570 bp, Homo sapiens
ctgggattacaggcatgagccaccgtgcctggcctatcaacattttatacaagtctttttgtgaacatgtttttatcttgagtaaccacctagaagtgggattgttggatcataagaaaaatatgtatttaattttataataaagggttttcaaaagagattacaacaatttatactccatcaaaaatatgtgtgagtcccagttgctttgcatttggccaatatttgatgttggcagtcattttaattttagccattgtggtgggttatggtggtatctcatgtccttgttgactaatgacgttgaacacttttccatgtgattattcgttgttcatatattcttttttaaaaatgaaatgtttattcaaatatttgagctattttttattgtgctgttcatgtttatataattaaattatatagggggctattatatagcccctattatgtagggsgtatttatatatcctagatatatattccagtcctttgtcagatatgttttgcaaatatttccttctggtctgtagcttgtttattaattttcttaaagatgacttttaataa

SEQ ID NO: 288574 - DNA, 570 bp, Homo sapiens
ctgggattacaggcatgagccaccgtgcctggcctatcaacattttatacaagtctttttgtgaacatgtttttatcttgagtaaccacctagaagtgggattgttggatcataagaaaaatatgtatttaattttataataaagggttttcaaaagagattacaacaatttatactccatcaaaaatatgtgtgagtcccagttgctttgcatttggccaatatttgatgttggcagtcattttaattttagccattgtggtgggttatggtggtatctcatgtccttgttgactaatgacgttgaacacttttccatgtgattattcgttgttcatatattcttttttaaaaatgaaatgtttattcaaatatttgagctattttttattgtgctgttcatgtttatataattaaattatatagggggctattatatagcccctattatgtagggcstatttatatatcctagatatatattccagtcctttgtcagatatgttttgcaaatatttccttctggtctgtagcttgtttattaattttcttaaagatgacttttaataa

SEQ ID NO: 288575 - DNA, 605 bp, Homo sapiens
tatacatgtctcagaatacttggtgttctgaaaagaggtctgtatacatctcttgatttgyttggaatgaaagattcctgtggggaatcataaaacagctgacaagagtgatatatttcaagacagtttagtggaaaccaggttgcattaatggatatggaaaacagagtgaaaaaaaagtctttacaaggagtacaaatgccaaaaggacatctggatggggcagtgtggggttgcgcttggaaacacagaagcccaacaaagtttcctcttccccctttcccctcagcatgctgcaagctggttgaaaaaaaaaagctgggtggaaaagcaagaagtattttgtcactattgctgagggaccctcttctaatggacgctgcaggaggaatgtgagaaagccccaaaccaagtttagagggaaatttctagctgttgccttaaagagtgtcaatgcccaagggcatctgaggctgaaaatgattttaaggtaattgagtattctcagggagcactaaagtgttgggggcccaggaacagcaaaggggagagtgtactttgaagagattttcctgtggggctgccctccaaccctcctttggaga

SEQ ID NO: 288576 - DNA, 614 bp, Homo sapiens
gcagagccaacagagagtggtaagaaggcatccctccttcattttgggtaggtgtgtatattcatacaaactttctcaaaagcaatttagtgatatgtagcaggtgctctaaatgtttgcacccttgactccctttgatttccatcacttctagctagctatccaaaacaactaacttccagtgagagcttggaagtgattatcaatactatatataagagtaaacatttgggaacctagatccagcggaagaggaataatcaaataaattattggatatcatgatgtaggacacgaaggccagtcactaaaaataatgtgtgcatagtgctttcaatgacctagggatatattatgtttataaaagaaggttccacatgcccaaaatatatatgcataacatggtctcaaatatataagaaaaaatgcataaaaatgcctctggaggatgggattatgagcaatttttctgtttctatacatttctataaataarattttttaaagttatagcctaaaaataaaaatccaagctcccccttggattttttattcttgaaaatatttctctttccaatatagaaaacaatttatttctcttgccaatataaaaa

SEQ ID NO: 288577 - DNA, 1081 bp, Homo sapiens
cctctgtgggagctctaggatccaggtagaaggttatgaaaccctggtaaagcccaagacggaggagaggtactttaagaaagcagacctgaacccccgtagtaggcttgctgaatgtggtcctagctgtacaccaaagcagccccatcctcctacggagttggctccagccccgtttggttgcagcctgcaaccagctccatctggtaaggaaaccagaataacccatgcctgtctgtgcccccagtaacagacctgctgcccctgtcctgaatgtggatcctgaagcaggcctgtggcccagccccagccccactctaccatcgtcctgagtcagtcctgcctgctcaggaatscagtgacacctatctgtgcccctggtagtaggcctgctgacttcagtcctgactggatcctgatgcagccctgtggtccagctccagatccattcaatggtggtctggaggcaggcctgcctgcccagggaccatgagagcaccctatacccatcagcacttctggtaacaagactgccgacctwcctctgtgggagctctaggatccaggtagaaggttatgaaaccctggtaaagcccaagacggaggagaggtactttaagaaagcagacctgaacccccgtagtaggcttgctgaatgtggtcctagctgtacaccaaagcagccccatcctcctacggagttggctccagccccgtttggttgcagcctgcaaccagctccatctggtaaggaaaccagaataacccatgcctgtctgtgcccccagtaacagacctgctgcccctgtcctgaatgtggatcctgaagcaggcctgtggcccagccccagccccactctaccatcgtcctgagtcagtcctgcctgctcaggaatgcagtgacacctawctgtgcccctggtagtaggcctgctgacttcagtcctgactggatcctgatgcagccctgtggtccagctccagatccattcaatggtggtctggaggcaggcctgcctgcccagggaccatgagagcaccctatacccatcagcacttctggtaacaagactgccgacct

SEQ ID NO: 288578 - DNA, 560 bp, Homo sapiens
tgtttgttccttcaaataaacagacatcaacacaaggctgtatggatcatgaagaagcaggcaaacatggcaccatcaaaagaaactaataaagttccagtaacygaccctaaagaaatggagatacatgaactgtatgacaaataattgagaataaccatttttaaggaaattcagtgagctacaagacaacaagaatacataaatctacaaaaatcagaaaaccaattcataaacaaaataagaatttcaacgaaaggctagaaatcataaaaaaagaactaaacagaaattctagagctgcaggatgcagtgaatgaaatgggaaaaaatgcaacaaagagcttctgcagcaggctctataaaaatgagaagaatttgtgaacttgaagacaggtcaatgaaattatccagttagatgataaaaagaaaaaaaatgaaaaaaagtaagaaagtcaacaggatttacgtgacattataaagggaaactatatatatattatggatgtcctagaaggaatgagagagaaaaacagaaaccttatttaaataaataatgc

SEQ ID NO: 288579 - DNA, 560 bp, Homo sapiens
tgtttgttccttcaaataaacagacatcaacacaaggctgtatggatcatgaagaagcaggcaaacatggcaccatcaaaagaaactaataaagttccagtaaccgaccctaaagaaatggagatacatgaactgtatgacaaataattgagaataaccatttttaaggaaattcagtgagctacaagacaacaagaatacataaatctacaaaaatcagaaaaccaattcataaacaaaataagaatttcaaygaaaggctagaaatcataaaaaaagaactaaacagaaattctagagctgcaggatgcagtgaatgaaatgggaaaaaatgcaacaaagagcttctgcagcaggctctataaaaatgagaagaatttgtgaacttgaagacaggtcaatgaaattatccagttagatgataaaaagaaaaaaaatgaaaaaaagtaagaaagtcaacaggatttacgtgacattataaagggaaactatatatatattatggatgtcctagaaggaatgagagagaaaaacagaaaccttatttaaataaataatgc

SEQ ID NO: 288580 - DNA, 601 bp, Homo sapiens
catcagtttgagtcggtttgctcactatagtccaaaataatgtacacaacttcctactttcctttgtatgtttgtatgtttaagaaaacagaaaacctaaaggcaaatgagcaagtatgtgcttgttagtgtgtcattcaattacaaagttcttgtaatcttatgaaatcagacagggaatgattgaaacaagtaataagttaactctaacaactgtattaagcagcatgatcttaaaggcatggggcggaagagcactggagcctaatcagtgtttccagtgagtaccagaactacactgttgctggtctagcttcacgtgaggcacacaggaggtttgtttacaatgtcagtgctcgtgtcccccactgggagattctgacttgtcctactctcagaatggctaggcacacgtatttttaaaagccctctaggtaatgctgaggtgcagccaggtttsgaaaccatgtaggataaagtctggtatcccagaatcctgaatttgaatccctctaacaatctatagctctgtgatttttgtgaaagttatctactgtacctaaactggtttctgcatttggaaaatgcaccacctcacagg

SEQ ID NO: 288581 - DNA, 601 bp, Homo sapiens
catcagtttgagtcggtttgctcactatagtccaaaataatgtacacaacttcctactttcctttgtatgtttgtatgtttaagaaaacagaaaacctaaaggcaaatgagcaagtatgtgcttgttagtgtgtcattcaattacaaagttcttgtaatcttatgaaatcagacagggaatgattgaaacaagtaataagttaactctaacaactgtattaagcagcatgatcttaaaggcatggggcggaagagcactggagcctaatcagtgtttccagtgagtaccagaactacactgttgctggtctagcttcacgtgaggcacacaggaggtttgtttacaatgtcagtgctcgtgtcccccactgggagattctgacttgtcctactctcagaatggctaggcacacgtatttttaaaagccctctaggtaatgctgaggtgcagccaggtttcgaaaccatgtaggataaagtctggtatcccagaatcctgaatttgaatccctctaacaatctayagctctgtgatttttgtgaaagttatctactgtacctaaactggtttctgcatttggaaaatgcaccacctcacagg

SEQ ID NO: 288582 - DNA, 480 bp, Homo sapiens
atgctagaacttaaaccccaacatgatagtattaagaggtgctgccttcgggaggtgattaagtcatgagggcaaaacccttgtgagtgggattagtgaccttataaaagggcaactagcttgacctttttttttttttttttttttttttttttgcccttctgtccctcctgctatgtgaggatgcagcactttttccctytggaggaagcagctttcaccttggaagaatcttgaccttgccattcaaagtcaccagacagggaatctgccagtgccttgatcttagacttcccagcttctgtaactgtgagcaataaatgtatgctgcttataaactatccagtctcatgcattttgttatagcaatataaacagatgaagacagacataaacatatctttttgagagatgcagtgcaacccataccaccaggattgccacatgtttgctgatttcacctggtagcaaggcttagct

SEQ ID NO: 288583 - DNA, 480 bp, Homo sapiens
atgctagaacttaaaccccaacatgatagtattaagaggtgctgccttcgggaggtgattaagtcatgagggcaaaacccttgtgagtgggattagtgaccttataaaagggcaactagcttgacctttttttttttttttttttttttttttttgcccttctgtccctcctgctatgtgaggatgcagcactttttccctctggaggaagcagctttcaccttggaaraatcttgaccttgccattcaaagtcaccagacagggaatctgccagtgccttgatcttagacttcccagcttctgtaactgtgagcaataaatgtatgctgcttataaactatccagtctcatgcattttgttatagcaatataaacagatgaagacagacataaacatatctttttgagagatgcagtgcaacccataccaccaggattgccacatgtttgctgatttcacctggtagcaaggcttagct

SEQ ID NO: 288584 - DNA, 578 bp, Homo sapiens
gagcatagtacctgataggcagtttttttacccctcaccactctgccttcaccctctagtactatacagtatcaattgttcccacatttttatgtctatgtgtgctcaatasttagctcccattcataagtgagaacatgtggtatttggttttctgttcctgcattaatttgttcaggattatgactccagcttcaaccatgttgctgcaaaagacatgatctcattcttttttatggctgcattatattccatggtgtatatgcaccacattttttttatccagtctaccattgatgggcacccgggttgattccatgtctttgctattgtgaatagtgcagcaatgaacatacaagtccatttgtctttttggtagaatgatttgttttctttggggtatatactcagtattgggattgctaggtcaaatggtagctctgttttaagttctttgagaaatctccagactgtttccacagtggctgaactaatttacattcccaccaacagtatagaagtagtgccttttctccacagcctcaccagcatctattattttttgactttttaataat

SEQ ID NO: 288585 - DNA, 578 bp, Homo sapiens
gagcatagtacctgataggcagtttttttacccctcaccactctgccttcaccctctagtactatacagtatcaattgttcccacatttttatgtctatgtgtgctcaatagttagctcccattcataagtgagaacatgtggtatttggttttctgttcctgcattaatttgttcaggattatgactccagcttcaaccatgttgctgcaaaagacatgatctcattcttttttatggctgcattatattccatggtgtatatgcaccacattttttttatccagtctaccattgatgggcacccgggttgattccatgtctttgctattgtgaatagtgcagcaatgaacatacaagtscatttgtctttttggtagaatgatttgttttctttggggtatatactcagtattgggattgctaggtcaaatggtagctctgttttaagttctttgagaaatctccagactgtttccacagtggctgaactaatttacattcccaccaacagtatagaagtagtgccttttctccacagcctcaccagcatctattattttttgactttttaataat

SEQ ID NO: 288586 - DNA, 451 bp, Homo sapiens
agttgagactgcaattgtgacctaatgtgattccaaacttttttttacataagaggagccacagaaatgacagtgtcttgagcagatgaaagggaaaatggaagacaaaaagtaagactgctttgcagaaaacagaccaggagtgctggagttccagacttcctcttacacatagagtaagccttccattgctggactctatgtccacttctagctttgtctgatccttttcctcaccctcatgcaagactattaaaggaattttccatgctccctgccactacttgatcatcgtccatttaggttaagccacagccacctcacttccacccctgacatctcyggaaaaggttattgacatctatttactttcttctttttttaatatacatatataattgggtttgttttcatatgatgaaagcaaatatgcttatcacagaaaattttt

SEQ ID NO: 288587 - DNA, 338 bp, Homo sapiens
cttatctgaaacactcttgcctccacctctctgtgccagaattcagataayattagaagcttcaggagcaggagggtaggttctgtctgatgagagggcgtattagggttctccagagaaacagaaccaagatctatatttatagagagatttattatgaggaattgactctgtggattatggaggctgagaagtcccacagtctaccatctggaggaacattttggtttggatctgattctcataaggttttgaacctccttttaaaacagtcaaggctgcagactctttcctccattgcctgtccccaaatagtctttgcttcaaacacaactcga

SEQ ID NO: 288588 - DNA, 618 bp, Homo sapiens
  misc_feature (1)...(618): n = A,T,C or G
tacagtcgagccacacagtgtatctatttgtacgtgaaactgcaatggtgcagatcctttggtgttcagcatcccggcaccacagtaagctacgagatgacaaagttctacctcatctccttatctgaaactccaaagcttcatcygtgcagccactgtgatttcttgtcttttacctggtacaaatgggatttgggcacaaaagtacaaatgcaagcacaaaaatattatgacaaattttggttaaagaatggctagtcagaagatcttagattaacagttttagattttcactgaagtaaaatcataaagctaaaaattaaagaaactgcaactccctgtgaatgctgagctgcattcataaccctccattctgaccatccatctccccactttctccatgccaggccacgcagggctacgtctcacaagaactgggtcagttaaaagaatgaactcaacgtctacatgagggaaagggataaagctgagcaccaagtaaataggactttcccaggctccaaaaggagagcatctaaaatatgagtacctccacataggtgcccctgaattgtaccccttcattacccacctggaacccttgacccannnnnnnnn

SEQ ID NO: 288589 - DNA, 1116 bp, Homo sapiens
  misc_feature (1)...(1116): n = A,T,C or G
tacagtcgagccacacagtgtatctatttgtacgtgaaactgcaatggtgcagatcctttggtgttcagcatcccggcaccacagtaagctacgagatgacaaagttctacctcatctccttatctgaaactccaaagcttcatccgtgcagccactgtgatttcttgtcttttacctggtacaaatgggatttgggcacaaaagtacaaatgcaagcacaaaaatattatgacaaattttggttaaagaatggctagtcagaagatcttagattaacagttttagattttcactgaagtaaaatcataaagctaaaaattaaagaaactgcaactccctgtgaatgctgagctgcattcataaccctccattctgaccatccatctccccastttctccatgccaggccacgcagggctacgtctcacaagaactgggtcagttaaaagaatgaactcaacgtctacatgagggaaagggataaagctgagcaccaagtaaataggactttcccaggctccaaaaggagagcatctaaaatatgagtacctccacataggtgcccctgaattgtaccccttcattacccacctggaacccttgacccannnnnnnnnwccagctacttgggaggctgaggcaggagaattgcttgaacccaggaggtggaggttgcagtgagccgagatcatgccactacactctagcctgggtcacagagcaagactccatctcagaaacaaaaaaaaaaaaaagaggtgttcttattaaaaaaataatttttgtctaagtcaaacattatttaaaggttatttataaaacaaggtaaacagaaccagtaaatawgagaaatgtaaagaaaattatgaatataaagggggttttttagtaagaaaacttaaaaggaaaaaaattctatatgagaaagaatcttgtgtgatgaattttttgtcccaaaataaaatgactggttattaaagaaagtgggatgaaaccggaagtccaaccatgttataaatggtttgtgtaagtcataataaggtttgtataaagaaattatgaaaaaaaactttatgtgatcaagttggctataattaaaaaaggaaattatttat

SEQ ID NO: 288590 - DNA, 535 bp, Homo sapiens
tttctcttctttaagctgtttacagcttttaacaattgagtaaagtatactctaataagaaaaatttaaaacaactccattgcaattgcttcagaatttggaaactatttggtgaatatccttagtttatgacaatgtagttctttgcataaattcaataagaatctattttcttttataacaggacataattggagacactggtgatttcatcaagactttgattgtaatgacattttcagatggccttgagaaaatgaggctgacctataaagccaataaaagcgccttggaaaacctgggatcatacatttttatttgcagcgtactgacttgggataagtaaagaatgtcactttctgacaggcccaggaaactcargttttcttgggaccttgaaaaaagagtaattcacccaattcacacaggtatctgcaggcacagtaaattcttagctgggctcaaggcttttaaaaagttcaaatcttagattccttatgaaaagcttccagcaaagccaattttataaagagaa

SEQ ID NO: 288591 - DNA, 552 bp, Homo sapiens
tgttatggtttctatggtggttccagatacagtgtatgtatttaatttaaactactcaccagaatatactatgaagtagtagtgtttcatatgtatgttatgtatatacattatatatgttayttagattacatatatggaatataccatatttagagaaaataatagcttcaaaacaacttagtatgttttaatataatacaatctaggttctgaatttaataactgacagacttcatgttgcaatgaaaagaaagagttttaagagtaaagggaagctttgtatttgcaacatggagacccttgacctcggcaaaaatggttatggtaatagtgttgagggtggaagccaaattagagtggacggtgaaacactggagatagcaaatacagacaatccttttgtaaagtttagccctggaagggaggaaagagaacagtaactgaagggcagatgtcaagtccaacaagatgttgctgctgtttgcttttttagtggaagagctgtgaatggcacatgctggtgagaaggagccaataaaacaggaaagg

SEQ ID NO: 288592 - DNA, 552 bp, Homo sapiens
tgttatggtttctatggtggttccagatacagtgtatgtatttaatttaaactactcaccagaatatactatgaagtagtagtgtttcatatgtatgttatgtatatacattatatatgttatttagattacatatatggaatataccatatttagagaaaataatagcttcaaaacaacttagtatgttttaatataatacaatctaggttctgaatttaataactgacagacttcatgttgcaatgaaaagaaagagttttaagagtaaagggaagctttgtatttgcaacatggagacccttgacctcggcaaaaatggttatggtaatagtgttgagggtggaagccaaattagagtggacggtgaaacactggagatagcaaatacagacaatccttttgtaaagtttagccctggaagggaggaaagagaacagtaactgaagggcagatgtcaagtccaacragatgttgctgctgtttgcttttttagtggaagagctgtgaatggcacatgctggtgagaaggagccaataaaacaggaaagg

SEQ ID NO: 288593 - DNA, 910 bp, Homo sapiens
tatttcaatgcttaatattaaaagcgttttgatctttatttagtagtttcgtggtgttgtaaccagaaacatgccctaagaacttaactcttgtttatatcaattaacctatggtaaaactggtttcattacatatgaaattaaatgaggagttactgtacatgatttatcaagtcatttaaaataccaacttctactgaaattatagtgctagccctataaaagtaattccatttytagaaccagctaggaccttctagctgtgctagttttgtttctctataccaatttacttacaaacagcaaaagccagaaagatccatctggatccacttcctttattaatggaagcgataaccaccaaccataaacaaacaattgaaacattataataaatttctatttatgaagtagttattttataatttgtctaatttccacacatagaattaaacaatttaagtgtattttaattgtcaccaatttggcaagtactwtgtccactgaagctatcactagccgtgctaaactctgtaactatcacacaccacatgaccagatgtagactcctgagtaacctggggctccctactccctacaaggaatagcttggtctggtcaaatgtcatcataatatcccattttaacatacaaaattttcwttacacttttttcaaagataaaaattaagatcactataatcaataagccttaatatatttccaaaatttatcttgtagcaagtgaatataaaaatggaaagttgaatctattaatctctatttaaggcactgcacatcaataatttttgaaaaaatattttgaaatatttgagtaagaagctacaagtttataatatgctatgcataattcaaatagacttggggaaacattaccacataactactcc

SEQ ID NO: 288594 - DNA, 559 bp, Homo sapiens
gcctctgagtatgtaatggctataattgtcatattcgaatatttgaaaatttaattcattcctttggagacttagtgagtgatatcatgactttttgatattttaattatgaggttggtatgggagcaaattatgcacagggagtgacaactaggaacccgtggtgcactactggacccattctaagccagggcttgactgatgctgcctagaatgtcactgactttcattctgaaggagatcagccccctaagagatgatatctccatagagatcctgttcttttgtgtctctgggagcctgtcagctcattcccgtgtaggtaaagaggctggtyaaggagcaggaacatttctgcccaggagggtggttcatgctcctgaagtgggatctgaacagcagcccagggaggcagctatcttttgtgtctccctcttgtttagggatatggaactcttaagagttcccactctttactgtattgcttaatgggcagcacttgagacctggttatgttgaaccaatgaacaaataatcttcagttccccaattgtgttcc

SEQ ID NO: 288595 - DNA, 592 bp, Homo sapiens
ggatatgaaggtgaatgagacagtctcatcctcgctcctcacaatgtggcccactgyacaggagcatcagcctaacctggaaactggttagaaatgtagaatctcaggccccactccaaacctactagattagggctatccagagaaacagaaccaataggtaattgatatatatctttctttaactatatatagatagatttattataaggaactggcctgtaagattatggagactgacaagtcctatgatctgctgggtgagtcagagaactagagacccaggagagccaatgggcttgttctagccagaagaccagcaggctcaagtcctaggcagggccatgtttcagttaaagtccaaagccatgaagaaacggatgtgctgtctttagaagcccaaacctcagcatcactcaatatacccatacctacacatacaccctctgcatctaaaatttttaaaaatgaagaagctgatgttccagctgaaaggcagtcaggcaggaggaattcttgcttactccaggggaaagtcagcctttttcttctatgaaggccttcaactgattggatgagtcccacccacatt

SEQ ID NO: 288596 - DNA, 567 bp, Homo sapiens
acagcctaagaaggtgagcccgccattcattagcgaggcaggtattcctgcttccagctcctggatctgctctgcttcttgccctttctcaagcctgagtcttaagcctcctgcagattctatgggcagcacagcactttccaaaacatgctcttctatttaaggtggtgagagctagtttctgctgcttagagatgaactccaacagaaatamcccctttttcacctgagaacactgaggctcaaaacagttctatgaattggcaaaggttacacaattgattggtagtaaagaatagagttccgtccagtgttatttttacttttctgagtggagtcacttgtaggaacactcagtgaacctggacacctcaccgtggaaacctattttgcctccacctcctagggctcccttgattagacataagctctgaaagcaccattccatgccacccacaaagtcagaggtttgtcaatcattttgatttgggctgaatatgcccaaaatctagattaatcaggaggatatagctgaagattaattggaacaactgtttctttacaagt

SEQ ID NO: 288597 - DNA, 614 bp, Homo sapiens
caggtgtgggccacacgcccggcttaatttttgtacttttagtagagacggggtttcgccatgttggccaggttggtctggaactcctgacctcgggcgatccacccgcctcggcctcccaaagttattcagtcttaaaaagagggaaatcctgtcatttacaaggacatggatgaatctggaggatattatgctaagtaaaatgcaccaggcacagaaagacaaataccacatgaactcactcacatgtggaacctaacacagttaaactcatgaaagtagagagtagaagrctagttacaggaggctgggagggtaaagagggagggaatggaggagttgttgatcaaagggtacaaagtttcagactgacaagcacaggttttgagatctattgtatagcagggtaactatagttaatagtaatgtattatgtatttcaaaataactgagtaaatttcaaatgtcacaccataaaagagataggtaagagaggcaatggatattaatgagcttgatctaataaccatgccacattgtatgcatacatcaaaacattgcaacgtaccccataaatgtgtacaattatgatttatcaatcaaaaataatatta

SEQ ID NO: 288598 - DNA, 614 bp, Homo sapiens
caggtgtgggccacacgcccggcttaatttttgtacttttagtagagacggggtttcgccatgttggccaggttggtctggaactcctgacctcgggcgatccacccgcctcggcctcccaaagttattcagtcttaaaaagagggaaatcctgtcatttacaaggacatggatgaatctggaggatattatgctaagtaaaatgcaccaggcacagaaagacaaataccacatgaactcactcacatgtggaacctaacacagttaaactcatgaaagtagagagtagaagamtagttacaggaggctgggagggtaaagagggagggaatggaggagttgttgatcaaagggtacaaagtttcagactgacaagcacaggttttgagatctattgtatagcagggtaactatagttaatagtaatgtattatgtatttcaaaataactgagtaaatttcaaatgtcacaccataaaagagataggtaagagaggcaatggatattaatgagcttgatctaataaccatgccacattgtatgcatacatcaaaacattgcaacgtaccccataaatgtgtacaattatgatttatcaatcaaaaataatatta

SEQ ID NO: 288599 - DNA, 614 bp, Homo sapiens
agattatgtatgtaaaagtacttcatcatcataaagcactacacaaatggggctgcttatttaaaatacaggacattttaagccttacatatgtacattgcagaaaatagtcttgaaggtacgtgaaagctggtgggtgctgcagttgtttttaaacagttcttagtgccaattttgttcaagcaatatatccatcccaataaacctttcagggaggagcccagggaacatgtcttaatcattcacaattagggaattaattcatctagatgyctcagggtgggaaaatcctatctatcgcttagaaaaatatcctctgagaccaatatccccagtgaatttcaaaggcattgagacctctttactcacccctaggttcaccagaagctttctcactctttgtttgactttatcctagtgttttcttctctcaagttcatggataacattttgggacctgaagagaccatctaaatactaaaaaaatcattttgtctctgattacagattccatttctccctgaaatgagcaccatgtcaaaagatcagttacactaattatttgttgacctttaatatttttatagtattaaaagcctatgggtctaaaatgt

SEQ ID NO: 288600 - DNA, 631 bp, Homo sapiens
cataaatttgaaatgtacatccatttggaagtgacaggtaatgagcacaacatttcagtgctacagttaattcagtcagcccaaatcaaatacctagactccaacaaaggaaaagccctagattttcagattattacaatgagtctatttctgcaatgttaatgaagcagctctccatcttcagcaaaatttccacttttatcacacttcaatggggtaagcaatagaaatccaagaaggatatggaatcccaaaagatccaaaatagccaaagcaactttgagcaaataacaaagctgccagcatcacactttttgacaattccttacaaagctatagtaatcaaaacaatatagttctggcataaaaaacacacatatagaccaatgcaatagaatagagaacccagaaataaacagatgcatttacagtcaactgatcttcaacatgcattccaaggacrcaaaacagggaaattattgtttcttccaaaaaaaaatgaaattgaaccccttctcacaccacacacaaaaaccaactcaaaatgaattaaagacttaaccataaaacttgaaactataagctgaaaaattagagaaaaaccttcttgatgttggtcttagcgtcttag

SEQ ID NO: 288601 - DNA, 574 bp, Homo sapiens
tgagcaaagtgtccttactttgcaggcagggctaaacttaaattattttggcttattccccttgaagtcactaattagcatttggtttgtttcttttcataacatcattctttaatcaacaaacatttccaagagcttttctgttatcagatctgatttgctggcttgtccaagagtgattccactaaggtgtytgatagagaagggagggggcttcctgcagggcagagaaggcttttctaggagcccaccacagagggtaccttttcacactttgcacaaggactttatgtggatgagctgcagcctgagtaataccatcatgtcactgcagtaaagcctacaccatggtttctcagaggttacaggaaggctttgtagtcggtgcaaagtaaaccctcaatacattttagctagcaattgagagagtactgtatgtgtgaaatgcaaactggtttccttttttggaagagaggaggagaggaagtaattgaagtaattcttgctgtgtttttggcttatcaaaaaaggtggatcactttgtgagagactgaaggagttagaagcaaaagtg

SEQ ID NO: 288602 - DNA, 628 bp, Homo sapiens
gggaataacatttatagaagatttcctgcaggaattgagttttgatcaagataagaatagacagattaactcttactaatatagttgacgtgggaggcttttcagatggtggaaaatagcctggcaagggtgaagaactgggcattaagtagtcatgaactgggtaccacacacagcaagactccagagaggagaagatgggctgtgctgggacaagaagtgmggtaaaatacggagaaaacctctcctattgtaaatcacccaactccaagtacatcaaagtccatttatgcaccccccaaaaaatgtgtgtaatcagtagcaattactacagttcccaaaattagggctttctgcatctctctgaaaattaggtaaaaattgttattgtaagagaaagtgtaggtaatcaatgattattgctgttgaaaaatcagacatttctatagctgagcacagaacacaaggaagaagtttgagaattaattatatcttctaggtcttttagaaatttctcagattcctattttcctctcctgtgaattaggtaaaatttctaatccactcacctttcatagtagagtctaacaacatgctcacaataatgatttttcagaaaatgcccttg

SEQ ID NO: 288603 - DNA, 546 bp, Homo sapiens
atttttaacaaattgtttaaactaatttcttaaggagactttctccactgccagagatcttgaatagcctcctgtttattcatccagaagcaattatttacataactgatgaactgggctcccactttgggaagagaaccaccttttcctatacttgcytgcattttggctttgatatcttctacagaactaggtccttttggtgttttcagggtttttttcctgttttttttgaataattcttcacctttagatcttcttgttaatgatttttagtctttttctattctggtttgatttttggcagaagtatctcatacagatttattcactagagctttttcttcagtttcctcattatcaaaatcattatcatcatcttcatcagcagcaagttctacttttctctgtggaaccttttatcacctccacaggtggactgccttctagatatacttaaaagttgcatatccttctcctcttcatcttctgactctgcatcttcctccatagttactaagcgctgtccactaatatgcactggcc

SEQ ID NO: 288604 - DNA, 599 bp, Homo sapiens
agactctctccaaaaaaaattgaacaaggtactgatttgcacatgaatgtacttttgctgcttttttttttttttttttttgagatggagtcttgctctgttgcccagactggagtgcagtggcatgatctcggctcaccacaacctccgccttctgggttcaggcgattctcctgcctcagtctctcaagtggctgggactacaggtgtgtgccaccatgcccggctaatttttgtattatcagtagagatggggcttcactatgttggccaggctggtctcgaactcctgacctcgtgatctgyccacctcggcctcccaaagtgctgggattacaggcgtgagccaccatgtgcagccttaattcttatttaaaaaatcaacttttattatttagagcaattttaagtttacagtaaaactgagtagaaagtacagaaagttccacagacaactgattttttagagagatacaaagataatttagtgggcaaaggatcatcttttcaacaaatggtgctgtaattggattgcaatacatataaagaagcaagaaggaagaaggaggaggaggagaaggaggagaaagaagacagaa

SEQ ID NO: 288605 - DNA, 523 bp, Homo sapiens
tggtgacacttcattactatattatgaagactcataatacagtaactcacttttcaaattgaaccctagagttttacacatttaactctagttgggatcttccaggtttgaaggcaagtttsccagcctggggtagtggggaaagcacatggattcttgcccttatcagccattacaagctgtaggttaggcactccataatattcattgaaaatgaggggcttggaatagaaattgtcttatgtcgccatcattttgtgagtatgtctaaaaagacagtatcatttcagcaccatggacagtcaccatgggtaggaaaggacactgaacttgaggagaaaagctagtggggttgttttaaaagttattgtaaaaaaaaaaaagttcatggatagttttatcttttgttttgttttttgagacagggtctaactctgtcactcaagtggaatgcagtggcaccatctcggctcactgaaactttgcctcccaggctccagtgatcctcccacctcagcctcca

SEQ ID NO: 288606 - DNA, 542 bp, Homo sapiens
gactacaggcacacaccaccatgaccagcaatttttttgtattttytgtagagatggggtttcaccacgttgcccagtccggtctcaaactcctggactcaagtggctcccccgcctgggcctcccaaagcgctgggattacaggcacgagccaccacacccagccgatagttttaatatttcaagttaatgtgatgtttatggtaataaggaaatttttccattttcattgtttgcaacatttttcaaaatgatcgacatcttggaataaaacagaaactatttgccttgagaagaaaacctcctgtatttactatctaactgttccaataaacggtgattgaagatttgtacagaaaatgactcaggaaataaaataaacatacaaaaagttacccaaaaaagtggaaaatgcattaaaatttatgcttctgtattcttcaactgaatactagtaacttgaaaagcatgaacagttttaactgtatcaacttaagtcagatatacacaaatatttttaatcaatttaaacaacgttaaag

SEQ ID NO: 288607 - DNA, 582 bp, Homo sapiens
tacaatataatttttacatatgggtaaacatatatttgtccattatcttttcaacagatctttctcagaaagctttaccactcaaaaaataatcaagccagtcttgatattaaaaaggcaagcacccatatatgatgttttaaagggaatggaatatatttgcatygcacagaagcaaattttagagtttaaaatactaacatatgcatttaatatagtaatgtgtactctgtatgttactatagtaattctgtactagaaatcagaattagagcaaagatcatcttagtacattataaaaatgcaggaaaactaacacaactagctggtgtgagtgactgttgttatgtatcagtataaaagtataaaaactaaagccaataaacagattaattttcaaggttttattcacaagaaaagtgatgatgtttcatagtaaaattgatttaaactatcatgttattgatttgtttacctaaacagtttcactttttaatttattaaagagctaatattgaattgataatccaattgggttttctagatgcaaaccgaaatagaaaaaattatcaccacactctc

SEQ ID NO: 288608 - DNA, 593 bp, Homo sapiens
gttaagaagtagagatgcaatgcattttgtgctccactacatctgtaaacactctactgttttaagactgacatttacagaagctctaataatatcctcattcaacccaaatcacttttcatttaactacaaattgcaacaaaaacaagttacatctttatatatcattcttgtgatttcatgttgtgaatttatccacttttacatgcatgtataatgaagcacacagcattttaatgaattgacagaattgtttacaaaccagtcattcagatggtcacttttatctttcaagcagaagcagctactgttcctctatcattcagggttctagtaggaaatacatgtcatattcaaaaaaggtaacttaaggaaaattcaataaaattttgactatttacaaagatgtagaaaagatgtaggaaaaccacaaggcattgtgcaatattttgaggcaagtaacatgcccaattaccaaccctaaagtagcaagagaagsgacaatgacgggaaactggagacaggctgtgtggtgacgaccaccttacaggagctgtgatcttaggtagagggacagagtcagcccaaggagg

SEQ ID NO: 288609 - DNA, 537 bp, Homo sapiens
agatgtagaaaagatgtaggaaaaccacaaggcattgtgcaatattttgaggcaagtaacatgcccaattaccaaccctaaagtagcaagagaagcgacaatgacgggaaactggagacaggctgtgtggtgacgaccaccttacaggagctgtgatcttaggtagagggacagagtcagcccaaggaggtctcacatgtagggagcagtgttaacaaatgtctgcccgcccaattttcactgcctccagtctctctcaacaatactcctcattggccaaacccagttagaaactgaggccaagagaactctattgctgtatttcatgcaggttggcttcctggaacttgtgatggggaaggtcaagaacygcaggggtaaaggaaagacctaacacactcctcttccctctacttataaatgggctagattctcaaagagcttctttaatgatgtcatgagtgcaaactacttgtccagtgagctcatgtaaagtgctagatcccttccaaattctaactatgtatttaatgttca

SEQ ID NO: 288610 - DNA, 578 bp, Homo sapiens
gctgtaaaaaatatcaaaatgctctaggggatagcagaataaaagtgaacaacaggagatgggagttcaaaaggaggtttcatttaaacctctaggaaagacaaggagcatatccatcaatatagaaagaaaaatattgctaactgaatatttgctaccatgcgccaggcactgagtgaaagctaagtgttttcacatcatatctcatttaatttgcagcacagtgcagtgagatattttcatttagagcattttacatacgaggaaagtaatttgcctaaggcactacaaaacgaaatcagaaaatccaataaagatccattatttgaaaaaggttttacaaccagatacaacctcagacataatctcaatttttaccatttttaatcattatttgtgtcttagaaagtagcaagatacaaatgataatgtattctgcctacttatagcaygaatctggaaaagcattatttcttctataataaactccttttgaagaaatattttaagtggtgtcacagcacttcgaagcatgttaggaaaagagttagctcatgaaatctttaccctagaacaga

SEQ ID NO: 288611 - DNA, 606 bp, Homo sapiens
aagagtgctcacccagccatctgacatactcacagcatctgggcacaagaaaactgtcttccccaagtccctcttccctgccccccatcttccccagtcacacatgcaaacaatctggacagtccataaggtagaggataattttagggagttccccagggcttggctggatgctttccaatcatttctttctggcctgtgaaatcagatgcactatttctttatacatgagaaaaaatgaaatcagtttctatttgcagagtaagatggaaaaaaatgaagttgcacatagctatgtcacagattcttagaaaggaactccctaagctggaggacaggaaggaggcacaacagaaactccctttctaaaggaaaggaagttctatttgttaacctctgagaactatcctatgagactggcctcaggtacacaaagcacgttttaaggtttggagcaaagttggtaaataaaatcagtgaggtttcttgagtcactttactggtcatgrtgtggtttaatcatcatggccatttgaggcacaaatcactgtgtgtccgtctttctgtctgcatgtggctctgtgtgtgactgacctctctatacca

SEQ ID NO: 288612 - DNA, 467 bp, Homo sapiens
ttgctagccacataaacccactcccaccctaagaatatcaaatgttcttccaaggatccttcctccctctggtgtcaggaggtgtcctttgaggaaattatgccatgtaagcacctgaaccaatccaggcagccactggaccaggctggctccaggtggcctgtgcacccctactacccctrcagcaaactccccatgaccgctctgcccaggccaccagtgctccccttgcattgaaaaagctctttcctctgattctgctctctgaaagggcactgtagcagggtggcttggatcatgatatgttaagctatttttcctggcacagggcacttggctcaggggacagagggaaagaggagggagttcaaacaccagccactatctgtttctgcaatctataatcccagatcctcagactctctttctgggtctagcccagcagccgttccttgcaattggtcttc

SEQ ID NO: 288613 - DNA, 631 bp, Homo sapiens
gtaaacagacaaaggagctcagctattcaactgtaatgggcaaaattaaggtctttaacaggcaaattagaaagaaaaatactgcttgaaaatataaccattttaaggagagaagggatggagttaactgaaatataaaaatggcaagatttataaaacgtagccctggaaatcaatccaaccagtggagcacgtttgtcattagtgggtgctaagagagaaatcattgaaattcaggcacaatgtttaaataaaaaactatgcaataaaatatgtttgggtaatatgccaaatcttttacccaaatgcctcctaatttagaggcaggatatttatcaaatgttgtttggcaagttagtagtttgaaactctgaatacatttyctcccccaaaaaataatgttattacatggtaactggtttcccaagatagaccacaagaatctcccaaagtatagtgtaataatgtataaatatgatactgagataatggggtaatacaaactgttttgtaaaaacagaatcttattatcctatatagcagtgcttttcaaattgtgggtcgtaacccatgaaatcaatttagtgggtctttaccagtttattttttaatagaatgaaaaggaaagaat

SEQ ID NO: 288614 - DNA, 1137 bp, Homo sapiens
gtaaacagacaaaggagctcagctattcaactgtaatgggcaaaattaaggtctttaacaggcaaattagaaagaaaaatactgcttgaaaatataaccattttaaggagagaagggatggagttaactgaaatataaaaatggcaagatttataaaacgtagccctggaaatcaatccaaccagtggagcacgtttgtcattagtgggtgctaagagagaaatcattgaaattcaggcacaatgtttaaataaaaaactatgcaataaaatatgtttgggtaatatgccaaatcttttacccaaatgcctcctaatttagaggcaggatatttatcaaatgttgtttggcaagttagtagtttgaaactctgaatacattttctcccccaaaaaataatgttattacatggtaactggtttyccaagatagaccacaagaatctcccaaagtatagtgtaataatgtataaatatgatactgagataatggggtaatacaaactgttttgtaaaaacagaatcttattatcctatatagcagtgcttttcaaattgtgggtcgtaacccatgaaatcaatttagtgggtctttaccagtttattttttaatagaatgaaaaggaaagaatwaataaataaaactaaaaaaaactgggttttttagaggcagggtctcactatatcaccaggctgaagtgcagtgcagttcagtgacactatcatagctcactgcaaccttgggaactcctgggctcaagcaatcttcctgcctgggtctcccgagtagctaggactacaggcacatgccactacgcatttttttttttttttttttttttgtagagacaaggtctcactatgttgcccaggctggcctcaaacttctggcctcaagcgctcttcctgccttgtcctcccaaaatactagaattgcaggcatgagccaccatgccagacttaaaaaaaawttttttaagtatttgtgggaagtaaatggacaccatgttgagttcagcttttagaaagatgattttggtaatagtacaaaagatagaggggatgagatgaaaaatcagaggctacaaaactaggtaagtcaatacagatggctggcaaagcactgtggcaccagaat

SEQ ID NO: 288615 - DNA, 534 bp, Homo sapiens
ccatctctaaaacataaataaataaaactaaaaaaaactgggttttttagaggcagggtctcactatatcaccaggctgaagtgcagtgcagttcagtgacactatcatagctcactgcaaccttgggaactcctgggctcaagcaatcttcctgcctgggtctcccgagtagctaggactacaggcacatgccactacgcatttttttttttttttttttttttgtagagacaaggtctcactatgttgcccaggctggcctcaaacttctggcctcaagcgctcttcctgccttgtcctcccaaaatactagaattgcaggcatgagccaccatgccagacttaaaaaaaatttttttaagtatttgtgggaagtaaatggacaccatgttgagttcagcttttaraaagatgattttggtaatagtacaaaagatagaggggatgagatgaaaaatcagaggctacaaaactaggtaagtcaatacagatggctggcaaagcactgtggcaccagaatccaggatttacct

SEQ ID NO: 288616 - DNA, 578 bp, Homo sapiens
tgtgtaaaccaaagtggccagagtgggaagaaactactttattgtccacattctaaccaaaatgaaacaaaaggycattcattagaaaaacatccatctcttctcctgatctctctgaaattaaaggtaaccaaagttagaattggagcatttggtgaaaataaaaagctgcctaaatttttctcaagtgtcctagcactttcacttttggaaatgaatatttagaaaggtttaagaatatctttcttacacatttctccttccctccttcccaaacgactgcctcttcatttttgagcaagagtgtgttgaaggggctactgcctgagaagcaagcatcctcaaagcacattcctaattcagttcatctttgggcactgcttttccccaaaggtaggaaagggaagattactcagtttgtccaggaacaccgattaagaatgatacataggtgggacgtgttaggtcgagtcagccaacactgaatcaatcctttgtagaaagacagagtgggcagatgctacaagcagctcctacctctagatgggtggaaaataacacagagcaagacatgaggc

SEQ ID NO: 288617 - DNA, 578 bp, Homo sapiens
tgtgtaaaccaaagtggccagagtgggaagaaactactttattgtccacattctaaccaaaatgaaacaaaaggccattcattagaaaaacatccatctcttctcctgatctctctgaaattaaaggtaaccaaagttagaattggagcatttggtgaaaataaaaagctgcctaaatttttctcaagtgtcctagcactttcacttttggaaatgaatatttagaaaggtttaagaatatctttcttacacatttctccttccctccttcccaaacgactgcctcttcatttttgagcaagagtgtgttgaaggggctaytgcctgagaagcaagcatcctcaaagcacattcctaattcagttcatctttgggcactgcttttccccaaaggtaggaaagggaagattactcagtttgtccaggaacaccgattaagaatgatacataggtgggacgtgttaggtcgagtcagccaacactgaatcaatcctttgtagaaagacagagtgggcagatgctacaagcagctcctacctctagatgggtggaaaataacacagagcaagacatgaggc

SEQ ID NO: 288618 - DNA, 555 bp, Homo sapiens
gcttgatgaagggagttctcccctcttgtcctgtcttctgccatgtaaggatgcagcagcatttttcccctccagaggatatagcattcaaggtaccagcttggaagcagacagcagtcttcattagatgccagccttgatcttgtacttcccagcctctagaaatgtaagaaataaatgtctgtttttataaattactcaatctgtggtattctgttatagcagcacaaaattgcctaagacataatgtgaaagaaaagtgactttgcttctctgtacttcagttttctcatctgcaaaatgggtttaataataaaggtacctaccacatatggtatatattagttttgtattgctatcataacaaattaccacaatttagcagcttagaacaatgcccatttattgtctcatagttctgtrgattagaagtctggtgggttcatgtgggttctgtgcctggagtctcacaaggctaaaaccaaccaggctggcctcttacctagagtttctgggaagaagccacttccaaactctttcaggttgttgggagaa

SEQ ID NO: 288619 - DNA, 619 bp, Homo sapiens
cacatatggtatatattagttttgtattgctatcataacaaattaccacaatttagcagcttagaacaatgcccatttattgtctcatagttctgtagattagaagtctggtgggttcatgtgggttctgtgcctggagtctcacaaggctaaaaccaaccaggctggcctcttacctagagtttctgggaagaagccacttccaaactctttcaggttgttgggagaatctagctccttgaagctgtaagtctgaggtccttgttttcttgctgactgtcagccagaagccactctctgcttctagaggcttcctggactccttatgcggcctccttcatcttcaaggagaaactgcattgaatccttctcatgcttcaratctgacttcctcttttgccaacagccagagaaaatgtttaccacttaaaggtctcatatgattacattgggcccacttggataatctttctattctaaggtcagctcattagtcaccttagttacatcttcaaagttgcttttgccatgtactataatcacagaagtaattccagggtgaagatcataagagctacgtagactcctgcttaccgcatgattattttgaggaataagt

SEQ ID NO: 288620 - DNA, 594 bp, Homo sapiens
gtgttggggagtgagcaaggataatcctgcaccagcctgaaaaggagagacagttcccacccaaccacatacctccaggagttctatagcagccasatatttaaaccaaagctttttcttttatactatttctgttttctcgttcttcagcacctctcaattctccatgggcagaggtgtgtttcagtcatcttccagagccaaacagaacaagtcatgatctggaatcaacaggtccatttttccccatgcttcatttctgtagcattataataacagtaacaatagccagcatgctactacgtgggaggcactgtgctaagccctctacatatactattatgcaattattacaattgatcatgtcatcaactcctttgggtgataccttcataatccctactttacaactgaggaaaatacagcatgacatgctgattaccttcccagggtcacagagctaggaagacatggagcctgaataggcatccaggcagtcctccatacccacatcctcacctggcatcccatcatccttagactagaagagcagcaagggatcaggctctctcagcctcaccatagggtgagagg

SEQ ID NO: 288621 - DNA, 1226 bp, Homo sapiens
gagaaaattatttgctataaaaataatagtagaaactaccatattgtttctaatttaaacttaagtgcctacccaagatttgcaccraggtaggcccaaaggagacataatgctctcaacttcctgcttctattccctttaaaattgacttagttatttttaaagtttaattgggcaattttttattttttatttctgttggtacatagtatttgtatatatttatggggtacatgagatgttctgacacaggcatgcaatgtataataatcacatcatggagaatggggtatccatcccctcaagcacttatcctcagttttacaaacaattaaattacactcttttagttatttaaaactgtacaattaagtttttattgactatagtcaccctgttgtgctatcaaatagtaggtcttattctttctaaatgtatttttgtacccactaaccatacccactggccaattgttttttaaattcacaatcccactcgctccaatatttccaccatctttatcctaaaacatcctatacctgccctcctgtagccttgttccttcatcagaaaagcaaawtttagcatttgctattactgtagtttctaaaacatactatgtgcttatttttgaaaacttagaaatatagaaaagatgtaaacaaacaaaaacctcatgaccccagtacccagaggcaaccctgttaacattttgttataatttcttgcttcctattttctatgtaacttttatttagttgatttcatatcacaaatatagcttttaattcccaaggagacttggagaatataaacctataggaaatcaactttaaccttagcatgctaaaataataagtattttagcatgctttatacttatttaaatatagtatttaaaacattatatatttatatatatagtaccttgtatatatatacactatatatatagcatatatatagtatatatatagtatttaaaacattatatatatacttatttaaatatagtatttaaaacattatgtatataaaatatattacatatattacatatatacatacatatataacatatatatatatttaaagcataccatataaacatactawataaaggttgacttttagaatacttatcagtttaaattcattggtttaaaggagctgacccaaaggaacctacatttattcagatattactgttgtagaagtccttcatg

SEQ ID NO: 288622 - DNA, 290 bp, Homo sapiens
gatgatcaaacaactgaatgccatgcctttctgagcctacaacagacccttgacatttccgatgactgtctctggagacattcaagaatccctagatttgtgcacaccaaactccyctgtggcatataattacctcacaaaaaggatattttttgaactggctagagcagtcactgaaatttcagcattttctaccctgtcttcatatagagcatactgtgattctttcaagtcctagatccaagtccattgccaaatttgacattctactctttcatgcattaaaaatt

SEQ ID NO: 288623 - DNA, 479 bp, Homo sapiens
tgttgaagctctacctctcaaggtaatggtatttgaatatggggcctttgggagataggcttagatgagggaatgaagcagggtcctcacaatggaattagtgcctttataagaaaagacatcaaagagtcctgttcccaacccctctctgccatgtgaggacacggcaagaagatggccatcttcaagccaggaagagaaccctctacggaactgaccatgctgacaccttgatcttagaygtctagtctccagaactgtgagaaataaatttctgttgtttaatccactcagtctatggtattttgttatgtcaggtcaagccgactaaaacaggtgtacaatttgttataggcaaaatttatgtcaaatgctccaaagttgactttgaggacatattctataagaatccattcattttatttctaggatataccagcttctaaaattcttaattattgcatacaaaacaagaaaat

SEQ ID NO: 288624 - DNA, 471 bp, Homo sapiens
gaatgtgaagttcatcaacagtagaaactctcaggatgacccagatggccaacttctatgatagaaaataggattttaattgacagattcgatcccaggttcctccctagggcttcccaatagaggtcatgaactgtgatgcaactgcatggttttaaaccactttcaattaagttcacacaagacccccgtggaatgcatttcaagcggcaacaacattctatatcccaatatcagttgttccgtcccatctcccagctctcctatgtttacaactttaatacaagaagcttaagttgtatcattctctgctactgattatgcacctttcttccagactacttgcatcctttccaaaatgcatcagctctgtcmcccaacattgatccctctgatacaagtgggtgagttctttctgctcaggtaccgacacaaagacttcactttcttgatccaattacagtcagactg

SEQ ID NO: 288625 - DNA, 555 bp, Homo sapiens
ccagcaccttgattttagcccagtgagacccatttttaaacttctgacctcaagcagtgaaaaataataaatttgttttgtttttgttgttgttgttgttgtttgagatggagtcatgctctgttgcccaggctggagtgcagtggccatgatctcagctcactgcaacctccacctcccaggttcaagcgattctcctgcctcagcctcccccgtagctgggattacaggcacccrccaccacacccagctatttttcctatttttagtagagacgaggtttcaccatcttggccaggatggtcttgaactcctgacctcgtggtccacctgcctcagcctcccaaagtgctgggattacaggcatgaaccactgcacccggccaaatttgtttagttttaagctactaagtttgtggcagtttgttgcaacaacaatgagaaaccaatatacagagaatgcatacattttcatgtcatgtagtatagggggagaaaaataattttcctctacctatctttagtttcactggtgggacagacctcataacaaaa

SEQ ID NO: 288626 - DNA, 555 bp, Homo sapiens
ccagcaccttgattttagcccagtgagacccatttttaaacttctgacctcaagcagtgaaaaataataaatttgttttgtttttgttgttgttgttgttgtttgagatggagtcatgctctgttgcccaggctggagtgcagtggccatgatctcagctcactgcaacctccacctcccaggttcaagcgattctcctgcctcagcctcccccgtagctgggattacaggcacccaccaccacacccagctatttttcstatttttagtagagacgaggtttcaccatcttggccaggatggtcttgaactcctgacctcgtggtccacctgcctcagcctcccaaagtgctgggattacaggcatgaaccactgcacccggccaaatttgtttagttttaagctactaagtttgtggcagtttgttgcaacaacaatgagaaaccaatatacagagaatgcatacattttcatgtcatgtagtatagggggagaaaaataattttcctctacctatctttagtttcactggtgggacagacctcataacaaaa

SEQ ID NO: 288627 - DNA, 555 bp, Homo sapiens
ccagcaccttgattttagcccagtgagacccatttttaaacttctgacctcaagcagtgaaaaataataaatttgttttgtttttgttgttgttgttgttgtttgagatggagtcatgctctgttgcccaggctggagtgcagtggccatgatctcagctcactgcaacctccacctcccaggttcaagcgattctcctgcctcagcctcccccgtagctgggattacaggcacccaccaccacacccagctatttttcctatttttagtagagacgaggtttcaccatcttggccaggatggtcttgaactcctgacctcgtggtccacctgcctcagcctcccaaagtgctgggattacaggcatgaaccactgcaccyggccaaatttgtttagttttaagctactaagtttgtggcagtttgttgcaacaacaatgagaaaccaatatacagagaatgcatacattttcatgtcatgtagtatagggggagaaaaataattttcctctacctatctttagtttcactggtgggacagacctcataacaaaa

SEQ ID NO: 288628 - DNA, 555 bp, Homo sapiens
ccagcaccttgattttagcccagtgagacccatttttaaacttctgacctcaagcagtgaaaaataataaatttgttttgtttttgttgttgttgttgttgtttgagatggagtcatgctctgttgcccaggctggagtgcagtggccatgatctcagctcactgcaacctccacctcccaggttcaagcgattctcctgcctcagcctcccccgtagctgggattacaggcacccaccaccacacccagctatttttcctatttttagtagagacgaggtttcaccatcttggccaggatggtcttgaactcctgacctcgtggtccacctgcctcagcctcccaaagtgctgggattacaggcatgaaccactgcacccggccaaatttgtttagttttaagctactaagtttgtggcagtttgttgcaacaacaatgagaaacyaatatacagagaatgcatacattttcatgtcatgtagtatagggggagaaaaataattttcctctacctatctttagtttcactggtgggacagacctcataacaaaa

SEQ ID NO: 288629 - DNA, 643 bp, Homo sapiens
tcctctccaggctgataagggtctagagttgtcttcagtggttaacctttgttctccctggtaaggaagggaggccagacacctttgcctttgtaaacatatgycctgcagtaaacatatgtatgagggcaaaaaacggggagggatgggggaagagcagagagtctttcctatgactgaatccttccatttgccctcagctcaaaatgagttttatgtctaagaggcatcttttggagtaacatattctggcttccttcagtagatgaaagactaataaaaagggttatccccaataccatcttaataagtgataataaaatttaattaaccctgtaaggaaaaaaagtatttgggccttggagacaccagagtttggttcataccagtaaattagctaagctttctgcgtttcctcatgtaaattggatatagagctatagaaggactaaaagagagttttaggaagaagcaaacacaattctgagcactcacctgagagtctcctgaccctttcttctcatcagttcccaagagaacactgagaaaaaccaagctcatctttggaaaagctgtaatttgtgaatattaaagatgtcaaataatttaaacatcatcgatataatttgctaattggaaatgg

SEQ ID NO: 288630 - DNA, 643 bp, Homo sapiens
tcctctccaggctgataagggtctagagttgtcttcagtggttaacctttgttctccctggtaaggaagggaggccagacacctttgcctttgtaaacatatgccctgcagtaaacatatgtatgmgggcaaaaaacggggagggatgggggaagagcagagagtctttcctatgactgaatccttccatttgccctcagctcaaaatgagttttatgtctaagaggcatcttttggagtaacatattctggcttccttcagtagatgaaagactaataaaaagggttatccccaataccatcttaataagtgataataaaatttaattaaccctgtaaggaaaaaaagtatttgggccttggagacaccagagtttggttcataccagtaaattagctaagctttctgcgtttcctcatgtaaattggatatagagctatagaaggactaaaagagagttttaggaagaagcaaacacaattctgagcactcacctgagagtctcctgaccctttcttctcatcagttcccaagagaacactgagaaaaaccaagctcatctttggaaaagctgtaatttgtgaatattaaagatgtcaaataatttaaacatcatcgatataatttgctaattggaaatgg

SEQ ID NO: 288631 - DNA, 643 bp, Homo sapiens
tcctctccaggctgataagggtctagagttgtcttcagtggttaacctttgttctccctggtaaggaagggaggccagacacctttgcctttgtaaacatatgccctgcagtaaacatatgtatgagggcaaaaaacggggagggatgggggaagagcagagagtctttcctatgactgaatccttccatttgccctcagctcaaaatgagttttatgyctaagaggcatcttttggagtaacatattctggcttccttcagtagatgaaagactaataaaaagggttatccccaataccatcttaataagtgataataaaatttaattaaccctgtaaggaaaaaaagtatttgggccttggagacaccagagtttggttcataccagtaaattagctaagctttctgcgtttcctcatgtaaattggatatagagctatagaaggactaaaagagagttttaggaagaagcaaacacaattctgagcactcacctgagagtctcctgaccctttcttctcatcagttcccaagagaacactgagaaaaaccaagctcatctttggaaaagctgtaatttgtgaatattaaagatgtcaaataatttaaacatcatcgatataatttgctaattggaaatgg

SEQ ID NO: 288632 - DNA, 1692 bp, Homo sapiens
tcctctccaggctgataagggtctagagttgtcttcagtggttaacctttgttctccctggtaaggaagggaggccagacacctttgcctttgtaaacatatgccctgcagtaaacatatgtatgagggcaaaaaacggggagggatgggggaagagcagagagtctttcctatgactgaatccttccatttgccctcagctcaaaatgagttttatgtctaagaggcatcttttggagtaacatattctggcttccttcagtagatgaaagactaataaaaagggttatccccaataccatcttaataagtgataataaaatttaattaaccctgtaaggaaaaaaagtatttgggccttggagacaccagagtttggttcataccagtaaattagctaagctttctgcgtttcctcatgtaaattggatatagagctatagaaggactaaaagagagttttaggaagaagcaaacacaattctgagcactcacctgagagtctcctgaccctttcttctcatcagttcccaagagaacactgagaaaaaccaagctcatctttggaaaagctgtaatttgtgaatattaaagatgtcaaataatttaaacatcatcratataatttgctaattggaaatggwctagtaattaactctaaaaaacagaaagggagacagtcattattagtagatacagatgttagtctttcttgctgggaatcaaaaaacagtgttcagtcttttgtctatgtatctagatgtctaaggatgcatgtggggatgtgttatatacatttatatgtacttcgtgtagcattcaaggaaaataaatatcacctccatctaaagtcaatgtacattagaagatttggaatataatcaaatcaccactcctgcttcaaggaatcactgcaggatgtaaaataagagcacagagctgcaccattttgcctttttctttcaggaactgaatttgcattacccttctgccatatgttcaggtagctttcaatggtacctcatacagctgtgwcattgaattcccaaaccttaatgaataaactawttgacaactgctggggcttctgtaatattaaatactgaagatgaagccaccaattgtacagactgaactgaggtttctttgcataattccttaatgaaatgagactgctacactagaagttgggcaaccctgacctagattcttacagtaagaatagctgccctagatgtctgtcaagattgtgcattagagtgtattcttaatcagtgaacaatcaaaacaaatatttcacttcacttcagaaattcatgtcgtgtgatwgcatctgacacatctaggagaagataatcccttacagttcacttcctcctgtttctaaatgtaggctgcattgacttaaatagggttctccactttgtcctggactggagagagtattcagaggatctggtgaaacgagaattcctaactggttcttggagtaggaattatgagaaccaggaccccttgcctaaccaggactgagaatgccagagtgggtagaattttctcaaattaagcacaagaaaaaaatcaatgtggtattcttttcaacagaaataagagtatcagtatgtatttcgacattgtttatttcagtatcattgacagtggcaaaaaaaaaaaggagaggaaatcacctca

SEQ ID NO: 288633 - DNA, 578 bp, Homo sapiens
gacatgagatttgggtggggacacaaatccaaaccatatcagaagcttaacaccaggaagtagaaatcctggtgttttgagtgagacccaacaggcaggagtttaaccagggtacaccagcctagaaggcttaatgagttcaaattggcaaagtgctttaagattcaataatagaaaaaacaatatgttcataccacccttgtagcatttgtgttttcttatattttcttcaaaagttgacttaattcttttgagcaaattgattatttttccaccattgtatagctcctatgrgtggttttaaaaaacatttttcttgagattatagacatggcttaccagtatcagttcaagttattgtggcctaatacatatatctaatatcattgttgttaatacttcaattacataaatagtttttgaaataactcttattgctaaatgttttctagaacatttttttaaaaggagagttttggaattacctttaataatggtatggcaggcataataatttcccctgctgcaaatgtccatgtcctaatacctggaacctgtgaatatgttagatcacatgg

SEQ ID NO: 288634 - DNA, 651 bp, Homo sapiens
tcccaatgtaatcacaagggtctttacagtggaaaagggaagcagacgtcagtgtgaggtgatatgaaaaggagtagacctattttggctttgaaaatggaaggggctacaaaacaaggaataaaggctgcctctgggagagggagagtcttaaaaaggcaagraaacagattctcccctagagcctccagaaaggaacacagccctgatgattccatgattttagcttagtgagacccatgttggacttctaacctacagaaatgtaagataatttgttttaagccactaaagttattggtaatttattagtaattggtaatttgttacagctgcagtagaagactgacataaagacttacaacaaatgggtgggaggtggtttcaaataataaatcaatactttaactggagtcatttacccttcaagcctctgagtatgtaatggctataattgtcatattcgaatatttgaaaatttaattcattcctttggagacttagtgagtgatatcatgactttttgatattttaattatgaggttggtatgggagcaaattatgcacagggagtgacaactaggaacccgtggtgcactactggacccattctaagccagggcttgactgatgctgcctagaatgtcactg

SEQ ID NO: 288635 - DNA, 1080 bp, Homo sapiens
acactttctggcaccccacactgtattggcatcagtgttaacagtcccagttcagatgtgcaatacttcagattggatacactgtaacaagaatccaactttgcatagacatcctcagaatcgcaatcagtcatggggttgcccttccaagctggcagaaaaggaacccgatcttaatttccagctactcctggaaaagaaggaaaaaaagtttyttcctctcctcctgctccttcatatggttctcccggacttccttccatgtatttaaaacttggaactagaaaaacggctgttgaccaaaaaaaaaaaaaaaaaaaaagaaagaaaatagaaaaaaaaaaaaaaaaaccatttccaccttctctccctccttttcatccacccttcccccccattttttttccaggctgaaacttttgcttggtgggtgtcaagctgccgatactgcgccctaacggctacwttagttctggttaaggtggagctgcttattagtattcgagtgaagatgtttagtaggctgttggatatttggagttcaggagacaggtcagacctgagatgaatatttgggagccatacttgcatggatcacccaagtagtcagtgtgtggggagcgctcaggcctgagctctggctttctccaacgtttagagggtccagtaaaggggacagagatggaggcactagtatgactaaactactaaaaacaatgaaaattgtaaatgtaatatcagaatcattaaaattattaaaacaagagactgggacattctagatattgcggtacccataaattaatttatacctgaaaagatgcccccaaatcctcattctcttctctgctatattcaagggtataattgagctaccatctttttctcagtcaccagagagactatgattttgaggtttaaccatggatgaaagaaatgccaacatgtaaagaacttgtgaagatatgaatatgccaaatwagtgaatttttggatatgtgaaaatgccaagttgcaaataaacaaatatgtaaaaatgaaatatttgttgatttatcgtgagtggctttttcataattc

SEQ ID NO: 288636 - DNA, 584 bp, Homo sapiens
tcactcagactgcagtgcggtagtacagtcagatcagggttcactgcagcctcgacctcctgagctcagacaatccttctgcctcagcctccagagtagatgggaatacagacatgtgccaccacaccaggctatatttttaattatttgtagagataggggtctcacttggttggccaggctggtctcctgggcctaagtgatcctcccgctttggcctcccagagtgttgggattacaagcatgagctactacrcccagcccaacttaaatctttttaccagagggaccaaaacccacaatggttcagcacagcatgcacagtctcccaaagagctgagatcctgagaagttttatatttcacaaatgcaaatgtacaaaaagacatcttttcctgtattgaggaagtttcaacgtttttatgtacacatacaatactctcacatgaagtcaatgttgtgataaagcactgttgtggcatgaaatttgcaaaaaaaaatgcaaatgacttctggcaaatgcagcattatttcgctaaaagttcctgggatttcattagctggaaggaaagccaatttagaca

SEQ ID NO: 288637 - DNA, 1143 bp, Homo sapiens
tcactcagactgcagtgcggtagtacagtcagatcagggttcactgcagcctcgacctcctgagctcagacaatccttctgcctcagcctccagagtagatgggaatacagacatgtgccaccacaccaggctatatttttaattatttgtagagataggggtctcacttggttggccaggctggtctcctgggcctaagtgatcctcccgctttggcctcccagagtgttgggattacaagcatgagctactacgcccagcccaacttaaatctttttaccagagggaccaaaacccacaatggttcagcacagcatgcacagtctcccaaagagctgagatcctgagaagttttatatttcacaaatgcaaatgtacaaaaagacatcttttcctgtattgaggaagtttcaacgtttttatgtacacatacaatactctcacaygaagtcaatgttgtgataaagcactgttgtggcatgaaatttgcaaaaaaaaatgcaaatgacttctggcaaatgcagcattatttcgctaaaagttcctgggatttcattagctggaaggaaagccaatttagacawaatgaacagttttagagcactaataaaaagaaaacaggtacagttaaaaaaaaagaaaaaatggaattttacttggtatcttttatagtctagaaataagcaaatttctagttctagaatttatcaccwatttctttagacattttgaccttttttaccttttagaatacattttccagggtctgcatctagtagaatattattttattaaaacatttgcagtatttgcaaggcaccatttctcatgataaaacattaaagctaagtaaatacacaggaaaatgaaagcaccaagttattaaattatgattgcagatatgtccttagcaggggaggtttgatcaagaaagctacttggatttaatatgctcttgtcacgtatgtttagaattaacacataccatgaaaaatggatattattattattttcatcagctcagcatgccataacaaaatactataggctgtgtggcttaaacaaaagaaatttattttatcagttttggaggctgggaaatctaagatcagggtgccagcatggtcaagtctggtgagggg

SEQ ID NO: 288638 - DNA, 589 bp, Homo sapiens
tatagactatctaggaattactataatgagtgaattcatatgtaagatatagtgcccttctctgactccttcatctgcttctacatagtctagactatacaatccttgaaataagaaactatgaccttcattgtttcacactccaaagcctagcactgttagtgctgtggttcaaggcataaatgaacgaattcccccatgtgataggttaaatcatggctctccaaagatgtccataacttaatcccatgamcctgtgaatatattacattgcatggaaaagaaactttgcagacataatgaagtttatggactttaggaagagtaacctgaattatccaggttggcccaatctaattacatgaaaaagcagagaacttcctttggctggagccacatagataacagtagaaggcagaagaggaacagcaggaacaatgatagaagttagatttcaaatatgagaaggctgtgctgtaagaggtcataaacacaaactaaagagaggcctctaagagtgaagggtgcccttctactcacagttagcaatgaagtggatatttcaatcctacatccatccaccaaattt

SEQ ID NO: 288639 - DNA, 618 bp, Homo sapiens
atgatgataatctgtttttctcttataaacctaaattcaaaatacaatggtgtcttttcccatagagggccagcaccaggaaagcattaaattatataatgtttacctttgttagtttcacagtttttttgatgttcttattttctagtgttctaaattattcatttaaaatacatatatctattggtttctaattgtccctyttctcatttttatacatactgtacacacagtgcacacacacaggtgtgcacacgggaaacgtgtgtaacagattactaaaggtttggggcttgggaagtagtgcattgctgcaacacaactaaatgtagtataaaatatttatttagttccaaataattagatatttatttaaaatatctaatctctttagttatttccaaactcacgcttttgtccagcattctattcagtttccctgttgactcttctcattgcttttttttttcccttcctctttttttcagtattccttccctttcttctctgcctcactcaggggcaaaacaaacaaacaatcaaatcaaagcgatcttccattttcagatgtactcagttctctttggtccctacctccaaatttagcagacttgttgc

SEQ ID NO: 288640 - DNA, 552 bp, Homo sapiens
atactatagacaatgcaaaacaaaaaccataaaaaaaacaaaaaactagttgaaaggaaatatctgctcaatatttcagctgtaatgtcttcatgtctctgaataggcagtttattgatttttcctcctcttttttgatgatttggctgcttgttttgtcaacatataatttcagtttcagtctgtattttaggtacatatgatgtcatgaaatcagtctttttattcccctcagtctttgaatccactttggaatatcatggatgctatttaatataattattcctgatctatacacttaaaatgtatcaggtttttgtaatccactcaagtacagatacatccagttcttttttaaatacattgatttcagttgcataaaaaattataagataaaagatgaaggcaataagaaataaacatagatcaagggagaaaatcaagaaaggrtaggttcatagataaatgcacgaagtaatcaaattaacaaggatttttatgatggtgtaattaatgaactgcaattttacattagtctccagcaaaaagaaa

SEQ ID NO: 288641 - DNA, 552 bp, Homo sapiens
atactatagacaatgcaaaacaaaaaccataaaaaaaacaaaaaactagttgaaaggaaatatctgctcaatatttcagctgtaatgtcttcatgtctctgaataggcagtttattgatttttcctcctcttttttgatgatttggctgcttgttttgtcaacatataatttcagtttcagtctgtattttaggtacatatgatgtcatgaaatcagtctttttattcccctcagtctttgaatccactttggaatatcatggatgctatttaatataattattcctgatctatacacttaaaatgtatcaggtttttgtaatccactcaagtacagatacatccagttcttttttaaatacattgatttcagttgcataaaaaattataagataaaagatgaaggcaataagaaataaacatagatcaagggagaaaatcaagaaaggayaggttcatagataaatgcacgaagtaatcaaattaacaaggatttttatgatggtgtaattaatgaactgcaattttacattagtctccagcaaaaagaaa

SEQ ID NO: 288642 - DNA, 418 bp, Homo sapiens
caacttgttgtgagctatgctcctaagccatttttctgttggacttatgggatatttttgtttttcttctctaacatacagcaccatacttgtcttaattgaactttattctgtctctgttttttttttttttttttgcttaactgtagtttcctctaatctttttgggcctcagtttcctcctttatacaataagaaagtttgggtagattaactcctgaggtactttttacctccaaaacatcattctccatgttgggactgaatcartctttggctccttaaagccagtttcagatttaaagagtatgttctatgttttatcatcctgacacttgataagaagatagacaaacaccaggcctcagatgaactcttcagggcatcatttgttacattctcctgagttgacactaat

SEQ ID NO: 288643 - DNA, 563 bp, Homo sapiens
catgtgctctccgccctcatgctcctctctctccctctttcactctgtcttcctctctttctctctctgcatgtgaagacacaatgagaaggcagccttttgccttgtataagccaggaaaagggacctcactagagacaccaaatctgctggcaccttgatcttggaattgtcagctctcagaactgtgagaaataaatgtctgttgtttaagccacccagactatggaactttgttgtggcagcctaagctaacttaaatagttggaatctgaaaagtgttttgactaaagccctggctttgaaagttgatgaagcaattcatgagtaaatataataaaaactccaaaatttggacttttcccagagttttagattatrtaattaggatgtcagcccagagaaataaatactactttattgttgttttctctgaacacaaatgcagtatagctcattgagaattctcactgagctgtggtaaaagcactgaagggaaggttcttaataacactccccaggctgttgatgaaaccctcggtttgaaatcaccgggacaggaa

SEQ ID NO: 288644 - DNA, 573 bp, Homo sapiens
cttagatggtttaaaatacccaccttcacagyacacacacatcattcttttctagaattttatcatatcctctttgtatcaaagggattcggctacaaagatttctctaaatagcaaagaatggatttatttcaaggataaaccagataaagtattcttccctcaaaatcaacatgcaactaaggatctcttcgtatttttgagttaagtgaatataaactgttgctcctcaagagatattagtgtgtaacaagaatagctgtagtgaatttctattggctaattaaagtaatctttcatataagtgtgcatttttaataacatcaccattaaacataaaaatgagacagggtagaaatcctttgattgtgattgatactcttagaaaaaagacgagaataaaatatattttattttaaacaacaggaccttcatcttcaggaaaagctgagtgacaaaaattaatattcattataagtaactctgaaaagcgatctggacatcagtttacacacatctggaaggaactaaagtctagtaatgagaaataatgcacttgtgaagcatacaatc

SEQ ID NO: 288645 - DNA, 573 bp, Homo sapiens
cttagatggtttaaaatacccaccttcacagtacacacacatcattcttttctagaattttatcatatcctctttgtatcaaagggattcggctacaaagatttctctaaatagcaaagaatggatttatttcaaggataaaccagataaagtattcttccctcaaaatcaacatgcaactaaggatctcttcgtatttttgagttaagtgaatataaactgttgctcctcaagagatattagtgtgtaacaagaatagctgtagtgaatttctattggctaattaaagtaatctttcatataagtgtgcatttttaataacatcaccattaaacataaaaatgagacagggtagaaatcctttgattgtgattgatactcttagaaaaaagacgagaataaaatatattttattttaaacaacaggaccttcatcttcaggaaaagctgagtgacaaaaattaatattcattataagtaactctgaaragcgatctggacatcagtttacacacatctggaaggaactaaagtctagtaatgagaaataatgcacttgtgaagcatacaatc

SEQ ID NO: 288646 - DNA, 573 bp, Homo sapiens
cttagatggtttaaaatacccaccttcacagtacacacacatcattcttttctagaattttatcatatcctctttgtatcaaagggattcggctacaaagatttctctaaatagcaaagaatggatttatttcaaggataaaccagataaagtattcttccctcaaaatcaacatgcaactaaggatctcttcgtatttttgagttaagtgaatataaactgttgctcctcaagagatattagtgtgtaacaagaatagctgtagtgaatttctattggctaattaaagtaatctttcatataagtgtgcatttttaataacatcaccattaaacataaaaatgagacagggtagaaatcctttgattgtgattgatactcttagaaaaaagacgagaataaaatatattttattttaaacaacaggaccttcatcttcaggaaaagctgagtgacaaaaattaatattcattataagtaactctgaaaagygatctggacatcagtttacacacatctggaaggaactaaagtctagtaatgagaaataatgcacttgtgaagcatacaatc

SEQ ID NO: 288647 - DNA, 595 bp, Homo sapiens
catacatttacaactaatttaagcccactttcaaataatattttaccacttaatgggtaatgtgagaaccatataataacaagacaatcctaattctccctcttgtcccttgtatcattactggcattcattgcacttacatakaagcatacatatgcagatgtactaaaatacattgctgccattattattttgaacacactgtcgtctgttagatcaattaagaataagaaaaataagtttttattttaccttcacttattctatctttggtgctattcctttctttatatagatctgagtttttatctatattattgtttttctctctaagagacatttcttttaacatatcttgtaaagcagatctgctagaaagacattccctcaatttttatttgtctgagaaactatttctccttcacttctaaaggataattttgcagagtatggaattctaggttggttctgtcctcaatgttttaaatattttattcctcctgttattgcttgcatggtttccgaagagaagttggattaattcttatcttcattcacctagagatgagtctataggtaagatgtttcttccctc

SEQ ID NO: 288648 - DNA, 483 bp, Homo sapiens
gtgggaaagggtaaagaaatggaatctcctctaagacctccagaaggaacacatccctgctgacctatttttgacttctggcctccagaactgcaccatagtaagcctgtattgtttttagtcccctccactgcaaaaacgtgatctattatacttcaaatttaacttggaaaacaaatattacaatagaaggtgatatatctgccctctmtaccaaattcacatatctaaatcctttaaggatagtataaacacagcaaactttttagatacaataggatactgagcaccttcaaaatacatgaagtatgataaatatacaatactttgagtatcattttagaattaaatatttatcatattacattctgatcctgtaaaaactgatggtactatatgatacatcgatctctattacctaaaatgtaaaattaacaaggaacttgatttttttcacttattattattgttatttaaattttt

SEQ ID NO: 288649 - DNA, 533 bp, Homo sapiens
ccatttgcatatcttcttttgagaattgtctattcatgtcctttgcccacttttttatgggatcgtttatttttttcttgctgatttgtttgagttcattatagattcttgatattactcctttgctggatgtatcaattgtgaagattttctcccactttgtgagatgtctgtttactcttctgattatttattttgctgtgcagagaagtcttttagtttaattataagtctcatctatttatctttgtttttgttgcatttgcttttgggttcttggtcatgaagtcgttgactaagccaatgtctagaagggattttccaatgtcatcttctagaatttttatggtttcaggtcttagatttaagtttttgatccaccttgagttgatttttgtrtaaggtgagagatgaagatccagttttattcttctacgtgtggcttgccaattatcccagcaccactggttgaatagggtgtcctttccccactttatgtttttgtttgctttgtcaaagatcagttgactgta

SEQ ID NO: 288650 - DNA, 616 bp, Homo sapiens
gcctgaatggacctagatgtttccttttctttccatagtygttaatccagacactactttctaacaaataaaaggatcttatctcagagtctgcttcccagctgcaacagtcctttggtagttaggaatatgcaataagtaggataaagatgtttgagatggaaggaggaaataaagagtgtggagagacataaaagacaataagaggctaagaaaagcagtgcagatggaagtaaccaggagtttcaacacttaagagtgaaaatttcagtcgtggcatcttggtagaatcagtctgaaaacattataggacagtgagtagcaactgatggagatacaagagtaagaaaggaaatgattcaaataggaaagttttattgcactatagaaatatctctattgtagtcaaaatagcatagtagatttatctttgtgtttccagcagttttgaggtatataatgtatacttccttgagacatgattttcggtttattcattagaaatccaaagatttttacatcttatctaactatagaagcagaggataaatgcctgattataaaaatcaggattattatagcaacctatttgaaaaacaattctcaagtgacatag

SEQ ID NO: 288651 - DNA, 576 bp, Homo sapiens
ccataattttgaagcatgagtgttttttgaataatttattcaatttctagagttcatagtttttcaaattaattctcatcacttctagtgagagtattgttatcaagttaaaagaaaaatctaaattgaataagaatccttgtaggaattgtaagtaatgtaaaaaggaatcattttctataaaacccacttaaaataataaatgaagtttcaagctacaatgcaagagaaaaaatcagtttttgtgtggtatgtgtctgtgttgactttgtaatttttccaaatayggttttcataatttttgatactcataagtatcttccttatattagaagaatatggatgcactgagaaaaatgcataagaccttaatatatcatatataacacccctttaatatatcatatacaatatccaagtttgcatttccatcctcaatttttttatgatatctgaaaagagtttaatagtttcttatttgagggctgcattttttccatagagaatattctattaggtaagaacaacaaaattattatgttttaaagtcacttggagtggttctcctctgtgagg

SEQ ID NO: 288652 - DNA, 523 bp, Homo sapiens
ctcctatcactgccataattttgaagcatgagtgttttttgaataatttattcaatttctagagttcatagtttttcaaattaattctcatcacttctagtgagagtattgttatcaagttaaaagaaaaatctaaattgaataagaatccttgtaggaattgtaagtaatgtaaaaaggaatcattttctataaaacccacttaaaataataaatgaagtttcaagctacaatgcaagagaaaaaatcagtttttgtgtggtatgtgtctgtgttgactttgtaatttttccaaatatggttttcataatttttgatactcataagtatcttccttatattagaagaatatggatgcactgagaaaaatgcataagaccttaatatatcatatataacayccctttaatatatcatatacaatatccaagtttgcatttccatcctcaatttttttatgatatctgaaaagagtttaatagtttcttatttgagggctgcattttttccatagagaatattc

SEQ ID NO: 288653 - DNA, 523 bp, Homo sapiens
ctcctatcactgccataattttgaagcatgagtgttttttgaataatttattcaatttctagagttcatagtttttcaaattaattctcatcacttctagtgagagtattgttatcaagttaaaagaaaaatctaaattgaataagaatccttgtaggaattgtaagtaatgtaaaaaggaatcattttctataaaacccacttaaaataataaatgaagtttcaagctacaatgcaagagaaaaaatcagtttttgtgtggtatgtgtctgtgttgactttgtaatttttccaaatatggttttcataatttttgatactcataagtatcttccttatattagaagaatatggatgcactgagaaaaatgcataagaccttaatatatcatatataacacccctttaatatatcatatacaatatccaagtttgcatttccatcctcaatttttttatratatctgaaaagagtttaatagtttcttatttgagggctgcattttttccatagagaatattc

SEQ ID NO: 288654 - DNA, 585 bp, Homo sapiens
cctgttttatcagcaaggtctttatgacctgtatcttgtgccaaccccctatctcatcctgtaactaagaatgcctgacctcctgggtgtgcagcccagcaggtctcagccttattttaccyggcccctattcaagatggagttgctctggttcaaacacctgtgacatatttccccctcccttttacaaaacaacctgtaatcctaatggttgtagaggaatgaatacccatcttctgtaacttcttcaggctgaatgggggcaatgatattcttgcctattagggtctctcatattcaggatagagaggagctcggtcacaagatatctgtatgctgagggtcattcataactctgagttctgacaaaaggtggtatctggaagattaataagtgttcaatttaagaaaacattcagtaaacttatcctgcattcctaaacagagtacaacagcaatattttccacaacagtaaaacaaaatcagtaaaattatcccaagtaaactaaataagaaggatttccatgaactgcgcaattattgaaaccaagctgatatgggtttgctagctgattccaatatgt

SEQ ID NO: 288655 - DNA, 585 bp, Homo sapiens
cctgttttatcagcaaggtctttatgacctgtatcttgtgccaaccccctatctcatcctgtaactaagaatgcctgacctcctgggtgtgcagcccagcaggtctcagccttattttacccggcccctattcaagatggagttgctctggttcaaacacctgtgacatatttccccctcccttttacaaaacaacctgtaatcctaatggttgtagaggaatgaatacccatcttctgtaacttcttcaggctgaatgggggyaatgatattcttgcctattagggtctctcatattcaggatagagaggagctcggtcacaagatatctgtatgctgagggtcattcataactctgagttctgacaaaaggtggtatctggaagattaataagtgttcaatttaagaaaacattcagtaaacttatcctgcattcctaaacagagtacaacagcaatattttccacaacagtaaaacaaaatcagtaaaattatcccaagtaaactaaataagaaggatttccatgaactgcgcaattattgaaaccaagctgatatgggtttgctagctgattccaatatgt

SEQ ID NO: 288656 - DNA, 585 bp, Homo sapiens
cctgttttatcagcaaggtctttatgacctgtatcttgtgccaaccccctatctcatcctgtaactaagaatgcctgacctcctgggtgtgcagcccagcaggtctcagccttattttacccggcccctattcaagatggagttgctctggttcaaacacctgtgacatatttccccctcccttttacaaaacaacctgtaatcctaatggttgtagaggaatgaatacccatcttctgtaacttcttcaggctgaatgggggcaatgmtattcttgcctattagggtctctcatattcaggatagagaggagctcggtcacaagatatctgtatgctgagggtcattcataactctgagttctgacaaaaggtggtatctggaagattaataagtgttcaatttaagaaaacattcagtaaacttatcctgcattcctaaacagagtacaacagcaatattttccacaacagtaaaacaaaatcagtaaaattatcccaagtaaactaaataagaaggatttccatgaactgcgcaattattgaaaccaagctgatatgggtttgctagctgattccaatatgt

SEQ ID NO: 288657 - DNA, 548 bp, Homo sapiens
tggctggcttcacacaactgtttgacaaaatttcagaacagtgtatcaaggaatagggataaatagattattagttcaggaatattcaatttaatggttttatcactgggcatactttctttctgcattttcttttttatgttgcatgtatgaaattatcccatctgcagatcaccttgaaccagagcatatagattcacattctatagttgcacagaatttctaatcaccacttacaattatgacatttttctgagttattgtatttattatactttgtatcaatatttttcacttcagaaagccattttgagcctgtagtccatttttattagttggagaaataatagaactaataatgttagatataagctgacttttctggtaaagcacagtagaagctttaagaatgaattggttgttaagactgtaacagcctttctatgaaagtcacgattttacacttcagatgtgagaggcacattgaaccaaagaaaggctcattsctctttcttgtaaatctgccaggggctagcagtgttctgaga

SEQ ID NO: 288658 - DNA, 377 bp, Homo sapiens
ctgggtgtaatgccaaaatatcactttagcacagagaaaatcatgttctcaaatgggctccagaaaagatgttcgtacaagtttccttggttacaatagtggtgcttcccagtccttatggcctgaaagctctctccacattgcaagaatgcagaatgctctatcaaacaatgatattagtctttagtagcaatcagaaacattataaagcttagaactctaggagtattttggctacmaaataatgacactggcctcacaaagcaatacatgaaaaccaattttgttaaattaatctgtttgtttattcattcatgtagtgatccttcaattaacatttattgaatgattatttactgaaacttactacaacttct

SEQ ID NO: 288659 - DNA, 468 bp, Homo sapiens
aataataaaggaaaaaaattttaaaagtaaaaagacaagctacaatcttggagaagatatgtacaacatgagctctttatgtgttttgtatactgtctttgtggtagtatgagtgtaactgcttttgaaagtaaaagtaattggtatttatactcaatctgatggtgcattgccccatcatccttctcaggcctaatatatatatatatgtatttgtccagtctggtcaccrtcactgaattgcatcgtgattacgcaggtgtaatcacggtaatccaggtaaggtggtaatgttttagtacctggaatccagatgttagatcgaggtgacttgggttggtaagagattttctcaaccatgaggctctcatgcctcagggacctcactgtggaacagcagaaggccactccgccagcccaagtgcgcctcttgtgagagtaggactctaatagcatgctcactcaata

SEQ ID NO: 288660 - DNA, 608 bp, Homo sapiens
aatggagcctattggggtgccaaaaaagagaaggcaaatattggtaagcaattagctgtgtctaccacgggtggatattattatattggaggaacctgtggctcagagaggctgtagtttgcctaaagacatacagctggcaagcagctgggctggcatttgaatctaggtctttgactccagcacctgagctcttacctactatgaatgtaagtagatacgaacatatcaacttttgttaagcagaataagagacacaaatggcatcgtatggggtgcttacaattaatcagaagggctgagaactggccaggcatggtggtgcatgcctttaatcccagcattttgggaggccaaggcagggggatggcctgagctcaggagttttagaccagcctgggcaacatggtaaaaccctgtctctacaaaaattacaaaaattagctgggcacggtggtgcgcacctgtagtcccagctactcggsaggctgaggtgggaggattacttgagcccaggagtccgaggctgcagtgagccacacttcagcccgggcaatagagcaagaccctatctcaaaaaaaaagaatgactgagaaccaagatcagg

SEQ ID NO: 288661 - DNA, 573 bp, Homo sapiens
agttatacaatatatggtctttcataacaggcatcttttacttagcatagtgttttcaaggttcatctatgttgtagcatgtatcaatattccattttattgataaaatatactctgttttatggatgtacaatgttctayttatccatttatctgttgatagatctttagagattttgttaaatggcttctgttccttggagtaacattaacttaggtgggttgcttttttccctttagttatctacaaccagtttataaatgaaattcctcattaaaataggtagttagccaacaccaagcaaatgttcttaaaatgccattattgtcctttgctcaagcagttgtaggatcctgccacatttgtcatcttgacctcatttatggccatatatagacactgcccactaccaacaactgcaacaccatctaatccttgatttcaatggctctgctctggtaccttctatgttttcagttgacttcctcaactactgtcactccagcaactctttgccctcaccagaatatccagtccatccaccctccaatcttttcactgtccagcaatcc

SEQ ID NO: 288662 - DNA, 541 bp, Homo sapiens
ggctgattgtgaagaaattcaatggaccttccatgttctctaccattcacaggcatctggtatcattgagtgttagaatggcctcctaaaaaacccactcaaaaagatttctaattctccttccttcacctcctaccactcaacacaccttagtgaggcaatctgatcaattaacgcagctatttcccaaaaggagtcatttcctctcagtcactccctgggtgatgaccagaggtgaagggctatgtagacttagtgggattctgtccygaccattcttgggcacgcttctttctttcttctaagagcaaccagggccagcctgtttggcacaccctccgagcgacaactagccaaaagggggcacagaagagtcaaacttaattctgactcaggcactgggattctctttttgtattgacatgatcctagatcataaagataatgaccactaagttaagcacactgcttgccaagtccccatatagtggcccaggttggccagagtttgtgatgtaataggcctctgtaagttttgtcc

SEQ ID NO: 288663 - DNA, 493 bp, Homo sapiens
aattctattccattgatctatatgtctatctttaagccagcacctcactgtcttgattaccatggttttgttgtggcttgattcttgcaataataaaattaacrtgctgggttttttttcttgaaagtgaaagcaaatttattaagaaagtaaaggaataaaaggatggctattccataggcagagcagccctggagggtgctggttgcccatttttatggttatttcttgatgatatgctaaaaaaaaagggggtgggttattcatgcctccccttcttagaccatatagggtgacttcctgatgttgccatggcatttgtaaactgtcatggtgctggtgggagtgtagcagggaggatgaccagaggtcactctcttggttttggtgggttttagccagcttctttactgcaacctgttttatcagcaaggtctttatgacctgataagctgtatcttgtgctgacctcctatctcatctggtgacttaa

SEQ ID NO: 288664 - DNA, 606 bp, Homo sapiens
tcctgatgttgccatggcatttgtaaactgtcatggtgctggtgggagtgtagcagggaggatgaccagaggtcactctcttggttttggtgggttttagccagcttctttactgcaacctgttttatcagcaaggtctttatgacctgataagctgtatcttgtgctgacctcctatctcatctggtgacttaaaatacctaaccatctgggaatgcagcccagcaggtcgcagccttattttacccagcccctattcaaaatggggttgttctggttcaaacacctctgacatttcccccttcccttttataagagaatccttaatcttaagggttgtaaagggataaagatccatattctgtaacttcttcaggctgaacaggggcaatgatattcctgcctcttgtattcagggtagagtggaactcagtcagaaagcatcagtgtggtgagggcaattcgtaactctgagttctcataaaaggtgatatctggaagattartaagtgttcaatttaagaaaacattaagtaagcttatcctgcattcctacacaaagagtacaacaacaatatattccacaacagtaaaggaaaattatcc

SEQ ID NO: 288665 - DNA, 1178 bp, Homo sapiens
tcctgatgttgccatggcatttgtaaactgtcatggtgctggtgggagtgtagcagggaggatgaccagaggtcactctcttggttttggtgggttttagccagcttctttactgcaacctgttttatcagcaaggtctttatgacctgataagctgtatcttgtgctgacctcctatctcatctggtgacttaaaatacctaaccatctgggaatgcagcccagcaggtcgcagccttattttacccagcccctattcaaaatggggttgttctggttcaaacacctctgacatttcccccttcccttttataagagaatccttaatcttaagggttgtaaagggataaagatccatattctgtaacttcttcaggctgaacaggggcaatgatattcctgcctcttgtattcagggtagagtggaactcagtcagaaagcatcagtgtggtgagggcaattcgtaactctgagttctcataaaaggtgatatctggaagattagtaagtgttcaatttaagaaaacattragtaagcttatcctgcattcctacacaaagagtacaacaacaatatattccacaacagtaaaggaaaattatccwtgtgcttatacaaataactatattgccataagttaagaaaacaaatagtttccatattctggagaaatcaagtagagaaaaacatgtatgctccaaagtttgttcataggcatatacattactcaattggtaaaagctgtcaatawctcaaaagaaaagtttccttgactctgaaaaacaaaaacaaaggattagcaatgttttaagcaaaaagtcaaaaagattacttcagacttctattagtttagtccatgcagttaactcctgttctgcttgatattcatgaacatttcagctctccatgagtgtcctgaaagttttttcctctattctaatttaataatctccaaagttatcagaaacctgcatttaagaatgcctgttagagttctatagttgattataaaaccaccttctaaagaggatcaaaacaagatgattgtctgtggatgaaaaaaatgccttagggcagcctctattaaagccacaattgactaggaattttgttaattctgtggcatacatcaatgtaatgtaacaattataactattaatagcatacactaagtaa

SEQ ID NO: 288666 - DNA, 571 bp, Homo sapiens
tgtgcttatacaaataactatattgccataagttaagaaaacaaatagtttccatattctggagaaatcaagtagagaaaaacatgtatgctccaaagtttgttcataggcatatacattactcaattggtaaaagctgtcaataactcaaaagaaaagtttccttgactctgaaaaacaaaaacaaaggattagcaatgttttaagcaaaaagtcaaaaagattacttcagacttctattagtttagtccatgcagttaactcctgttctgcttgatattcatgaacatttcagctctccatgagtgtcctgaaagttttttcctctattctaatttaataatctccaaagttatcagaaacctgcatttaagaatgcctgttagagttctatagttgattataaaaccaccttctaaagaggatcaaaacaagatgattgtctgtggatgaaaaaaatgccttagggcagcctctattaaagccacmattgactaggaattttgttaattctgtggcatacatcaatgtaatgtaacaattataactattaatagcatacactaagtaa

SEQ ID NO: 288667 - DNA, 633 bp, Homo sapiens
agataataggatggggacaagtgagtgttctagaccaagtaacaatagagacaatgctccttcagatacctcctgtctagatatgcctagagcctaggctctrattctgtaaaagtaatatcttccaacaacacaagtaaagggagtattctatgcatttctgtgaaatattagaatgagagtttctgctcatatattgaggtataagggtcccttagagcccttctggtaaaatcaaggaagttgttctggcatccttagcctgactactatgcagaaataacattgctacaagaagaagtcaatgaatatttcccataagctttctgttttgccaagaatgttaagcctgcaggcagagaagcaaaattataggagaaagtagggtggtgagcagtaaatacatgataaggctgtgtggtttgcaggtgaagacaaattgttttaaagattataaagactttctgggtgtacatacaacactcacgaacacctgacaacaggtctccattgtttcattcagaaacaacttatttcatcctcctttgctagtttcttaaatttataacagatcagtttaaattatacctttctgccaaatatctccttacattatattaataaaaggtttgt

SEQ ID NO: 288668 - DNA, 590 bp, Homo sapiens
cgtgttggagaatgtttctctaggggatatgcattttattatattatcattgctattgttgaggctagtattgcaaccatccctgtccttagatgacatgagttggttttgcatgttccctcatatatgaatctatgcctagatgaagtaagtatctagactaccgatggggtctgatatagattcagcaaaccaaatttctaagtatatacccttgttctgatagcagattaataccttgaggtcgaagagtcggtgcctaggtcctctttgtttccctttactttctgtgttgatatgtctgaacaataggtytaagataactcaccataacactcaaggttcacatttatgaataaagattatttttcacattagatttcccagagagcaaattataagaatacataaaatattgttggtaaataagacaaatggtaccaaccatagcagtttttaacacttaacaaatgatttctaaatttgcaatttcatgactgagttcttttttaaaatttttttattttaatttttgtgggtacatagtaggtgtatttatagggcacatgagctgttttgatatagacacg

SEQ ID NO: 288669 - DNA, 565 bp, Homo sapiens
tgaagaactagtatgtaatcttgctgaactggtagaattatagccaacagtcaagagacctgtttaaayagtctatgcagccttatcattgtgatggataatttcctttaaagtttaggaatgttgactgtaaaactcatggattccccaacattatcatcacagccgtggtagtccagcaagcctgggctgagaatcacggattaaatacctacaaggcactgatcttggtgctaagtgctgaaaatgtgaaaataaataagccatggatccttccttagtatgctcagagtttaatttctgatatgactagccttgccttttgagtgcacaataatacctgactggatttctcactgaaccaccccaaatttattctgtttattttcttgaccacctagggttctcccaagggcagaccacttaagaacttttatattttcttatggcataatgtaggcatttctcatctgccagggaatctgggagctgcctgagagcagtctctcccaggtttacactaaacaagaaggcaacactttattaaattaaaatcactcaacat

SEQ ID NO: 288670 - DNA, 535 bp, Homo sapiens
catttggttgagattatcttaatttttaggaataatataaaaataaccacacctctggttatgattaatattaagccagtttggtatgcataaacttggtaatcctctaaaaactcttaaactcctatagactcggtatcttgatttaagcaagactattttttccttctctttagaagaaaaaatattacttctytaaaactaccacttttccttagagatcacttaagtcttttatccattcttgttcagacaaaacataagtgctcctaccttagcacgtatactatttttttatttttatttatttatttgtttttgagacagattttcccgtcacccaacctggagtacagtggtataatcacggctcactgctgcctcaacctcctgggctcaagcaatcctcccacgtcagcatctcgagtagctgggaccacagatgccaccatacctggctatttttttatatttttatgtttttgtagagatgggagtcttgctatgttgcctaggctggtctcaaactcatggg

SEQ ID NO: 288671 - DNA, 593 bp, Homo sapiens
caagggcaggaaggtggcgtgatgagatattgacctcagttttgaatgcactggacaggcatgtgtccagtgttctttaagttatattacagtcatattttggaggtgctttaccatgttagctagaatttagagaccctaatatgtttaataaagacttcaaaaaatctatattcttcactatacaatagttaaactgaatgagataaatctatacggagtggtactacagaataatgtcctagatatatgtggaaaaacaaagtacagaacagtgaatatagtatgctcccctcrgtagaaaataaaagtgatatatgcttatatattcataaactcatcctggaaagatacagaaaaatgggtaatgtgctgcctcacaggaagagacctgggggactgaagttctaaggcgggaaaagactaattttattccttgctctgaaatctacattgtctgatatgcatatagccactctagctttcttttgagtagtatttgcatagtatttatctttttttctatccttttacttttaatctgcctgtgtcttgatatttaaagtgagtttcttatagacagggtatggttg

SEQ ID NO: 288672 - DNA, 1312 bp, Homo sapiens
tctccgcctactgcacttttggattcaccactgagtttgcaccggactaagtttttcctgcactgctctcagacagttactgagcacagcagatcctgaccaatttggaattcctctaatgaacaactttggcttaggactccccattgacctggctgagtctctcagaatgacattacaaacaggttctttcaacctattcttccttcccattctgctttttcagatttcgactcccctgcattccaatcggagtctccctgccttctcttgctggtctccctttgtccttcacaggcattttctcttatctcctgcacatgtaatcccgtcttggcatctgcttctcagaaacctgtaattgacaaactgggtgttgyttttaaatttcggcaaaagaaaatgacacccacaaaggtgactacaatgaattaagaaagattctcaatgggaaaagttagagcatggcctaatctctagtttttaacaagtttttcaggggtcaataattaatctggttttgttcagttagctataaaaaaaaagaacttcaaaaatatgtatgactctaagaataactttgatggctgggtcaagaccaatctgacatatattaatttcggaaataccaatatgtctattgaaccaaaatgaattgawattaatggttaagtgcctgacctggggtgagctttaccaaaaacattcagtcttcagtcttcagtcttttacaagtctcctataatcttcttcaatcaaaagttaccacctcagggacattgccttctttgcaggcagctagaacttccacaactttttgttaggcagaacttttctaacccaaggcatgatcaatatattttaaaactagaggcagtcccctttgctaaggttatctgcaaccatttcttttattgccactcacagttggagattttcttattgaaatgtaatcagcaccatgatagccttgccactctcgaagctcccagtgatctcttcagaaccttgaagtwctcctccttgaggaaggccggatcaagcaatggccccaggctctctgtgggacacctcagatattatgtgatgggcacttgcccctcttgaagcatctcatccaggcttgctattcaaggttcaaatgcttccttcccaggaacaaaaaaaggcctgaatatagtctcttttacagacactgggttcaatcagaggagagcttttttgcctgtagaatgcctcgtttcaaggctttgggcttgacaaccatcatgtcaaggagccactcaaaggcccagcatatcaatactaactc

SEQ ID NO: 288673 - DNA, 537 bp, Homo sapiens
aattcttgctgaagcgtaagagctgtaaggacatatgctgtaagtatgaatacgtaagcatttacctgtatgcttatgatacagatgcctatgtattctatatatatgcattatatataattatgtattataagtgaataagtgaaactgggattcttacatatctttctaagaagattattttccttttttaaattttttttttattatactttaagttctgggttacatgtgcagaacgtgcagtttttttacataggtatacatgtgccacggtggtttgctgcacccatcaacccatcacctacattaggtatttctcctaatgttatccctcccctaacccccaaacccccacaggccccagtgtgtgatgtgcccctccytgtgtccatatgctctcatagaacattatttttctaataaataaatgagtctttgaattttatagttgaatgttattttgaggattatccaggcagaccattcattaatttgcaatgaagtatgcaaacctaagcacattgaataacttag

SEQ ID NO: 288674 - DNA, 572 bp, Homo sapiens
attagagctgatggccatttaatctctttattaacaaatattttttgaatgcctactatatgcctggcatatagtgctagacactggggatagaatggtggacgcatacgttaaaggcttaktctaatggagctcactttctagtggaagaggacagacaataaacaataaataacatgcttgatagtgaagagtaatatgaggaaaaatgaagcagaatcagattgcacatgatggcagggcatagctgtggaggtggtgctacgtatggttgtcaagcaagacatttctgataaggtaacaagtagatgtaaagaaaatgagagactgagccttgcttaaatctgttggaacaggtatgaatttaatgcataagtcacagaatgtaagagtttggcagccattttgcactgattaatttctaggagcgtatatttgggctcatttatctaatagttactatactcagtaaatggtaattaataaggatgattttatattaagcaactatcttttcatttttattgatagccaactatttgaatacagttcagttattcttctaagtatga

SEQ ID NO: 288675 - DNA, 564 bp, Homo sapiens
aaaaataaagcagctttatttttccaaaataaagatgaccaacatcttcctagtcatcttttctatgcttggagaagagaaaagactcaacttttctttaataagcttcttttaatctgtcattagattgtaktttctaagctttcatgcatgttttaaatctttctgttaaatattagaggagttagagtgaaaatttaactaatcgaataaaaattagtagagtcttcaccagtgacatttcatcttattcatgctaaataaaattgattaatttgtggctgacacagttaattgactaaaaccaccattcccaaccatgaggtcacaagcaagtaaacaaaaagtcagcacagtaaagacagtagacaagaaaaacagcttgggttctaaatagcatctttgaataactaaatcaacagcagcaatagcacatctccaaaattcttgttatatggggagaatgaaaccctgatgaagtcactacttgttgggttttctgttacttgaagcccaatcaatcttaagtgataccacaatcatgatgaagaaatattcactgtg

SEQ ID NO: 288676 - DNA, 564 bp, Homo sapiens
aaaaataaagcagctttatttttccaaaataaagatgaccaacatcttcctagtcatcttttctatgcttggagaagagaaaagactcaacttttctttaataagcttcttttaatctgtcattagattgtagtttctaagctttcatgcatgttttaaatctttctgttaaatattagaggagttagagtgaaaatttaactaatcgaataaaaattagtagagtcttcaccagtgacatttcatcttattcatgctaaataaaattgattaatttgtggctgacacagttaattgactaaaaccaccattcccaaccatgaggtcacargcaagtaaacaaaaagtcagcacagtaaagacagtagacaagaaaaacagcttgggttctaaatagcatctttgaataactaaatcaacagcagcaatagcacatctccaaaattcttgttatatggggagaatgaaaccctgatgaagtcactacttgttgggttttctgttacttgaagcccaatcaatcttaagtgataccacaatcatgatgaagaaatattcactgtg

SEQ ID NO: 288677 - DNA, 564 bp, Homo sapiens
aaaaataaagcagctttatttttccaaaataaagatgaccaacatcttcctagtcatcttttctatgcttggagaagagaaaagactcaacttttctttaataagcttcttttaatctgtcattagattgtagtttctaagctttcatgcatgttttaaatctttctgttaaatattagaggagttagagtgaaaatttaactaatcgaataaaaattagtagagtcttcaccagtgacatttcatcttattcatgctaaataaaattgattaatttgtggctgacacagttaattgactaaaaccaccattcccaaccatgaggtcacaagcaagtaaacaaaaagtcagcacagtaaagacagtagacaagaaaaacagcttgrgttctaaatagcatctttgaataactaaatcaacagcagcaatagcacatctccaaaattcttgttatatggggagaatgaaaccctgatgaagtcactacttgttgggttttctgttacttgaagcccaatcaatcttaagtgataccacaatcatgatgaagaaatattcactgtg

SEQ ID NO: 288678 - DNA, 429 bp, Homo sapiens
gaaccatgaaagttgccaatacccaaattactaattcctaatacatcttcagaaacaggcttagattaaaatgcaatttcaaaccacagatcgtggttttttttttctttttcaaacaaaccagtttaaaaacttgcaaagctattacctaaaacagtgcttctcaaactgtgttataaaccactttttttttttacatttccaacccttcaaagatagaaacttgtaaaatacaacaaaatgaattaaaagattaacatttttaaaagatacaaaatacaaggtcaaatttttattattagattcaaaagaaacaaaattactctttcatattactataaaagtttctaaatgcttattttsaatttctctatatatcttgtcttgaacaaaacacttcatggactagcaccaggctaatccctaaac

SEQ ID NO: 288679 - DNA, 550 bp, Homo sapiens
aattacctgatacatatgcaggagttgttccagttatgcttttaaataagatgtcttttatgtcttttaaataaagaaatccataatttcctatacaaaaatggacagagcttccagcaataaagatgtatgtcagaacctgcatagtgattagaaggtgggctggtttcagaaaggagatgatacgacaaagttctgcaggctggcccattatttgtaatacaatagtcaaatgtgaccatcatcaaaacacctgttttttgtttttgtttttagagtcaggatttccttctgttacctaggctggagtgtggtggcaccatcacagttcactgcagcctcaacctactgagctcagatcctcccaccacagcatcctgagtagctggtactacaggaacacgtaaccattcctagctaattttttaattttttgtagagacagggtcgtgctatgttgctcaggctggtctcaaacttgtggcctcaagcagtccycctgccttggcatcccaaagtgctgggacaatagggatgagcctccatgccc

SEQ ID NO: 288680 - DNA, 586 bp, Homo sapiens
aactgtttaaaaatcatgacaatgagctacagtacagagtgaacacttcattgtaaggccctatgtgattataggatcctgaaggtgaagcagagaagcgtgtaaattggagattccagcacaactttctcttttataccagtacagtgagttcaggtcgtgacctagcgtgggctgtagaagtaggaacccctcttatttacactgtcccatgcmgaagagtaaactcaggtaatgtagtccacttaaatgctggcactcagactcttctttgtttcccttccccagaaatctttacagttgacttaaattacaaagttgtaatcaggaaatctttagttctgttggggcaaaactaacaaagacaatattgtcatacaagccatcattattactgccctcttgttaatgcaggaaagcatgtaaatagctctttttcaagctccagagttttttttaaaaaaacattcctagagatttgcttttgtttatctattttggtgatttaatatttgtgttatttttaattaattagttttaattcattttagttttaggccatggttcctaaataagataaagatat

SEQ ID NO: 288681 - DNA, 582 bp, Homo sapiens
gcttttcctgtttgaggctagaaaaacagtaaaagttttaaagactgatgaytcctgcttttgtttagtctacaacagcaatattaatgttgcttttgtgttctggtgactgacttaggtgtaatttttcattacacgtattaaaagttgaattattttcaaccctgaactttagaccagcccatgtgtgaacttagagtataagcaagacggtaacttcaggatcagaatcactcaaggccactcatattattaaatgcaaccagagaatgttgatatgaggagtttaatataaattagaaaaaaaactttcaatgagacattcaacagtttttaaagaaataagacaaatttaattgaccttattgtagcttaagtaaccaaactgctggggtatttcatcattactctcttctgtgctgctttgcattcctctcatcatcttattttgtaaagtgtgtattttttttttctcaatagagttaagaggaagtgcctgcaaaggaaacaaccatttaaagcatagtagaaatcacactgctttctggttgcatttttctttaaagatctagttaatccagt

SEQ ID NO: 288682 - DNA, 636 bp, Homo sapiens
actcctgcttttgtttagtctacaacagcaatattaatgttgcttttgtgttctggtgactgacttargtgtaatttttcattacacgtattaaaagttgaattattttcaaccctgaactttagaccagcccatgtgtgaacttagagtataagcaagacggtaacttcaggatcagaatcactcaaggccactcatattattaaatgcaaccagagaatgttgatatgaggagtttaatataaattagaaaaaaaactttcaatgagacattcaacagtttttaaagaaataagacaaatttaattgaccttattgtagcttaagtaaccaaactgctggggtatttcatcattactctcttctgtgctgctttgcattcctctcatcatcttattttgtaaagtgtgtattttttttttctcaatagagttaagaggaagtgcctgcaaaggaaacaaccatttaaagcatagtagaaatcacactgctttctggttgcatttttctttaaagatctagttaatccagtttatctttacacttacaagcaaaactgagcaatgcacttcccacacttgaagctgaaacagcttcaatctacctaacacttatacgcagttgaacatgcaagct

SEQ ID NO: 288683 - DNA, 582 bp, Homo sapiens
gcttttcctgtttgaggctagaaaaacagtaaaagttttaaagactgatgactcctgcttttgtttagtctacaacagcaatattaatgttgcttttgtgttctggtgactgacttaggtgtaatttttcattacaygtattaaaagttgaattattttcaaccctgaactttagaccagcccatgtgtgaacttagagtataagcaagacggtaacttcaggatcagaatcactcaaggccactcatattattaaatgcaaccagagaatgttgatatgaggagtttaatataaattagaaaaaaaactttcaatgagacattcaacagtttttaaagaaataagacaaatttaattgaccttattgtagcttaagtaaccaaactgctggggtatttcatcattactctcttctgtgctgctttgcattcctctcatcatcttattttgtaaagtgtgtattttttttttctcaatagagttaagaggaagtgcctgcaaaggaaacaaccatttaaagcatagtagaaatcacactgctttctggttgcatttttctttaaagatctagttaatccagt

SEQ ID NO: 288684 - DNA, 596 bp, Homo sapiens
gaagaagagaaagagatcagttttacctggggatggagcaggatgggcagttgtagaaacagatgaatgatgattcatcaagagtgasaagatgactttccaaactgagagaacattctatatggaatatattgatgggacaaaacatggcacatacctctcataatttggtgtgactagatgatatatataagtagtggcaggaggtaggagtgagaaggtaatttgggggcaggttgtgaagagccttgtgtgccttgctgaggagtttggagaccccattctgtaagtaatggggagtttttgaaggtttgaaagtaaagaagcaaaatggatagatttgtattttgtagtactgtgtaggaggtacagagagaggagagataggggctaggtcttttgagatcttgaaattaagttatctcagaatagaagatagtgacactaaaaagggttaaatcaagactggataaattgatggtagagatcatcagcatataattaataatcaaagtcatgtgaaaagctttcctggggattaagtatttcgtagcggaaaataacttgctttctggcacctggttccccagctgcca

SEQ ID NO: 288685 - DNA, 560 bp, Homo sapiens
aggaagcagattacttatttacttataacaaaggtatgtaacagtatattttattatggaatatataaataaagcattctaggaatcatagcaggcaacagttgctaaattaaatttctataagaactaaccttccatatttcagaggggaggatacaaaattaatatgaatttaaataaatacagctgttcaaggacttttttctggacaagaaataacaaatgatgcagtcactttatgatggtcacttaaatatatcagtgargccaggcacactggtgtgtgtgtatgtgtgtgtgtatatatatatttatatatataattatatataaatatatataatcagtgatgaaaaaataccatgccagaaaacaatacatagaatccaatagtcctcccactctagtattaataattgtgctaagtagaagtaagcatctaggttcctacttaaatgaattgaaaacaaagtgagatcttaacaaataagttaaataactgtgtaacatattgttgcaatttttctttattgcatataagttgcttcaagaattactcc

SEQ ID NO: 288686 - DNA, 485 bp, Homo sapiens
ggtcaattcctaaccaaagtgctagttaattaattttaagggaaacccaagggaggcatctttctttcctggcccctaatatccaggtttaacctagtccattcaaaaaaatattgaaattcaagtggataaaagaagagttgagatagaggctaaaagtttagcccttgggaagactgtagtatttcttcctttttaaagtrtatttaaaagaaaaaaaattaggagataaaaggagataacttgtttgtaaataagacttacttaggtttatggtctctaggatttgccataacatgttcaactagaaaaggaattccatacgattcaaaagggtgcagcgtgccttatgtctaaaatgaaagttgagagccaaagagctgcccaatagccaatatgagtcatcattccaaatgataaacaaaggacaaaaataaaatgactgagaggagagaaaaagcagaattactggaagctttactgga

SEQ ID NO: 288687 - DNA, 1124 bp, Homo sapiens
tgctaatattatagtggccttcagaagttaataatgaatgagtgagtgagccagtaaagaagatattggaagatattcataaagaaccctgcgggagtttcaggattgatggaattcagtttgtatgtatcaagtcagtatagatactgaatgggtaggcgtctgggaacacaagacacgatatgtaccttcaagtggttttcaggcttgtggaaaaatctaagcttaagactcagatcaaataactaaaataaaaagtagatttaagattgaaaatcaggcagaagcaaagtcctgtagaagttctaaggacagtgaaaggtcatccggttgagagatcagggcaggctctgtggagccagagctgtctgggcaagacccttgtagagaggaggagggcattgcaggtggggatttggcagaggcacccaggctctaggctcagcagacagacccctgggctacttgtgggagaagcaggtgtggaaagcaacagtgarctaaaattctggaaagttgcatgccctcctcttgctggtgtggcwtgatatatagaaaatctaaagactctacaaaaaaaactgttacaactgatgaattctgcaaattgcaagatgtaaactcaacatacaaaaatcagtaatatttttatatacaaaaaaatgaattattcaaaaaactaggaaaacaatcctatttacaagaaaatttttaaaataggataaaatacttaggagtaaatttaatcaatgaggcaaaagwcctgtaccctaaaaactataaaacattgaggaaagaaattgaagatgagacaaataaataaggtgataccctgtattcgtgaattggaagaattaatattgttaaaatatccacactacccaaagcaatctgcagattcaatgcaatttctatcaaaattccaatgtcatttttcacagaaatagaaaaacaatccaaaaatttgtatggaactgcaaaggacccctaatatccaaagccaccttgagcaaaaagaacaaatctgaaggcatcactttaccttatttaaaaatatgttacaaaactatagtaatcaaaacagcatggtaatggcataaaagtagatacataaaccaatggga

SEQ ID NO: 288688 - DNA, 612 bp, Homo sapiens
ttaaattaagtttattattttaaaaattatatagatgtgcttacaaatacatrcagactatatttatcaaaactactttacttcttcaaaatcattttagccatctaatttaaagcttaataatctaagtacatatcagctttcatgaataaaaacatcttatttttcatgtattttatcctagaagtagatatataaatcaatgttcatgtaaaagcaaatttggtaaaattctttctgggtgtgatttgtgatattgtgaggtaataagaagtacgtatttgatttctgcccctggatcccagcacagagctcctaaaactctcttaatttcttgaacaataggagtgttaggtgcatctcttgctagattcttggtctttgacccaggttcttgatgcagagaccctcattaatcccttggaatttactgtatgataggaacatttcttgttctaaagagataactgttggtgagctcccagatagcctcaggaggaggctggttaccaagagagacaaccatgtgattagaaggttggaactttaaagtcccaacctctaacctctgggaacacagggagagaggctgaaagttgagtagataaacaa

SEQ ID NO: 288689 - DNA, 424 bp, Homo sapiens
ctgatttacagcctgttggtaagaaatataagtgacaacctattgctcatgattggcatcagaagtgggggtggcattttttggggactgatgccttaacttgcaggatctgactctaactccaggtggacagtgtaagaattgagttgaattacaggacacccagttggtgtccttttggcatgtgaagaaaaacccataaacatccattgtcagaaattgagtgctgagtagtgtgtgagaataggaaaaacaaattgttttttctatctcttacagactgtgagggtattccccraagagattattgtttgcatttagtagactgagtaaaggtctctctcaccaaagtgagtgggcaacatccaatccattgaaggatagactaagtcaaacaaaaaggcaaaggaagaggtgattttgt

SEQ ID NO: 288690 - DNA, 584 bp, Homo sapiens
ttttggcagccaagtcccagaaacacagttactggctctgacagcgtctcagtacaaataagaactacaggaactaagacagtttggttcttagtagaaattaaaaaaaaaaaaaggmgtacatagtccagaaatgtaatgatgcttactctatatggaaaattaatttatgataaaatgatgtttttcaaaggaataagtcaataaataaatgactatttattcattgaataatcattcaataaactctggtaaggaaaaccttagccaatatggagccacttttgtttagctagtgcatttccaaactcccttttgtccatatcaatctcagaggctaaatgtgctgtctgtgtgtgtgatagagagagaaagaaagagagaaaggaatatgaaaatgttatgttccttatttgctacagcagaagcataggtacgcaatcatctaaaaccatgtaagatatttttgatatatgtttaaaagcatgatagccagattataggtctactctacagccctacaactattactttctcagcttccttgtatctaggggccccatgtagtcaggtattgtcaatga

SEQ ID NO: 288691 - DNA, 1198 bp, Homo sapiens
gagggttacatatggtgcataattttaataccatatttgtttcatcttacttcaaatttgaaagtacttttgctataagtttcctaaaagtatttaatacttttttttttcaatttagattaaatctcttgatgaacagtgtgtggttggcaaaatttccaagyactggactggaattttgagagaggcatttacagacgctgataactttggaatccagttccctttagaccttgatgttaaaatgaaagctgtaatgattggtgcctgtttcctcattgtaagtctgttcttattaatcttgattatagatgctttctctaggttcattctgaaatgattcagtaaagtgtatatttcaaaatgacattttaaaatttatagattttaaatcaggattcccatttaatcctagctctgaaattctatttgatcctgacactctggggtcacaggtgactagtttctacctgaagagtctatgaatattcacatggcaagagggggactaaggagatgtactaaggagagattttagtctccccttaaatcaggcatctcctagatgctttgaggaagaagttgaaagtaggcatatgtggaaaawctggcccctacctatatgaggagtttctctgtgggaacttcacatcattctccttagaagtcagaatgtaatctcctatgagttatggcaaacaagaaaacaaacagaaatctgtaggagttgcctgataataattcaaattcccagggtatatattttccatttgagtcacagatcagaaaatgattcaataaatatagwtgatgcaaatctcagacaggttttttttttttttcttttttaatggtctactattctttgttaactgagactccctgttctcccactacccaacccataggtggcctgcagcacctggtaaacagaaaggatagatttaattgaaagactccttttattgcaaggcaattgacaaatgttaccagaaaataaactcccaccattcccaagggaacggatttcaatctggtggaacaggctagactacacggaactacactgattctgacgtgagtcagcagagggaacaaaaggactgagatacttagaaactctagtgagtaggcaaagtcaaggtgctttacatatctcaaattctttttttactttctctcccttcatttgtgaaac

SEQ ID NO: 288692 - DNA, 573 bp, Homo sapiens
gtcagacttttgttatatcaaagccttcatctgattagaggagcccacccatatcatggaggccaatctgcctcattcagtctattgatttaaatgttaatctcatccaaaagcatccccatagaaacacctagaataaagcatggtcaaatatctgggcaccccatggcccagtcaaattgacagataaaattaaccattgcactgagtaatctgataagtactattcagtaattagtagtgtaaagacatttctctctatttgaaagatagagaaaaakacatttctgtctatttgagtgagttttataataagagttttaaattatatgtagaagatttctggattaatagagggaaattagtttagatttttgatgtttctttagctgaaagttatcccaggacacggagtgtcatcaacatgggtctcaaaattagctcttgttgctccttcactttcttacctttagaattataaagacatctgaacattaaatatacaaaacagatacacacaaaccttgacaaccaaatcatttaacaattctaaacataaagctaagtatttgt

SEQ ID NO: 288693 - DNA, 573 bp, Homo sapiens
gtcagacttttgttatatcaaagccttcatctgattagaggagcccacccatatcatggaggccaatctgcctcattcagtctattgatttaaatgttaatctcatccaaaagcatccccatagaaacacctagaataaagcatggtcaaatatctgggcaccccatggcccagtcaaattgacagataaaattaaccattgcactgagtaatctgataagtactattcagtaattagtagtgtaaagacatttctctctatttgaaagatagagaaaaagacatttctstctatttgagtgagttttataataagagttttaaattatatgtagaagatttctggattaatagagggaaattagtttagatttttgatgtttctttagctgaaagttatcccaggacacggagtgtcatcaacatgggtctcaaaattagctcttgttgctccttcactttcttacctttagaattataaagacatctgaacattaaatatacaaaacagatacacacaaaccttgacaaccaaatcatttaacaattctaaacataaagctaagtatttgt

SEQ ID NO: 288694 - DNA, 573 bp, Homo sapiens
gtcagacttttgttatatcaaagccttcatctgattagaggagcccacccatatcatggaggccaatctgcctcattcagtctattgatttaaatgttaatctcatccaaaagcatccccatagaaacacctagaataaagcatggtcaaatatctgggcaccccatggcccagtcaaattgacagataaaattaaccattgcactgagtaatctgataagtactattcagtaattagtagtgtaaagacatttctctctatttgaaagatagagaaaaagacatttctgtctatttgagtgagttttmtaataagagttttaaattatatgtagaagatttctggattaatagagggaaattagtttagatttttgatgtttctttagctgaaagttatcccaggacacggagtgtcatcaacatgggtctcaaaattagctcttgttgctccttcactttcttacctttagaattataaagacatctgaacattaaatatacaaaacagatacacacaaaccttgacaaccaaatcatttaacaattctaaacataaagctaagtatttgt

SEQ ID NO: 288695 - DNA, 622 bp, Homo sapiens
ctcagtcatgtatattcattatgatttctacccaaagtcactgacttctgtttcacagagaaaattgtagagtttgttcttaagaattgtctatcaaacactaacattttcaaaaatttgtgaagctcatgtaaacaactttctacrccgaactttctatgcccatatagctcgtaatggagctaactcacagcacgtgtttcctgataagtatgtaagctaaaactgtgcatgagaaagtattagacaaacccaaactgagggacattctatgtagtaactggcctgtactagtcaaaaatgtaaaggtctagatacatacacagaagaatgtgaggctatatttactagttgaaacaagactaaaaagacataacaaaaaaaaatgcaatgagtgatcttcaattaaatcctggactatatcctcccccgcccaaaatagctataatgttattctgggggtaattgatgaaatttgactaagaactgcagattaaataatagtactatatcaatattaaatattagaaaatctcctgatattgaaaatgctaactgtgctgtggttataaaggagaggtccttgttcttaagacatgtataatcaagtatgtaaaggtca

SEQ ID NO: 288696 - DNA, 280 bp, Homo sapiens
tggcaagtgattctagagatgtaagatttctgcttytaccttgagaagacagatttctaaatgtggagaacaatcatactttcaggaagatgttcgatatgttggtgagccctgaatgatggatatctgcagcagatttccattcttcatctttgccattttggatttatatgattcctatccttttgttgttattgaagtggagtcataggaaggagacagactactgtacgtttctagtcattcttttgttatactcaatttgtgtctgtgtgtgtgt

SEQ ID NO: 288697 - DNA, 593 bp, Homo sapiens
tttatacacatcgcagctcattaaaggatgtaaaactgtatctaagattaaaaaataatgatatgaatttagaaaaagttaaagaaagataattaggggaggttcaatatataaatggtaagaactatacacttgctataataaatttggacctatttatttactctgaataaaaattgacataattgctaaaaagaagactggatagtataatgaaacagagacattatgcaatgaagtcagagaacagatattgaacaggcttaatatattttaattaagatatatttttcgactcagtgatttattcactttgtcttcatatggatgggaataaaattttattcttgagaaatcatctactaggtgaagtttttgctagcacacatgatgatagtaaactatactaccaaggcgaactccaattatatatcttttcatgtgatacatgcaagataaagaaaatgttagctaggaaagcatttggcacatgctaggcataaagtaacttttatttytataaagggaaaattgctgtgaaatgattagtttaattgctataaagggggttacatgttttagagtgaactacc

SEQ ID NO: 288698 - DNA, 533 bp, Homo sapiens
gtggttaacattaggtgccaatttgattggattgagggatacctagatggctggtaaagtgttgtttctgggtgtgtctgtgagggtgttgccagaggagactgacatttgagtcagtggagtgggagaggaagacccattctcagtgtgattggggaccatccaattggctgctagtgtggctggaaaagcaggtggaagaagatgggatagctttgtttgctgagttttctggctctcttcttgtcatgttggatgcttgcttatgctactcctgcccttggacatcakactcaaggttcttcagcctttggactctgagacttgtaccactagcttcccagggggctcttgggcatttagtcacagactgaaggttgtattataggcttcccaggttttgaggctttcagacttggactgagccactactggcttctctcttccccagcttgcagatggcctatcatgtgactttgccctgtaatcacgtaagccaattctccataataaattcccttttatatacacat

SEQ ID NO: 288699 - DNA, 533 bp, Homo sapiens
gtggttaacattaggtgccaatttgattggattgagggatacctagatggctggtaaagtgttgtttctgggtgtgtctgtgagggtgttgccagaggagactgacatttgagtcagtggagtgggagaggaagacccattctcagtgtgattggggaccatccaattggctgctagtgtggctggaaaagcaggtggaagaagatgggatagctttgtttgctgagttttctggctctcttcttgtcatgttggatgcttgcttatgctactcctgcccttggacatcatactcaaggttcttcagcctttggactctgagacttgtaccactagcttcccagggggctcttgggcatttagtcacagactgaaggttgtattataggcttcccaggttttgargctttcagacttggactgagccactactggcttctctcttccccagcttgcagatggcctatcatgtgactttgccctgtaatcacgtaagccaattctccataataaattcccttttatatacacat

SEQ ID NO: 288700 - DNA, 633 bp, Homo sapiens
tgcctgttagatttctcatgttaaaggcataaaaatctccattctaaaaaaggagagatttatgcttcataggatgttttattggattacaaagaattttttaaaaaagaatttttcaaacaagaatttttcaaaattaattcatttccttaatacatccattatttatttacttttatttatgttttcagtttcctttaattgatagaaaatttamatgcagtaaaatgcacagaacttcagtatacaattcaattattttggataaatatgtacacctaggcaattgacatctcaatcaagacacagaacattctcaacactctggaaagatcctttgtgtccattttagttatgcttactcctatcaccaaccatgtttctggtttctattgccatatattagtttatcttgtccttgaatttcacgtaaatggaatcatacactgtgttctcttctgtgccttcttgaactcaatgtaacattttgagatgcatttatattacaggatgtacctataattcatttctatttattgctaaatatgtttaccattgtaggaatataacaagttttattatccatatttgataggaaaacatttttggttttagtttttatactattacaat

SEQ ID NO: 288701 - DNA, 562 bp, Homo sapiens
caagacacagaacattctcaacactctggaaagatcctttgtgtccattttagttatgcttactcctatcaccaaccatgtttctggtttctattgccatatattagtttatcttgtccttgaatttcacgtaaatggaatcatacactgtgttctcttctgtgccttcttgaactyaatgtaacattttgagatgcatttatattacaggatgtacctataattcatttctatttattgctaaatatgtttaccattgtaggaatataacaagttttattatccatatttgataggaaaacatttttggttttagtttttatactattacaataatattgctataaaccttcttgtacaagtcatttttgtacatatatatttttatttgttttatatccagaatctcatagtataatatctaatatgtccaggaaacaatcccaacttgaatgagagaagacaatcaacagacattaatgccaagataaatcagatgttgtagttacttgatacagtttttgaagcagccatcataaaaatgatttttaaaaaagttaaa

SEQ ID NO: 288702 - DNA, 633 bp, Homo sapiens
tgcctgttagatttctcatgttaaaggcataaaaatctccattctaaaaaaggagagatttatgcttcataggatgttttattggattacaaagaattttttaaaaaagaatttttcaaacaagaatttttcaaaattaattcatttccttaatacatccattatttatttacttttatttatgttttcagtttcctttaattgatagaaaatttacatgcagtaaaatgcacagaacttcagtatacaattcaattattttggataaatatgtacacctaggcaattgacatctcaatcaagacacagaacattctcaacactctggaaagatcctttgtgtccattttagttatgcttactcctatcaccaaccatgtttctggtttctattgccatatattagtttatcttgtccttgaatttcacgtaaatggaatcatacactgtgttctcttctgtgccttcttgaactcaatgtaayattttgagatgcatttatattacaggatgtacctataattcatttctatttattgctaaatatgtttaccattgtaggaatataacaagttttattatccatatttgataggaaaacatttttggttttagtttttatactattacaat

SEQ ID NO: 288703 - DNA, 571 bp, Homo sapiens
ggtacaaagtttctgttaggattaataagttctggaggtctgttgtacaacatgatgacatatagttaataataactaatacttgaaaatttctgraaaagcagatcttaaatgttctcacctcaaaaataacaagtgtgtgaggtgatggatatgttaattagatttatttaataatttcacaatgtatcaaaacttcagattgtacatgataaatatatacaacttttatttggcaattataccttaataaagctgagtaaaaaaatacaaatttctaaatgtgttaatttccaagaagggataaagactccctgagtctaagtcagataaaacttcccaaagcaaataaaaacaacaaatgtgcaaagttaaagaatgagtcaagagatacatataataacagaaagattattaaagtatatattaacaacatttctttaagttgtgacaggtaacaaaacctgggaccacaagatgtactatttcttattcctaatggcaactttccttgaattaggcaaggccatgtttattaatttattgtctctatttcgctttcgtatgaaaa

SEQ ID NO: 288704 - DNA, 593 bp, Homo sapiens
ttatattccatgaccacatctagtcaggagagagatactgtatcaaagctaattgttatatcccttacagacattaatagcattgcagcctaatggcactaaagatgagaattttgagatcttatagctgcaggatatyagaaatgatgtatgatacatcagtcttataatacattttatttttaatttagagtttaaaaaataaaaaaataagcaagagttctggcgtttgaaggcaactagcttcttatccattattaattcacataagaaaaatagctatgatggcaaaggccagatagttatacacaggctataaatatagatgaataattcatttctctattaattttgaatttatagccaaactggttgaactctattttttcttttcctagaagggcatacaccagacaaaatactgcactgtcaacagtcaagaaagacataaactactcagtacgcaaaatgagatttactatatgcatatttatcttatttgaatgaccctctgtgttctccttatggcttactagaaggttttggaaaattatgtcttttcaaaatataacattaaatatgtcaaagtattt

SEQ ID NO: 288705 - DNA, 526 bp, Homo sapiens
ggagagagatactgtatcaaagctaattgttatatcccttacagacattaatagcattgcagcctaatggcactaaagatgagaattttgagatcttatagctgcaggatatcagaaatgatgtatgatacatcagtcttataatacattttatttttaatttagagtttaaaaaataaaaaaataagcaagagttctggcgtttgaaggcaactagcttcttatccattattaattcacataagaaaaatagctatgatggcaaaggccagatagttatacacaggctataaatatagaygaataattcatttctctattaattttgaatttatagccaaactggttgaactctattttttcttttcctagaagggcatacaccagacaaaatactgcactgtcaacagtcaagaaagacataaactactcagtacgcaaaatgagatttactatatgcatatttatcttatttgaatgaccctctgtgttctccttatggcttactagaaggttttggaaaatt

SEQ ID NO: 288706 - DNA, 562 bp, Homo sapiens
ccatctcccaaaatgtctcctacagagaaagagctgggctggttttacaatttttatggcaaaggttaaaataagtaatttccacaacagctgtcgacatatagtctatctttggaggctgctttccctagagaattttatttcttcaaatgtcataattagaatttaatctccagtgactactcaaggaaatctggcagcaggatgcagtatgggtcacattttaattatraatgcatctttcacatctgaagggccaggagattttgctagtcatgtcacggaaactcctatgcactgtgaataattaagtatgtttttcagtggatagcagttgtttccttaaaattcagcaagatttatcagagcatgaacagatttcttgtcccaccaaaatctgatggggtgcaaagaagtcgatttccaggcaattagagcagtgggttgtgttcattcacacgctggcattgtctatgacagatgtgtatcaatagcagtgtgttttcatgcattcatttattaatttcctttcttttattaaacaaacctttattgagtatat

SEQ ID NO: 288707 - DNA, 522 bp, Homo sapiens
caaaggcacatgtgcccatctgtcttaaaatctttaaaagtaaagaactattatccaaaatacacaaagaactcttaacactcattaaaaaccagtaggagaaaacagtaaaaatatcasagttttaaaaaattgtcctatgcatccctttcctttggctgttccccaagttatatcattcgtaataaactagtaaagtttaaaaacaaaaacaaaacaaaacaaaaaacaagtcagtgatttccagggcttacacggggaagggagggaggcaggaataaataagcagagcacagaggatttgggtggtcataaaaccattccgtataatactattacggtggacacttgtcattatacatttgtcagaactcatagaatgtacaccaagagtgatccctaatgtaaacgatcgactttgggtggtgatgaattgtctatgtaggtgcaacaactgtaacaaatgtaccactttggcggagatactgcttgtaagggaggctaggcatgtgtgggcgcaga

SEQ ID NO: 288708 - DNA, 522 bp, Homo sapiens
caaaggcacatgtgcccatctgtcttaaaatctttaaaagtaaagaactattatccaaaatacacaaagaactcttaacactcattaaaaaccagtaggagaaaacagtaaaaatatcacagttttaaaaaattgtcctatgcatccctttcctttggctgttccccaagttatatcattcgtaataaactagtaaagtttaaaaacaaaaacaaaacaaaacaaaaaacaagtcagtgatttccagggcttacacggggaagggagggaggcaggaataaataagcagagcacagaggatttgggtggtcataaaaccattccgtataatactatyacggtggacacttgtcattatacatttgtcagaactcatagaatgtacaccaagagtgatccctaatgtaaacgatcgactttgggtggtgatgaattgtctatgtaggtgcaacaactgtaacaaatgtaccactttggcggagatactgcttgtaagggaggctaggcatgtgtgggcgcaga

SEQ ID NO: 288709 - DNA, 866 bp, Homo sapiens
ttcctctaagtgcttaagggcattaattctgttgagccttacaacagatttttgttttcatcactacacatgtgggaacggagaattagaaaggataaataacttgctgagagttacactcttgtgagttttaaatccragaattgaactccagcaacaattaggctatcattcatttgtggaatggttgatttcactgaagaaatgaaatattaaatatttagaatttgataaccacttctcccgtgtcttatgctcctagtattgttcaccgagtctataaccactccaataccctacttaacatattctaaatctgctaattcatatatgttttattcttatcatttctatgttatgwgctgtccctgtagccattcttcagcccaccaagatatcctgatctagcttcccaagaaatcagatatgcctctgatttgaaaacaactccatatacacacagtacacatatagcatggcaaaaaagggagcctctgctttaaaaaattttatatgtgtaattcgttctcwaattctatttctgacctaaactatactgtaagaggctcctaactagtttctaatcacattattctcaaaatgtaccaagggcactgctgccaaaatttgttttcaaaaactcaaatatgactatgcacagtttctgctgataacccttcaacagttccttttggctacaggataaaattcaagctcctaatgtggcataaacccttcattataaatccccctccttgtgttccaactgcatctctcattactccctaccttgcactgcatgctccaacaatttcaaataacttacagtttgtattcctacaaccctgtgcattttctcatgctgt

SEQ ID NO: 288710 - DNA, 495 bp, Homo sapiens
tttacacaaataattaatttgataaaattataataaaataaacaatggcccagatattttctatagttgtattccaaactgggctctgagttttctggcagaaaagatgaaagcagagattacatatgttacacacttcttgtgatcagagagaaaaaacaaaattctgtgattccttaaaataattaaaggctttcctgcactaatttcatactgctctttcttataatgaccttattgctgagagcaacataaaacaacaaccaaaaaaaaactataaccataaaacaataacaacagcaataacagcgatgaaatcaatgtagtggcattgattctgtgaaaggctaaggtaatgaatttaaaatatatgtattgctaaaaattattcayttttttcaggtcacatacattcaattaatgtgtcttgtggtagtaaacttttgaccaactctcagcaatatacaatgtgtgcaattgaagtgcttaataaat

SEQ ID NO: 288711 - DNA, 628 bp, Homo sapiens
tattcagtgttgtttccacagaagaacatattgaagtggtcagataattgtactttcttaaaatggatgttttgatttattagacatgaagtgatcagaaatcgttttgtaggagtacaggaaaatagaagagagataaaagtatacattaacataagaaaaatagtgatgagtccattaagcacaggtcagaattacttgtatacggtagggaaaagagaaataaccttaatggaattacgttaatatgccaagaaatggggaagtggatacaacaagggactgcaaaataattggaaataaagtgagccctatttttagttgtagcatcaaataattcttttttattacatgagaaacggtagtgatagaaacaatatgcccttctatgggtctctaatacttataagggtcttaaaaaccatattttctgacatgccatggggaatagagggtggattaaaagagtaaacagtaataaagagaatacaaagaagttgtgtgatcaatctctgaaaacamcaggaaaagattgaaaacacactggtacacacaaaataaatagtttttacacctgtgctgtagcaggataataatagaatattatgaaataactaacgttagtaaa

SEQ ID NO: 288712 - DNA, 614 bp, Homo sapiens
atagtatttcattgttcagagaagatcgtttctgtattaatgaactgttagaattgctcccactagctgcctgggcgtaactattattattgaaattgaagcccttagtataacaaaatttcaaacctaaaaggaacaagtcttccatagtcctctcattttatagataaaataaacaaagaaacaaaactaaggcctacacaggtaaagcggttttccccaagccacacagctaactcattacagagctcgaacccaaacttgaaacaccttaccagtacatgtgtgatgccacyagtaataatgagactcaaaaagatgagaaaataacttgtccaaagtcacacatctagttcataacaaaattctgcatacattcagatcttctcagttgaaattctataatttctgcactatcctccaaatgacatcttataaaagaattcccagaatgtattagttcctatagtagagattagggggcagagaaataagcattgactctggaattaaatagaccttaaatactaatatcaatactgtccattgctagctgtgtggacgttggcaacacacaagtctcattaagcaacagaagatacattaatcatctg

SEQ ID NO: 288713 - DNA, 628 bp, Homo sapiens
aactaagaatacactataccaactcaatctgttaaaaaaaatgtaatcctgcctttcttgggacaaaaatttcatagaagacgaaaatggcaacacgcctctagataaaagcattggcagagttccgatttaaatactgcattcccttaatgctcaacttaaaatgaaacatacagcaacagaatacactaagtataatgtttctaagataattcattagcagatctatagcactgaaataktagcaaggtatatttccattaaattacttaatgtattcctatagtacagccaaaagagatgcacatacatcaatggctatcgtcaacatgtaaatatggacacatctgcacacatctctcctatataattccttctgcccctctgctgccaacctaacgaacaagtcctgacatatactgctcagaggtggttaaacaattccatgtccaagacgcatcttttctatcaattataacaaaggtatttacaaattggctaattcactagctctagtttttatcatatattgtcactccagacatccataaagtttagatattgcaaaataatgaatttgtccacaataaacacagggaatttactaaaaatgctcatatagacctgt

SEQ ID NO: 288714 - DNA, 1174 bp, Homo sapiens
aactaagaatacactataccaactcaatctgttaaaaaaaatgtaatcctgcctttcttgggacaaaaatttcatagaagacgaaaatggcaacacgcctctagataaaagcattggcagagttccgatttaaatactgcattcccttaatgctcaacttaaaatgaaacatacagcaacagaatacactaagtataatgtttctaagataattcattagcagatctatagcactgaaatattagcaaggtatatttccattaaattacttaatgtattcctayagtacagccaaaagagatgcacatacatcaatggctatcgtcaacatgtaaatatggacacatctgcacacatctctcctatataattccttctgcccctctgctgccaacctaacgaacaagtcctgacatatactgctcagaggtggttaaacaattccatgtccaagacgcatcttttctatcaattataacaaaggtatttacaaattggctaattcactagctctagtttttatcatatattgtcactccagacatccataaagtttagatattgcaaaataatgaatttgtccacaataaacacagggaatttactaaaaatgctcatatagacctgtwagaaagccctttgcactttgtgctcctcctttcctatgaaccagcacaaatataataatgtgtactgcttagagaactgatcaatttccawaagacaatatttcatatcaaaaggatagctacaaaatgtgttatttactacctctacttttaacagactttgtgcacttctaaacatctagaaagactatgtttctacctctactatatttactgcctctgcttttaacatattttgggcatctctaaacatctagaaagacttatgtttcaaataaggacttaagtttgtccactatggacacagtagtgttgaataaactacacacatgtaacagtggttacatctgaaagtgtcttctaaataggagcattctggtctagaatccttcattccttccaactcctctccaccaccaacctggtggatataggtatatgtgtcacttagagctgatgttatcatttcactttcaaaagtccttttcagaagacagcctttctatgaattttaacaaagtgtacaaaatgtgttagtttactaa

SEQ ID NO: 288715 - DNA, 545 bp, Homo sapiens
agaaagccctttgcactttgtgctcctcctttcctatgaaccagcacaaatataataatgtgtactgcttagagaactgatcaatttccataagacaatatttcatatcaaaaggatagctacaaaatgtgttatttactacctctacttttaacakactttgtgcacttctaaacatctagaaagactatgtttctacctctactatatttactgcctctgcttttaacatattttgggcatctctaaacatctagaaagacttatgtttcaaataaggacttaagtttgtccactatggacacagtagtgttgaataaactacacacatgtaacagtggttacatctgaaagtgtcttctaaataggagcattctggtctagaatccttcattccttccaactcctctccaccaccaacctggtggatataggtatatgtgtcacttagagctgatgttatcatttcactttcaaaagtccttttcagaagacagcctttctatgaattttaacaaagtgtacaaaatgtgttagtttactaa

SEQ ID NO: 288716 - DNA, 545 bp, Homo sapiens
agaaagccctttgcactttgtgctcctcctttcctatgaaccagcacaaatataataatgtgtactgcttagagaactgatcaatttccataagacaatatttcatatcaaaaggatagctacaaaatgtgttatttactacctctacttttaacagactttgtgcacttctaaacatctagaaagactatgtttctacctctactatatttactgcctctgcttttaacatattttgggcatctctaaacatctagaaagacttatgtttcaaataaggacttaagtttgtccactatggacacagtagtgttgaataaactacacacatgtaacagtggttacatctgaaagtgtcttctaaataggagcattctggtctagaatccttcattccttccaactcctctccaccaccaacctggtggatataggtayatgtgtcacttagagctgatgttatcatttcactttcaaaagtccttttcagaagacagcctttctatgaattttaacaaagtgtacaaaatgtgttagtttactaa

SEQ ID NO: 288717 - DNA, 590 bp, Homo sapiens
ataccatttagttttgaggggaaattattgacggagtttgcagtaatttggcttgtcatccccaacatctgttgcctttgccgttacaccacttagctcctgatgacaaattgaacaagatcagagtgagtgcatgataactaataagcatcttcatgggtaaaatcagttaacatcaaaaacaggccagtggcattagtgtatgcagtttcctggtagtagtctcttcattttcactattcttagataattctttcactcctcaaggattcctaatcgtctctmtgccgtctagaaaagactttaattatactatcttgcttatagaagtggccctaaaagaaacacatgtgtaatacaattataagaatatctgatatatgttttctgatgtaggattatcaatcacagtcatatctataatgaaactggaagaaaaactacacagaaaagaattcaaagtgatttggcactgccttctgcttggcccatctgctgttattttttttctcctactggcagaacgttagacaatatttcaacttagcatctcataggcagttaaacaacggacaaggtaaactatatta

SEQ ID NO: 288718 - DNA, 590 bp, Homo sapiens
ataccatttagttttgaggggaaattattgacggagtttgcagtaatttggcttgtcatccccaacatctgttgcctttgccgttacaccacttagctcctgatgacaaattgaacaagatcagagtgagtgcatgataactaataagcatcttcatgggtaaaatcagttaacatcaaaaacaggccagtggcattagtgtatgcagtttcctggtagtagtctcttcattttcactattcttagataattctttcactcctcaaggattcctaatcgtctctatgccgtctagaaaagactttaattatactatcttgcttatagaagtggccctaaaagaaacacatgtgtaatacaattataagaatatctgatatatgttttctgatgtaggattatcaatcacagtcatatctataatgaaactggaagaaaaactacacagaaaagaattcaaagtgatttggcactgccttctgcttggcccatctgctgttattttttttctcctactggcaraacgttagacaatatttcaacttagcatctcataggcagttaaacaacggacaaggtaaactatatta

SEQ ID NO: 288719 - DNA, 593 bp, Homo sapiens
ggctttatggccctgcccattgcttaagaaaccagtatacttgccctcaccaastagggcaagctcaaatcccactgttaataccacaggtggggctctcttgaaagtaccacttcctagctggaggccaaccaactcagtccatcacagcaactcaggacagaatagcactgctcctaggaaggagtaaacaacagttaataccaccacctgcaacactttggctaactagaggtcctgagttggaccacatgacaacttcactgctagcataaccaacatttgaggaagccagcacactaaacctatccacaacccaaggattctcacagagtctatgtcactcccctgccacctccaccagagcaggtgctggtatccacaactgggagacctgaagactggtcgtgtcactggactctttgcagacattccctagcgccagcctgaagcctggtagcccctctgggtggctagacccagaagagcagtaacattcactgcagttcagctctcaggaagcctcatccctagagaaaggggggagcacgacaccaagagatgaccctgtgggaagaaagaatctcaacaac

SEQ ID NO: 288720 - DNA, 619 bp, Homo sapiens
agttatttttttatcccttttcagaaactacttaaggttaggcctgaaagagaaaagaggggaaggaagagtggcaacttatacaagagaagagggattcacagaaataatgagttagtccatgagatggaggataaagaagaaacttttacaacagagtttctcaaacagggttttctcaaaacctaggattccacaagatgccacttagggttccttgagagattgtgactgaaaaggaattgaagttggtttgggggaactttgtgctctgtggaacactagcatttgtggaggtggacagtcaccaagcagcctggtttgtcttttagctctaggtagcactgtctagcactatgtttacttggttgagtacattctcgttttygacttaggataggggaagccgatgatagttgatgagcgtgtgattgcatcagggagagaagaacaggcttgacaacatcagcctctccctcccaaaataccttcttcagccttcctcaaaactgtgttggttaggtccggtgttggttcaggtgccaagacagagttagtagtgaaggagatttattgagggaaatgcctatgaaagataaagggaaaaaacaacagatac

SEQ ID NO: 288721 - DNA, 518 bp, Homo sapiens
atggtgggagcagtaccaagagagagagtgggaggggatatgccacacacttaaacaaccagatctctcaaaaactcattcattatctccagatcagcaccaagccaagagggatccacsccatgaccgaaacacctcccaccatgccccacatccagcactgggaatatcaattcaacatgagatttggtggggacatatattcaaaccgtatcagtacttaattaaggaggggaaagatctctgcaaggaggtctagaaaacactaatgaaataaatcatagatgacacagacaaatggaaaaacatcccctgctcatgaattggaagaatcaatgtctttaaaatgaccatactgcccaaagcaatctacagattcagtggagtttctatcaaaaaataccaatgtcattttcacagatttaagaaaaaataatcctaaaatgtatatggaaccaaaaagagtatgaatagccaaagcaattataaccaaaaagaacaaatatgaaggtgttact

SEQ ID NO: 288722 - DNA, 530 bp, Homo sapiens
gtttaaaacgaaaggatggagaaggatattttatgctaatactaatcaaaagaaagctggagaggctatagtaatatcagatagtgtagatttcagagcaaagaacattaccagagatgaagagggtcatttcaagtagatagtttctctacatgtttccccactaactttctttcttcgattcctcaataccttctatctacccttccctatgtttccrtgcatcaggggttctctagtggagactcttttcctcccatctcttaacatctgctctgagcatccccagcaactcatcaggtggaaaaagctactagtcacagtttaaatctcattctcccaagaaaatgctcatcttagcacagaccaaagcttgcagtcacaggaaaggagctctaagttagaatttcaatgattagtcttctctttctcaacaactacaaattcagcaccagattatcctcatcagcactgcagatcccccatggtgctagtgctagaagctggaatccatgtttttcttgggaaaa

SEQ ID NO: 288723 - DNA, 603 bp, Homo sapiens
ctcagccatgtggaactgtgaatcaattaaacctctttcgtttataaatgacccagtctcgggtacatctttatcagcagtgtgaaaacaaacaaatacagagaaagagcagattgaattctgtttcagatctgtttagtttgaggtgccaacatgattttctatcaggagaggtacaaaaggaatttagaaagacagatctaagagatgaagaaagaaaaagagaactaagattataaatttggaagaggctgccagagaaggtagttgaaattttgtctgtgggtgagatctcccattggaatagtgtagagcaaaaaggaggagagggttagaaaaacatgtgccatcagtgagttttcaaagaactggtgatataattgacttaggatattataagaaaattyaagaaagagagagtattcctaatgagggctggttagcaatatcaaatgctgtgtagaggtcagctagaatgaagggtaaagagctcagggaactttttaatgagaaagttattggccacctctggagaccagctgtggtagaggaatgggctcagtagtttctatctattgcagtggaatgaggagtaagtgtgag

SEQ ID NO: 288724 - DNA, 604 bp, Homo sapiens
tgcctagtaaaatactaaggctaggactgtatgttgttcttaccaagctctgcttcttcctacagaaagaaaagttaaccacaaatctcagaccaattggcctgctccatcatttaatgatgcagctgcctacatcttcaaatattcatgaaactaaaaattctccaccgccccactcttccttcttcttagtacacctctatcacgatgtattggattactctatctcattttcaatacctgtgacctttctcattttattcatttattcaacaaacatttatggagtgtctcttgtatgtcaaatattgtgctaagcataggtgcagatggtaggaatgaaaaatagttatactttaattcctgaccttaagggatttacagtcttgtgacggcaacagattgtaaatggtacacagataaaaccgtgtacttacaaggtgagaaaagcatcaggaaggaaacacagaattacccagtttagtcagggaaaagttttctggagaagtaacattatatctggaratttgaaggataaaaatgaactagcttgcgaagcagtggaaaaagtattcagacaaggaaccagcagatgtgaacatcc

SEQ ID NO: 288725 - DNA, 544 bp, Homo sapiens
cattgttatctatggatatgggctacactgaactaacagtggtattttggcacattttctaaacctccatgacaaaacaacaacaacaaaatatcattgtgctgtgacatctgttaaggataaagatgaaaaaatgattccagaaaagagaagtcctattaaaagtgtatctgtgcatatagaacaatctgtccctatatatattttcctctccttctctctattaccattatccccaatccctgatccaggcatactagagtttatttttcattgaggatcatggttttgttctctctgtacgtggtgatttggctctgttatgggttgacaattgtgaaataaagaatccctctatttccccttttgtggctgtttattcctttccctatctccaatatatcaaatagttggtacttcatgctctttcaacttgcacactattttttctctttatatactatctgggctgaagtattgatattgttttgcttctgacctttagagggggaaacrtaattatgcattctccaaaggcaggtga

SEQ ID NO: 288726 - DNA, 543 bp, Homo sapiens
aatgaatgtatctatcgattgatcaaaacttgttgaattttttaaagcataaattgtatggctggtttttttttttttttcattkgggccctttttcccacctttgaatgcccagagagcattgttcacaataactaatttaacaaatctatccttttggagtgtctgttgctttaaagaaatgatgacactcttcaacactgattagaatcacagtacctaagagaagctcttttattttttggtggcatactttctagaaattatctttggctttttagctcaactaattcccatttgtggctacaaaacaattataaatgataacttttccatgcttttcacctttgttaataaacggtttaaagaatgagggaggtttttttaaattccattttaatctgtcgttcctggcatttaacagaaatcaggacaccagttcaaaaattacgtaccaagtcaaaaatgaaaaacttgagcttgcagaaaaagttgtgttgtcttttctaacaaacttcacattttccaaaaaagaagtagact

SEQ ID NO: 288727 - DNA, 505 bp, Homo sapiens
gtttctgaatgaacatttcttttttcaatagtccttgcacaccttttcagctagataaaccaatagctttacaccttgagcaatgatgctgttttctagcccattttatagacgtgaatattaagaacaaaagatggccamagacttgaatatgacattttaaaaacgaacagaatattttacatatttttatcagaaaggtatatgtgtccattaaaaatacaggtggggggaaacaaaaatctcctattaagacagcaagtagagaaaattgtcatggaggaaacctgtttagaaaactcaccagtaaagaatgggcagttggaattttgtgaggagcacttgctgggagtgggctatgctgttgttttcaccgattcactgcctctcagaaagggaggcagagaggagctgcctctccccttgtgcatgtgagagagggtgtcaaggaaactctgggtcttgctatgcttacgcaggagtttggtgagcagaatgtgccaat

SEQ ID NO: 288728 - DNA, 941 bp, Homo sapiens
gtttctgaatgaacatttcttttttcaatagtccttgcacaccttttcagctagataaaccaatagctttacaccttgagcaatgatgctgttttctagcccattttatagacgtgaatattaagaacaaaagatggccacagacttgaatatgacattttaaaaacgaacagaatattttacatatttttatcagaaaggtatatgtgtccattaaaaatacaggtggggggaaacaaaaatctcctattaagacagcaagtagagaaaattgtcatggaggaaacctgtttagraaactcaccagtaaagaatgggcagttggaattttgtgaggagcacttgctgggagtgggctatgctgttgttttcaccgattcactgcctctcagaaagggaggcagagaggagctgcctctccccttgtgcatgtgagagagggtgtcaaggaaactctgggtcttgctatgcttacgcaggagtttggtgagcagaatgtgccaatwcaaactatacgagtgagtgagtttgattaatttttttattctttgtactttcatgtcttcttaattttatccatatacacatgcatgcaatccaatttaaaaataaaaatatggaaagcaaaacatttgttttttctatttaagttttagtgaaacacaaatttaccatgcacagtttcagttttacactttattcattgttttcctataaagtcttatttttttcagattaagtttttaaatttctaacwaattttactaagtactatttttgttatttttattttgtgttggttgttattattagttaagctaaaagactgatacttttgtttatttcttggctaacctctgagaaaattgtgaggaattcccctctggtatgtcctgtcatcatcactggcaaaatggacaaaacccaaagaattctgttag

SEQ ID NO: 288729 - DNA, 435 bp, Homo sapiens
caaactatacgagtgagtgagtttgattaatttttttattctttgtactttcatgtcttcttaattttatccatatacacatgcatgcaatccaatttaaaaataaaaatatggaaagcaaaacatttgttttttctatttaagttttagtgaaacacaaatttaccatgcacagtttcagttttacactttattcattgttttcctataaagtcttatttttttcagattaagtttttaaatttctaactaattttactaagtactatttttgttatttttattttgtgttrgttgttattattagttaagctaaaagactgatacttttgtttatttcttggctaacctctgagaaaattgtgaggaattcccctctggtatgtcctgtcatcatcactggcaaaatggacaaaacccaaagaattctgttag

SEQ ID NO: 288730 - DNA, 555 bp, Homo sapiens
tttcctctattcagcgggagataaaaaaatcttttagtcctagaggagaaggtggacaaacgatttcttatgcagctgtggaggaattttgtgagtttccttggaagttctccacatctccagggaaggtgcctctcttaggctcagtcatggaccacactggtgccctggacctgctcacggtggcttcttcctggcaggcactccatcctgtgaaatcctgtggaccattgttcacatatgaggcgggtggggttagatcaaggccaagcccattaaagtccttccatagtaaagagtacaacacggcttgaaaaggaatattcataattagagtaagcagaactttcagttctgaggtggcccctgcagggatcatattgttgaaagggtcataagaccatkagctgcactcccagatcatgcagatttctcatccgttggggctgtgctgacccccagggttttgggtgtgcatccatgaagaactagaaaagtcctgaagagtggaatccatttactacctcagattcttagaatgtgtgtgttctatgt

SEQ ID NO: 288731 - DNA, 481 bp, Homo sapiens
taggctggaaaatatacctttttgtttttctgagcacacttggaaagctcaatataaaaggtgaaatttcataaacaatccaatgaactttatcatattaggctagaccaaaaggacatgttagataaattatatttatcattcaattatattccatttaatttgattttttataggtctgaaggaagaargaaagatgtctttaatccatttaaacctatcagtacattctcctgattctatccagataataactagagcttcttatacattctaaaataccagattaccttgcataatatttctatctgttgaatgaattaggtagatagacaattggaaatcttctcataatttgagtgcttctattagttgcaatgtcttaagtcaagaatatatatattgtgtttattttttggtcaaacatgttaaatgggaaactgtatgtgaaaaattattgaaagtggcaagtgtttcacac

SEQ ID NO: 288732 - DNA, 481 bp, Homo sapiens
taggctggaaaatatacctttttgtttttctgagcacacttggaaagctcaatataaaaggtgaaatttcataaacaatccaatgaactttatcatattaggctagaccaaaaggacatgttagataaattatatttatcattcaattatattccatttaatttgattttttataggtctgaaggaagaaagaaagatgtctttaatccatttaaacctatcagtacattctcctgattctatccagataataactagagcttcttatacattctaaaataccagattaccttgcataatatytctatctgttgaatgaattaggtagatagacaattggaaatcttctcataatttgagtgcttctattagttgcaatgtcttaagtcaagaatatatatattgtgtttattttttggtcaaacatgttaaatgggaaactgtatgtgaaaaattattgaaagtggcaagtgtttcacac

SEQ ID NO: 288733 - DNA, 481 bp, Homo sapiens
taggctggaaaatatacctttttgtttttctgagcacacttggaaagctcaatataaaaggtgaaatttcataaacaatccaatgaactttatcatattaggctagaccaaaaggacatgttagataaattatatttatcattcaattatattccatttaatttgattttttataggtctgaaggaagaaagaaagatgtctttaatccatttaaacctatcagtacattctcctgattctatccagataataactagagcttcttatacattctaaaataccagattaccttgcataatatttctatctgttgaatgaattaggtagatagmcaattggaaatcttctcataatttgagtgcttctattagttgcaatgtcttaagtcaagaatatatatattgtgtttattttttggtcaaacatgttaaatgggaaactgtatgtgaaaaattattgaaagtggcaagtgtttcacac

SEQ ID NO: 288734 - DNA, 395 bp, Homo sapiens
aaacaaagagaaaagtcaaaagttagaaacatggrgagatgcaaacaggcatgttagatataccaacaacaaccacagctattgccatgacaatatcagctacaaagcaactgggatcaccaaccaatcatctgaatcctgcaagtttgggcaacatactactaaaaggatcccgggcagacactttgtaatgattagaatacaatacgaaatgaaaatttagcatttatagatttccatagatcactgatacttattttaaaaaggacagataatttaacaataaatggatgtgaatgtattagctatgagaatttaattgatgctgaatttcatgacagcttaagtggtcataaacggatgaaaacatagtggccttaaatactaaattaaat

SEQ ID NO: 288735 - DNA, 395 bp, Homo sapiens
aaacaaagagaaaagtcaaaagttagaaacatggggagatgcaaacaggcatgttagatataccaacaacaaccacagctattgccatgacaatatcagctacaaagcaactgggatcaccaaccaatcatctgaatcytgcaagtttgggcaacatactactaaaaggatcccgggcagacactttgtaatgattagaatacaatacgaaatgaaaatttagcatttatagatttccatagatcactgatacttattttaaaaaggacagataatttaacaataaatggatgtgaatgtattagctatgagaatttaattgatgctgaatttcatgacagcttaagtggtcataaacggatgaaaacatagtggccttaaatactaaattaaat

SEQ ID NO: 288736 - DNA, 348 bp, Homo sapiens
tttaacgtagttatcaaggtaggtacctcacacaagaaactgcttgatgatgaacatttaagtttcaaagcaggaaagatagcccttgtgatgaaggcgattagaacgtgatacaaatgactcttagtttttcagtggaccagagcaacagttactggttagttcaacaggtgagactcagtcacaaagartttacggatctcgctgaaaataatgaagacaggtaccatggcagaatcactaccctatacacaactgactctctgagatgagtgcctaaaccacatggcaaccaaataggtattataattagtttgtgagaaagtggtaatagtacttgttgcaaat

SEQ ID NO: 288737 - DNA, 448 bp, Homo sapiens
tataacagcaaaaacctggaaacatataaatactaagggattttttaaaatgctatttagaagagtataaaaatcataaagtatttggggctaagtttaatgaaggatgtagaaagcctccatgctgttttaaaagtacagcgctttaaatagagaaattaaagaaakatatcaaaggatagttataccatgctcatggattggacaataatatgttgtgaagatgtcagatatgttgattatagtatatacctaagggtagggaagcaatcacttcaatgttccatagactcactggacccggtatgatattgtcctggccgtcatcctcccatctgagaggagtttgtgatagaacctcaggtgtcaaggaaccataaacgctgaacaatgttttccattatgtccagctattctccagtgtatcgttatccatgtacagtttaat

SEQ ID NO: 288738 - DNA, 559 bp, Homo sapiens
ctgtacatacttgtatggtatggctgggtattttctcatggaaatttggtctctctgacaagttcaatttctgaaaattggcttaattatagaaattgggggamaattttcaacattattttgaggaagtatttttcagccacctgatcatcagtctttgatgttttattattgtattataggaggatcagtgtcctttgttatttttgaatatgtgataattttatctactttttgttttgttttgaattttagcgctaacttgtctattatctccattgctaccagggaacctggattagaagcatgtgctgctctcagacctggcctacagagaagaactgacacagacttccttagatgtgttgtcttcctgtcactggtgcattccttatcaatgtggtaagtagtgtatcctctgggccctccagcagaacatgattgactagtgagttttcatattgtctctagcatatctgcttctctgagaattttcatccttctcttttcacttgctaaggcagttctagtagttctatttcccttagagtggccctgt

SEQ ID NO: 288739 - DNA, 559 bp, Homo sapiens
ctgtacatacttgtatggtatggctgggtattttctcatggaaatttggtctctctgacaagttcaatttctgaaaattggcttaattatagaaattgggggaaaattttcaacattattttgaggaagtatttttcagccacctgatcatcagtctttgatgttttattattgtattataggaggatcartgtcctttgttatttttgaatatgtgataattttatctactttttgttttgttttgaattttagcgctaacttgtctattatctccattgctaccagggaacctggattagaagcatgtgctgctctcagacctggcctacagagaagaactgacacagacttccttagatgtgttgtcttcctgtcactggtgcattccttatcaatgtggtaagtagtgtatcctctgggccctccagcagaacatgattgactagtgagttttcatattgtctctagcatatctgcttctctgagaattttcatccttctcttttcacttgctaaggcagttctagtagttctatttcccttagagtggccctgt

SEQ ID NO: 288740 - DNA, 559 bp, Homo sapiens
ctgtacatacttgtatggtatggctgggtattttctcatggaaatttggtctctctgacaagttcaatttctgaaaattggcttaattatagaaattgggggaaaattttcaacattattttgaggaagtatttttcagccacctgatcatcagtctttgatgttttattattgtattataggaggatcagtgtcctttgttatttttgaatatgtgataattttatctactttttgttttgttttgaattttagcgctaacttgtctattatctccattgctaccaggraacctggattagaagcatgtgctgctctcagacctggcctacagagaagaactgacacagacttccttagatgtgttgtcttcctgtcactggtgcattccttatcaatgtggtaagtagtgtatcctctgggccctccagcagaacatgattgactagtgagttttcatattgtctctagcatatctgcttctctgagaattttcatccttctcttttcacttgctaaggcagttctagtagttctatttcccttagagtggccctgt

SEQ ID NO: 288741 - DNA, 571 bp, Homo sapiens
atggctctggtttgcctacagtggtgatatgaactcagggatgcgcattcctcatagaagatattctttgtcacccccaactgggacagcttaagaggcctaaatgttgtgggaagaaaagggcattttccaggaatgagttactagttatgtagttataagctggagagtgcatgtctgggccctgtcttctcttgtggacaatggcagggcccagaagtgcccgtcagctctgacrctgacccactggcatggttgcagaaccctccattgctggccactctccctcactgtgcacttgacctaaatcaccacaccaacaaagccaggcaatgttctggaggtcattcctccaccagccaaaacagggtggctctcccctttaaggacaggcttggtgaggtgaaggcctcttccctgaacaagaagaaggtctctggaagcacagttaacccattccctaagaaagcattcttttcaccacatttgattaacacaaatgccattgaccttgactaggaataagagggattttgcttagctcccagattaggacagaaagcacacttag

SEQ ID NO: 288742 - DNA, 552 bp, Homo sapiens
ataacacacaaatttaaataaacatacagtcatttatcttctaaattaatttgttgacagataaggtagcatakagaatttgtactcagtattcctaacatactttgaacttcttgaacatacttttctctgttcaaatcaatcatacttaattgtttattggattatgaaaattatgcaagacagcttgtaataatgtataagctacaacaagatgatacattaaagttagtggtaaaatgaaagtgaagacgtgtagaggcatatatagaggcatacgtatgcaactaaaaaacattcctgatcatggataacttagttgatgtccatgctcctcaaccatagtcatagtcagagaataaaacgatttaaggatcttaagaatacagacgctagggtcccatcccactgattggccccctgaagtggtggcctcaccatgttagatttttaagaatttcaaaagtgtttctaatctatagccaaagctagagaactactattttagttggatcatagatttgtctcccagtttcagggcagacaatgcag

SEQ ID NO: 288743 - DNA, 611 bp, Homo sapiens
gtcaatggattcttttttatgaaatatttgctgtaaaagacactgtaaaataactcaaaaaatacattcatatttattaaagtaatggcatctcaaattttatgctaaaaatctttttatttcatgtgcagcaaaagcctagagtaaaagccttcagggccactgtaaacattttggaaaatcatggctggcactgcaagtccaagtacccgtggggtctctactgtcttgagagacatggtgagctaaactctcagtactactaagaagractcacagtatgaggactaaaatttttgaaaaaaagaaaatttgaacacatgtgaaggaaaggaaaattttgaaaatgactgctctattctccgaagttgttaaaaatacttcctgcaagttgaaaaatggaaaaaaaaatcggctcttgtgggctcctttttagcttctattttcagtaaaatggaatgctctttgtgtagcaggatttagtgatacttagatgtgcttgaacccaggtatgcaagaggggctcagaagaatagaaggatccagactgcttactggcaacctgatagagagctacacctaaaaaaaagacaaaaaccactgtaaggcaa

SEQ ID NO: 288744 - DNA, 619 bp, Homo sapiens
tctcgtcagtatggattaatttgcaatttcaagaatgttgtataaatgaaattatagagcagtacgtttttgtctgattttattcactcacagaattatttcaagatccatccatattgttgcatgattcagaaggctgctctttttatattgctgagtagttttcaatggaatatactacattttgtatatccataagcctatcatgtgcattttggaatgtttccatttttttggtaattgcaaataaaactgcaatgaacactcatgtataagtctttgtatagacatgtatggctttctttcttgggtaartaattactagtggcagagcttctagttatagtaggttgctgtggtatgaatgtgcatccctctaaaattcacatgttgaaatcccctcctctaaagtgatgatatcaggaggtggggcctttgtgagcttattaggccaagagactatagtcctcatgaaagagattagtgctcttctttatatacatatatgtatgtattttttaaattatactttaagttctagggtacatgtgcacaacgtgcaggtttgttacatatgtacacatgtgccatgttggtgtgctgcatccattaactcgtc

SEQ ID NO: 288745 - DNA, 579 bp, Homo sapiens
ggtttgtgttgatgttaaatgytggtcagcttttcctgagttccaaaagggaggagaggataataaggcatgtctgactcccctcttccctgaactagtttttcaggttaactttggaatgcttttggcagagaggaggggtctattcagatggctggtaccgggggccacttaaaattatctttggttgacagtttcatcagtgtatagaaggaaagagatgaaatcaccaaaagaaagactgacaataacaaagagaggtctcaggactaagcctcctgaagaatgggattccctagatggataggatggtcccacggagattgtcaagagtcacgaagtacgagtggaaaacaatttctactgtagcaacatggagtcagaacaagatggaaatcgaagattggctgttggacgtggtaaagtgaaagtcctgtgaacactgaaaagaagcaggtttgatggagcactggggtgtttgattggagtgtgttcaagaaagaatgtgggggaagagtgtgggtggctttagcaagaagatttgttgttgaggggagcagagacagcaggcagcaatgg

SEQ ID NO: 288746 - DNA, 624 bp, Homo sapiens
cataatctgtgggtaacaaaagtgcaatacatccttgattcctttttttggaatcaggcaaccagcagagcttgttcagccttgatgtgttgcacttttggtcaaatgtayagactaaaggataaacccacagaggcaggagaatttagtgatatttgataaaaaaaaaaaaaaaagtagctttgttggtgcttttctctctgaacagcagggttactgaaaataacaggctccagtgtgtttctttctaagaggcaccaaaaatagttcttttgtcatcagtcttaatagagttacacagtcagttccatagaaattaaaagcaatactggagctcatctggattatgtgtggtctttttactgctgatcatacgtaacgcacaagatggggtgaggggggaatttagaataatcaatttctcagcaaagaaaaaagaaacagcacagaaaaacaaagaatttggaataaaatacaaggaaactggactcttcccactccttcccttctaaacatagtgagtatcacattcttccttcctgctgtggttttgcttctcacgggcctacaagtcagagatagatgtaggaacaacttaaacaattttttcccttagaagatcaa

SEQ ID NO: 288747 - DNA, 571 bp, Homo sapiens
tagaggtgaaccaacacagtgttggttcacatctggttaaagcctaacagtaaaacataccacattctgactccttggatcacccacacagaaggaatattcctgcccttggagactattttcacatcatacggccatgtccttcctagctggtcgctatggtatgactaagatgactgatgtgggaagraaggcagagagaacaggcactctggggcagtgacaataatggcacctgccatcggctctgcactgtcctaagagtttaggtggactatttccaatagtgtttgtaagagctcctaacatcggtgtcactatgctgggaaccaggctaagcacgtgatgtgtattaactcatttaatcctggtaacaaccctattattggggtcctattattcccattttacaactgagggaagtaagggccagaaggatttagtaatttatcttaagtcacatagttgagttaggattcaaatctaaaccctttggctctagaacctactcatttatctgctgtgctaaaccacagagtcctgtgaatattcctgtgttaaagatatggaa

SEQ ID NO: 288748 - DNA, 565 bp, Homo sapiens
gcactaatctcatttatgagggccccaccctcataacctcatctaaccttaattatctcccaaaggcctgatctccaaataccatcacattggggcgtaggtcttcaacatatgaatttggagggaaaaacaattcagtcaataacacagaaacttacctagtttataaattggatcaatccctgacaaaacgtcactgatcaacttccactctgaaaatactccatgactaaccagcatcctaacctccccactttgagacactatgggactctatcaagatgatgttgatcctcgagtttaataagagccaatgtgggttctgtgacatcatcatctctctgcttctgattggtcaagtatcctctctctctccccacttttctccctctaatccagtggttctcaaacattagctgtacctgagkcccctggggagcttcttaaacctcaggctgctgggcccactcccggagttcctgattcagtaagtctgggagggggcctgggaatttgcatttctaacaagttccctgatgcttttgctgatgctggtccagggacc

SEQ ID NO: 288749 - DNA, 565 bp, Homo sapiens
gcactaatctcatttatgagggccccaccctcataacctcatctaaccttaattatctcccaaaggcctgatctccaaataccatcacattggggcgtaggtcttcaacatatgaatttggagggaaaaacaattcagtcaataacacagaaacttacctagtttataaattggatcaatccctgacaaaacgtcactgatcaacttccactctgaaaatactccatgactaaccagcatcctaacctccccactttgagacactatgggactctatcaagatgatgttgatcctcgagtttaataagagccaatgtgggttctgtgacatcatcatctctctgcttctgattggtcaagtatcctctctctctccccacttttctccctctaatccagtggttctcaaacattagctgtacctgagtcccytggggagcttcttaaacctcaggctgctgggcccactcccggagttcctgattcagtaagtctgggagggggcctgggaatttgcatttctaacaagttccctgatgcttttgctgatgctggtccagggacc

SEQ ID NO: 288750 - DNA, 598 bp, Homo sapiens
tatcctcgactatgactaaaatatcacataaggtgattcaggaaccaaagctataacctcctatatttgccttccatccccagggccccctggaaggttctaagtctgagtttgtgtgcctcactcacttgcttgccttttgttacggcgacccattcaactgcatttatatacacataggatgaatattctgaacgtgcagtaattcatgcttggggaaaattattcaattatgggtcagtcatttcacaaatatagaggctaagccctgttacaccgtaatcaggtgtacatattatccaaggatctcataaacttccaagaggctggagatctgtttatttaatagttcacaaagcagttataatctcttccytcagttttgctaagggatccagactttctaactttccatataaagggacttgccatatgccgggcatttggcgctacccacttgtttctttctcaaagggttagattctttgggacagtatagtagacactatattgctccacccagacgtcctttttagggccaatacacccatccccagctgctgatggttcacaaggaaggtcctcagccagctgcagg

SEQ ID NO: 288751 - DNA, 518 bp, Homo sapiens
ccagatttcccaagggcctgcttattaacaccccagccttgcgcttctcagagcgtatgtcctgtctttcctctagatggcactgtggagcagaggcgactgtcttagggacccgcttcttcctctatcagccattacccacttctctgcaggtgaaaccaggcccaagtgcacagctttgaggggggaaaagaaagtctcctgggaactctttgcagcctggggagaatgtggaagcagtggatgttctgtctgggtagcagtgtggcggactaggaatgsgctggccacgcgcgcctgaacctgcagtgggtttctgatggattagtgactggtgagaagaccccatcacagtagggcacagttagcgaaagttccggatttagttagcccagatatcaaagtctcatcagaatatggttgccaaataaaaatacaggacatcagttaaatttggatttcggataaacaacaaacgcttttttagtataaggatgccccacgtatttgaagagaac

SEQ ID NO: 288752 - DNA, 606 bp, Homo sapiens
aaagcaatcatcaaagtcactcactacagtcatgcaggagtcaggatgaactatccacacagtctatgcataataccacacctggtgtttaaggacttataaaggtcataaaaagctgtttgtttgtcctcaaatataaggggagcagaaggtacacacccagaacattattatgagcaggtataaacaaatatacaaaagataaaatatgtattaactgcatcagtaagtaagaagcagcctattggggttgtttggagtctgtttccccatggaatcaccacattaataacaatattactacaggctaattctcttggagttatatttgtctttttctgaaatttgacaaagtgctgaatctggcagtgcttgtccaagtaaaaccaactccatacagctttrcaccagctctgtcactaagcccccaaaatgatttagagataaaatacccttggaaatctgtgcactacgacttctgataaagtgtcatactttggaaaatggacgacagcatatcagcactttctttgctaagatgttttaacatgtcatcaggggaaggtgtattaagcggaaccatgatgctatcactttcaaaaaact

SEQ ID NO: 288753 - DNA, 537 bp, Homo sapiens
aagcagcctattggggttgtttggagtctgtttccccatggaatcaccacattaataacaatattactacaggctaattctcttggagttatatttgtctttttctgaaatttgacaaagtgctgaatctggcagtgcttgtccaagtaaaaccaactccatacagctttgcaccagctctgtcactaagcccccaaaatgatttagagataaaatacccttggaaatctgtgcactasgacttctgataaagtgtcatactttggaaaatggacgacagcatatcagcactttctttgctaagatgttttaacatgtcatcaggggaaggtgtattaagcggaaccatgatgctatcactttcaaaaaactcctctctgttccctgaatctttcatggcatggactcaatgatatgatggaaaactgcatttctgagccctcatcttccaaaaagaaatgtcctggaggttctagccaggacaattaggcaataaaaagaaataaaaggcatccagagaaaaagggaagaattaaa

SEQ ID NO: 288754 - DNA, 537 bp, Homo sapiens
aagcagcctattggggttgtttggagtctgtttccccatggaatcaccacattaataacaatattactacaggctaattctcttggagttatatttgtctttttctgaaatttgacaaagtgctgaatctggcagtgcttgtccaagtaaaaccaactccatacagctttgcaccagctctgtcactaagcccccaaaatgatttagagataaaatacccttggaaatctgtgcactacgacttctgataaagtgtcatactttggaaaatggacgacagcatatcagcactttctttgcyaagatgttttaacatgtcatcaggggaaggtgtattaagcggaaccatgatgctatcactttcaaaaaactcctctctgttccctgaatctttcatggcatggactcaatgatatgatggaaaactgcatttctgagccctcatcttccaaaaagaaatgtcctggaggttctagccaggacaattaggcaataaaaagaaataaaaggcatccagagaaaaagggaagaattaaa

SEQ ID NO: 288755 - DNA, 537 bp, Homo sapiens
aagcagcctattggggttgtttggagtctgtttccccatggaatcaccacattaataacaatattactacaggctaattctcttggagttatatttgtctttttctgaaatttgacaaagtgctgaatctggcagtgcttgtccaagtaaaaccaactccatacagctttgcaccagctctgtcactaagcccccaaaatgatttagagataaaatacccttggaaatctgtgcactacgacttctgataaagtgtcatactttggaaaatggacgacagcatatcagcactttctttgctaagatgttttaacatgtcatcaggggaaggtgtattaagcggaaccatgatgctatcactttcaaaaaactcctctctgttccctgaatctttcatggcatggactcaaygatatgatggaaaactgcatttctgagccctcatcttccaaaaagaaatgtcctggaggttctagccaggacaattaggcaataaaaagaaataaaaggcatccagagaaaaagggaagaattaaa

SEQ ID NO: 288756 - DNA, 612 bp, Homo sapiens
tgctgttagtcagataggggttcctttataggtgactataaacttttcttgtgctgttgttagaatcctctcattgtcattaactttagacagtttgactataatatgctgtggagaagacctttttgcattgtatctgtttgagcatctttgagccccctgtatctggatgtctaagtcttttctaaacatggaaagttttcatctattatttcattaaatatgttttctaacattttcattctctctctatccttgaggacactgataatttaaattttggttgctttatgtatgttgtcccaaatgtcacaaaggctttgcactttcttttttctttttttctttatttttgtctgayttgattacattaaaagatctgtattcaagttgagattctttcttctacttgagcaagtctactgttaaagctttcaaacgtatttcatatttcatttaataaactctctaattccagaatctctgttttattctttttaaaagtatctctttttgggaaatttctcattcatatcctgaattgtttttctcctcctctgtttttcagaattctcttgtatctcactgagcttctttaaaatcagtattttg

SEQ ID NO: 288757 - DNA, 601 bp, Homo sapiens
acagtttgactataatatgctgtggagaagacctttttgcattgtatctgtttgagcatctttgagccccctgtatctggatgtctaagtcttttctaaacatggaaagttttcatctattatttcattaaatatgttttctaacattttcattctctctctatccttgaggacactgataatttaaattttggttgctttatgtatgttgtcccaaatgtcacaaaggctttgcactttcttttttctttttttctttatttttgtctgatttgattacattaaaagayctgtattcaagttgagattctttcttctacttgagcaagtctactgttaaagctttcaaacgtatttcatatttcatttaataaactctctaattccagaatctctgttttattctttttaaaagtatctctttttgggaaatttctcattcatatcctgaattgtttttctcctcctctgtttttcagaattctcttgtatctcactgagcttctttaaaatcagtattttgaaatctttgagattttgtgaatttctctttgattgggatctgtttctggagaattattgtgttcctttggaggtgtcc

SEQ ID NO: 288758 - DNA, 601 bp, Homo sapiens
acagtttgactataatatgctgtggagaagacctttttgcattgtatctgtttgagcatctttgagccccctgtatctggatgtctaagtcttttctaaacatggaaagttttcatctattatttcattaaatatgttttctaacattttcattctctctctatccttgaggacactgataatttaaattttggttgctttatgtatgttgtcccaaatgtcacaaaggctttgcactttcttttttctttttttctttatttttgtctgatttgattacattaaaagatctgtattcaagttgagattctttcttctacttgagcaagtctactgttaaagctttcaaacgtatttcatatttcatttaataaactctytaattccagaatctctgttttattctttttaaaagtatctctttttgggaaatttctcattcatatcctgaattgtttttctcctcctctgtttttcagaattctcttgtatctcactgagcttctttaaaatcagtattttgaaatctttgagattttgtgaatttctctttgattgggatctgtttctggagaattattgtgttcctttggaggtgtcc

SEQ ID NO: 288759 - DNA, 603 bp, Homo sapiens
tgtcctattaccttgctttttcctgtttcctgtgtttttacgttgatatctggtgtaacagtccaagtttttgaatttgttttcataggggaggactttttcctgaagatataagatatgtacatctacttttttgtgacgagatatatatatatggcactatggctttgattttgggtgcatgcagttagtccttatatgatttcttcagctgtaaacagtgtcaatggtgtctgtgatttcctcagtggcttagggtgcagttattagtaagtctgtggtgaagttttactggggactaagatgccagatggccagtctgcaggccttastggtgggagcagtgagctgaacatgcctgtacttaaacccacagtatatgttggctctggtgttagtgggtctaggtttgccaattctagggcttccagttggcttgctcacatgctggtggtggcagcagtgggccaggcatgtgggcaggttctcagaccactgggcagcaggtatgatgtgggcaatggcagtagcagtgatggggcagcccagtgggacccaaatggtccatgctgttgttcctggtgtctgcaaaagtctaggagt

SEQ ID NO: 288760 - DNA, 571 bp, Homo sapiens
ttcattaatggttttagaatctctaaaactcactgctgcttctgaaaattaacattttcctcattcttgcagaaacattcaccaagaaatcacaacaccagggccgtgataagactttggactctcagcctttaaaaagagtatgagaagtaatctaacactacagcrgttaacacaagaatgagcctgaagtcagaatttctccttgcacaattatgattgtccaaaagtttggttttgcttatgttgaaaaagaaagggtaaagacaaaaattacttaaaggaaaaaaaagaagctctaaaaagagacaatagacttaaaatccttaagcctcaataaggcaggcacaaagatgaaggaaccatcttgaagcactacaacattttgctgaaacaccagtaactacagtacctaaaccaccttcctatcctttcctcctccacttctaaagataaatttaaaacaaatgctagttaaataagaggagctaccagtgcaattaaatacagaatcaagttaaaaatgaaaacatgggaattccaatactgtaggtctttaaaaatataatgc

SEQ ID NO: 288761 - DNA, 576 bp, Homo sapiens
cttagtggcatttctattaataaggagaaagttggaaaaggtgcctgaatcagtttcttaggctgctgtaacaaagtacctcatactggctggcttaaaacccaggaaacacatcctctcacggagctgctgagagggactctgctccatgctcctctcccagctcctggtggttgtgggcaatgcttgatgttctttgcttgtggcagtgtaactccaacctgtgcctttgccttcacatggtcctctttactctggtgtgtctgtgtcccattttcagtcttcttaaagacaccagccacaattaatttggggcccactcaaatccactatgagcacagcttgacttgattacatctacagagaccctatttccaaataaggtcacattcacaggttccaaattcatcacgaattggagtgggggcrcacgattcaacccagcacagggcctgtttgggagcagtgatcacagggtcaacactcttaaattggacataataaagttcctctaggaggacttttacagaaatgaaaagaataatagggattcatgcacattttccacatatagca

SEQ ID NO: 288762 - DNA, 593 bp, Homo sapiens
tttttgagtttcaacttactggatcaaatgttttagaaaggaataaaatgcattcattataaagctgaatcattccaggccaccaccagggcatcacaatacgtctccatgtttgagtcagcaagtcccagaacccagctttcctcttcctcacagcccaggccactcacaactgtgtgctcagagttctccccctcctctctcactcctaatcaacyccaggtttcccaaatcagaagcttgcttggaaattgccttgtgccactcactaatgtgccctaccaccacccccagacacacacacatcccacagccccttttcttcttaatcatggtaacctagcatggggttagagttaaggcacagttaagaatgtatctttggcaggtacaacttcagccgtttggggaggatgcactttctttttggggacaacttctttgagagcctctggcactttaaagatactaataattttacatttagaagttacaaaatcagtacaaacaggaaacacatttatacaagaaaagacatttttccaccccacacagcatgggttaccacggttaagaagaaatcattctcagcc

SEQ ID NO: 288763 - DNA, 562 bp, Homo sapiens
aagtgcatgtcacagagtgatggcaagcatgggtgtgcaaatatgtgcaagctggcattaagggaagatgttctttagatctgagcttggtaaagtgaaagaagtggttagtccaacaaaaacaatttccttggccatttctccccttcaggtttattcacaaagaaagcaccatttaagaaacaacctgatatatgtgcattcycctttcccaatttacctaatgaatagtgccacataaacaaatggtccttccatccttttctttggaggtgcagtcatggcttaataggttcacattttcaagctcagcttataaactgttgagctaaacctacagatagaaaatacttcaaccaggcggtggtgagtatacccttgttatgcgacatacaccattggctttagaccagaagttgattctcaaaatattaggtatgtaatcctcacccatggctacccatgagaattacctagcgagctttaaaaaaactatgtgatgccagagcttgcccctagaaatttccatggttattcaattattcaggtttgcgaattactg

SEQ ID NO: 288764 - DNA, 551 bp, Homo sapiens
atcatagaactatattcctatggattttcagttcaatatcatggcttgttaagggagagagattgagggatatggtgagggagggtcagggagaagagaaagacgttgaaagagagggtaatttgctgtttgtccagtgatcggatagggcaaaaataaagatagttatgacttgagctcttgataaatccacatatttttatttttagctgatgatagtgtaccgaatactgaataatttttaaaaacatctaaatttttacatcccatctaaaaaatcgaaagcatagtgtttatagttttgtttttctaagaagatagagtgacttttttgaggaaaagcctatttcaagagtaacatcttcatcttatgctatrtaacaatactaccactgaagagtttcagttgatgcatttgtgtagcttcataaaaaatgggttaacatggtgtcagggaactctaatgattagatatggccaagaggttaatgtttcccacctttccctccacattccttacatcattatcacaattaagttgcccagtcagt

SEQ ID NO: 288765 - DNA, 536 bp, Homo sapiens
caatgatgcaatagttaataactgctaagccaccatataggggaagacagtgcccaagcagatgagccctgcaatgggatrttttactcctggggcttctgtcgactctggaagggacagttgatggttaagcagctctttttccaacatcacagggccagagtgacaaggattgaggtctaagactctgcaagagcaaaaggccctcatacaccctttggctctgtgttaggattccatagggcagccttgaggggtttgcaactcagcttggaatcatgacaatctcagatatcaagtacctccagacacctggcagaagaaaaggaaactcccttttggagtttgggagataacatcttcctcatcctcaaattatgttttcaaatatgtgtccagggcaccacccaaaataatcaagcataagaagatgggacaactgcaaagacagatgacaaataaaaagatggcaaaagatctgccatgcaaacactaacccagaggaaactggagtctctctactaagacaaaagcag

SEQ ID NO: 288766 - DNA, 1073 bp, Homo sapiens
caatgatgcaatagttaataactgctaagccaccatataggggaagacagtgcccaagcagatgagccctgcaatgggatgttttactcctggggcttctgtcgactctggaagggacagttgatggttaagcagctctttttccaacatcacagggccagagtgacaaggattgaggtctaagactctgcaagagcaaaaggccctcatacaccctttggctctgtgttaggattccatagggcagccytgaggggtttgcaactcagcttggaatcatgacaatctcagatatcaagtacctccagacacctggcagaagaaaaggaaactcccttttggagtttgggagataacatcttcctcatcctcaaattatgttttcaaatatgtgtccagggcaccacccaaaataatcaagcataagaagatgggacaactgcaaagacagatgacaaataaaaagatggcaaaagatctgccatgcaaacactaacccagaggaaactggagtctctctactaagacaaaagcagwcaatgatgcaatagttaataactgctaagccaccatataggggaagacagtgcccaagcagatgagccctgcaatgggatgttttactcctggggcttctgtcgactctggaagggacagttgatggttaagcagctctttttccaacatcacagggccagagtgacaaggattgaggtctaagactctgcaagagcaaaaggccctcatacaccctttggctctgtgttaggattccatagggcagccttgaggggtttgcaactcagcttggaatcatgacaatctcagatatcaagtacctccagacacctggcagaagaaaaggaaactcccttttggagtttgggagataacatcttcctcatcctcaaattatgttttcaaatatgtgtccagggcaccacccaaaataatcaagcataagaagatgggacaactgcaaagacagatgacaaataaaaagatggcaaaagatctgccatgcaaacactaacccwgaggaaactggagtctctctactaagacaaaagcag

SEQ ID NO: 288767 - DNA, 581 bp, Homo sapiens
aaagtagcacccaacttcctggggaaatgattcagattttagattttctaaaatactgaaatgacaaaatcacaccaacaagattgcctctcttggtacgttaaaatagcacagaatatcagagtactgaaaacccagcatcgccatctctaggtaatgagggggaggcgccctgagagcaggaaatgacatcttcatctctggggaggccacagagcacagcagagcagctggctcattgttgtcttctgaatgaacaaaatcagaataccagttcacacacagaatcgtaaagctcccacacaggagtgtagagggtccacatatagaaacatttgctgtataattgaagattatytgtgtcagggaggcagtgtgaaaagaataagggccatactgcctcttacaactggtgacttcaacacatatgctctctcctgaaggcttaataaaatgataggatagtagtttgtttgtttaaaggcaagtcctataaactgaaaaggataaaatgaattggaactattgtggaggagtaacaagaaaatttgagaaaatggaaaagagatgcagatgagtga

SEQ ID NO: 288768 - DNA, 508 bp, Homo sapiens
gtgcaagaggcctagcttttggctgtctcagctttttacatgccttcctcactaagcttaatcatttctagcttttgatttaaagtgagagatgtgtgactcctcttttcacttgaacattttgagaccattgtaggattattaattggcctaatttcaatactactgtgtttcaggtaatagggaggctttaaggagagggagatagatgaggattggccagtggatggagcagtcagaacatatatacacaatgtttattgactgtcttcttacatgggcatgtttgtggtgcccccaaataattacattaggaagataatagatctctgaccacagatcatcataatggatataataatagtgaaaaggtttgaaatattgggagaattatcaaaactttccagagacatgaagtgagcatatgctgttggaaaaatgaacccaatagacttgctcaatgtagtgtyaccacaaaccttcaatttgttaaaaaaaaaaaaaaggc

SEQ ID NO: 288769 - DNA, 558 bp, Homo sapiens
atgaggttagccttccaagtaattatatgtgtattttaccctacattttgaaataataattttgatgggtataaaattatgatgtcattttctctcagggttacaaatatatttctctattacctgtttgtgttcagtattattaacaacaataaactaccaatttgaaggtcatttctttgtgtattatctacctcttcctctggtaacttttacatttctttcattatcccttattttcaaaaatgtcagcaaaattgtctaaacgtggtcatttaaatccagaggtattagtgsatcatttcaataaaaaactataactttcttcagatctgagaaattgtgatcattatatttaaagttattctctctagtttatccattcttcacttctccccattactattaataaatattgaaacttctagtttttattctccacagttctccattttttaaaataattttgtctttttggactgcagtctctgggaaataaaacacttggcttggacaatcagcctactaatattttcattggcagtgtacaattttgca

SEQ ID NO: 288770 - DNA, 605 bp, Homo sapiens
cttcattcattcactcaacaggtaagaagcatttatttgccaatcatcattccagattggaaaagaaaataaagaatatgtgtctcattgtctatacagtgatcttttttaagacatagggtaactcaatggtgaaaatgtttttttctaatcttttctatgtgtcagaatgcttgactactaaactttctggtcatctctggtgatggaagcaagtgattgtttcattgcatcttctttaaacataaaaataaaaaccatggcaaaaatctagtaagtcatcttaattttttctgctcatacatatttacattttgtttggaaaatatatacacaattttatagttaatgaacagtttttatttaacgatcttgtgcaaaaaaaattttatggcatttatcyatttactataatgcttctagtaccataactttgcccttcctctaataggacatctaatgttttctttttccctttcatgttatctattctatcatctttacattttatgcttatttctctgatggtgttatataatttttcaaataaatcattttaattttataatatagtaatgtttcctaatcaaattgatggtatgaat

SEQ ID NO: 288771 - DNA, 635 bp, Homo sapiens
ccataactttgcccttcctctaataggacatctaatgttttctttttccctttcatgttatctattctatcatctttacattttatgcttatttctctgatggtgttatataatttttcaaataaatcattttaattttataatatagtaatgtttcctaatcaaattgatgktatgaattagctattcatagaaatgagtttttaaagtgaatgaaggggaaaatgtgaaccaaagactatcattcagaaagaagtggaacaaacactccacttctaagccattctaaatctctcagaaacgcccctggcatcttgctgatactaactttccaaaaggaaattccatgtgaaatgctaatagaataatctggaatcatctgtaatattctgctgtttattttataatattttgtgtgtattgtcacttaatagtgcctgatctatatatgattttatctaatgtatattttggaaaatgcctgataaatgagatttcctattgttatattttttcatacaatgtaatttgacctattctcacatttagaagataaataatcctttcatgtataaaatatttttaatcttactttaccatttagtcccagtttatgaaatatttatgtaaaaaat

SEQ ID NO: 288772 - DNA, 635 bp, Homo sapiens
ccataactttgcccttcctctaataggacatctaatgttttctttttccctttcatgttatctattctatcatctttacattttatgcttatttctctgatggtgttatataatttttcaaataaatcattttaattttataatatagtaatgtttcctaatcaaattgatggtatgaattagctattcatagaaatgagtttttaaagtgaatgaaggggaaaatgtgaaccaargactatcattcagaaagaagtggaacaaacactccacttctaagccattctaaatctctcagaaacgcccctggcatcttgctgatactaactttccaaaaggaaattccatgtgaaatgctaatagaataatctggaatcatctgtaatattctgctgtttattttataatattttgtgtgtattgtcacttaatagtgcctgatctatatatgattttatctaatgtatattttggaaaatgcctgataaatgagatttcctattgttatattttttcatacaatgtaatttgacctattctcacatttagaagataaataatcctttcatgtataaaatatttttaatcttactttaccatttagtcccagtttatgaaatatttatgtaaaaaat

SEQ ID NO: 288773 - DNA, 469 bp, Homo sapiens
cataatctctccgaagaggattaagtggtagatgaaataagcctaatacaatgtaatgataatmtagatggttatataataaaatgttgtgaataaaactcactgaatcaaatgccagattggaaaaaagtattttatgttgatctaaacttattatcctacaaaacaacttttaaggaaaaaaagaaacaaacctgggaacatgttatgtgtttgatattcaaagaggatcaacagggatataagtatgtagaccaaaacaagtcttctttgtaatgcatcgtctgcaacatggctcatctccttgctactaatcaaaaatttaatgtgtttttggcaaaaagaaattactcacccacaagagaaatgcaacttatctgaagttaaataatgaaaaatcttacagtgcacccaaagttttggcaagttaacacctcaaaacaaattttgggatgcttccgtgtgatga

SEQ ID NO: 288774 - DNA, 469 bp, Homo sapiens
cataatctctccgaagaggattaagtggtagatgaaataagcctaatacaatgtaatgataatctagatggttatataataaaatgttgtgaataaaactcactgaatcaaatgccagattggaaaaaagtattttatgttgatctaaacttattatcctacaaaacaacttttaaggaaaaaaagaaacaaacctgggaamatgttatgtgtttgatattcaaagaggatcaacagggatataagtatgtagaccaaaacaagtcttctttgtaatgcatcgtctgcaacatggctcatctccttgctactaatcaaaaatttaatgtgtttttggcaaaaagaaattactcacccacaagagaaatgcaacttatctgaagttaaataatgaaaaatcttacagtgcacccaaagttttggcaagttaacacctcaaaacaaattttgggatgcttccgtgtgatga

SEQ ID NO: 288775 - DNA, 587 bp, Homo sapiens
gtctatgctgacttctaactttatatagataagggattccactgraacaaaaaagaagaaaaacaacaacaacaacaacaagaatatatacactactgtaactcatgtgatatgagataatttgaatagtccttgtaactattaagaaaattgaattcatatttaaaactccaaaaatcaaaatctacaggcccagatattttcattggagaattcaaccaaacaaataaatcaggattaataccagttctatataatgtgttcaagaaaataaaaaagaagggattgctttcccaaggagaaagagcacttcctagtactttttatgaagccacgattaaccttctatcaaaatcagaaaaagagactgcaacaaaagaaaatagcagatatttctcctaaatacagatgtaaaaattcttaacaaaagcttaggaaatagaattaagcaatgtaaaaaaagaagaaaataccatgaccaaatggagtttattctagggatgcaaactggtacagcatttgagaatcaatgaataaaacctactttagtaacaggctaaagaaaaaaaaattacataatcatatga

SEQ ID NO: 288776 - DNA, 587 bp, Homo sapiens
gtctatgctgacttctaactttatatagataagggattccactgaaacaaaaaagaaraaaaacaacaacaacaacaacaagaatatatacactactgtaactcatgtgatatgagataatttgaatagtccttgtaactattaagaaaattgaattcatatttaaaactccaaaaatcaaaatctacaggcccagatattttcattggagaattcaaccaaacaaataaatcaggattaataccagttctatataatgtgttcaagaaaataaaaaagaagggattgctttcccaaggagaaagagcacttcctagtactttttatgaagccacgattaaccttctatcaaaatcagaaaaagagactgcaacaaaagaaaatagcagatatttctcctaaatacagatgtaaaaattcttaacaaaagcttaggaaatagaattaagcaatgtaaaaaaagaagaaaataccatgaccaaatggagtttattctagggatgcaaactggtacagcatttgagaatcaatgaataaaacctactttagtaacaggctaaagaaaaaaaaattacataatcatatga

SEQ ID NO: 288777 - DNA, 587 bp, Homo sapiens
gtctatgctgacttctaactttatatagataagggattccactgaaacaaaaaagaagaamaacaacaacaacaacaacaagaatatatacactactgtaactcatgtgatatgagataatttgaatagtccttgtaactattaagaaaattgaattcatatttaaaactccaaaaatcaaaatctacaggcccagatattttcattggagaattcaaccaaacaaataaatcaggattaataccagttctatataatgtgttcaagaaaataaaaaagaagggattgctttcccaaggagaaagagcacttcctagtactttttatgaagccacgattaaccttctatcaaaatcagaaaaagagactgcaacaaaagaaaatagcagatatttctcctaaatacagatgtaaaaattcttaacaaaagcttaggaaatagaattaagcaatgtaaaaaaagaagaaaataccatgaccaaatggagtttattctagggatgcaaactggtacagcatttgagaatcaatgaataaaacctactttagtaacaggctaaagaaaaaaaaattacataatcatatga

SEQ ID NO: 288778 - DNA, 622 bp, Homo sapiens
aactttctccattaatttaaatgcttagtattttgtcaacatggaacaatagttgctcaacaaatgtaaatttactcactcttttccttcctgtttaattatgcaaataattaaaagatattaaagatttaacagacggagcaagcctgaaagtttaagtcatgaaattttgattccttgttgtaataaaaaggataaactactaaaagataagctgaatgaaaggaagaacaytatgcctctgagaaagcattgtgagctttgacatgtacctgaggacaaaatgtatctggcactttctaatcccagagagctactttccacctatgattaagactctcagagacagaccatatttatattcctaattaatgccttttatgttttcctcctcagctgtcagtagagcaaaactttgggaactcctctgcttcttgtcagaaatgacaaaggaaatcaaatttggcatgctctgaaagtaacacaaagattaacttcatggggaacacgttgtcaaccaagtcagaagctttaagggaaacttcgtcttgacactgactttaccagtgctttccattgttcgtatctcacggaacacagaatctacactgctggtctaaac

SEQ ID NO: 288779 - DNA, 594 bp, Homo sapiens
tccatagtgctccgctaggcaggggccacagttggcagatatgccttatgcttacttggtctgccctaatctgctgtccacgtccttcccagggaagcataggtttctgcctgcctgcagagtttaggcagaagtgggaccactgggctggaagcactagcaatgtgacccatctggccacaggaggtggaatgagtgaagtttcctgccctgccatctggtgcttccagtacaaaaggtggctgtgtaccttgacaaattcaggtagaagaaagactgctcagctggaagctctagcaagcataaacttcctggctaccagaggcagrggtaggtgaggtcgcccaccctgccatctggctgtttcctgggacaacagaaggctgtatcctctggctgtgttcagaagtaggaccactgggccagaagctctggcaggtgttgcctgctaccagtaataagggagggtggggtcacacatcctgccttttgggtgcttcctaggacaataagaggcttcagctgctggctgagtaagcagaagtgggactgccgagtcgggagctggcacagagccttgtctggcaaggaggg

SEQ ID NO: 288780 - DNA, 594 bp, Homo sapiens
tccatagtgctccgctaggcaggggccacagttggcagatatgccttatgcttacttggtctgccctaatctgctgtccacgtccttcccagggaagcataggtttctgcctgcctgcagagtttaggcagaagtgggaccactgggctggaagcactagcaatgtgacccatctggccacaggaggtggaatgagtgaagtttcctgccctgccatctggtgcttccagtacaaaaggtggctgtgtaccttgacaaattcaggtagaagaaagactgctcagctggaagctctagcaagcataaacttcctggctaccagaggcagaggtaggtgaggtcgcccaccctgccatctggctgtttcctgggacaacagaaggctgtatcytctggctgtgttcagaagtaggaccactgggccagaagctctggcaggtgttgcctgctaccagtaataagggagggtggggtcacacatcctgccttttgggtgcttcctaggacaataagaggcttcagctgctggctgagtaagcagaagtgggactgccgagtcgggagctggcacagagccttgtctggcaaggaggg

SEQ ID NO: 288781 - DNA, 529 bp, Homo sapiens
aagctacaaatatggattcattcatacattaaaaatattcataaattatttatatgttccaatcccttttatttttcttgatattgaaaataataaccaaaaaagacagaatcatgaccttcaaagaaatattagtctaatgagtccttaattaatataggtttagtattttaaaaaggaaagaggattgcaggaaaactataaatgtaacagtctgaaataaggaggatgaactagctaaagaaagtagccaacaacctttaatataccaattgatagtataatagaagtttaaagtttacaaaaggagtaggaactgcttaaaggtgaagataatactattaaaatgtgaatgcaaattaaattatctttatmaagtgttaatgctacctctatatcattcacatttatgtgttcacttttaagtgttgttatgagttaaaaaatgttctgtatatgagttagaaaaatgtcatcatcgtggaacatataactcaactaagccttttcataatcatacgtgtgatgc

SEQ ID NO: 288782 - DNA, 529 bp, Homo sapiens
aagctacaaatatggattcattcatacattaaaaatattcataaattatttatatgttccaatcccttttatttttcttgatattgaaaataataaccaaaaaagacagaatcatgaccttcaaagaaatattagtctaatgagtccttaattaatataggtttagtattttaaaaaggaaagaggattgcaggaaaactataaatgtaacagtctgaaataaggaggatgaactagctaaagaaagtagccaacaacctttaatataccaattgatagtataatagaagtttaaagtttacaaaaggagtaggaactgcttaaaggtgaagataatactattaaaatgtgaatgcaaattaaattatctttatcaagtgttaatgctacctctatatcattcacatttatgtgttcacttttaagtgttgttatgagttaaaaaatgttctgtatatgagttagaaaaatgtcatcatcgtgraacatataactcaactaagccttttcataatcatacgtgtgatgc

SEQ ID NO: 288783 - DNA, 560 bp, Homo sapiens
tagcatgaaagcaaatttttataaggcacttctgtgaggatgtggtatcttctgtaagacgagatgttggtcaaagatactggtatcttctctcatgcatgatctgcagtgatataggacaatagataatagtacccacactagaggtgcagtctagttgcatactgaaacagaatattcatgttttgaaatgaggtttgctgagtccctacactttgactcaatatctctgatggcagagcccccaaattggcattttttggtcatttttgggggagattaagtataatttgcatactgtaaaattaacatttttagtggaaagttctgtaagtattgacatacaccaaatacatgttaagcaagcacttaagatgattattttattcattamatttgattaccactgactacataagtggttctcaaacttcactgtgcatcagaattacatggagggcttgctaaaactcaccctgatgttatccactctctgtttttgattcagcaggtctagggaggggcccaataatttgcattaatgacaaatgccaggtgat

SEQ ID NO: 288784 - DNA, 556 bp, Homo sapiens
tgctagatctgtcatcagcatacccaggatagagttccaccatatgacacatcaagacatctcatggccatctcccagacctcctaattaaccatagtgatcccttaacactcagacccctaacttgttagatggaactctcccctacttaataaatcctacctaactgtctctgccactgttatctggacctggaaaattggtatttatacctcttagtggcttaatggcactatctttcgtacccatggttgtgataataacacaaaagcaaaagtttccctgtgatccaaccctagttgccaagttcccaaggcagygttgaggaaaccacacatggtgcctccttcagggccaatacacgcaaaggagaaacaacttcctgacctgcgaaagtggaagtaccagcctgttctagaaaataagagctgtttgatcatccccactggagtttgggaaaaaatatttctataaacaaaacttggcagcagaggacagatgttacaccccacagggcctcaatttgtgccctaactgggctaatttttgcctatgg

SEQ ID NO: 288785 - DNA, 556 bp, Homo sapiens
tgctagatctgtcatcagcatacccaggatagagttccaccatatgacacatcaagacatctcatggccatctcccagacctcctaattaaccatagtgatcccttaacactcagacccctaacttgttagatggaactctcccctacttaataaatcctacctaactgtctctgccactgttatctggacctggaaaattggtatttatacctcttagtggcttaatggcactatctttcgtacccatggttgtgataataacacaaaagcaaaagtttccctgtgatccaaccctagttgccaagttcccaaggcagtgttgaggaaaccacacatggtgcctccttcagggccaatacacrcaaaggagaaacaacttcctgacctgcgaaagtggaagtaccagcctgttctagaaaataagagctgtttgatcatccccactggagtttgggaaaaaatatttctataaacaaaacttggcagcagaggacagatgttacaccccacagggcctcaatttgtgccctaactgggctaatttttgcctatgg

SEQ ID NO: 288786 - DNA, 259 bp, Homo sapiens
ttgcctcttgcttgtttaacatccttgtaaagtttgtgtctcgtagattacaattccatgtaaaaatgatgctgrcacaaggcttccaacccatcccactttctgacctggagaataaaagcatcatgtctttgggccctttagatcaggtatccagagatttttactcttccaatgctaggcagggccaatacccataaaatcagcagggaaaacttacaaagaaaaaaaaaaatagacctttacccttctgcagccc

SEQ ID NO: 288787 - DNA, 553 bp, Homo sapiens
tggtagctgtggatttttaacatattaaagtctgaaagcagaagaaagcagggttcagtataaaatgaacaaataattattgggaaaatgcaccttagatggagaagtcgctatgcaagagtacagattcaaagtttagttattatgattttaaaaacaacctcttctaaaaagttaactgattcaagatcttagttcactcattcaacaaaaactcatctttttaggctcggtttccgttcttcctctgcaaggaagatttctcactagcagagtcctctgtctctgaaatcatgttgcattgtaagttaastaggcaatgatttttatgtgcccaccatgggcaaggaatacattcattgctagcaggggtacaaagaagtatcagaaataattaactagcatcacacagtttagttgtaaaatgttctccaatttttacaggtatgcatgctttattgtcattttcaaatgacaaaattcttgagggaaaaacttcatttatacaagggataatgagaagaatttgttttttgagtggcatctctgatga

SEQ ID NO: 288788 - DNA, 573 bp, Homo sapiens
ttcttcagtcttaaagtaagagggtttttctttcatcccagtattaactttttgggttcattggattctatctcctctgacctcctccctagatgtaaatttttttctttctcttgtctctgattccctctcttcagcctacagacatgatcaaatctaatcttccccatctcctattgctttaacctcctcccaactctcatcttatctaccttggccgyttgtgtgcagccagccctcttttacttaccgtcttcctccctgctcaccatgcactgggagttagtaaaagaaggccacacctattccaggtaatcacctaggagctcatgtcctgtccttttcttttctcttctagctcatattctttgttctctattgcttggtttttcaccctgccttcagagagctgtttctggatactcaatttttggttttatggtttccttgattgtagctttcacatactcctcacttaaactatgtctcaaccttagtttttgggccaaagtttggccctttctgccaggagatggagtgttagacatttttctgaactatgaagccttttaa

SEQ ID NO: 288789 - DNA, 566 bp, Homo sapiens
cacaagggtactgagaaaaggtaacagacacatttatatatgtggaaccaggaatctttctgatgactttcagaaagggtggacatacaaataaaaatcaaccttcttcttggtgaggatttgaccctggttccatattaacccaagagctgataagcacaaacctggagtccagtttttatgcaaatataacaactctgcttataccttgaattacttgtatgaagcggggaaaattttttactctctctgaacccataattaaaaaaaatctgtatgacttggataataaacccacttcctagaatttttatgaatatgaaatattgtgtgaactacctagtatgttatggagcacatggtttgtgtttaatatgtggaagctagtattgctattattgttgttgttataaacaatagcacttctatctacataattctcaaactttccccctgaagctcaagatactttagtacatkaattattattaacttcaatgcacagattgagaaactgggaaaaaatatgcaagccgcagagtggagaaagaaaattccaggtgtcc

SEQ ID NO: 288790 - DNA, 581 bp, Homo sapiens
ttggcctttcaaaagggaatctgtcattaaataatattttcaaggaaaatacatgtcaccaaatacatttatttattcagatgcaaaaaaggtgaaataaactctcaatgtaactccaccctcttccctcagaaaattattacataaatctcactattttccagaggataaaccttttaaaatagaagagaaccagtctgacagaaaagtttttattactgaaaattgcaaccttggcttatctttgaattttcttctagaaaacaataaatacaatcagcgccttaaggttttggaagggacttcttgcgtaaatcaatacatgatacaaataaaaaggaagacactataatttcttgactttttgaggcacatgsaagaattagctcatttcctttgtgctttgagcaaatcttattcatagctccttattgcccatttgctgaagatgatcaatttaagaacgtatttaattatacattggaacagggactttcaaaagttcataagtatgtacattatccatgccaatatataaataattgcaagttaaatattttcactttttgtggcatcataat

SEQ ID NO: 288791 - DNA, 570 bp, Homo sapiens
aaccacatttggtacagcagctgcaattgaagtcactgcttggttaagcttgcaataatccactgtcattctccaagatccatctatcttctgcacaggccaaataggagagttgaatggggatgtggtgggaatcatcacccctgtgtctttcaagtcctcgatggtggcaygaatctccgccttctctccagggatgcaatattgtttttgatttactttttctaggtagaggaagctctaatggctttcatttggccattcccaccatgacagccctcactctatcagtcaggaagccaacgtgggggttctgccatctgctaagtatgtctctgccaattatgcattctggcactggagaaatgactataggatgagtctggggacccactggacccattgtaagtcagacctgagctaaaactccattaattacctgacctccataagcccctactttaactggaggaccacaatgacgttttgggtctcatcgaatcaacgtcagctcagagccagtgtccagtagtctcagaaatgtctgataatttccctttccccaatgca

SEQ ID NO: 288792 - DNA, 559 bp, Homo sapiens
agtacctcaataatgaaataatttgtaaaacaaactccagtgacattgagtttgcctatataacaaacctacacatgtaccccaaacctaaaataaaaatttaaacatytaaaaataaaaataaaaggactgcatttcccagtctcctttgcagctatgtatgccatgtgactcagatctagctaaagaatacaagcagaagtaaaatatgcctgccaggggacactaggcaatgtctggagtcatttttcattgtcacaactggggacagggaggtgacattcctggcacctatcgagtagaggccagggatgcttctaaacatcctataatgcacaggacatctccccacaacaaagaattgtctggtccaaaataacaatagtctgatggtcagaagtcctgacttaaaagggaaagacgcatccatccccttctttttcccttctgtcaggttggaattgggacataggagtgatccatattgggccacagagagagaagcaacatcctggagatgacagagcaaaacagcaggctggtgcctcataacttcaca

SEQ ID NO: 288793 - DNA, 511 bp, Homo sapiens
tttctcttttttcctgaccctttcacagaggcaaaataaaacataaattaatatttcaatatatgattctgtcccttttcagcttctctctaaacttgtcatcagggtagctagcaagaggcaagctggtctgtttcctcaccatctgccctgccctttcatcattgaaagactttggaagagtctctaatgggaacactggtgtccccttcccagcttcaccaaggcacaacccagcacacactttctttctttcttttccaatataaagaaacaattaaaatcagcttagctcacagcaaaactagcttttatttagcttgtgcttccttttataaagcaggttctttcttgagcctcaccaaagtcctgtgggtgagccttttaagggatatcccatggtgaagccaccatcaccccaatcagggctgtcttcatgataacttmtgagtgactgtgaccatttctctaccctgaaggccccttcagctcctcaaactcaatgcatcta

SEQ ID NO: 288794 - DNA, 394 bp, Homo sapiens
ctgcaacttctgcctcccgggttcaagcgattctcccacctcagtctcccgagaagctgggattacaggtgcgcaccaccacacctggctaatttttgtatttttagtagaaacgggttttcaccatgttggycaggctggtcgcaatctcctgacctcgtagttacacaaatttttgttaggtattctgtcacttgcaactgaaagaatcccaacaggtacagagagttttacggtttgaaaaaaaaaatctgacaggagaaggaactgacaggagaagtttcacttttaggacctttttatttctctcaaggattaggacatcatctgcaaggttcctgtggcaagaaaacaatgagaacagaagttctgccattgtctgatatacatgtgc

SEQ ID NO: 288795 - DNA, 394 bp, Homo sapiens
ctgcaacttctgcctcccgggttcaagcgattctcccacctcagtctcccgagaagctgggattacaggtgcgcaccaccacacctggctaatttttgtatttttagtagaaacgggttttcaccatgttggccaggctggtcgcaatctcctgacctcgtagttacacaaatttttgttaggtattctgtcacttgcaactgaaagaatccyaacaggtacagagagttttacggtttgaaaaaaaaaatctgacaggagaaggaactgacaggagaagtttcacttttaggacctttttatttctctcaaggattaggacatcatctgcaaggttcctgtggcaagaaaacaatgagaacagaagttctgccattgtctgatatacatgtgc

SEQ ID NO: 288796 - DNA, 561 bp, Homo sapiens
attcaatgctattcaatgctaagacttgaggccagagctgcaaatggataaaccttacacatttcacacatcagatattctatgaaactagctactacattgtccataagcaatttgagtgaagatttctgacctagcagagcatctaccttgagatatttgttgaactacactaactcttgcctsagggcctttggacgcaatgttccgtttactttgaatattctagcacctcttgttgccttcctattacccatatatcccataagacctgaaatatttcctacaatttcccatggcaatgaaaggatcagctgtcagtctagataccactttttgtggaaagtcttctctaaccaccacgccacccaatccaaccattccacagttccctattcttcccagttacagccattaccaatctggatttaaattttctatttactatttacttacacaagagtataagttccgtaaggacatatctgctgtgtgcagatatgaagtgctcaataaacacttgttgaaagaagggagggagagaaacatagatggatagtt

SEQ ID NO: 288797 - DNA, 561 bp, Homo sapiens
attcaatgctattcaatgctaagacttgaggccagagctgcaaatggataaaccttacacatttcacacatcagatattctatgaaactagctactacattgtccataagcaatttgagtgaagatttctgacctagcagagcatctaccttgagatatttgttgaactacactaactcttgcctgagggcctttggacgcaatgttccrtttactttgaatattctagcacctcttgttgccttcctattacccatatatcccataagacctgaaatatttcctacaatttcccatggcaatgaaaggatcagctgtcagtctagataccactttttgtggaaagtcttctctaaccaccacgccacccaatccaaccattccacagttccctattcttcccagttacagccattaccaatctggatttaaattttctatttactatttacttacacaagagtataagttccgtaaggacatatctgctgtgtgcagatatgaagtgctcaataaacacttgttgaaagaagggagggagagaaacatagatggatagtt

SEQ ID NO: 288798 - DNA, 616 bp, Homo sapiens
acaaactaggtaagacagaggctgaaaattatcctttggatttaagagcaagaaaatcattattgatcttagtgaaagcagtttcagagaaatagtaggagaagcaagactgaggaatgaatggcagataagaaagcaaagatagggagataaggataaagatacctctttttgaaagtttcaaaggaggtgagatataaggagagtagaaggagagatgtagcattgagggaaagttttttataataattatcttagcacaggatctctaggagcctgaagtaggactaaacactgttctttttctgtgagattcaagcccagggaagtgagggtgaggaaaaggggaaaattggacaagatgagatgcaaagctgtgttgaagcactgattgccacttcacaatgagccatgaagaaacaraacaggttgctcatcacgtgtatttgcaggcctttttgagggactgtgagaagaaatttcacctcagagtagtgcgtggagaggagatgaattgagagtttaccttatgctttcctactctggaatctcactggtcaaggctcatctcatagtttgttttgcttttctaattccttgaggtgaatcattaggt

SEQ ID NO: 288799 - DNA, 515 bp, Homo sapiens
tttaacttttcaggatagttttcaaaggggagtcaacacggcaacttattagtcatctgctttattcttstacccatcctaattgttaagaggaggaaggtagagaaggacactgtgtagaaaatgaaaggctgtcatagtgaacactgtagtacatcacctagataccacctcacccaaggtcatgctcccaccccaggagcaacctacatccaatgactaatctatgcatgggtgcaaagtccaagcctcattgtggagccaactgtgcccccctcatgcatagaccatcccagcccctgaacccaaactgactgcccactcctgcttcctcactctgtcatagacattattctcatgggacaagaaagaaggttcttaaatgggattatggagccaaattgccaactgaccagttggtgttgatcacttatggtagatggagcacaaatagcccctgacatgtgtcagtggtactactgttaaagttgccaccactggagaactgaaattgt

SEQ ID NO: 288800 - DNA, 466 bp, Homo sapiens
cccagtaatcttaaaagttttcacccagaaaagaaatccaccaaaaccctgaaggagttgttcccagaacttttaccagcaaagggatctgagcagcacaagcagtaaactttaatagacattttaatgtgctatccagatcaccccttcgcttcaggccagamacactcattcccccagctaccatgactattactgatggacagctcacagctgatcgttcctcgagatattgccctcagctaatgagagccacctcttccaatgtcatgctcccttcccagggcaactggcatcaaatgactgatcaatacagggctacaaaggctcactgcccttggcccagggccattttagctccatagttcctgagattcagctgagatatctgttgtgactacaatacagctcaaattttctctctcaatcatcctgcattcttcattcccttacaggtgttgatcca

SEQ ID NO: 288801 - DNA, 450 bp, Homo sapiens
tttgaaaaacaaaactcacatggctgccctaatgtttaatccacaatttcaatttccaagttctttcaaaaactcatgttaaaactaaaaattcatctagaccatataaatacctatactctatatctttgtagctatttatttaaatagctgttttattatgttgtaaacatattttcccattctatgaaatcaacattattcttaaattttatatctttcttctttcataaaatgataaaaattcattgcctactatttcattcagtttctactgagaaataattataaattcttaaaacttcacatcatcaatattatcaatctgctgcctcatacacktggtgtagtagaagaactacttaacgaggaatctagacttcttagtttagcttttttatgtgactttgtattactcactttatttattcatttaacaaatatggtgca

SEQ ID NO: 288802 - DNA, 612 bp, Homo sapiens
aagctaggtatttgtatgtgtaattttgtattccttttttcttaaagaatttttctccttctcaatgaataaaccgcatatgcacacaacttggatctgcccttgttcctgagaaggtagaaagggcaacagaaacctttttttagtttccagaacacaaatgacttcttgatagtttccatggaagaaggattatgggttgacttaaaccactctctctaaattaacttgaatcactaaatgagaagccccacaaaggggatggagaaaatgcagaaaaacccatgagattatcgtaagattttgtgcctgttcaacttcactatcattgaatgataasagagaaatacattgggggcttacagggctacttttgggtttaactttagacgatgagatccttgaaggcaagttgaacaaatgttcagtttgattgaatttgaagagaatgctgagcagcagtctccaacatcaatatttaaaacaaaccatagtggctcatttagataacctaggtccctaattaaccaaaagagaaatgaagctgaaattgcttcaagccaagtaatatacttcctgatgtatgcagtataataaagagtgggaatacac

SEQ ID NO: 288803 - DNA, 622 bp, Homo sapiens
gtttgtgctttattctgttctactaagtagattaattacttcctagaaatctttaaggtatattctctattttttctaaatgtttttgttttttacatttgggtctctcactgttttccctaggtttattttttgacataacatgagatagggatctatctttttttctatgtggataacttagttctcctgatcatgttttctgaataatttttatccattgattttttttttcctttttgagacggagttttgctctgtcgcccaggctggagtttagtggctcaatctcagctcactgcaacttccgcctcctgggttcaagtgatyctcatgcctcggcctcccaagtagctgggattacaggcacccgccaccatacctggctaattttagtattttggtagagacaggtttcaccatgttagccaggctggtcttgaactccagacctcaggtgatccaccagcctcggcctcccaaagtgctgggattacaggcttgagccaccgcgcctggcctatccattgatttttaacaccatctcagacatacacaacatttttatacaggtttatgtcagtttctggtctccctcttctgttcccatgtcctattttcc

SEQ ID NO: 288804 - DNA, 530 bp, Homo sapiens
tcccaactgcttttgaaaaattaaaaatatatatataaactaatttataggttgaggtgggaggattgcttgaacccaaaattctcaagcagcagtgagctatgatcacaccactgcactccagcctgggcaacagagcaagaccctgtctcaaaataaataaaatgtcataaactatgagatatagtgagaagattattaaaataaatcataaatattggttctaagactcattggctatgttatctttggcaagtggtttaaactctctaacaccatgtgttccyccacaacctgaggctatacccatttaccatgcagagtgcttgtgaggttcaaatgataaaagtgtatgtgatttgacaaaaaaaaattcattgcatgcctaccatgaacaagcactcttctagtcacagtgaacagaagacactctgcactcatgcacctataatatagtaggtgataaagacacgtaatatcaatagtgaaagtgctaagaagaaaaataaagtatgtaattatcattactg

SEQ ID NO: 288805 - DNA, 568 bp, Homo sapiens
atgagcaactgaagaacaaagaacccttttcactggttttacgaggcccctttgcccctagtttagtattgtgaggtattttttgaagggctaagaaagaagcaccaagaaaggtatccatcttttccattgatcttgaaattctactatctgtgtttctcttgtctgtgttgtacattgcattggtattagcatatgtcaagcacatataatctygctgtatttgtctattttcccacatttcactcttagtttaagcagggtggcctagttagggagtgggttttggagcctatttagggtgtgggttcaaatgatcgttctgcctcttatagtgtgatcctgggcttggacttcagcttaatcataagcaaattgaggtattaatacctactttactgtgtttgagaattaagtgagataaagtatgtgaagcatctgtcacatgaaaaatactcaaataccatttttccccattagaagaatttatacatttttagctttaaaaacttcctgctagattctagaatagtagttctatacacttaacctagagagagttaagtgg

SEQ ID NO: 288806 - DNA, 562 bp, Homo sapiens
ttaaagaagtgaaagatctctacaatgaaactataaaatattgatgaaagaaattaaagaggacataaaaatggaacaatattccatgttcatggattgggagaatcaatattgttaaaatatccaaatttctttttcagcatcaattgagatgatcacatggtttttgtcctccattctgttgatatgattgatgtatcacattgattgatttgcatatgttggaccatccttgcatcccagggataaatcccacttggtcatagtgaatgatctttttaatgtgctgttgcatytactttgctagtattttgttgaggatttttggatcaatattcattagggaaattgtcctgtagttttctttttttcatgtgtctttgtctcattttgatatcaaggtaatactggctttgtagaatgagtttggaagtatcctctccgctattgttttggaataatttgagtggggttggtattagttctttaaaggcttggtggaattcaagagtgaagccattgggtcccagacttttctttgctgaaagaccttttattatga

SEQ ID NO: 288807 - DNA, 574 bp, Homo sapiens
ccagccttgtagagtgtctgttgttaaagtcagagcattgattggaaagggagagtgatatgatatggatctgtttcaccatcctaatttcaggtagaattataatcttcaatgctggaggtggcgcctggtaggaggtgattggatcatgggggcggtttctcatggttcatggtttaacaccatctccgtcttggttctgtyatcacaatagtgagttcttgtgcaatctggttgtttaaaagtatgtggcacctccccctctagtgggactctttgtattttggaggcaacatatttctcattcaggtgttattccagcccatttactgggtgagctggaaagctgcaagttttgagtggggcccagaacaagacgagattctgcaataggtccaggctattttgcaagtttctctggcacttgtgccatatgatccagcagatccaatgtgtttgaagtgttggtggaagatagggatgttgtttgaagtctttggaagaccattatagataaattgcagctcagtactttaggattttggaacaaggccctgccatcattctcagataa

SEQ ID NO: 288808 - DNA, 575 bp, Homo sapiens
ttactgggtgagctggaaagctgcaagttttgagtggggcccagaacaagacgagattctgcaataggtccaggctattttgcaagtttctctggcacttgtgccatatgatccagcagatccaatgtgtttgaagtgttggtggaagatagggatgttgtttgaagtctttggaagaccattatagataaattgcagctcagtactttaggattttggaacaaggccctgccatcattctcagataactacttttcttttgagaaatcacttttggtctgctatytggccttagtagagattaaatgcttaactacaggccaagttatcgaactaccatgtgatctgagctgtccatcaaaaactggttattatctcacccaccaagccataaagtaaggcacgcacagcaacatttcattattaaatggaactggtatatattgattaggcctgagcaggccctaaaggcacaagtaagttacctgagagtggcctaaatgcccacggttcctactcctgtcacactcctttctctctttcagcctgcacctatgaccttgcagggagtagta

SEQ ID NO: 288809 - DNA, 575 bp, Homo sapiens
ttactgggtgagctggaaagctgcaagttttgagtggggcccagaacaagacgagattctgcaataggtccaggctattttgcaagtttctctggcacttgtgccatatgatccagcagatccaatgtgtttgaagtgttggtggaagatagggatgttgtttgaagtctttggaagaccattatagataaattgcagctcagtactttaggattttggaacaaggccctgccatcattctcagataactacttttcttttgagaaatcacttttggtctgctatttggccttagtagagattaaatgcttaactacaggccaagttatcgaactaccatgtgatctgagctgtccatcaaaaactggttrttatctcacccaccaagccataaagtaaggcacgcacagcaacatttcattattaaatggaactggtatatattgattaggcctgagcaggccctaaaggcacaagtaagttacctgagagtggcctaaatgcccacggttcctactcctgtcacactcctttctctctttcagcctgcacctatgaccttgcagggagtagta

SEQ ID NO: 288810 - DNA, 562 bp, Homo sapiens
gatatgtcatagaaaggaactattgytcatgtaccatttttcctaaattagcaactactgtaagctaatttctttcttaaattttgtagagttgcagcatattgaaaattggctgacttggtttcagtttattccaatatctacagtcttgccaatagaaagagacattgttatcactttctcctccaccagcaccataccccttgtctctcttagtttagggttgatttgtaaatgtcttactataaaaaataattaatgctaaattattccatgttgttatattatcagtgtcctatctgaatccatactaatataattagagataaagtcgacactgaaataacaagtagctcttaaagttccttgcatgttaagtagcatttactgtgctggcagaacagaatttagatctcaaaaataatttgatattaaaagacaaaagtaaacaaattagactgtaagtttgttttttcccccgggtattaatcagccccagtaaaccttgtattgtactcttcaaatctgcattaatcagaatttaggttttgaaagtcaaaag

SEQ ID NO: 288811 - DNA, 545 bp, Homo sapiens
gtatataagtttgctagagttgccataacacagtgccacagactgggtggtttaaacaacagaaatttattttcttataattctggaagctaaaaatctgagatcaaggtgtcagtagagttggtttcttctggggctcttcttggcttgcagatggctgccttctccctgagtcttcacatggtcttccctctgtacatgtctgtgtctaaatttcctcttcttcaaaggacacaagtcataytggattagagccaaccctaatgacctcactttaactcagttacctcttcctatctccatatagtcacattctgagatactgagggttaggatttcaacaaagaagttttaaaataaactcagtccataacagaaggaggtagcaaaagactgtctgtgccctcagatggtttctgttgtgaatgatgcagtttgaagacccattgtggaaggtaaaatcaaggcatgaggtatagataccaaagatgttgccatagtcgcatggacaaagacaatattaaaagtagcctgagtagatgggg

SEQ ID NO: 288812 - DNA, 572 bp, Homo sapiens
ttattcttttgcctttgcatcagcatatcttatctgtacttataaatgaaaacatattatgtttggtttttgcactcctgagttacttcacttagagtaatggcctccaacatccaagttgctgcaaaagacattatttcattccattttacggctgagtagtattccatggtgtatatataccacattatctttatccacttgttggttgatgggcatttaaattggttccatatttttgcaaatgggaattgtgctgctataaacacgcgtgtgcatgtgtcttttttgtataatgacttcttttcctttgggtagattcccagtagtgagattgctgaatcgaatggkagttgtacttttagttctttaaagaatctccatactgtgtgccatatagggtgtactattttacattcctaccaccagagtaaaaaagatcttttttcgtcacatccatgccaacatctattatcttttgattttttttaatttgagggccattaattttttcatttgctgctcttaaagggtacaatcccaaacaaaagttcactctcatcagtggagaa

SEQ ID NO: 288813 - DNA, 604 bp, Homo sapiens
gactttttttgttggcaattttattattactgtttcaatcttgctacttgttactggtctgttcaaagttgctgtttcttcttggtttaatctacgatggttgggtatttccaaaaatttatccttcttctctaggttttccagtctgtgtagataaaggtgttcatagtagccttaaatgatgttttgtatttctgtggtattggttgtaatattagtatatcctgttccatttttaattgagcttatttggatcttctctcttcttttcttggktaatctcactaaaagtatacaaattttgtttatctttacaaaaaaccaaatttttgttttatttatcttttgtgtgttttttgtgtcaattttatttagttctgatctgatcttgggtatttcttttcttctgctgggtttggatttggtttgtccttgtttctctagttccatggggtgtgatctcggactgtctatgctctttcagactttttgatgtaggcattaaatgctcaactctccttttagcattgcttttgcagtatcccagaagttttgataggttgtgtcactattggtattcagttcaaagaatttttaaatttcc

SEQ ID NO: 288814 - DNA, 620 bp, Homo sapiens
ctgtttgcctgctactatgagtgagttggcctgaattaaagcagacaaggaaatagattgcttggattggaacttctgtttttactattgtccaggcaggcttggttaacccagaaagagagagcaagacaagaaagtttatgtacatgtatgtaggagaatatgtcagaggaatatattagatgaggcataggaatgggagtatatgtaaggtaaagaaatttgtttagttttaaacatgttgggatttcatgggttgaggcaataaagtgtaattgggacaatgaaactgaagcttgggtggaagtttatgcccagagacaaatgaaaatcatttacaaaagacagtcagtgaagctggaacaactgatgctatttcaaaaggagagagtacaaaggcagagcagaggacctggtactgagcattggaggaaacctctattaaggggtattgaaagyggatcagcccagaaaaagaatgaaataatcagaacagtaggatgagaagaagaatggtgtgtttccatggaaatcataagaagttcaaggagattctttaaaacggtccaatgttataaaactgtgaagatcttcaagcactgtgctttgtattctaatct

SEQ ID NO: 288815 - DNA, 475 bp, Homo sapiens
ggtggtactcactgttctcaaaacaagtttcaccaaaagagcattgcaggaaaaaaatctgtttactgagagagcaaggaaaccaaagtgtatttgtgagagctatgtcctctgaaagtgagcaaggacttgtgcaaaaataaaagtagctcttctttgtgagtgatgtgcataaaaaatgagttactaagaaacctgagttaatgcttgtgsacattgaatggcatggacttacatggctcagagcatctcacaatgctgagcaattggcaatgtctgcatcagaaactggccacacttacaagaggtaggactcgactattgacttttacaaactattgatcttaaattatcataggctgattttatagatacaaagaatgttggcaagggtgcttctagagtttcagattatcttaactatatataattagctctgaaagactgtgagtgagggtgggttatgatttttaag

SEQ ID NO: 288816 - DNA, 587 bp, Homo sapiens
taaccaataaaatctactttaaaaagtaaagacatttactatcagcttgactttataataaaaccaagtttaattgtttgaaagtttgataaggcatctgccccatakaaatgtcttattaggcaaaatctgtagatgttggtcatttgctaaagagccccattttctcctctcaccccaatttactgaatgggtctgctaaaagcataagctttttagtcccataagtaattttaaaatgattattctaactgaactgctcctaagatttactacctatattcaagtgtaaacaaaacactatatctcagattcagtaaggaacttttccatttcctttctctccatttaagctcaaggcagatattatgattttgaaagtaatatttatttggataatatcagaaaaccaacctaaacaaattttttcttctcatgctattattctgaaacttccatggctatttttgtatacatttttctttccctcttccttacaatccttataactttatcctcactggagttattctgtgttggagcacataaacaaaatgaattcttacactgtattagccgaagggcag

SEQ ID NO: 288817 - DNA, 434 bp, Homo sapiens
catcatgcattaactactgtagtttcaaaattaatcatcatatgtgttgaaaactatggcagagtgctacttctctcagtcttctatggctcctgtgtcttctacctactgctactccatctatcttcctkcaaggccggttttacatgctagtctttggctcaaaagcctatatggacccatgattattactggataagatttagactccaaagatggcataaaatgccacaataattggatttacacaaatagataaaatttattttctatctttatatagggaatcctgaatttcatgaaattcggacatttgctcacagatgcaacttgcacatttgctactgcaagcttttactcattctgctactggccctggattgccctcaccctcttttctcatatgaatctcattgatattttaagaacctgaa

SEQ ID NO: 288818 - DNA, 615 bp, Homo sapiens
cactaattatcagagaaacacaaatcagaaccacactgagatactgtctacaccaatcataatggctattattaaaaatcatacaacaacagatgctggcaaggatgtaaagaaaggagactacttacaktgctgggagcgtaaattagttcagcccctgtggaaagcagtttggagatttctcaaagaacttaaaacagaattaccattctacctagtaatcccgttactgggtgtatatccaaaggaaaataaatcattctgccaaaaaggcactcattatgttcatcgcagcactattcacaatagcaaagacatggaatcaagctacctgctcatcagtggcaaattggaaaaagaaaatgtggaacatatacaccatcgaatattatgcagccattaaaaaaccaaatcatgtcctttgcagcaacatggatgaagctagaagacattatcctaattgaattaatgtagggacggaaaaaaaatcaaaggccacatgctctcacttataagtaggagctaaactttgggtacacatagacataaatatggcaacaatagtggggaccactaagggggtgggaggactgaaaggaatgtttgttggaaaac

SEQ ID NO: 288819 - DNA, 592 bp, Homo sapiens
tatgattaagtcctcaaaagcaatggtaacaaatacaaaaattgactagtgggacctagttaaactaaggagcttctgcatggcaaaagaaaccatctgcagcgtaaacagacaacctacagaatggcagaaaatatttacaaactatgcatctgacaaagatctaatatccagaatctacaaagaaatgaaactattcaacaagcaaagaaacaaataactccattaaaaagtgggcaaaagacatgaacagacactataaaaaatgctccacatcactaattatcagagaaacacaaatcagaaccacactgagatactgtctacaccaatcataatggctattattaaaaatcatacaacaacagatgctggcaaggatgtaaagaaaggagactacttacattgctgggagygtaaattagttcagcccctgtggaaagcagtttggagatttctcaaagaacttaaaacagaattaccattctacctagtaatcccgttactgggtgtatatccaaaggaaaataaatcattctgccaaaaaggcactcattatgttcatcgcagcactattcacaatagcaaagac

SEQ ID NO: 288820 - DNA, 569 bp, Homo sapiens
aaataatccacaataatcttccaactctcaaagtccttaacatcaatcacaaatgcaaggtctttttgccctgtraagaaagaaacacacttacaaattttaggggttagtacactttggagcacccatgattctgcttaccataccctacaaaaccatgtacctcttaagagaaaggaacatgcctttctatcttcatttttgcaatgttcaatatgatggaagcttgataatgtttgttaaatgttgttgagtgaacatgagttagaggtcgatggtgacatttatacctttctgtagaaaggagcaatattcacaaactaaaatgcctcaaagatgtcataaagataatgtacacttttaagggacgttttaactactagtagttattacctactcaaattattcttactaaaggtgaaattaaatgaaataaaagaagacacagtcttcttgaaaagttagtaaactcttgagaggttattttatacattcttcaatttttttgtactctgctagactacctgctcatacaatttgtatatcccttatcttgcctatatagcaca

SEQ ID NO: 288821 - DNA, 1152 bp, Homo sapiens
aaataatccacaataatcttccaactctcaaagtccttaacatcaatcacaaatgcaaggtctttttgccctgtgaagaaagaaacacacttacaaattttaggggttagtacactttggagcacccatgattctgcttaccataccctacaaaaccatgtacctcttaagagaaaggaacatgcctttctatcttcatttttgcaatgttcaatatgatggaagcttgataatgtttgttaaatgttgttgagtgaacatgagttagaggtcgatggtgacatttatacctttctgtagaaaggagcaatattcacaaactaaaatgcctcaaagatgtcataaagataatgtacacttttaagggacgttttaactactagtagttattacctactcaaattattcttactaaaggtgaaattaaatgaaataaaagaagamacagtcttcttgaaaagttagtaaactcttgagaggttattttatacattcttcaatttttttgtactctgctagactacctgctcatacaatttgtatatcccttatcttgcctatatagcacawaggatgtgaccttgataggatctcccagtaggaaaaccctagggtggggtcatttgttgtagatgtgactgaaggcacgtgtaattacagacaaaaagggtctttggacaggtcggatgatgcctagctcattggwacttaaataaatacagtaatacttaaaataggactctaattaggtgatttatttttctcaattctgatatgcagtaagtgattaccttgaagcgctcaagagggcagatgcatgcacaccaaggttgatggtttggcttctggcagattaactataaaattcctcctcccttcaggattataagctcctggtatagagtttaaaaatacataattacaggaaatatcatattttgttcatgcaactttaaaaaaagcccctaaaatttctgtaaataaagcttgtattagatgcttttcttttcagaactaaaaatattcacctaataatcagaaattgttttaacacgttaaagttttcttttcctattcccttaaaaaattgagttctgctgtgtcaacgtggctaagtctgccctaggctactcttgatgatggaatttatag

SEQ ID NO: 288822 - DNA, 612 bp, Homo sapiens
aaaacttattgccacgtttaactggaaatttcaagcaatgcattagattcaggtatggctgaatccacgtgttcatgatgttacaggaaactgtttctataacatctcagctttgcttttgtctgttggcttctcagtcaggtgttttccatgttacagtaaagatggcctccagaagctctaagctgacatagtttttcatgctcaggatctctgaaggtaagaaaggtatttcttttctatttatgtccatataaaactttcaaatggactttgattgattctattgggtgttattctcatttctggatcagttactatgttgaatgagatacagtgtttagactggctcatcaggtgtcattctgatcccactggcagtggaggtacagccattattggcatctgtaccagatgaaaagggcagttcttgaaagaaaaacttaaaacagaaaaaatacctctaaaaaaactaaaatattatttttagccatcaatcctracacaatgcaaactgacagtgaagtctaattcttatagcattcttgctagtagctgaaataccaaggcatattgggaagcaaaaataggcagaatggctataaggtacat

SEQ ID NO: 288823 - DNA, 630 bp, Homo sapiens
tgatgaatttcagttgccaatgacaatctgcagaattgtaaacatatagcacttatgcaatttctctgatgccctttgcttgctaaaccacaaaggaagttaatatttagaacaaacgagtctttaaactatacccttcaattcaacacaaagagatatttcaacacaaaaaaagcacacactggggcagaggaagtgttttattgtttatttttcttttattttttacctcaaaaaaattctttttttgatgcaatttagaacatcttaatgagaccttaaaattggttaaaatttgttagcaggacatacaaaaggattaatcattaaatttaataatttacatttatcaagaaataccactaagagagcaaacatcacctgcagattgacmgaaattcatatacaacacatatcacacgccaaagtcttgtataaagaatagaaaaatagaaaaaaaatacagaaaaatgcaaacaacacaatagataaaaaaattgaaaataatattgagaagtcatttcatacaaataaaaagactatcaaacaatgaataaacattctgagaggaagttcagtttctttatctgataaaccactgtgaaataccattaaacacacacacacacg

SEQ ID NO: 288824 - DNA, 1123 bp, Homo sapiens
atttctctgatgatcaatgatgttgagtaccttttcatatgtctgtttgccatttgtatgtcttcgagacatgtcttcaaatattttgcccattttaaaaatagyattattctatctttttcctagagagttgtttgagctccttatatataatccctatttagatgagtagtttgcaaatatcttctcctattctgtgggttgtctcttcactttgttgattttttgttgttgttgttgctgtacaaaatatttttaacttggtatgatcccatttttccattttttgctttggttgcctgtgattgtggggtattagtcaagaaatctttgctcagactgatgtcctggagcgtttccccaatgttttctcatagtagtttcctgagtttgaggtctactattgctttcactgtgtcccatatattttgttatattgtgtttcaacttttaagaacaatttcaatttctttcttaatttcttcattggcctgccagtcatttaagagcatattgtttagtttccatgtatttgtagagtttgcaawgcacagaatgttcactataatgttgactataataatatagaaataaaaactgtaaataatctaaattgttcatcaaaagaggaaggacaaattatgacatattcatacaatggaacaatatgcagtagttaaaatgaatgaaatagagataactttacccatataaataccaaaattataatgttgaacaaaataaacatattacctaaagatgtacaagatattatctattttagatgaggtttaaaaacataaaaaatctatctagtgagtattaatgctatatttatagaaaaattatgaaawatataactagaaatcgtaaaccacaagttcaataatttgggtatgtctacaggtgtttatttcttaaaaatatagaagacctgacacctttgaagtgtcttccaggaacctttatcattacaagtcaaatgattaaaattgattcctaaaagaagtcatcccaaagaattcctggcattccatccattttccctgacccttatttctcctagataatcagatcttcagagagtccccaatagcaagaagattttcagcagatatggctt

SEQ ID NO: 288825 - DNA, 575 bp, Homo sapiens
gcacagaatgttcactataatgttgactataataatatagaaataaaaactgtaaataatctaaattgttcatcaaaagaggaaggacaaattatgacatattcatacaatggaacaatatgcagtagttaaaatgaatgaaatagagataactttacccatataaataccaaaattataatgttgaacaaaataaacatattacctaaagatgtacaagatattatctattttagatgaggtttaaaaacataaaaaatctatctagtgagtattaatgctatatttatagaaaaattatgaaaaatataactagaaatcgtaaaccacaagttcaataatttgggtatgyctacaggtgtttatttcttaaaaatatagaagacctgacacctttgaagtgtcttccaggaacctttatcattacaagtcaaatgattaaaattgattcctaaaagaagtcatcccaaagaattcctggcattccatccattttccctgacccttatttctcctagataatcagatcttcagagagtccccaatagcaagaagattttcagcagatatggctt

SEQ ID NO: 288826 - DNA, 575 bp, Homo sapiens
gcacagaatgttcactataatgttgactataataatatagaaataaaaactgtaaataatctaaattgttcatcaaaagaggaaggacaaattatgacatattcatacaatggaacaatatgcagtagttaaaatgaatgaaatagagataactttacccatataaataccaaaattataatgttgaacaaaataaacatattacctaaagatgtacaagatattatctattttagatgaggtttaaaaacataaaaaatctatctagtgagtattaatgctatatttatagaaaaattatgaaaaatataactagaaatcgtaaaccacaagttcaataatttgggtatgtctacaggtgtttatttcttaaaaatatagaagacmtgacacctttgaagtgtcttccaggaacctttatcattacaagtcaaatgattaaaattgattcctaaaagaagtcatcccaaagaattcctggcattccatccattttccctgacccttatttctcctagataatcagatcttcagagagtccccaatagcaagaagattttcagcagatatggctt

SEQ ID NO: 288827 - DNA, 431 bp, Homo sapiens
gtatctaaaagatatgagaacctggaacatgcaggcccttgatcaaagagcttcaaaagatatgcagcaaaaactggcagaaatgaaaataatatatactcacaaatatagatgcagattatagaaacaggaaaaaattataaagaatagcaaaaactttaacaatgttaccaagcaactagacctaattgacattgatagaacactctacccagcaacaacataatacatatcactgtcaagtgcacatggaatgcttaccaaaataaagcatacggattataagataaggctcaaatttaaaagtattaaaattatatagcatatgtctctgaccacaacaagaaaaaaatagaaatcaataacataaagatatttggaaaatactcaaattcttggatgttaaayaacaaactttttaaaaaaccatg

SEQ ID NO: 288828 - DNA, 587 bp, Homo sapiens
ttccaccacatctcaaagctcactgtcttgctgtaaaattcttttttaaaatcatcttctcaaatattaaatctatacattctgatttgggtcttgaatgtatacttaagaaagtacagttctcagtacagatatcccaaagcagcccaaagaatgcaattatatcaataaatagtttcagatgatgcctgcagttgtaatggcaatctgtggatttcattactgtgagactatgtggagcttkctttattgtagatataatacttcagcaaatctgaggcctgaaattctcaagctaattgcatttgaccagcttctgagcctgagttcctgcctacaagaatgacaaatataaattattgctattaagagagactctataatgcattttgcagaacaaagaaatgagaatgaagtaagatgaatggcttttaaaaaaatgatcttcttaaataatgttattttaacttctgggataaaggcacatttaagtaaatgagctgtaatgcaagagtaagttagttgttcatctattcatggaagtggccatacagatagttatcctagagagatgataactagaatgg

SEQ ID NO: 288829 - DNA, 596 bp, Homo sapiens
gtaggctttattccttggatacaaatttggctcaacatatgtgaatcaataaatgtgattcaccacataaacacaatttaaaactatatggtcatatcaatagatgagaaaagctttcaataaaatccaacattccttcatgaaaaaaaccctcaacaagctaagcatcaagggaacataactcaaaataatacgaataatctatgctattacaaatctatatccaacatcatactgaatgagtaaaagctggaagcattctcattgagaactggaacaagacaaggatgcccactctcatgactcgtatgcaacatgtactggaagtctttgccatggcaatcaggcaagggaaaaaataaaaggcatccaaataggaagagaagaagaaaactctttttrcagatgatatgattgtatacctacaaacgcctacagagtccagcaaaaggcttttagaaccaataaatgattttagtaaagtttcaggatacaaaataaatatacaaaaattagcagcatttctatacaatagcattcaatctgaggaccaaatcaaaaacacaaacccatttataatatgaacaaacaaaatc

SEQ ID NO: 288830 - DNA, 587 bp, Homo sapiens
agggtggagttctctcctctccaacttggaaggtagcagggcttctgcctgctcctggctctcgccrgctccatgggaagtacagccctggctgtacctcccctactgcagctggtgtgatggcaatggctgctccagatgggccaccactacagtcaatgccatcaactgcttgtcaatcattcatctgtttttcagttccatgccagacctatgctagcatataagtaaatagcagtgaataagatgcccaagttctttgtcctatacaacctagtaaccttggatgaggttcataaattttctgaaaatttgtaaagaagggaattgaactagatggttttgaatgggacttcaatctcaaaattgaatgcctctaatatcttccattagcatggaagagagatggggacagatttctacacttttcttgctctcattccttccttttcccaagagcattagggtacagaaggagagatttgaatgaaaacagtagaagaaacactccttttcagacagaaagaagtactagagagagaatgagagaaaaaaggagaaagagatcctaaatcataaaagttttt

SEQ ID NO: 288831 - DNA, 584 bp, Homo sapiens
aacactgagccctcaatatggcaacattccttgggtaatcaaccagctacttggtggcaggttgagtatactagacttcttccatcatggaaagggcagcaatttgtcctcacyggaatcgacttactccagatatggatttgcctatcctgcatgaaatgcttctgccgagactaccatccatggactcacataatgccttatccaccatcatggtattccacatagcattgcctctgaccaaggcactcactttagagctaaagaagtgcagcagtgggcttgtgctcatgaaacccactggtctcaccatgttccccatcaccctaaagcagctggactgatagaatggtaaaatggccttttgaagtcaaattacaatgccaactaggtgacaatactttgcagggctgggacaaagttctctagaaggctgtgtatgatctgaatcagcatccaatatatggtactgtttctcccatagccaggattcatggttccaggaatcaagggatggaaatggaagcgtcatttctcaccatcaccagaagacacaacaacgattctattaaactggaagttaa

SEQ ID NO: 288832 - DNA, 584 bp, Homo sapiens
aacactgagccctcaatatggcaacattccttgggtaatcaaccagctacttggtggcaggttgagtatactagacttcttccatcatggaaagggcagcaatttgtcctcaccggaatcgacttactccagatatggatttgcctatcctgcatgaaatgcttctgccgagactaccatccatggactcacataatgccttatccaccatcatggtattccacatagcattgcctctgaccaaggcactcactttagagctaaagaagtgcagcagtgggcttgtgctcatgaaacccactggtctcaccatgttcyccatcaccctaaagcagctggactgatagaatggtaaaatggccttttgaagtcaaattacaatgccaactaggtgacaatactttgcagggctgggacaaagttctctagaaggctgtgtatgatctgaatcagcatccaatatatggtactgtttctcccatagccaggattcatggttccaggaatcaagggatggaaatggaagcgtcatttctcaccatcaccagaagacacaacaacgattctattaaactggaagttaa

SEQ ID NO: 288833 - DNA, 579 bp, Homo sapiens
cctctgttacatcctgagaaacactaactttaactcaatttgcctgatctttccagtgcactggacagcccatagaatttacaaactcartaaacagataataatatggtcatgatgggtatctgaaacctaggatgtaaaaaaacagattatggagagctgcatgagtacaatcaattactgagattttcccgaatacaaatcctatccaagcaaaactaatataacccccaaattaggagaagtccacagtcattttagatgaaatctcaaaagaaaccacaatctcattctctttttttcaaatttcaggactttaacatttattaaacaacaaaaacaaaaatgctgacatattatattgtacatatttgcaaatccaactgtgtaagaaggtgctttggtgggatttgagattatagctaaagagatccaggcataaagttatcactgcctgatagggaacgtaagctttatttacaatgagatgacaaatacttttgagtttttcttgtacatccttgtacacccacctggcttcctagggtttgtgtaccagctaactaatttatgtattgt

SEQ ID NO: 288834 - DNA, 630 bp, Homo sapiens
tatgactcatgctcttttctagttgtgcttctagtgggtgagtgatttggttatgatggcattggacaaaaagacttttcaaatcaagcacctttatcatatcctcccccytcctctcctctgtagtatattcccatcttcacccaccaactccctcctacatgtacacttccttctagaattccatcccctgatattctcccgtgatgacattttaatttctgtcttatttgtttctttcaataaagtgtttggataggagtactcctgaagttagagtgccacaaccgaagaagtgcaagggactcattagttgacggttaagaagaagttctgaaagaggctcagttgtgagtggttaactgctttaaccaaattctcaggggcaaactctggttctctcatttacctccatttaccctggcaaccacctccctcctttggctgtattaacatacctcctgaaacctggagcacagagagcttgtgtcagtgaaaaatgcatgtggaatgaggttttgttttatttttttcatatttaagcaatttcctaaattaggctcttttggcagctgtattaattcaagccactaagatattatttagtaccttgctgctccagggcactaa

SEQ ID NO: 288835 - DNA, 544 bp, Homo sapiens
ttggctttatactttgcctcttcctctaggccacgtatgattaaacaggagttcttgggtgtggaaaacatccttggaaaaatttaagaagatacattagctttagaattttagtacaaattatgtgggtataactttttctaaaaaaaagtttccatagatttcatcaaattttaaaatagttcatagtctgtaagctagaaaagattaagaactattgagtcattcattcaattttttttttttaaattagtccctaccatgcatcaggtactcttcygggcactgatgatatagcagtgaactaaacatacaaatatccctgcctcctagaagcttacattcttctgggaggatgcaaacaattaataaaataagtaaaatagatagcacaccagatgatgataaatgataccgagaaaataaagcagagataaaagccaaggcttgggaattgtgatttagaacagtacagacaaggaaggtcttatggaggaggtgccacttgagcaaagactgaggggctggagaaacaagtcatgaa

SEQ ID NO: 288836 - DNA, 584 bp, Homo sapiens
tcgtaattgaattaagcatttgaggatgtattctttgagttgtacatttttttttccaccaaagcaatcattgtaaaatatttaggtaacatttgttacctgccaggccgagtgcaagtgctgggaaccacatgtggaaggatagacctagtctctgcccttatggtgctgacagtgtagcgatccacctaagtacctggtggcaccacaatgatagtcagactctgcacggttctaaacatttccagtgcttgcattttgatccttggttgaattgcttgactttaggtaaattgttcaaaacagcatgcaatagttgcttcccggttcatacrtaaatatggctctcctcagatgacacatatacctattgagttagtagaaaatttagatgtgtatttgctaactttatttttttagtgtgtgctgcaaatgtcagttcaaattttgctggtcaaacaccccttgtaataggctttgataatttagctcctaggaatggcttggttacagaaccccgtaaaagtttattgacttctgcttgctggcttaggttgtaggttagaatgtacctcagaaattag

SEQ ID NO: 288837 - DNA, 552 bp, Homo sapiens
cagtgcttgcattttgatccttggttgaattgcttgactttaggtaaattgttcaaaacagcatgcaatagttgcttcccggttcatacataaatatggctctcctcagatgacayatatacctattgagttagtagaaaatttagatgtgtatttgctaactttatttttttagtgtgtgctgcaaatgtcagttcaaattttgctggtcaaacaccccttgtaataggctttgataatttagctcctaggaatggcttggttacagaaccccgtaaaagtttattgacttctgcttgctggcttaggttgtaggttagaatgtacctcagaaattagcttcatccagtttaatgacttcattacagagcagtttgcgtgctctcaagcactgcgtaatatattttttaacaccagtttgtagctatcttgagctatttctatgtaataggagaggcgggtttcacttgtttaaatggccaaaataaaaaatgtcgctgaaatgggaccccgtagggtccacgtggttggggactttcactaccaatatgg

SEQ ID NO: 288838 - DNA, 592 bp, Homo sapiens
ctaccaatatggtctgaggtaataattgaatacccaattgaatctcagctaactccagtgttataaagagatcacttgtagtagccattgcttttcctaagggcaaataaatagtgatttgaaaattatatttaggctttacataaaaccaaaggcaatagaggttgatgaatatttgtagccatttattagtctaaatccaacatgaaatgaatttggttttctccctatgcctaaatagagtgttttaggaggactattatcccttctatgttaccctaagacatgttattacacattgctaatgaacctctcagttcactgtacataaatgtggtgacatctgcaaagctgactacttgctagtctgttactgtgttgaagtgtattctgttagtgcaataagaagttaaatttaagaaakattttaaaatatgattaataacaattgtaaatacatgataattttagaaaaactagaataaatatataaaggacattaagtcacacaagatcctaccacttggaaagacctactattaacatttgggtgcctgttcatatgtatatgaagatctccagatgtatctgg

SEQ ID NO: 288839 - DNA, 548 bp, Homo sapiens
ttataattaaggaccttgttacaccataaaagattttcaaattttaatctatgacaacccacacagcactcagggcttaaatactttattgaccaggctggcaggctgactcctctgttggagctgggagagtcctgcttcaatttatctctcccacactacatatttgtagtcataaatcttttgctaggctctttgagcattaaaaatagcctggcattgctggctttccttgtggtactgtaagagccaaatcaaaggtgccagcctcctgtgatctttccattttgcgctgcagcaggaaacgtttacatctgtcccagccctcactgtctaagtgtcaactcaaacaatggcatttcccactcagagtttggctccatctccccagatgcctcccttatccagatagggcagctgaacagcagtctggcccgagctgttcctctgccagcctgggtctgttctctcttctygatggtaactctgggtggtgtgttttcttcattctgcagggatcctgctagatggagcagaatagctatgct

SEQ ID NO: 288840 - DNA, 399 bp, Homo sapiens
atgatggatactggtggctttccaattcccatagggatgggggtggggtggggttggactaaggacagaagtggcagagttggccacagtctggctttgccatccacaaagggagaaaggagagcaccagctggaagctaatctccacaacaatyggctcacagacatttcataaatgtgttcaacatcaactcttacactcttttttacttatatggcttatgttgccagcagctgatgtaagagatgacccagtggaaatcatgatcatggtggcataaataaaccatgtgtcaatctaataagatgcaaagaacctaacagcttcaggataagtgcactggcccaggttctgcagccaatggcaatgcacctctcatattctcagtaacttctgtg

SEQ ID NO: 288841 - DNA, 414 bp, Homo sapiens
tgataaactccctggttctgggatccagaaggaagaaagaaaacaacaatacaacatcaattcttcttatccagcccccaacctgttttcttttctttctgytacactctcagatattgtcttagaagcatcaaccaatttgaaatcctgattgtagcaaagcaaccacaggtaaccaaagaacaagaagagggagagcaatggttgttggacttactgggacacacgaaacccttcgttttcctcaggacctggatggaataagaaatcctgagggtttgctgaaaaacaaaactgtcatttttcacatcagcatcagtttgcaacctttgactctgctgctatttttcactgcacactagctacaatgggctggttcactgtttcgcatcctctgtttcattacttgtgggt

SEQ ID NO: 288842 - DNA, 227 bp, Homo sapiens
taagcttagaataattttctagctaccaaatttcaggaaggatttgattytatttggttaattatggagaacaacaagctttattaggatttcattatagtcctctgaatcccatgagatttccatagttagaaatgaatttttaaagtcttgctgaaatagcttcgattatttcttgaggttttttaaaaatgatactttactttggtggcttatctgttgttgac

SEQ ID NO: 288843 - DNA, 635 bp, Homo sapiens
gagtcaatatgtaaaatagagggacttgataaagtagattttctttaaatttatcttgcaaaagaaaagtaaaacagtttttctttttaaaaaaaatagtaaaatcatacaaacttatgacagagcagggagtgggatacaggcctgaactgcaatgccaggtcttctacttaaatgccatgtactgcctctactgcaagacgataattacatttttttgtgagtttcaaaaaaatgctattgtcttgtgtcttaattattaattrtagcaaaacatatagatctgaatatttctttttaaaatattttgtctttatcacaacagtgaatttctttattcaatgctactgccccaaattaaattcccactaaaacttacatcatttaactgtgacaaaacaactagtcaaaatagtattttagtcctgtgtaaacaaactaactaacagataaagagaactttcactgttcagctgattgtcatgaggctgtgctgactgagtcaaaggaaaaggtaaataaagcaagagactgacttcaatataaatcaatactgtctagaatcaacatgcaacacaacacttatgcatttaccaagaaatatttaccatattttgtatgttataggagggctg

SEQ ID NO: 288844 - DNA, 601 bp, Homo sapiens
aataaaataaagttgttaggaaacaaagatgtaacatcttgggaataaaattgtatgtgtgaaggtgtgtgtaagcaaggtagagagaatacaaaagtctcttcaattctaaatgattagttgcaataaactgtcttttgctggtgaatataataatgaaaaggcattaacgaaattgattttttaaaaatattgattgtcacaaaggaaatcattgcctctatttcaaaagtcagcaatgcagaaatgagaaaaccaacccayagtaaaactgcagaggtcagaggccaagttttatcttctctgtatgtgccatagcatataattggaagaaaagacctgacaaaggcatatttcccaatgggccctactgagaagaaaatatctattgtggctagaactattaagatcaggaggctttatagcaatatttattcaccacagattaaattgtgaaaaatcaatatatttgtttaaaaaggtgaataacaaaaaaagtatattgttttctaaatctctttgaagattttcaataagggtgcaagtttttaccccacccatttccaaacacacacacacacagacacacacacaaacacac

SEQ ID NO: 288845 - DNA, 625 bp, Homo sapiens
ctatatgccaacagtgaacaatctgaaaaagaaatttaaaaagtaattcaatttacagtagccacaaataaaattaaatacctagaaattaacttaaacaaagaagtgaaatatctctacaatgaaaactatgaaacactatgaaaataattgaagaggacactaaaaaatgaaaagatattccatgttaatggattggaagaatcagtattattaaaatgtccacactacccaaagcaatctacagattcaagacaaaccatgtcaaaataataatggcattcttcacagaaatagaaaaaattctaaaatttacatgaaatcacaaaagactcagaataagcaaagctatcttaagcaaaaagagcaaaagtggaggaatcatattaccttacttcaaattatacaacagagatatagtaatcaaaacagcacaatatggcataaaaacagacacatagatcaatggagcaggatagagaacccagaaataaatctggacaactacagtgagctcattttcaacaaaagtgccaagaacaaacactggggaaaagatagcctcttcaataaayagcgatgagaaaactgaatatccatgtgcagaagaatgaaagtagacccc

SEQ ID NO: 288846 - DNA, 978 bp, Homo sapiens
aatttctaaggaaaagcttagaaaaaaatctgcatttggaaaaggagcgcaattgtgattatcacctgatgtggtttaaaataatgcagtccttttcaaagaaccatcacattttatatgggccaacaggaagatatcaatgaggatgtgaacagcatcactgcccttcttttttgaggtctttcatgggctacaattatttctgcaatttccaaaagagtacagtgttgttttgggttcagtattctacctgtgagagctagcagggagggaaagttctggcaactttcatttatcctttttgtactaataaccctcactccctggcttagagagccagtctgagaatactgccaatgccagtgccaagtaggtccattttaattatacatttaggayatagtgacccacacagagagggtccwttatcttgtctattaccactgtctcagcttcatgcaggatctaatttttttcagaactattgtaatattcttctaattgggctctctgcttagtcttgcttttaactaatacatcgaatggctgtcaatgtgatcttaagtaacatatatcaatcactatgttactccctttgtaaactccttcagtgaatttcatatttttttwaaaaaaatctaagtctcctggaataacacataaacctgaacttatatgaataattctttttcagagtttgccaaaagaaaatgaaaaagtcaagtaaaacagtttaattaaaaataatcacctttctcacttcttaaaaaattcagaccttatctcgtcatttggtctcatagcttttgtttttccctttttaaaaattgctctctctccatctcagtctacagtaggatcttgatgcataagagcttttatatttccacacatttaaatgttattatttctactccatggaatgccctttcctttcatgacgctgaggtgaaattcaaatcattcttcaagtcccag

SEQ ID NO: 288847 - DNA, 556 bp, Homo sapiens
caaaaaacagagggaagacaaattatctctttctctcttctgtaactgggacagacttattttcttgcccttggaaaggagaaccccaggttcatcagactttggactccaagactgagagtccagtaccagtggccccaagtttctcaagcttgtggccttgtactgataggtacacaccattagtttccctggttgtaaggctttcagacttggastaagccatactactggctttcctggttctccagcttgcaaacggatggtctattgtggaacttcttagcctctacaatcacattcttctgctgatttcccatttaaaggatggctttataattattcataacgtatccagatagggaacaaaatggcagagtagaactctccagtgataatccctctgcagaaacatcaatttgaataactcttcacataggaacatactttcataagagccagggaagcaaggtgagagatcatagttcctgatagtggcacaataataggaaaagatgcattgaagagggtaagaagaacagttttggattgtttg

SEQ ID NO: 288848 - DNA, 556 bp, Homo sapiens
caaaaaacagagggaagacaaattatctctttctctcttctgtaactgggacagacttattttcttgcccttggaaaggagaaccccaggttcatcagactttggactccaagactgagagtccagtaccagtggccccaagtttctcaagcttgtggccttgtactgataggtacacaccattagtttccctggttgtaaggctttcagacttggactaagccatactactggctttcctggttctccagcttgcaaacggatggtctattgtggaacttcttagcctctacaatcacattcttctgctgatttcccatttaaaggatggctttataattattcataacrtatccagatagggaacaaaatggcagagtagaactctccagtgataatccctctgcagaaacatcaatttgaataactcttcacataggaacatactttcataagagccagggaagcaaggtgagagatcatagttcctgatagtggcacaataataggaaaagatgcattgaagagggtaagaagaacagttttggattgtttg

SEQ ID NO: 288849 - DNA, 1208 bp, Homo sapiens
tttgctagagctctgtgaaaagctgcatagaaagggtattttatatttgatgtttgagcagaatgtgaggaacaagatttgacaactagataagaatggaaggagtaatctgggcagaaggaacagtatgagcacaagctgagaggtgtgaagcttcatggcatgcatggaaaacagcagcaaaacagtctgacaggagtagaaagcaccagagatggcataggcaaggcaaattatggcatattataaacagcttcaagtgcgatgataagtcagaagctggaaatcatcctaaatataatgcagaaaaatatgaaggttttaaatcaggaaatgagagaatcaggtgtgcactctagaaatttaacagttagaagtacagattggagtgtgcaagcctggagatgagcatgtacattatgattttaggtaatartttaggtaacatataaagaagtagcacagtgaggtgaaagggtagatagattacaaaatcatttcaaaggaggagaaaaaagagatttggtgaaaagaagtagataaagaagagactgaggaaagcaaatctttccaaatcaccttttaattatccttttggaggtgatattaaatwcacatcataatcaaactgcttaaatgagtcataaaaagaaaaaaaaagtggccagaggaaaggacatagtgcatgcagaagaacaaaaatgagcatgacaacaggtttctcatcagagacaagtcaagcaggaagacagtggagtaaccttttttaaatactaaaagaaaaagcaagataaatttttcaaaattacttttagaatattaggaaatctaggaacataaaatttctgacttatgtataagttctaaaaatgaggataaaagagctttttctgttaagagagaaaagtatgttatacccaataagtatagggtaaaagattaattacwgagccactataaaactccactgtatgtagttatgtagtatgtatgcaatattatccctacagatgaaaactagcttatatacaattttataagaaccaaggtttctgcccaatttaatagaaaactgttcctgagtttggacatgcccatcagcataatggtccttattctctcacattccactggtatttaaaattttttaccatagcaaaactgctaaagcctgcatgcctctaataacaaaaacaaaaaactacaaa

SEQ ID NO: 288850 - DNA, 527 bp, Homo sapiens
atagtgcatgcagaagaacaaaaatgagcatgacaacaggtttctcatcagagacaagtcaagcaggaagacagtggagtaaccttttttaaatactaaaagaaaaagcaagataaatttttcaaaattacttttagaatattaggaaatctaggaacataaaatttctgacttatgtataagttctaaaaatgaggataaaagagctttttctgttaagagagaaaagtatgttatacccaataagtatagggtaaaagattaattacagagccactataaaactccactgtatgtagttatgtagtatgtatgcaatattatccctacagatgaaaactagcttatatacaattttataagaaccaaggtttctgcccaatttaatagaaaactgttcytgagtttggacatgcccatcagcataatggtccttattctctcacattccactggtatttaaaattttttaccatagcaaaactgctaaagcctgcatgcctctaataacaaaaacaaaaaactac

SEQ ID NO: 288851 - DNA, 552 bp, Homo sapiens
aatgaaccaagcagtcttcccataaattactcaaactaccagaaatctaaatcagcaattaatttaaaaagggattttgtgcccaatcacttggaaactatttggcagtatctacaaaagctgactatgcatagtcattgacccagtaactactactactatgtttatccscaacaaaaacatgtataaattttcaggaaaaagcaggcccaagaatgttcctaatcgtccaaaacagaagctacccaaagtccatcaagtagaaaagataaattgtgatatattcacacaatgtaatacaacaatatgaaggaaaaaaattacaactaacacaacaaaatggatgaatcaatgtcaagggaaagaagctagacacaaaatattacacactgtatgattccatttatatagtgtaaaaaacaagaaaaagtaacttgtgccattacaggtgcatataggatttacacttgagttcatgtagtgactagaagggaatacaacaggacttccaaagtgctggtaaggatctctttcttgatctgagagctagtt

SEQ ID NO: 288852 - DNA, 612 bp, Homo sapiens
gccaggcagggggcaagctgaggtttctcactacagtacttcaatcctaagatgccactgaatggtmtcttacagtcctttatggactattaagaaaaacagattgctagttcaattgtcacatgctatcagttgcaagtggtaaaactatacatctcagaatcagtaaagtgtggtatctggaataacagttacaggtaaattttttttaatgatttttatgatgaattacatacatagaattaaaagttcaaaaacctaccttaaagggtaagatacgttacttttctatgctagtaggaattcaaatccttgaatgataaagccatttagagtcttattccaaggtcctgctgacagagcctgatgtcacgatttccatgacataatcttgtaactttgtaaaaggctttcctttcccgtcttctctatccagggctggtgcggatggaagggcccagatttttggaacaaggatgcatactataacttatgtcttcctcagcgaccaaatatgatttaaaatatcttggagtcaaagactgcagtagagtggtattataaatttgtgaataaagaatcagtttaatttttcacattaaatcctggttc

SEQ ID NO: 288853 - DNA, 539 bp, Homo sapiens
agactatattatccaacattccaataagataaaataatcacaatgacttctcttttttggaaaaatgtttctcttattctcctacgttattgtgaagactttttttcttaaacaagaaacatgtgtaatatttgtaaaaacacaaagcttttgggccgggtgcagtggcttatgcgtataattccagcactttaggagcctgaggctggtggatcatgaggtcaggagattgagaccatcctgactaaaaaggtgaaaccacatctctactaaaaatacaaaaaactagccaggcgtggtggtgggtgcctgtagtcccagctacttgggamgctgaggcaggagaatggcgtgaacccaggaggcggagcttgcagtgagctcagatcgtgccactgcactcgagcctgggctacagagcgagactccttctcaaaataaataaataaataaataaataaaacttctatttctttcactttctaatataattttaatatctcctcctgggatttcactaagacacattttggacctca

SEQ ID NO: 288854 - DNA, 544 bp, Homo sapiens
ctcctctaaatcttctaggtcctcctggccatcagcctctgtttctgaaccagcctcttcatgctcctgttcttcactctctgggagaagactgatatcttcatctttctttcactaaccgcattctggaagcactgtaaaattgcttcattttgcaattccagttgttgcaaagtctgctcatcatcaaaactttctatcacaagtttttgtaaagagctgccatggattctaccattctctactgttttattaaagtcataaagcactttygttaaagaagtgaactttggttccaatccagcttgaaacctattgggaggaattaaatgagatttagaattatagataataatttcacagccctcttaattaaaagaaaaataaaaacctcaactcttctgtaaaatcaaatttgaataaagtgtaagtatagattctggccccaacaatatataagctgatgagccacaatgatatataaaacctgtcaaccaagtatttgtgaatcagctgtatagattgttggcaggaaaagcattac

SEQ ID NO: 288855 - DNA, 544 bp, Homo sapiens
ctcctctaaatcttctaggtcctcctggccatcagcctctgtttctgaaccagcctcttcatgctcctgttcttcactctctgggagaagactgatatcttcatctttctttcactaaccgcattctggaagcactgtaaaattgcttcattttgcaattccagttgttgcaaagtctgctcatcatcaaaactttctatcacaagtttttgtaaagagctgccatggattctaccattctctactgttttattaaagtcataaagcactttcgttaaagaagtgaactttggttccaatccakcttgaaacctattgggaggaattaaatgagatttagaattatagataataatttcacagccctcttaattaaaagaaaaataaaaacctcaactcttctgtaaaatcaaatttgaataaagtgtaagtatagattctggccccaacaatatataagctgatgagccacaatgatatataaaacctgtcaaccaagtatttgtgaatcagctgtatagattgttggcaggaaaagcattac

SEQ ID NO: 288856 - DNA, 532 bp, Homo sapiens
tagtctcactctgtcacccaggccagagtgcagtggcgcaatctcggctcactgcaagctccaccccccggcttcacgccattctcctgcctcagcctcccaagtagctgggactacaggtgcccaccaccacacccrgctaattttttgtatttttagtagagacggggtttcactgtgttaaccaggatggtctcgatctcctgacctcgtgatccgcccacctcggcctcccaaagtgctgggattacaggcgtgagccacggctcccagcctatagattacatttatgtggctagctcatgattctgcttccttctgaggttcaaaaaaaaacactttcactattccagcagcagctgcaggcggaggctgaccacctgggtaaggagctgcagagtgtgtcagcaaagctccaagcccaggtggaagagaacgagttgtggaaccgcctgaaccagcaacaggaggagaagatgtggaggcaggaggagaagatacaggagtgggaggagaagatacaggagcagga

SEQ ID NO: 288857 - DNA, 584 bp, Homo sapiens
ggatgaaaaccattattttatagattacatttatttatttatttatttatttatttatttatttgagaagtagtctcactctgtcacccaggccagagtgcagtggcgcaatctcggctcactgcaagctccaccccccggcttcacgccattctcctgcctcagcctcccaagtagctgggactacaggtgcccaccaccacacccggctaattttttgtatttttagtagagacggggtttcactgtgttaaccaggatggtctcgatctcctgacctcgtgatccgcccacctcggcctcccaaagtgctgggattacaggcgtgagccacsgctcccagcctatagattacatttatgtggctagctcatgattctgcttccttctgaggttcaaaaaaaaacactttcactattccagcagcagctgcaggcggaggctgaccacctgggtaaggagctgcagagtgtgtcagcaaagctccaagcccaggtggaagagaacgagttgtggaaccgcctgaaccagcaacaggaggagaagatgtggaggcaggaggagaagatacaggagtgggagga

SEQ ID NO: 288858 - DNA, 532 bp, Homo sapiens
tagtctcactctgtcacccaggccagagtgcagtggcgcaatctcggctcactgcaagctccaccccccggcttcacgccattctcctgcctcagcctcccaagtagctgggactacaggtgcccaccaccacacccggctaattttttgtatttttagtagagacggggtttcactgtgttaaccaggatggtctcgatctcctgacctcgtgatccgcccacctcggcctcccaaagtgctgggattacaggcgtgagccacggctcccagcctatagattacatttatgtggctagctcatgattctgcttccttctgaggttcaaaaaaaaacactttcactattccagcagcagctgcaggcggaggctgaccacctgggtaaggagctgcagagtgtgtcagcaaagctccaagcccaggtggaagagaacgagttgtggaaccgcctgaaccagcaacaggaggagaagatgtggaggcaggaggagaagatacaggagygggaggagaagatacaggagcagga

SEQ ID NO: 288859 - DNA, 597 bp, Homo sapiens
ctgatcttcctctcccctccaagcccaccaacttctgccctatcatctatcctcatgtctctctgtgtgacatgctgacttactttttggagagaatcgcctaaacaattaattctttcttctcgtgtctaatccatccactagtttcttatttcaacaattacatttttatttccttatttcattttattctgmgactgagtctcattctgtcacacaggctgaattgcagtggtacgaacctgcagactcggcctcctgggctcaagtgatcctcccacctcagcctcttgagtagctgggactataggcaggtgccccatacccagctaataccatacccacacagcagagacataaaagatttccatcctcaaagaaggttccattgaacagcactgctctaattcaataaaaaataccactgagcacaacatagtaatagaaaagattgaagaggcagtgctgatacttaaaaacctggtattttcagccaggcatggtggctcatgcctgtaatcctggcactttgggaggctgaggtgggaagatcgcttaagcccaggaagttctagaccagcctgggcaacatggtga

SEQ ID NO: 288860 - DNA, 573 bp, Homo sapiens
gttgctattgtgaatagaatctcttttttttttttttttttttgccacggagtctggctcctttgcccaggctggagtgcagtggcgcgatctcggctcactgcaagctctgcccctccaggtttaagcagcctgttgcccaggctgsaatgcagtagcatagtcatagttcaatacagcctcaaactcctgggcccaaatgattctctaagctaatatttttaattttttagagatggagtttcattcaaggatcactaaaggccagtgatcctcccgcctcagcttctgaaattgctgggattacaggtgtgattgagccatggagcctggccagacatgggctattgattctcgctgttactcttttccctttccttctaatccttgtattgggaagaaaacagtatggaaattttatttcttcattttattgatacgtagatctctgcttagaagacaattttagttttaaattataaatgtttcgttcattattcatagaaaactagatttgccatgggatatttataagtgttgcacgaatgaagggttttctagtcaaataagttg

SEQ ID NO: 288861 - DNA, 548 bp, Homo sapiens
catgggatatttataagtgttgcacgaatgaagggttttctagtcaaataagttgaaacacattacgttaaacaaacttggacagttttgtttccggtcatttttagagttctaaattatgattctactcaagaggatattgtatgcggtattttcaaaccaactcatcctgcgtcaggttgtggttacgctttgggagaggaagctataatcttatactgagactgtaatgaatgtattaaggtaattttcgtagctttctctttttggagytacctgagaaattatgacacccttttccaaacaggccaacctgctttgcaaacacgatttccataattttaacaatggtgaggccaggcacggtggctcatacctgtaattccttccagcactttgggaagcctaggcaggaggatcacttaagccaggagttcaataccagcctgggcaacatggcaaaaactcatctctacaaaaaatacacatattagccaggcgtggtggcacacacctatagtctcagctactcagaggttgaggtggga

SEQ ID NO: 288862 - DNA, 548 bp, Homo sapiens
catgggatatttataagtgttgcacgaatgaagggttttctagtcaaataagttgaaacacattacgttaaacaaacttggacagttttgtttccggtcatttttagagttctaaattatgattctactcaagaggatattgtatgcggtattttcaaaccaactcatcctgcgtcaggttgtggttacgctttgggagaggaagctataatcttatactgagactgtaatgaatgtattaaggtaattttcgtagctttctctttttggagttacctgagaaattatgacacccttttccaaacaggccaacctgytttgcaaacacgatttccataattttaacaatggtgaggccaggcacggtggctcatacctgtaattccttccagcactttgggaagcctaggcaggaggatcacttaagccaggagttcaataccagcctgggcaacatggcaaaaactcatctctacaaaaaatacacatattagccaggcgtggtggcacacacctatagtctcagctactcagaggttgaggtggga

SEQ ID NO: 288863 - DNA, 528 bp, Homo sapiens
aacagttatgcaaagactagcagtctgatggtgctggggagtcagaggctggaggtcagggcctgaggaggtagagcaacccttgtaaataaacactgaaacactaggaagctttgaaacactagaagggctgtactctaggagtaaggacaacccagaaaaagatcaacgctagcactagcaaaagttaagcgtcctctyagatggatcaagatctgccagtacacttatctgcctgaattctttctagagaaacgtaacagtttcagagaacagtctctaattttttcatataaaatcactatccattcacactcacacaccaagcatgccaagaaactaccaaataactaaaaaaaaatgtggaaaaaaatagcgacagaaccacaggtgatctaaacattggaactatgagggattttaaaataaaatgattctccaggtcctgttagaaaatattggttgcatcttctgaaaaagagatgcccgcatctaagaactccaggagctcaagtagctgcctgttac

SEQ ID NO: 288864 - DNA, 528 bp, Homo sapiens
aacagttatgcaaagactagcagtctgatggtgctggggagtcagaggctggaggtcagggcctgaggaggtagagcaacccttgtaaataaacactgaaacactaggaagctttgaaacactagaagggctgtactctaggagtaaggacaacccagaaaaagatcaacgctagcactagcaaaagttaagcgtcctcttagatggatcaagatctgccagtacmcttatctgcctgaattctttctagagaaacgtaacagtttcagagaacagtctctaattttttcatataaaatcactatccattcacactcacacaccaagcatgccaagaaactaccaaataactaaaaaaaaatgtggaaaaaaatagcgacagaaccacaggtgatctaaacattggaactatgagggattttaaaataaaatgattctccaggtcctgttagaaaatattggttgcatcttctgaaaaagagatgcccgcatctaagaactccaggagctcaagtagctgcctgttac

SEQ ID NO: 288865 - DNA, 528 bp, Homo sapiens
aacagttatgcaaagactagcagtctgatggtgctggggagtcagaggctggaggtcagggcctgaggaggtagagcaacccttgtaaataaacactgaaacactaggaagctttgaaacactagaagggctgtactctaggagtaaggacaacccagaaaaagatcaacgctagcactagcaaaagttaagcgtcctcttagatggatcaagatctgccagtacacttatctgcctgaattctttctagagaaacgtaacagtttcagagaacagtctctaattttttcatataaaatcactatccattcacactcacacaccaagcatgccaagaaactaccaaataastaaaaaaaaatgtggaaaaaaatagcgacagaaccacaggtgatctaaacattggaactatgagggattttaaaataaaatgattctccaggtcctgttagaaaatattggttgcatcttctgaaaaagagatgcccgcatctaagaactccaggagctcaagtagctgcctgttac

SEQ ID NO: 288866 - DNA, 615 bp, Homo sapiens
tccgccaccatgcccggaacatcttttgtatttctttagtagagacaggctttcaccatgttggccagactggtctcgaactctggacctcaggtgatccacccgcctcagcctcccaaagtgctgggattacaggyatgagccaccgcgcccaaaacgatgacttcaagtgaaatgctgtataataaaattaattttatcataggctaattgatatgaacaagagtcacaaaaacatcaccaaacgtctaaataaagattcaacacacttagagtattaaacttagaaataaatgtgagctgcacatacaattaagaaagcctaataaaacctagtaagattattattcacccaatttttggtgagtcagtgagtgatggcggtcgtagttgtggtaagttaaatcaaggaataaatgcttgcagagaaaaaattgtaaggagcacctcctactactacacagttaaaaaatcaataatgacagacacggcaggctggctgatctatcttgtactttcatcgttattgtcttgcatttgtatgattaccacgttttatgaatttttatttttcaataatttgtattcattccttcattttccaacctgctgatt

SEQ ID NO: 288867 - DNA, 615 bp, Homo sapiens
tccgccaccatgcccggaacatcttttgtatttctttagtagagacaggctttcaccatgttggccagactggtctcgaactctggacctcaggtgatccacccgcctcagcctcccaaagtgctgggattacaggcatgagccaccgcgcccaaaacgatgacttcaagtgaaatgctgtataataaaattaattttatcataggctarttgatatgaacaagagtcacaaaaacatcaccaaacgtctaaataaagattcaacacacttagagtattaaacttagaaataaatgtgagctgcacatacaattaagaaagcctaataaaacctagtaagattattattcacccaatttttggtgagtcagtgagtgatggcggtcgtagttgtggtaagttaaatcaaggaataaatgcttgcagagaaaaaattgtaaggagcacctcctactactacacagttaaaaaatcaataatgacagacacggcaggctggctgatctatcttgtactttcatcgttattgtcttgcatttgtatgattaccacgttttatgaatttttatttttcaataatttgtattcattccttcattttccaacctgctgatt

SEQ ID NO: 288868 - DNA, 615 bp, Homo sapiens
tccgccaccatgcccggaacatcttttgtatttctttagtagagacaggctttcaccatgttggccagactggtctcgaactctggacctcaggtgatccacccgcctcagcctcccaaagtgctgggattacaggcatgagccaccgcgcccaaaacgatgacttcaagtgaaatgctgtataataaaattaattttatcataggctaattgatatgaacaagagtcacaaaaacatcaccaaacgtctaaataaagattcaacacacttagagtattaaacttagaaataaatgtgagctgyacatacaattaagaaagcctaataaaacctagtaagattattattcacccaatttttggtgagtcagtgagtgatggcggtcgtagttgtggtaagttaaatcaaggaataaatgcttgcagagaaaaaattgtaaggagcacctcctactactacacagttaaaaaatcaataatgacagacacggcaggctggctgatctatcttgtactttcatcgttattgtcttgcatttgtatgattaccacgttttatgaatttttatttttcaataatttgtattcattccttcattttccaacctgctgatt

SEQ ID NO: 288869 - DNA, 562 bp, Homo sapiens
gtgtgcttgatgctactaaggtaccagtgttttctgtcctgcctccttcggctacatttaaattttttccctttgtcttaattttcagtttgattgtgaggcatctacatacaactttctttgtttttaggcctccttgaagttctgtgarctttttcaatctgtaatattttagctttttccctaatttgaataatttcacaattattgcctcaaaaacaaaaatcagccccattctttctctcatttcattttgagacccaaactacacatctggtagaccttttgatattgttcctcaagtacctgaggatctctttcttttcttttttgttctttttttctcacttcttcagttggataattctgctgatagaccttatggttaatttttagaagtaggattactgtggtcaaagagatgtataggccagaaacagtggctgatgcctataatcccagcaccttgagaggctgaggcaggagaatcgccttgaggccaggagttcaagaccagcctgagcaacacagtgaagccctatctctacaaaaaaattaaaaa

SEQ ID NO: 288870 - DNA, 562 bp, Homo sapiens
gtgtgcttgatgctactaaggtaccagtgttttctgtcctgcctccttcggctacatttaaattttttccctttgtcttaattttcagtttgattgtgaggcatctacatacaactttctttgtttttaggcctccttgaagttctgtgaactttttcaatctgtaatattttagctttttccctaatttgaataatttcacaattattgcctcaaaaacaaaaatcagycccattctttctctcatttcattttgagacccaaactacacatctggtagaccttttgatattgttcctcaagtacctgaggatctctttcttttcttttttgttctttttttctcacttcttcagttggataattctgctgatagaccttatggttaatttttagaagtaggattactgtggtcaaagagatgtataggccagaaacagtggctgatgcctataatcccagcaccttgagaggctgaggcaggagaatcgccttgaggccaggagttcaagaccagcctgagcaacacagtgaagccctatctctacaaaaaaattaaaaa

SEQ ID NO: 288871 - DNA, 524 bp, Homo sapiens
aagagataagtttatcagcaggaagaagattagtgaataagataactgaaaattaaacgtggattatttggtggccaaagaaaamgagggtacagaatgtttttcatagttgaccttgacttacagaagtagggaaaattgatttttaagtgatatttaggtattcccatgtaaatatttaaaatattattattacaaatacaaaagtttaaatggcttttttgaaaatgttataaacttaattcaagttccaaagaaacacttttgataaaaagtgtttcttaagtaattaatatgattttcaggccgggcatggtggctcatgcctgtaatcccagcattttggaaagccaagatgagaggatcacttgaggccaggaaattaagaccagcctgggcaacatagggacaccccatctctacaaaaaaaattaaaatatgtaaaattttaagaagaaaatgggattaattttcttttgaaaattaatcccagatcccataaaatggaaacaggaataattgtt

SEQ ID NO: 288872 - DNA, 524 bp, Homo sapiens
aagagataagtttatcagcaggaagaagattagtgaataagataactgaaaattaaacgtggattatttggtggccaaagaaaaagagggtacagaatgtttttcatagttgaccttgacttacagaagtagggaaaattgatttttaagtgatatttaggtattcccatgtaaatatttaaaatattattattacaaatacraaagtttaaatggcttttttgaaaatgttataaacttaattcaagttccaaagaaacacttttgataaaaagtgtttcttaagtaattaatatgattttcaggccgggcatggtggctcatgcctgtaatcccagcattttggaaagccaagatgagaggatcacttgaggccaggaaattaagaccagcctgggcaacatagggacaccccatctctacaaaaaaaattaaaatatgtaaaattttaagaagaaaatgggattaattttcttttgaaaattaatcccagatcccataaaatggaaacaggaataattgtt

SEQ ID NO: 288873 - DNA, 439 bp, Homo sapiens
attttttttttgatatgacctcaaaatcaaagatgacaaaaagcaaaatagacaactgagattacattcaaagaaaaagattctgcacggcagagaaaacaatccacaaagtgcaaacacaacctgtaaagtgggagaaaatctttgcagtctatacaactgatatggcattaatatctaaaatttataaggaatccaaacaacttaatgacaagaaaacaaacaacagtattttaaaargggcaaaacacctgagtaaacatttctcaaaagaagacatacaaatggccaataggtcaataggtgtattaaaaaatgttaaacatcactgatgatcagggaaatataaatcaaaaccacaatgagatatcactttgcacctatcttaagggctattatcaaaaagacaaaagaacaaatagtaaggatgtggagaaaa

SEQ ID NO: 288874 - DNA, 542 bp, Homo sapiens
ttgccaggatattttgttaattttagttcaatagtcttagtcaaatgtatctcacagatagttccttcaatttctgagtccttatttacaactgaactttacctgaagtctaaacttctttttctgttatacacataagaaattattgaaatatttagtcccagcctcagtacatgcctccatttcctttcttttcttcacattcccaccaattgttgttcaggttcacatmagtgacaatgtttggaaagtcttctctcaaataggtttctctgttggggaacacaggagataaactgtctgaattgctgtgtatctttccttcaacctaacagaggggccacatctcagctgggtccaggattgttgggctgtagtcctttctctcagtagtccttaactgctatgccactgtccgttccagcgttggagataaaaagtctaattccagcatcattcttcttctgtagataatatgttctttttaactgtatgtttgtttgtcagatttttctcttcctctttagagttcaacatttgta

SEQ ID NO: 288875 - DNA, 542 bp, Homo sapiens
ttgccaggatattttgttaattttagttcaatagtcttagtcaaatgtatctcacagatagttccttcaatttctgagtccttatttacaactgaactttacctgaagtctaaacttctttttctgttatacacataagaaattattgaaatatttagtcccagcctcagtacatgcctccatttcctttcttttcttcacattcccaccaattgttgttcaggttcacatcagtgayaatgtttggaaagtcttctctcaaataggtttctctgttggggaacacaggagataaactgtctgaattgctgtgtatctttccttcaacctaacagaggggccacatctcagctgggtccaggattgttgggctgtagtcctttctctcagtagtccttaactgctatgccactgtccgttccagcgttggagataaaaagtctaattccagcatcattcttcttctgtagataatatgttctttttaactgtatgtttgtttgtcagatttttctcttcctctttagagttcaacatttgta

SEQ ID NO: 288876 - DNA, 542 bp, Homo sapiens
ttgccaggatattttgttaattttagttcaatagtcttagtcaaatgtatctcacagatagttccttcaatttctgagtccttatttacaactgaactttacctgaagtctaaacttctttttctgttatacacataagaaattattgaaatatttagtcccagcctcagtacatgcctccatttcctttcttttcttcacattcccaccaattgttgttcaggttcacatcagtgacaatgtttggaaagtcttctctcaaataggtttctctgttggggaacacaggagataaactgtctgaattgctgtgtatctttccttcaacctaacagaggggccacatctcagctgggtccaggattgttgggctgtagtcctttctctcagtagtccttaactgctatgccactgtccgttccagcgttggagataaaaagtctaattccagcatcattcttcttctgtagataatatgttctttttaackgtatgtttgtttgtcagatttttctcttcctctttagagttcaacatttgta

SEQ ID NO: 288877 - DNA, 542 bp, Homo sapiens
ttgccaggatattttgttaattttagttcaatagtcttagtcaaatgtatctcacagatagttccttcaatttctgagtccttatttacaactgaactttacctgaagtctaaacttctttttctgttatacacataagaaattattgaaatatttagtcccagcctcagtacatgcctccatttcctttcttttcttcacattcccaccaattgttgttcaggttcacatcagtgacaatgtttggaaagtcttctctcaaataggtttctctgttggggaacacaggagataaactgtctgaattgctgtgtatctttccttcaacctaacagaggggccacatctcagctgggtccaggattgttgggctgtagtcctttctctcagtagtccttaactgctatgccactgtccgttccagcgttggagataaaaagtctaattccagcatcattcttcttctgtagataatatgttctttttaactgtatgtttgtttgtcagatttttctcttyctctttagagttcaacatttgta

SEQ ID NO: 288878 - DNA, 526 bp, Homo sapiens
ttatgcaaagactagcagtctgatggtgctggggagtcagaggctggaggtcagggcctgaggaggtagagcaacccttgtaaataaacactgaaacactaggaagctttgaaacactagaagggctgtactctaggagtaaggacaacccagaaaaagatcaacgctagcactagcaaaagttaagcgtcctctcagatggatcaagatctgccagtacccttatctgcctgaattctttctagagaaacgtaacagtttcagagaacagagtctctarttttttcatataaaatcactatccattcacactcacacaccaagcatgccaagaaactaccaaataagtaaaaaaaaaaaaagtggaaaaaaatagcgacagaaccacaggtgatctaaacattggaactatgagggattttaaaataaaatgattctccaggtcctgttagaaaatattggttgcatcttctgaaaaagagatgcccgcatctaagaactccaggagctcaagtagctgcctgtt

SEQ ID NO: 288879 - DNA, 521 bp, Homo sapiens
cttcaacatactgatttcatatatttggatatatacacagtagtgagattgctggatcatagmtagttctatttttaatttttttatgactgtccatactgttttccataatagttatactatctaacattcccaccaacaatgtgcaagggttccccttctccccattctctccaacactttttattttttgtcttttcgttaatagtcattctaacatgtatgaggtgatatctcattgtggttttaatttgcatttccctgatgattaattttgttgacctctttcttttcttcatttacctatgggccatttgtatgtcttatttgagaattgcctatttaggtactttgcccattttttaagaagtttattccctactattgggttgttggaattatttatatattttggctattaaccccttatcagataaaggtttgcaaatattttctcccattccatagattgcctttttcttctgttatttcctgcctatgcagaagtttttctagtttta

SEQ ID NO: 288880 - DNA, 521 bp, Homo sapiens
cttcaacatactgatttcatatatttggatatatacacagtagtgagattgctggatcatagatagttctatttttaatttttttatgactgtccatactgttttccataatagttatactatctaacattcccaccaacaatgtgcaagggttccccttctccccattctctccaacactttttatyttttgtcttttcgttaatagtcattctaacatgtatgaggtgatatctcattgtggttttaatttgcatttccctgatgattaattttgttgacctctttcttttcttcatttacctatgggccatttgtatgtcttatttgagaattgcctatttaggtactttgcccattttttaagaagtttattccctactattgggttgttggaattatttatatattttggctattaaccccttatcagataaaggtttgcaaatattttctcccattccatagattgcctttttcttctgttatttcctgcctatgcagaagtttttctagtttta

SEQ ID NO: 288881 - DNA, 521 bp, Homo sapiens
cttcaacatactgatttcatatatttggatatatacacagtagtgagattgctggatcatagatagttctatttttaatttttttatgactgtccatactgttttccataatagttatactatctaacattcccaccaacaatgtgcaagggttccccttctccccattctctccaacactttttattttttgtcttttcgttaatagtcattctaacatgtatgaggtgatatctcattgtggttttaatttgcatttccctgatgattaattttgttgacctytttcttttcttcatttacctatgggccatttgtatgtcttatttgagaattgcctatttaggtactttgcccattttttaagaagtttattccctactattgggttgttggaattatttatatattttggctattaaccccttatcagataaaggtttgcaaatattttctcccattccatagattgcctttttcttctgttatttcctgcctatgcagaagtttttctagtttta

SEQ ID NO: 288882 - DNA, 473 bp, Homo sapiens
cagtttttttaaagtgtttgagaaggactggttttctttcttctttaagtgttttgtagaattcatgagtgaaaccatcaagtcctgggcttttcttttcttttaaacagctttaaagatataatttacatatcatacaattcatccatttaaagtgtatcatccagcctaaatgcccatcaaccaacaagtggaaaaagaaaatgtagtatatacaccatggaatactactcagctataaaaagaaatgaaataatggcatttgcagcaacctggatggagttggagaccattgttctaagtgaagtaactcaagagtggaaaatcaaatattgtatgttctcacttacaagtgggagctaagctaggaggatgcaaaggtatgaaaattatataatggactttggggatgtgggaggaagggtgggaggaggtgagggataaaagactrcacgttgggtatagtatacgca

SEQ ID NO: 288883 - DNA, 1122 bp, Homo sapiens
ctctttccaggtgatgtgtacaaaagtcacacaaacagtactcagtggaaggtctttgcagatgcttctcacaataaatccggactaaagtcccatgcctaagttcttactgaggaaggggacaaagccagcycagatgttcagtagaagcagacggtgtgaagaaagctttttcctgccttctcctccatttgcaacagcagctcctccagattgtcttccatgtcgtctgactgctgcaggcactggcaaatctcacagatgaggaaagctcccagggtggcatcttccagggtatcttggatgtccatgttgatcacgtgcacaggctgaaaggtctgctgttctctggaacacagatcttccaccactgtgtcatagacactctcctcacaggtgaagatgacatcaaaggaatcagtgcactcctgaaatctttctggaccgggcttgattctctcatttcttcccaagatgtgtaagattccgttgcgggtgtagcgttctctatctttcctgaggaggtcattgtacatctgcttatatgttgttgcaaaatcataaactwtttttatttgtgtgaagaatgccattgatattttgatagtgattgcattgaatctgtaggttgcttcgggtagtatggacattttaacaatattggctcttccaatccatgaacgtggaatatctctccattttttttggtatcctcttcaatttctttcatcagttatttgtttccttcccctgccactttcagaatctttatttttgaactttgacagtgtgattataattcatattggggtaatcttacttggatttaatatgacatagataatgtatattaaatacatttctactttaaatgwcttcaacttatgattactttgttgggacgtaacctcatcatacatcaaggaacattcatatgataaagcaagtagagttaaaatttaatgaaagaatcttggtggttgactatataattggtcatcataatttttttttaattttctgtatatttgaaactttttataataaaataataaaaaatttatttacttgaataagtcatggtgactctttaagaatagccaatacagaataatggaaata

SEQ ID NO: 288884 - DNA, 1257 bp, Homo sapiens
acaacaatttagttaccagtgtaactttttcatacttaacatctactgtatttcacattttacagtttgtccaaaaagtaatcttttttacaagaatttccttattttatctgttccttaattctagttatataggaggacctatatgtagtcaastcaccaaacattttctctgggtgtttcccttctctttttaacttcaggaattgttctgattctaatataagtctattacttactctgtctttattccatttattttagattttaaattgatatatgtaatatttcaacaatatgttatttaaaaatatattgtaataatattataattaccaacaattgcactcataaaaataattattaatattgaaaacatttcattatttaatcatactttcatgtatttctatgttgtataatgattagtttattattacttaatgttacatgacaagaatttcctttgctacaaaatgaacttcacgtatttatttaactttaattaatactgcctaacagattttcacataaacattatattacaaaatatatcattttagccaacctatacattcttattgaatatttatttcagatgatttgccagtatcaataaacttgtcatwacaacaatttagttaccagtgtaactttttcatacttaacatctactgtatttcacattttacagtttgtccaaaaagtaatcttttttacaagaatttccttattttatctgttccttaattctagttatataggaggacctatatgtagtcaagtcaccaaacattttctctgggtgtttcccttctctttttaacttcaggaattgttctgattctaatataagtctattacttactctgtctttattccatttattttagattttaaattgatatatgtaatatttcaacaatatgttatttaaaaatatattgtaataatattataattaccaacaattgcactcataaaaataattattaatattgaaaacatttcattatttaatcatactttcatgtatttctatgttgtataatgattagtttattattacttaatgttacatgacaagaatttcctttgctacaaaatgaacttcacgtatttatttaactttaattaatactgcctaacagattttcacataaacawtatattacaaaatatatcattttagccaacctatacattcttattgaatatttatttcagatgatttgccagtatcaataaacttgtcat

SEQ ID NO: 288885 - DNA, 557 bp, Homo sapiens
attcagggttgtcttggattttgtttttgttttttaactaattgcaaagagggagaccagaggaacaatggggtgtctcaacaaacaaatgaaargatttagttattataggatttagggtacagattagttttaggcaaaataatcaacattttaataaggttaaaataaagcaggggtatctctaaagagattaacataaatactgaaatcttattttagaacccagctgcctgatctgagaatgggtggctaaactcccccattcatcaaaggttggcctgtgatgtcgttcttttatgaattttggcttgaaaatctttcattccctatttacgtacatgtactcaaaattggctagccagagaacttttcactgagaacaggatatgtggactgaaacttacctaataagcagtaagccatagaaaaataggcagtgagagtatttggggcacaggaaaaagaaatttcaaaaagccgacttctaaaattagatgaaggagttcaaagaatagaaatggttgtagcagagtatttgtggaggtgaagcagaa

SEQ ID NO: 288886 - DNA, 591 bp, Homo sapiens
tgttataatgatcctgaataaaccacatgtttaatggcctctagtgttactctcttagtctatttctactgttataacaaaatgcytgagactggacaatttataaataatagaaacttattcctcacagtttttgagcctggaacgtgcaaaatcaaggtgcttgcaggtttggcatctggtgagggcctagtctgttcttccaagatgccaccttgaacactgtatcttcacaagacaaaagaaacagaagagcaaaaagggcctaggctagttccctccagccctttgataagttcactaattccatgtaggaaggctctgctctcacgacttaatcacttcctaaaagccttgcctcttaatattatcacattggtggttgagttttaacatatgaattttggggaatatcttcagaccataactttccatccttagcccaccaaattcatttccttctcacacacaaaatacattcattccatcttaatagccccaaaaagttataactcattccagtaccaattcaaaattctaaggtctagagtctcatctaaatcagatatgagtgagacccaaggtacaatt

SEQ ID NO: 288887 - DNA, 624 bp, Homo sapiens
taatttccacatttgatcttaattctttcaacaaccctgtgtgactggtactatcattatccttgttgaatagatgaggtaatccaaattcagagaggttaagcaactcactcaaagacacacagttaagtaatgcagctttaatgtcaattcaggcaacccatcttaatcactatgcttctactcattcttcaatgaaagaaggaagatggaaggaaggaagagagggaggaacggagggagggtggcagttagcgmgggagggagggatggagaaagggatggaagaaataaggaaggaaaaagaaagacctggagggtagcaagaacggaaaaggcaagcaggcaggtaacaggaagagatggacttaccgtaagactaatgaaacttaagtgtcagggccctgcaatcacacaggcttttcccagcacttgagaggggctctagcaatgtgcttttgtaattttgtgaaattatcaagagacattttaactgcaagtagttaagacatctttctcttttcattctgactctacctctgttaaacttgccctcgtgttcaggggcattggagtggccatgggtaatttgggatccaattaaagtaagttgagtttaggatg

SEQ ID NO: 288888 - DNA, 547 bp, Homo sapiens
cagctaacattgattgaacagtcagtatgtcagttaaataatttccacatttgatcttaattctttcaacaaccctgtgtgactggtactatcattatccttgttgaatagatgaggtaatccaaattcagagaggttaagcaactcactcaaagacacacagttaagtaatgcagctttaatgtcaattcaggcaacccatcttaatcactatgcttctactcattcttcaatgaaagaaggaagatggaaggaaggaagagagggaggaacggagggagggtggcagttagcgcgggagggagggatggagaaagggatggaagaaataaggaaggaaaaagaaagacctggagggtagcaagaacggaaaaggcaagcaggcaggtaacaggmagagatggacttaccgtaagactaatgaaacttaagtgtcagggccctgcaatcacacaggcttttcccagcacttgagaggggctctagcaatgtgcttttgtaattttgtgaaattatcaagagacattttaactgcaagtagttaaga

SEQ ID NO: 288889 - DNA, 525 bp, Homo sapiens
aatattataaggtaactatgtgctttaaagatttaaagattcttttgatagtacgatacagcacaatgacaaattggatagatgaaaggcagaacactttactacttacagctccaaaggagagaaggttgccatgaagggccacacagaggattgctcctggagatggggtaacagcaagttgaaaatgtagcaggtgacttatgtgtggcaagtgagaggaagttaggttcaggggcttcctggggatcagctaatttgcataattcccgggagttggggcatagatgctgtccctgcttgtttggtacctggccctggggaggttgggatatgtgcctagttgctctggagagtggacgtctgataagaaaagtgkttgggttttgggcacagcaaactgcctgcatgaggaattgaagagttttcaaccatgacttcagcactgagtccagacggcacttgtgaaatattatattatcctattatgactgctgaagtgtggcagcttgaacctgcagaaac

SEQ ID NO: 288890 - DNA, 630 bp, Homo sapiens
tcctcacattgtcagatgctgcataatcctcataaactctgtgatgctcttaaatcttcttgaagtgcagctgctaccttttcacatggcatcttctcctatgagatgcattttcctctgcatttttcaagcttgtaattctctaacttaaaaaaaaagttcagctatcaagaaaacttgcttttttctcattaagacccmgaatcacaagaatgtctgattaaattaaccacaagttctagagcacaagcagtgctctgtttaatcttcagttttcttattcatactgggtgatggaaacacttttctccttcttgttactttggactccctaggtacagggacacttccttgttactggctctgaaaagacatgtgtctcgtaaacagtagtcggaatagatcagcgttttatatcttcgagtacatttgttagctataaagtaagatatgagagggaggaggaatatatcctaggtagaagagaatatttcatatttcgtaatcacattttctcagaaatagtgtatccaaatattcaacacacaaaaaggcagcatcctaactgctttttccttctctcctcacctgactgtgtttttccttacctattttatcttttcatttcag

SEQ ID NO: 288891 - DNA, 618 bp, Homo sapiens
ataataagtttgttttttctttttatggtcacaatttttgatcaactgcaatacagagtgggataaaaacrtttcccatcaaaattcatcttctttgggagtttcgaagtataaatgacaagtgccagtggaaaaggccatttctttccattgaccttggccttctggaatcagcgtcttcagaagtgaaggctgggcatttgcattttccataagttccacaggagattttattttaacaagcaccgtgttttgaatttagtgccactcaataattcttgttgatgatagttctcttggtggttgcccatccgacctgctctgggccagcctggaacccaagccaaatctacgtttgttagacttttaaaaggatttttgtcccaaatgttataaggagattttttaaacgtggctgtgaattacccttaaaagtataaagctattgctatagaaaaatagtgttagtttttcataatagagtcttaaaactgcaaatttaatttctctgattttctctgaggttctcaatctggaaagcagaaataagagtaaaatccttacctcgtttatgggtttaaggatagactgaagtattatctaaaaagtatttagtaa

SEQ ID NO: 288892 - DNA, 581 bp, Homo sapiens
ttcaattgggtaatggaatcacaggctttcagagaagtagggctcaaatataatttttatttataaaagattcctctgctattgaacaatgggacaacagaaaatacattaaaagaataatttcaagtaaaatattgaccaagtttatgttttcttgtggaggtgaaatcttgggccaaggtaacttctcaaacaactgtaacatagccatttgtaagacattgtttattaaaataggagctcctgacttctgatcttgcaggttggttggagaatcacctagggaccatgttaaaaatattacttcagtaactttgtggttggcactgagaagctgtatttcatgctccttcccaagtgatttttaatatgtagctggatttgggaatcattatgctaaatcacacattgtctcttttaaaaagagccaaaagagaacatttttcagcccataggaccaggaaattttatgcctttccaaagcatmtagtaccttttgatcttataggacaattataaatgttataatgaattgtttttctcttttagatttgactataagctcagaggcaattttgacc

SEQ ID NO: 288893 - DNA, 586 bp, Homo sapiens
agtctcagctactcgggaggctgaggcaggagaaccacttgaacttgggaggcagaggttgcagtgagccaaggttgcatcactgcactccagcctgggtgacaaaatgagactctgtcaaaacaaaacaaaacaaaacattgtgtagmggcatgataattgtgtggtcatgcacctcttaaggacaaggatatgtcctgaaaaatgcatcattaggtgatttcatcatggtttgaacatttaattttaagagtgtgtttacacaaacctagatgctatagcctaccatacacctaggccgtatggcatagcctatggcttctaggctagaaacctgtgcagcatgttactgtactgaatactgtggccaattgtaacataacggtaattatttgggtctctaaagatgcctaaacatagaaaagttgcagtaaaaatatggcataaaagataaaagatggtacatctgcatagggtacctaccatgaattgcacttgcaggactggaagttgctctgggtgagtcagtgagtgaatagtgagtgaacctgaaggcctaggacattactgtacactactgtagact

SEQ ID NO: 288894 - DNA, 515 bp, Homo sapiens
aaaatgcatcattaggtgatttcatcatggtttgaacatttaattttaagagtgtgtttacacaaacctagatgctatagcctaccatacacctaggccgtatggcatagcctatggcttctaggctagaaacctgtgcagcatgttactgtactgaatactgtggccaattgtaacataacggtaattatttgggtctctaaagatrcctaaacatagaaaagttgcagtaaaaatatggcataaaagataaaagatggtacatctgcatagggtacctaccatgaattgcacttgcaggactggaagttgctctgggtgagtcagtgagtgaatagtgagtgaacctgaaggcctaggacattactgtacactactgtagactttataaacactgtacataggctacactaaacttatacaaatatttttcattctttaataagttagccttaacttactgtaaatttttttaaaaagttttgactcttgtaataacacttagcttaaaacac

SEQ ID NO: 288895 - DNA, 483 bp, Homo sapiens
catctgcttagatgtctactctgatctccctcctctgtcttcttacataataattttactaatcagtcaccacattcagggaaactgcctgaaagtaaagctcatataaagaaatgagatagattgggaacctaaatccagatctctgcttaggcctgaagctgttttgtacttctggagttttctagcacataagccaacaattttgcttttatgtttaggatagttttggctcaatttcttccacttgmgttgaaaaaaatgactgacttatatacagaatacggattactgggctaaggttaaatagccattctggtaggaaacagcttgagcaaaggcatctaggcagaaaatctcagaatgtattcaaactggagtatacattaaatggaaaaaatgggaggtaggtctagataagaagtgctttgaatttcctgataaagaaaataaaatgtactctataaaaaaaatgaggaactg

SEQ ID NO: 288896 - DNA, 483 bp, Homo sapiens
catctgcttagatgtctactctgatctccctcctctgtcttcttacataataattttactaatcagtcaccacattcagggaaactgcctgaaagtaaagctcatataaagaaatgagatagattgggaacctaaatccagatctctgcttaggcctgaagctgttttgtacttctggagttttctagcacataagccaacaattttgcttttatgtttaggatagttttggctcaatttcttccacttgckttgaaaaaaatgactgacttatatacagaatacggattactgggctaaggttaaatagccattctggtaggaaacagcttgagcaaaggcatctaggcagaaaatctcagaatgtattcaaactggagtatacattaaatggaaaaaatgggaggtaggtctagataagaagtgctttgaatttcctgataaagaaaataaaatgtactctataaaaaaaatgaggaactg

SEQ ID NO: 288897 - DNA, 483 bp, Homo sapiens
catctgcttagatgtctactctgatctccctcctctgtcttcttacataataattttactaatcagtcaccacattcagggaaactgcctgaaagtaaagctcatataaagaaatgagatagattgggaacctaaatccagatctctgcttaggcctgaagctgttttgtacttctggagttttctagcacataagccaacaattttgcttttatgtttaggatagttttggctcaatttcttccacttgcgttgaaaaaaatgactgasttatatacagaatacggattactgggctaaggttaaatagccattctggtaggaaacagcttgagcaaaggcatctaggcagaaaatctcagaatgtattcaaactggagtatacattaaatggaaaaaatgggaggtaggtctagataagaagtgctttgaatttcctgataaagaaaataaaatgtactctataaaaaaaatgaggaactg

SEQ ID NO: 288898 - DNA, 630 bp, Homo sapiens
aagcaaaattcgtgttgctttagagggactgattgcagcctggtgtcaggagaaaaatactcatatgtgtcaacttggctgggctacagcacctaattatttaatcaaagtctaatttaggtgttaccgggaagctattttatagatgtggtcaacatttacgattagttgacattargtagaggagattactgtagataatacaggcaggccccatctaatcagttgaaagtccttaggattaaaaattgagattacctagacaaggaggaaattctgcctccagaccacaacatcaactcctgctgtcaagtttccagcatgttggcctgctcaacagattttagacttgccagccccacaatcacataagccaattcctctctctctctctctctttctctctccccctctcaattctactggttctgtgttcctggataaccctcactgaaacaagttctttgaagttatttgcatggtggtgtgactgaccaacactgaaacttaaatgggagtgtcagcaccatttgtgaaatggtaccaactattttgaaaaacaaaatttgccttcatagtatagctcaaagggtgatgctgcctatcccccctacctgtttaaactggctt

SEQ ID NO: 288899 - DNA, 537 bp, Homo sapiens
tagctattattatgcaacggcccaactatactgtgtttgcttgacatcagatcaaactgtccttcatccccactcactctctgaatcgtgattcagtagaaaagagctgaatcaataagaaaacggagaagctaatttatgtgcttcattgtctctctgaagcagttttaccatgggcttatgccgactggcactcttatgaatgtctgttcctattacctttttattagagaggcatgttttataataattctataactaagctgttgtaagttcttatattacctgtggggaactgaagttcagagatacaaagtgaattagtgccagaatggagaaaagaacttggacttttcatcagcaggcctattgtagagaagacttacaaatcaataactctaaatatctaagtagaatttaccagtgcttaactgttttaaacatgcactggaaatatttgaatgaaaatgtaatttttccagctttccttaaatacttrtggaaactgttgcttaggcaatgtttgtgggtacttca

SEQ ID NO: 288900 - DNA, 544 bp, Homo sapiens
gcttctgtgttttgactgttttgagtttgatttgtacctgctctggatctaaacacttgtactcttacttgtatctcattggcattattacacatcttattttattttattttattttattttattttattttattttattttattttattttaaatatrtgctgccaataaggtgaagcttagtaacatgattaaagttagggtggaaatagttacgcatgctcagatttttcatatagattaacttgtttttgccacctatttcttattgcgccatcatatcttttttactctagagtgaacttccaatagataaagttttccatttcttcctaagctcttctcccagtagaataaaagaataaagtttattcttgacaatagatttgttagtcctctcatgaaggtaataaagctatctcatgcaggtctatgtgacaatgagtttgtaacaaattggaccaaagtaggcatcggcatagattaaatattagattagttagctgattgcctggttctcagttaagtcagcatgtccccgct

SEQ ID NO: 288901 - DNA, 565 bp, Homo sapiens
atgacaaaatcaaaacagaaccctctgttgtttttttcccccctgtcattttaggaaatttcttttatcactttgatcatgctactttgtggagttgtttgggcaaatccccacagttagacaggcccactgacttccatctaatagggtcatatttatgttgctagaagggctgccgactggcttcatttccccaggaagtaactcttggctagctctggcagggacattataagcttgcaggctttatcaaatctgtgaaaccaagtgtgatttacagagagagttggggcaaagaaacatacagcagttggattctaaaatcagaagtttcctccctgaagaggtagagggaatttgagtcagaaagccaacaaataagaccgatttcarcttatcttgaaaatttctagacttattcataaatttgacagggtgctatcagagagaaacactttgaaatgataaaaagtaaacactcgacatgagacccagagatgtggatatctttcagatggctgagcttggtgcagagagcaacagtgacaacagaatatgatgccac

SEQ ID NO: 288902 - DNA, 514 bp, Homo sapiens
gttcttggtggtggttgggccatcctgcttttgccatccattgttctgattgcctcctattcactccattggtgagggagggattccttgcttcaattagcacaacatggacaaatacaagcaacccarcactggagatgaaagtagcagcagttgatctgtcatacattctcacagcccaggataaagtaccatgcataccatgcagggtcccacaggttgcatgctggaacagagtaaacaagcaggggctgctggggagagactctgtagtaaaaagagggtgcagtgacccccgtttcccataggagaatatgattaactggtttgaacaatttcacaggctggcagggaagtcaaacctgttgggttgaggacctgttagagtgtagctggtccaactgctgcagggactagtgggtggggagtgtaatagcagggaaacttgcagtgaagactctggggcactgtgaagcttaaagatgtcaaggcagcaactgtaacttcatttcag

SEQ ID NO: 288903 - DNA, 565 bp, Homo sapiens
caaagagcagataactaaagctacaagttcttggtggtggttgggccatcctgcttttgccatccattgttctgattgcctcctattcactccattggtgagggagggattccttgcttcaattagcacaacatggacaaatacaagcaacccaacactggagatgaaagtagcagcagttgatctgtcatacattctcacagcccaggataaagtaccatgcataccatgcagggtcccacaggttgcatgctggaacagagtaaacaagcaggggctgctggggagagactctgtagtaamaagagggtgcagtgacccccgtttcccataggagaatatgattaactggtttgaacaatttcacaggctggcagggaagtcaaacctgttgggttgaggacctgttagagtgtagctggtccaactgctgcagggactagtgggtggggagtgtaatagcagggaaacttgcagtgaagactctggggcactgtgaagcttaaagatgtcaaggcagcaactgtaacttcatttcaggccccaaagctctatcccctggatc

SEQ ID NO: 288904 - DNA, 597 bp, Homo sapiens
aaaaatatagggtgattaatatttttcttgccaccaatttgtatttattcattaagtcaatcataggttaaataactcttgacaattcttatcaaattcaaagttttaagtagggggcctggatttacttgaacatggtgtggcagggaccatgaatccggaagtgtgttatagtgatagcaacctctataaaaggtagttygaacaaagttcattcaacagcagaaaattgctgattaaacttatcaactctccttcctccattttggccttttcttttatttctctgttctgattacagttaagtggtggcataatattttttagatatgaacatgatctaaaatttctccttcctgtattttctttcccaactccattcctgcattcaagcaaatagttggctttgtaattttcacctcaggggaaggatgaggaaaaaaaaaagccatataagtgtttaggttctcaaaccttgtctgtttaaggagattgttcttatataggcaatgccctccagattagtgaattctccaaggtggaatgaaaggtaataaaggggaatgaaaagggatgaagaggaagtgagaaaaggta

SEQ ID NO: 288905 - DNA, 1112 bp, Homo sapiens
tatgactatacaagcagagatttgagtgatatgttttgaggatggaggacggggctgtaaaccaaggaatgcaggtagcttggtagataaagcaaggaaactaatcctcccctagaggctccagaagggaacacagccctggcagcaccttgacaaatacacttttatccagtgtggctggtcagatttctaacctacagaaatataagataataagcttgtgttgtgataagcccctgtttgggtaatttatttactgcagcaatagaaagctagtacaataataaatccataaataagtactgtaagatcttccagaaggaaaatgtaaacttaagtatataaaagctgtggaatagcaataattattctttcccaactccggcaggtctatgtggtcyatctgcatagaccagcaacagctttactcaagaggaacaaggaacaagaggaaaaatgtggaaagatgcttctcctgctctctgcagccacctaagttttgctcagatctatatcccttttctaaataaattgggaaactacaagagataagcacawtgaagagagagcaggagaacaagaggttggagaagwggtgttgaataatcacgtgggggttgtataggccctgataatgaacttagttgcttttttaggtgtaataggatgccactgtaaagtttaaggaatggaaggtacatactttcacttgcttatgagctcttaccttatattgtcttctaacttttaatgtacacatcttttgcctaaactagagcgttcaatttttgtagttgcttcaaatatttactgttggtgctgctaatatttttgtaaaacctgtgtggctgccctttcaagactgtaattacactaacactttatttcagtttttagcaatgtcaaactttccaagagtactgactcgactcagaaaggcatcgattcagtaaagtttcaattggacaactaaagtacatttatgtggttattacactgtcaacaaacatgacctgccttgcgagcaactcgagaagtgccaaaacacttgttagttgttcaaaatctagagtgtgccttctttaggattaggggtaacttgatgagacttg

SEQ ID NO: 288906 - DNA, 778 bp, Homo sapiens
aggaactgaggtttctgataaaaactgacagacrtagccattgccttttcagttaaattttctagggactttgtgcatttcatctccatatagtatgaacttctgaggattttaaacaaggaaagcaactgttgagaactgaaaatgagccctaaccaaatgtatcaacgtacagaactgagatatgaatttataaggtgggaggagatccgttaataataawtcccccacccttttatttttttctaataagttaggaaagacctttaatacttatacttacaattcttgccagtgactttttaaaggataagtattaaatatgtcattcaagatgcataatgtgttacaaaaattagatccattagaataagaaactcattaaggggtaaatttaaagggtttacagaagtacaccataactttatgaagtactgagttgttaatacaaaacatggtaacattcattaccttttgttaaagaaatcctataaacaagaaaactctttaagtgaaaacataaaaaattctataatgaatattttgaaacactggctctcaattacatataataaaccaccctaaaggaaaaaaaaaatgaatgttaagagaaaggagtgagcaagtgtgtccatctgcttgtgtttcaggaaagaaaagggaaatagtcaaagctacttcaagtacctaaagtactagctgtgcactgaaaaaaaaaaaagaaaccaatattttatgtaaaawtctaataatttttaatgctggcagtaaaaatgta

SEQ ID NO: 288907 - DNA, 599 bp, Homo sapiens
cccgaactgtgttttaagtttagttggaagccattgcatggttttaagcaggaatgtgatattgtataactttatatatatatatatatatgtatatataattttttttttttttgagatggagtctcrctctgtcacccaggctggagtgcaaaggcacaatcttggctcactgcaacctccgcctcccagggttcaagcaattctcctgcctcagcctcctgagtagctgggattacaggtgcacaccaccactcccggctaatttttgtatttttagtagagatggggtttcaccatgttggtcaggctggtctcgaactcctgacctcctgattggctcacctcggcctcccaaagtgctgggattaccggcatgagctgccatggccagccaaatgatatgtatttttaaagataatgtagataattgttgaattaaactatcttttcataagaagagggcttatttactctaattgaatattaatagtctttgtttcttcatatgaaacatttgcagagccttcaaagtctccatgaataaaaccatcaaaaataaaagaacgcttaattcaaatttttcatgttcattgtct

SEQ ID NO: 288908 - DNA, 599 bp, Homo sapiens
cccgaactgtgttttaagtttagttggaagccattgcatggttttaagcaggaatgtgatattgtataactttatatatatatatatatatgtatatataattttttttttttttgagatggagtctcgctctgtcacccaggctggagtgcaaaggcacaatcttggctcactgcaacctccgcctcccagggttcaagcaattctcctgcctcagcctcctgagtagctgggattacaggtgcacaccaccactcccggctaatttttgtatttttagtagagatggggtttcaccatgttggtcaggctggtctcgaactcctgacctcctgattggctcacctcggcctcccaaagtgctgggattaccggcatgagctgccatggccagccaaatgatatgtatttttaaagataatgtagataattrttgaattaaactatcttttcataagaagagggcttatttactctaattgaatattaatagtctttgtttcttcatatgaaacatttgcagagccttcaaagtctccatgaataaaaccatcaaaaataaaagaacgcttaattcaaatttttcatgttcattgtct

SEQ ID NO: 288909 - DNA, 572 bp, Homo sapiens
aaacaattccctataatatacctacctactaagtctgctaaaggaatgtctgagacagtgaaaaaggtcccagtctctcttcctagttgttctaccctgatgagccataaaactactggtcactaataactacaggagagtcatcaattgtcaattaaaagaaaatgcatatagactttttagtattcagagagaagggagaaaagtagcgttaagccagatgaaatgtaagggaatcctaactagtaggctagcaggttccttaaaactgcacctgygtttaaaaaaagtgagggtggggggcacgcaccagaagccatctgcttttcaaacttaacttgtgacaaaggatttgtctcttcaggataaagataaattgagtctcagataaactattagtgctgatcaatccaggactgcctagcacaacaaaaagagaacagaaggtccaaatccgagctaccagtaagatttattaaaacatacactagagtattattcactgtcccctccttttttaaccaaccatgatgttgtagatgctaattctatccttgcttccatagaatacc

SEQ ID NO: 288910 - DNA, 627 bp, Homo sapiens
taaagctattttccaaaatggggaatattctggcatgcctgtattgaaatgacagtttctttatgggatgggagatgggcaggaaaatgccagccaggtagttgcccctgtgcccaccactagtagaagttctataatgagattccaaattagattgctgaacctcaaagacaaggtgcttcacatctgtgagatgttcagcttgactttataatgagttcaccgagcagaatgaaccacacttgaaatcaaatactttgcatgcaggatgaartaagtggggatcaatcatagtcagggaagtggcaattgctctgaatgtaatgacacactaaagggggaaaaatgagagtgtaaaatggagcagatgaaagaaccagttcatggctaacacaaatgggcaacatttgtgccaaggcagagctgcatgcattagtctgtagagatgatatctaaagagggtgggatggtgagaagtataaatgttcacactctctatccaaagacatcaacctactcaggaagcagccataatcatcgccatcttaggaagcattttctgagtgtattattctcagaggcttttaactggtgacagactttggaaaagcaaacaaattagtcatg

SEQ ID NO: 288911 - DNA, 496 bp, Homo sapiens
gctctgcctcgtctccccaccccccgctcacgcgcgcgcccctctccacacacacagacacacacacacgcactcacactcatacacaccctcgcgcgcggagtcactccccctcgcacgccctcgccctgggcaccctcccgcggcgagactccgggtcctcctcctctcttcctccactgcctggcggctcggcgctctccggcccggcctggggccgctgggcccgcggggatcggaggggagccgagggcgcagccttgccgcctcccccggactctcctctcctccccgccccgcctgcgccgcgcccccaccacctccccccctcgrgaaagggacctcgggagaggcagcccgtggccggccgggctccgctcggcgcggcgccggcagcggcgggggaagggagagagcgagggagcccgcgagcccgcgagcggagcggcgaggcggggaggggacgcgctgccgagccggggctggagcggcggag

SEQ ID NO: 288912 - DNA, 540 bp, Homo sapiens
ggagcttggtctcctttactctctaggaaggtggccaggggttctgtgggtgaactaggccttggattgcccctggtttccaagtgacacaggttgtgtgccctgtgctgagcaccagcctcagcaggaattcccagagctccctttgctaccttgaggctcaggctaactccatcctcacagcagtaagcccagatgctctacttccttctttgcatgggtgattgtcattaagaggtctcaatgagacctaagctatagacttgatgtcctggatccagtggaatcagggatcatttgagccaaagggtcttttgtcatgttcctgtccaattcttctcattttacagaggaagactctgaggcccagagggtgatcatggcttgctttcacaaattgaggatgggaytgaaactggaattgcaaggcctcatgagcccttgctcattgctgcctggggaagacagggaaaggaatctctgcatcttgctgtcttctcttgggaacatcagtattgggcaacacctagatcaggaaag

SEQ ID NO: 288913 - DNA, 579 bp, Homo sapiens
gctcatcaggcctgtgctgtttttctgttctctgagcagtgacgcttacgggaaatgtcattgtcattcctattgtcttctgcagcatctgactcaacctccctttattagggagagaagggacctgtgacaatttcctttagcatgcagatggggaaactgaggcagagattggcttctttagaaaactcgactgagtgagtcagaggcagatacttgaattggattcttctgattcagatctgtcttcagattttactctggagaragaacgctcacccttggcaacccctgaaatatattagcaaggcatagagtaaagttgatgggaaaaaaaatggcacatataaaaccaggggtcccagctcgagcacctactgatgcagttcactatgctgcctcctgggttgtgatacaaaagtggaggcatctcggcctttgcccgaaagagcttagtgtgggatagggaaagttgggaagtggtctggctgtactcttgaactccacattgagactgcctgggtttaatggcgccgcctacttattacatcctttagacaattattacaactccttatg

SEQ ID NO: 288914 - DNA, 554 bp, Homo sapiens
ggatagccatgtggaggaaaacaggcatggtgatagccacctactcattactttttattagtagtataacagcatatgattgtctactatatgtcagcagtgtactaagaactttgcatatattatctctttaagtttttacaacagccctgcaaggttggaaaaaattctgtaccctataaagatgcagaagctgaggctcagagagactatataaacttccatagtcacgtagctgataaggagcagaactaattttcaaataccaatctggctgctccmatgccctttctcctttcaccctactactcattcccatgccatcagggcccctaggtagaaatcagaccttcagggttattacttttttattatggcctcagggtgtgatattctcttctagtcatattgccagtcaagaaagcatcagcccaatgagtactatatgccaggcactgtaccagacacacagagattttaaaaataaaacatttccttctgagcagtttaaatactgacttagaagttaatggtgattaatccatgttttaatg

SEQ ID NO: 288915 - DNA, 640 bp, Homo sapiens
gagatggctcactgctactggttgtctcagttatgtaattgagaccggcagcctatctgtcaccccatgctctgagatgagagagcgtttgacagtgtccaaaaatcactttaatgaaaacggaattgatttttacttcttccaagcaggaagccgcctccaggtgatttgcatttcactttaaaacataatcctggaaggggcctgcctgaggttcgaagaggcgaggagactaagcctgggagatcaatacaggcacaccacagaatggggtacttgataagcctccccacagtgccagaagtggagccagtctgagatctgcttttgttaacccttaaatacctgaaattttatctgcacctttatctactgcctcyggagcccatcagtgctcctctcaatgcccaagcaccttggccccaggacactggctaatagtgtccacctacttgggggtgggcccctgcctaggggacttggatcttaggacacctattgggaacaaacgacctcaaagccttttctttgttgacatttctctgttgacatttctttgttgacagttctctggtgctgaaattcttaagagagggtgcagaactgcatctcaacaaggaatctttcattcgttcaacac

SEQ ID NO: 288916 - DNA, 633 bp, Homo sapiens
agagccttgccttcgaggttgtacaaagtaaatgtttcactctgaactggatttctcccagtggcatagtcctccatctttccttccatctctatttcccagccagttattgaaagactgtaaatgcaaatattaactgatcagccaaacaattaaaaaggcaaatcagctgcttaaaaactaaacaatgcatgtcaaagactgatggaaataatgtttttatgattcttgatgtgggaatttttccagtgctattttcccagtggcatggataaccaagagttaaccataattacaggcttatagctgctgargagtatcattagtttatttttacttcttcctggacacgcatacttaagcagaaaagaaaactaagagaattaaactaaatgatatcaaaaccatggacagcacaaatcttgattcaattcaacaaacattattcaacatccagttgaatttgcaaggcatattagtaggcattttgggggatagagaaataaagaaaacatgaggcttgtccctaagaagttgtcaatatagtggggaattggagtatgtccatgagagtgtacaagagagaatggggcatgtgctgaaaagatcaggagtacagaataaatgcttaat

SEQ ID NO: 288917 - DNA, 530 bp, Homo sapiens
cactcactgttagctcgtcctcctttcctcacatttctcccaccctccaccacacattcctcttgtcagaggcctagagaaagaatatcccaatggggagtacctgggttaaagaaatttggcatcttgctcaggagtcaattctgatatccacaagactccatccagtttgagaggccaagatggtgtccaggccatgttgaacaggactacytggtcatatcctgggacctgctctaggaactgcagttgagggactctggaatgggccaaggtctagaatcagatctgtctactgaggtgtggaagacttcaaaggaacaaaatgagaggattgatgtcctgccaagtagattcaatgttgatgtctacagtgagatagagtccgcttagggaaatggggtcttttgcatctcagcctccaccatgtctgcacatctcatcctgggtggaggttcatgctgggagcagaacacccccaggagacagagctaaggcttcaccaacaaaggctggtatgggcagctgag

SEQ ID NO: 288918 - DNA, 530 bp, Homo sapiens
cactcactgttagctcgtcctcctttcctcacatttctcccaccctccaccacacattcctcttgtcagaggcctagagaaagaatatcccaatggggagtacctgggttaaagaaatttggcatcttgctcaggagtcaattctgatatccacaagactccatccagtttgagaggccaagatggtgtccaggccatgttgaacaggactacctggtcatatcctgggacctgctctaggaactgcagttgagggactctggaatgggccaaggtctagaatcagatctgtctactgaggtgtggaagacttcaaaggaacaaaatgagaggattgatgtcctgccaagtagattcaatgttgatgtctacagtgagatagagtccgcttagggaaatggggtctttygcatctcagcctccaccatgtctgcacatctcatcctgggtggaggttcatgctgggagcagaacacccccaggagacagagctaaggcttcaccaacaaaggctggtatgggcagctgag

SEQ ID NO: 288919 - DNA, 530 bp, Homo sapiens
cactcactgttagctcgtcctcctttcctcacatttctcccaccctccaccacacattcctcttgtcagaggcctagagaaagaatatcccaatggggagtacctgggttaaagaaatttggcatcttgctcaggagtcaattctgatatccacaagactccatccagtttgagaggccaagatggtgtccaggccatgttgaacaggactacctggtcatatcctgggacctgctctaggaactgcagttgagggactctggaatgggccaaggtctagaatcagatctgtctactgaggtgtggaagacttcaaaggaacaaaatgagaggattgatgtcctgccaagtagattcaatgttgatgtctacagtgagatagagtccgcttagggaaatggggtcttttgcrtctcagcctccaccatgtctgcacatctcatcctgggtggaggttcatgctgggagcagaacacccccaggagacagagctaaggcttcaccaacaaaggctggtatgggcagctgag

SEQ ID NO: 288920 - DNA, 405 bp, Homo sapiens
atggcagaagaaagatgacaaaatcacatgagaggacctggtgctgagctgtgctagccccagagcctgagctcagggcatcatttcacccccggggtgccttcattcattaattcattcagcaaaaatgtcttgagtacctactatgtgccaagcactgttctagatgcagggaatggagcagtaaacaagggagaatccttgccctcaatatactggcattctagattggggagacagacagtaaacaagtgtacaagtaaatgaacaagataaatataggtaacgataggtgctatgartgaagtaagagagggtaatgggaccaaagggaggctgatggtgggcacacagctgaggtgggtggcaactctaggtatggggttcagggaaggcctctccaag

SEQ ID NO: 288921 - DNA, 535 bp, Homo sapiens
ccctcagcattttgaggtcactgctcacctctcccagggcctcccctacccactgcctggacctaccaggcccctgccactctccatgctctagccctgctctagttttctccatagcgcacttaccaccactgactttttaatttttttttttagctaacgtatctctaggttattaactcccattagaatataagttccatgagggtaggaattttattctactttgctcactgctgtatcaccaaatgattagaacagtgtctgtcgcataggagctcgacaaatacttgttaaatgaatgagtggcatagaggtcatggtgcactagaaagtgaacgggccctggagtgaagctcacctactccccgggaagctcagcttctcggagtctcagctgatgggatacctgcttttaaagatctccaagtcccttcttaccttcccacaaaaaacgsagatcatggcccatgcctgctgttccacctcagtggaaagcagcgggaatgaagctcaagcaaagaccaggggtggg

SEQ ID NO: 288922 - DNA, 556 bp, Homo sapiens
ttgggttaggagaagaagctaattaggtaggcagatttagaagggctgctggaatgcgggacaaagcgaggtgatttgatgcaattcactgttttyggtttttgttttttttttttctaagcagtaagttgtgttcaaagtcacagaaaattggcttgaaaactgaggtgacaaggaacaggagggcatccctgtgttagtagttgataaatcctggggctggagggaaccccaaaagggggtctcatatactgcacagagtgctgaactccagcacacccaaaggcagagggccttcgccgtttaatgtgacaccagaactggcgtcttcatccgtggctgggaaagcattcattcaggttctctctgcaggaaggcacaaggtgttcctcaatgaatgctggttggatggataactgaatcagtgtctgagcagtagaccaagaagccagccagcccctggacctgggtaaggggcttctggttcctgtccacctggccccagggcacttgcctgcctctggtccttgattcttggctaggtgccacccccaac

SEQ ID NO: 288923 - DNA, 574 bp, Homo sapiens
ggatcttactcagctttgttgctgcctaatggagtagtttggggtcctcaacttctcctggcctcagtctcagctgcaaaatgaggctccacttttcattcagatgatttctaagttcccctctggtcagagctgatgctccaagattcctgggaaccttggggtggggaccgtggtgagagattaygctttcagggtggggtcaaaatgaggtgcctgtggacaacctggttctccagcctccaggcaggagaggtcaggctggggctttgggacccacatctctcagaaaaaaagaaagcattcttcctaagcctcttcatcaaaagtactgggaatgagcctccccaccgcctacagaggtggcgctctgggctctgcttcagcatttattgtcctgacccattttcatgaggtctcattctttagtctgggagcagctcattgaattcatcatatatctccgggtccccagtgcctagctaggggcctgccactgcacagccagtgcactatgaatatttgttgaagaaacaaatgaaagttttgccccggcccttagaatgcaggctga

SEQ ID NO: 288924 - DNA, 478 bp, Homo sapiens
gcacacactcagtaaataacagtaaacacatgactttactgcccatggggctgctatatttgagttttcatttcacttattgcttactgaaagtctccttgtgccagaccccagggaccaaggggcaaatgaacagttctggccctcaggaagcttgtagtctccccagggagatggccacgtgcaccaccaattgtaacctggtgcagtcaatgtcaagcgatgatcagaatgataaggtctttttgagtactgcacatgtgccaggcatgtggaggtacaggtgctgagccaygggggagcagatggaggaggtaaccctggtgggcagattcaagaagaccttctcaaagcaggtgatgggcattttaaaattcacttttgtttcccacccagaggtagaatcatggtaaagaaaggctaagtaaggtaagagctaaaatgaatagagtccttcactctctaagcattccaggtg

SEQ ID NO: 288925 - DNA, 654 bp, Homo sapiens
caactcgcaagcccctggcacagtgcctggcacttcacgggagtgctcagtatgaattcacttaaataaatgagatttttggctaaaattgaccaggaaacctctttctctagaatagatggtatctctgagacatccatttcttgaggacagaattctaatacttctttgcatctcccagagcatttagcacagagcctggcacataytaggcacttttctaaatgtgtttggatggctaagtgagtcaatgatggggctctggagcaggatcccaatcagtccatccagatgtggagccatcctacccggagagagaacgatgccgaaggtccctgggagccaggcttgatgctggaggaagcaccagggaactggttgcatcatcattaaggggcttgtgatgatctgccacttctgggcaggagccaaagctccagcccctccttctcccttaagcctatacatttccctttgctcctcttcccccctcttcttgccttctctgccttggggagaggctgggcagaagacagagaacaaaatctgtctctttgcctacccctatgttgtctgaaaatagtaactaattcaaaagtcacttttctttggcctcagaataggtcccatgagtgtttgggagcagattgaact

SEQ ID NO: 288926 - DNA, 513 bp, Homo sapiens
taggtctttttatacttttatatgaattgtagaatcagcttctaaatttctaccaaaaggaaaaaaatcctgctggggctcatgcctgtaatctcagcactttgggaggctgaggagggtggatcacttgagcccaggagttcaagaccagcccaggccaacatagcaaaatcccagctctaccaaaaaaaaaaaaaaaaaaaaaaaaaaccggttagctgggcttggtggcacttgcctgtactcccagctactcaggaggctgaggtaggaggatcacctgagtttggaaggttgtggctatagtgagctgtgatcacatcactgcactccagcttgggtgaccctgtttttttaattaaaaaaaaaaaaagcctgctgggattttttgaatcaataagtaaatttggggggaggtaatatcrtaacaatattgaatcttctaagctgtgaacaggacacctgtttccatttatttagatctttagtttctataagcaatggtttgtagtt

SEQ ID NO: 288927 - DNA, 573 bp, Homo sapiens
ggccatttaaacagtgaaacaccaacaaaaaacacaaaaatgtaaaaaaggtggcactaaatagaccacacaaaaaactcttgtttcggccaggcacagtgrctcatgcctgtaatcccagcactttgggagggtgaggtgggtggatcacctgaggtcgggagttcgagaccagcctgaccaacatggagaaacgacatctctactaaaaatacaaaaaattagctgggcgtggtggcacatgcctgtaatcccagctacttgggaggctgaggcaggagaatcacttgaatccgggaggcggaggttgcagtgaactgagatcgcactattgcactccagcctgggcaacaagagcgaacctccatctcaaaaacaaacaaacaaacaaacaccaactcttgtttccagtatgagcgtggagacgagaaggcagagctcagccctgcggggcctcagctggatcacgcacccttggaagcacaggcgttgtgctgttctgtgcaaatccttgaatgattttgagagcaccgtgaggattggttctgagttttcctcactaaatgaggaggt

SEQ ID NO: 288928 - DNA, 331 bp, Homo sapiens
tactgaggaacttaaattttacagcatctaagagacttaccccaaacccccagagaataagtgggatagctgggatttgaactcaattctgagttctgttggcttagcaaccattctgtaaaatgtaccaaggaacaaaacctttctgatcccagttaccaaactcatkttgagcaaaatcacactcacacaggaaaaaaaaaaaaaaacacatgaaactgtcaccaaaatggcaataacccaactgtgctacagttttatttcctgctggcttctcagttctctaagccttgaggatccacgcgccttagaccattattacctcctcccc

SEQ ID NO: 288929 - DNA, 544 bp, Homo sapiens
aggtgatgcctcaccctgctttggctctcacacagtgggatgcacccactgtcctgcacccactgtccagcactccccagtgagatgagcacagtacctcatttggaaatgcagaaatcacccatcttctgtgtcacacaggctgggagctgtagactggagctattcctattcagccatctttgagttcctctgaacaaggaaatatcttcagaaaaaactggaaagaagcattatgagaaactgctttctgatatattctttcttctcacagatttaaatccttcttttgatggaatagtttaraaacactgtttgtatacaatctgcaaaaggatatttgggcacatggaagcctgtgttgaaaaatgaattatctccagatatgaactagaaggaatctttcagaggaactgctttgtgaggtgtgcattcatctcacagagtaaaactttcttttgattgagcagtttggaaacaatgttcttgtagaatctacaaaggcataattgaaagctcactgagacctgtggtgaaaaaggaa

SEQ ID NO: 288930 - DNA, 553 bp, Homo sapiens
ctgagcattttggaagcactgtttttctagaatctgcaaatggatatttgtgagcactttgaggcctatggtgaaaaaggaaatatcctcacataaaaattagaaagagctttcttttagaaactgcttcgtgatgtgtgcattcatctcacagagttcaacgtttcttttcattgaacagtttggaagcactgttctcctagaatctgcaaagggatatttgggagtgctttgaggccaatggtgaaaaaggtagtatcttctgatgyaaacaagaaagaaagtttctgagaagttgcttcataatgtgtgcattcatctcacagagtttaaccattctattgattgagcagtttggaaacacagtgtttttcgaatctgtgaagggatatttggattcactttgagacttattatgacaaagtacatatcttctgatacaaaccagacagaagcattctgaggaactgctttgagacgtatgcattcttcacacagtgttgaacctttcttttgattgagcagtttagagccaccgttttttttagaatct

SEQ ID NO: 288931 - DNA, 565 bp, Homo sapiens
ctttttttgtgaggtgtgaattcttctcacagagctgaatcattctttctattgagcagtttggaaagagtctttttgtagaatctgtaaaggtatatttgggagtgggttaaggcctacagtgaaaaaggaaatatcttcacataaaaactagaaagaagctttctgataaactgttttctgaggagtgcattcatctaacacaggtcaacttttcatttagccatttggaaactctgttcttctaaaatctacaaagggatatctgttagctctttgagacctaaggttcaataagaaatatcttcacataagaactagacagaagctttctgataaacttctttgtgatgcgtgcattcatctcacagatttgaaccattgtattgattractagtatggaaacagtctttttgaagaatctgcacatggatatttgggagtgtgttgaggcgtatagttaaaaaggaaatatcttctcattaaaactagagggaagctttctgagaaactactttgtgatgtgtgcattcatctgaaaaagttgaacgtttcttttcattt

SEQ ID NO: 288932 - DNA, 553 bp, Homo sapiens
ctgagcattttggaagcactgtttttctagaatctgcaaatggatatttgtgagcactttgaggcctatggtgaaaaaggaaatatcctcacataaaaattagaaagagctttcttttagaaactgcttcgtgatgtgtgcattcatctcacagagttcaacgtttcttttcattgaacagtttggaagcactgttctcctagaatctgcaaagggatatttgggagtgctttgaggccaatggtgaaaaaggtagtatcttctgatgtaaacaagaaagaaagtttctgagaagttgcttcataatgtgtgcattcatctcacagagtttaaccattctattgattgagcagtttggaaacacagtgtttttcgaatctgtgaagggatatttgkattcactttgagacttattatgacaaagtacatatcttctgatacaaaccagacagaagcattctgaggaactgctttgagacgtatgcattcttcacacagtgttgaacctttcttttgattgagcagtttagagccaccgttttttttagaatct

SEQ ID NO: 288933 - DNA, 566 bp, Homo sapiens
tttcttttcattgaacagtttggaagcactgttctcctagaatctgcaaagggatatttgggagtgctttgaggccaatggtgaaaaaggtagtatcttctgatgtaaacaagaaagaaagtttctgagaagttgcttcataatgtgtgcattcatctcacagagtttaaccattctattgattgagcagtttggaaacacagtgtttttcgaatctgtgaagggatatttggattcactttgagacttattatgacaaagtacatatcttctgatacaaaccagacagaagcattctgaggaactgctttgagacgtatgcattcttcacacagtgttgaacctttcttttgattgagcagtttagagccaccgttttttttagaatctgcaaagttgaaccattattttgattgagcaatttggaaccactcttcyttttctagaatatgcaaaaggatatttgggggcgctttgaggcctaaggtgaaaaaggagatatcttcacatgaaaattagaaaggatctttcttagaaactgctttgtgatgtctgcattcatctca

SEQ ID NO: 288934 - DNA, 465 bp, Homo sapiens
cagaatgcttctgtctagttcttctccgtagaggtttgcttttccaacatacacatcaatgcactccctaatatccctttgtagattctacaaaaacagtgtatacaaactgctcaatcaaaagaaagttctaactctgtaagataaatgcacacatcaaaaagcagtttctcagaattcttctctgaagacatttacttttccaccttaggcctccatgtgctaccaaatatcccttcgcagattctacaaaaacagtgtttccaaactgttctttcaaaagatggacttaactatgtgagatgaatacacatatcagaaagtagtgtatcataacgcttttttccagtttttatatctgaagatatttccttgttcaccataggctttttttgcactgcctaatatcgctttgcagattttgcaaaamgagtgtttcaaactgctcagtaaaaagaaaggttg

SEQ ID NO: 288935 - DNA, 498 bp, Homo sapiens
gcttctgtctagttcttctctgaagataattccttttccaatataggcttcaatttgctccaaaatatccctttgcatattctacaaaacagtgtttccaaactcttccatcaaaagaaagatttacctctgtgagatgaatgccgtcatcagaaaacagtttctcataatgcttctttccagtttttatcttaatatatatccttcttcaccataggtctttttgtgctaccaaaatggttttgcagattatatgaaaacagtgtttccaaactgctcagttaaatgaaaagtttacctctgtgagatgaatgactacatcacaaagaagtttctcaaacagcttctttctagtttttatctaaagatatttcattttttaacataggcatcagtgtgctccaaaatatccctttgcagrttctacaaaaacagtttttccaaactgctcaatcaaaagaaatgtttaactctgtgagaagaatgcacacatcaaga

SEQ ID NO: 288936 - DNA, 953 bp, Homo sapiens
ctgtttttgtataaactgtgatgtgatattaggtagcacaaagaagcctatggtgaaaaagaaaatatcattcaataaaaagtggaaggaagcttactgggacactgatttgtgatatgtgcattcatttcacagtgataatctttcctttcatggagccatttggaaacacccttttggcagaatctgcaacatgttattttatagcgcattcaagcctacagtgaaaaaggaaatatgtccagataaaaactrgaaggaaactttctgagaaactggtttgtgatgtgtgcattcatctcacagagttaaatctttcttttaattgttcagtttggaaacactgcttttwttcttttcatgagccttttggaaacactctttttttagaatatgtgaaaggatatttgggagtgcattgaagcctatggtcaaaaaggaaatatcttcagataaaaactagaaagaagctttttgagaacctgctttgtgatgtgtgtattcatgttacagagttaatcctttcttttgattgaacagtttggaaacactgtttttgcataatttgcaaagcaatatttggcagcacaaaaaagcctacggtgaatgaggaaatatcttcgaataaatactggaaagaagagttatgagaaactgctctctgatgtgtgtgttcttcacacagagttaagtccttctgttgaaggagcagtttggaaacactgtttwtatggaatctgtgaagggatatttgggagagcattgaggcctatggtggaaaaggaaatatcttcagagaagaaatacacaaagctttctgagaaactgcattggatgtgttcattcatctaacagagttaagcttttcttttgactgagcagtttggaaacactgtttttgtatgatctgcgaagtgagattagatagtgcaaaaaggcctatggtgaatgag

SEQ ID NO: 288937 - DNA, 542 bp, Homo sapiens
acgtgtgtttcatctcaaagagttaaaactttcttttgattgatcagcttggaaacactgtttttgtagaatctgtgaatggatatttggaacacacgaggccaatggtttaaatagaaataacttcagataaaaacaagagaatatttctgagaaamtgatttgtgaagtgagcattcttctctcagatttaaaggttacttttgattgagctgtttggaaaaactggcttggtagaatctgcaaaaggatgtttgggagcacaagaggcctatagtgaaaaaggaaatgacaagataaaaactagaaagaagttttctgagaaactagttagtgaagtctgcattcttctcacagaggtaagcgtgtcttttgattgaggagtttggaaacactgtttttgtagaatctgcaaagcgatatttgggagtgcactgatgcctttggtgaaaaaggaaatatccttggacaacaactagaaagaagctctttgagaaactgctctatcatggatgcattcttctcacagagataaacttctc

SEQ ID NO: 288938 - DNA, 542 bp, Homo sapiens
acgtgtgtttcatctcaaagagttaaaactttcttttgattgatcagcttggaaacactgtttttgtagaatctgtgaatggatatttggaacacacgaggccaatggtttaaatagaaataacttcagataaaaacaagagaatatttctgagaaaatgatttgtgaagtgagcattcttctctcagatttaaaggttacttttgattgagctgtttggaaaaactggcttggtagaatctgcaaaaggatgtttgggagcacaagaggcctatagtgaaaaaggaaatgacragataaaaactagaaagaagttttctgagaaactagttagtgaagtctgcattcttctcacagaggtaagcgtgtcttttgattgaggagtttggaaacactgtttttgtagaatctgcaaagcgatatttgggagtgcactgatgcctttggtgaaaaaggaaatatccttggacaacaactagaaagaagctctttgagaaactgctctatcatggatgcattcttctcacagagataaacttctc

SEQ ID NO: 288939 - DNA, 553 bp, Homo sapiens
aacagtgtttccaaactgctctttctaaagagaggtttaactctgtgagatgaatgcacacatcacaaagcagtttctagataccttctttctagtttttttccaaagataatttctttatcaccacaggcttcaatgcactccaaaaaatyccattgtagattctacagaaacagtagttccaaattgctcaataaataaacagatttaactctgtgagttcaatgcccacagagcaaagtagtttctcaaaagtttctttcgagttttcatccaaagatatttcctttatcaccgcagacttcagttcactcccaaatatctagttgaagattctacacagacactgtttccaaacttctcaatcaaacaacaggcttaactctgtgagttgaatgctcacatcacaaagcagtttctcagaaagcttttttgtagtttttatgtggtgatatttcctttttcaccacagacctcagggtgctcacaaacatacctttgcagattcggccaaaaaagtgtttccaaactgctctatcaagagaaagtttta

SEQ ID NO: 288940 - DNA, 1034 bp, Homo sapiens
aacagtgtttccaaactgctctttctaaagagaggtttaactctgtgagatgaatgcacacatcacaaagcagtttctagataccttctttctagtttttttccaaagataatttctttatcaccacaggcttcaatgcactccaaaaaatcccaytgtagattctacagaaacagtagttccaaattgctcaataaataaacagatttaactctgtgagttcaatgcccacagagcaaagtagtttctcaaaagtttctttcgagttttcatccaaagatatttcctttatcaccgcagacttcagttcactcccaaatatctagttgaagattctacacagacactgtttccaaacttctcaatcaaacaacaggcttaactctgtgagttgaatgctcacatcacaaagcagtttctcagaaagcttttttgtagtttttatgtggtgatatttcctttttcaccacagacctcagggtgctcacaaacatacctttgcagattcggccaaaaaagtgtttccaaactgctctatcaagagaaagttttawctgctacaaactggacagaagctttctgagaaatggctgtgcaatgtgtgcattcacctcacagatttaaacgtttcttttcattgagcagttcagaaactctcttcttctggaaactgcagagggatatttggaagtgcattgaggcttatgttgaaaaaggaaatatcttctgatacatactggaaagagagtttctgagaaactgctttgggatgtgtgcattcatctcacagagttgtactattttttttatggagcagtttggagccactgttttccttttttttttttttgttttgccctgattatatttwttattattattattattattattattattatactttaagttttagggtacatgtgcacaatatacaggttagttacatatgtatacatgtgtcatgctggtgcgctgcacccactaactcatcctctagcattaggtatatctcccaatgctatccctccccc

SEQ ID NO: 288941 - DNA, 219 bp, Homo sapiens
cgtgtgcattcacctcacagggttgaaacatttctttattgagcagtttggaaataagagtttttgtggaatctctcaagggatattcagatttgcatggaggccagtggtgtaaaaggaattatcttccaataaaaactagacagaggctttctgagagaatgctttgtgatgtgtrcattcatctcacagagttgaaccattcttttgatggagtcg

SEQ ID NO: 288942 - DNA, 410 bp, Homo sapiens
ctcacataaacactagaaaggagctttcttagaaactgctttgtggtgtgtgcattcgtttcacagagttcaacatttctcttcattgagcaacttggaaactctattcttcttgaatctgcaaagggatatttgcagtgtcttgaggcctatggcaaaaaaggaaataccttctgatacaaactagaaagaaagttkctgagaaattgctttctgatacgtgcattcttatcacagagcttaaccccctttttgattgagctgtttggaaacacagtgcttgtagaaactgcgaacaggtgtttagattcgccttgaggcctatggtgacaaaggaaatatcttctgacacaaactagacagaggctttctgaggaacttctttgtgatgtgtgcaatcctttcacaga

SEQ ID NO: 288943 - DNA, 360 bp, Homo sapiens
aaagaaagtttctgagaaattgctttgtgatgtgtgcatttatctcacagaatttaaccatttttttgattgagaagtttggaaaaacagtgtttgtagaatctgtgaagggatatttggattcaccttgaggcctatagtgaaaaatgaaatatcttctgatacaaattagacagaagttttctgaggaaccactctttttgtagaatctgcraagggatatttgggagtgatttgaggtctgtggtaaaaaggaaataacctcacataaaaactgaaaggggcttcctttgaaactgctttgtgatgtgtccattcatctcactgagataaacatttcttttcattgtgcagtttgga

SEQ ID NO: 288944 - DNA, 985 bp, Homo sapiens
ttggaaaaacagtgtttgtagaatctgtgaagggatatttggattcaccttgaggcctatagtgaaaaatgaaatatcttctgatacaaattagacagaagttttctgaggaaccactctttttgtagaatctgcgaagggatatttgggagtgatttgaggtctgtggtaaaaaggaaataacctcacataaaaactgaaaggggcttcctttgaaactgctttgtgatgtgtccattcatctcactgagataaacatttcttttcattgtgcagtttggaaactctgtccttctggaatttgcaaagggatatttggaatgctttgaggcctatggtgaaaaaggaaatatcttccrataccaactagaaagaaagtatttgagaaattgttttgtggtgtgtgcattcatctgagagwgtgctttcttctgacagactgaaacctttcttttgattgagtattttggaaacaatgttttagtagaatctgcgaagagatatttgtgcatgcactgtggcccatggtgaaaaaggaaataacttcggataaaaactatgaagaaaatttacaaaaactgctttgtgatgtgtgcattcttctcacagatttaaaatttcttttgattgagcagtttggaaacactatttttgtagaatctgtaaagggatatttgaaagcacagttaggcctatggtgaawaaatgaatatatttgaataaaaactagaaagaagttattgagaaattgctttgtggtgagtccattcatctcacagagttaaaactttcttttgacagagcagtttggaaacactgtttttgtaaaatctgcaagagatattaggtagctcaaaaaagcctatggtgaaagaggaagtatcttgatataaaagctagaaagaagcattatgagaaactgctttctgatgtgtgtgtttgtcgaacagatttaagtccttattctgaaggaacagtttggaaa

SEQ ID NO: 288945 - DNA, 615 bp, Homo sapiens
ctgcacattgtgcacatgtaccataaaacttaaagtataataataataaaaaataaacaataaaaaaattgtttccaaactgttacatcaaaagtaggacttatctctgtgagatgaacacacacatctgaaagccatttctcataatgtttccttccagtttttatctgaagatattacatttatcactataggcttttttgctgtagctgatattgcttytcagattttgcaaaaatgtgtttctgaacttctcagtgtaaagaaaattttaactccatggggtgaatgcacacatcacaaacgagtttctcaagaagcttctttctagtttttatcctaagataattcccttttcaatataggcctcagtgtgcttccaaatatacctttgcttattctactaaaatagtgttttcaaattgctcaatcacaagaaaggtttaaatctgtgagaagaattagagcatcttaaagcagtttctcagatagtttatatctacttcttttctgaagatatttcccttttcaccagaggcctcagttcactccaaatataccttttcatattctacaaaaatagtgttttcaaactgctctatcaaaaagaaggtt

SEQ ID NO: 288946 - DNA, 615 bp, Homo sapiens
ctgcacattgtgcacatgtaccataaaacttaaagtataataataataaaaaataaacaataaaaaaattgtttccaaactgttacatcaaaagtaggacttatctctgtgagatgaacacacacatctgaaagccatttctcataatgtttccttccagtttttatctgaagatattacatttatcactataggcttttttgctgtagctgatattgcttttcagattttgcaaaaatgtgtttctgaacttctcagtgtaaagaaaattttaactccatggggtgaatgcacacatcacaaacgagtttctcaagaagcttctttctagtttttatcctaagataattcccttttcaatataggcctcagtgtgcttccaaatatacctttgcttattctactaaaatagtgttttcaaattgctcaatcacaagaraggtttaaatctgtgagaagaattagagcatcttaaagcagtttctcagatagtttatatctacttcttttctgaagatatttcccttttcaccagaggcctcagttcactccaaatataccttttcatattctacaaaaatagtgttttcaaactgctctatcaaaaagaaggtt

SEQ ID NO: 288947 - DNA, 615 bp, Homo sapiens
ctgcacattgtgcacatgtaccataaaacttaaagtataataataataaaaaataaacaataaaaaaattgtttccaaactgttacatcaaaagtaggacttatctctgtgagatgaacacacacatctgaaagccatttctcataatgtttccttccagtttttatctgaagatattacatttatcactataggcttttttgctgtagctgatattgcttttcagattttgcaaaaatgtgtttctgaacttctcagtgtaaagaaaattttaactccatggggtgaatgcacacatcacaaacgagtttctcaagaagcttctttctagtttttatcctaagataattcccttttcaatataggcctcagtgtgcttccaaatatacctttgcttattctactaaaatagtgttttcaaattgctcaatcacaagaaaggtttaaatctgtgagaagaatkagagcatcttaaagcagtttctcagatagtttatatctacttcttttctgaagatatttcccttttcaccagaggcctcagttcactccaaatataccttttcatattctacaaaaatagtgttttcaaactgctctatcaaaaagaaggtt

SEQ ID NO: 288948 - DNA, 363 bp, Homo sapiens
taaatctgtgagaagaattagagcatcttaaagcagtttctcagatagtttatatctacttcttttytgaagatatttcccttttcaccagaggcctcagttcactccaaatataccttttcatattctacaaaaatagtgttttcaaactgctctatcaaaaagaaggtttaaatctgtgagatgaattcatgcatcacaaagctgtttctcagataacttccgtctaattctctaatgatatttccttttccaacataggcctcccaaatatcccttcacagattctataaaacagtgtttccaaacagctcaatcaaaagaaagttttaagtctgtgagataaacacacacattacaaag

SEQ ID NO: 288949 - DNA, 886 bp, Homo sapiens
taaatctgtgagaagaattagagcatcttaaagcagtttctcagatagtttatatctacttcttttctgaagatatttcccttttcaccagaggcctcagttcactccaaatataccttttcatattctacaaaaatagtgttttcaaactgctctatcaaaaagaaggtttaaatctgtgagatgaattcatgcatcacaaagctgtttctcagataacttccgtctaattctctaatgatatttccttttccaacataggcctcccaaatatcccttcacagattcyataaaacagtgtttccaaacagctcaatcaaaagaaagttttaagtctgtgagataaacacacacattacaaagwgaaagcttccttcccgttttttactggagatatttcctttttcatcacaggcttcaatgcgctcccgagtatcccttcacagattctgtaaaaacaatgtttccaaactgttccatcaaaataaggatttacctctgtgggatgaatgcacacatcagaaagcagtttctcataatggttctttccattttttatctgcaactgtttccttgtttgccacaggacattttatgctactaaacatagctttgcagattatttaaaaaagagtgtttccaaactgctcactcaaaagaacagtttaagtctgtaagatgagtgcatacaactcaaagcagtttctcaaaaagcttttttctagtttttatctacagatatttcctttttcaccataggcatcagtgcwctcccaaatatccctttgcagattctacaaagccagcgtttccaaacttttcaatcaaaagaaacgtttaactctgtgagaagaatgcacacaacacaaagcagtttcttaggaag

SEQ ID NO: 288950 - DNA, 577 bp, Homo sapiens
ttcactgtgttagccaggatcatctcaatctcctaacctggtgatctgcccaccttggcctcccaaagtgctgggattacaggcatgagccaccgtgcccgggagttccctggagaatttctaagtcccacttatttcagttgaatcctgttctacttgagcttctcactctgactggttctcagttggctagggcatagaactggcttggcaaagtgctaaatttagctttccttgagcctctctctgtggtgctaagcctatgatttaaaaaaactcaaamaaaaaacacaaaactctcaaaagtatcttgccttgctattgatgtgtcccccacaaaaatatttctcaaaagtacctttcattgccattgatacacatcagcagctcctttggaatatctctgactcccccaccagatgcacaagccacatgtgctgcttatgttttgggtgggaaatgttgaagggacactgctttgtttcaaggtaaaatgtattgaaccaaagttatttttcttctgatgaccaccgtgattatttgctttggtctgtatcctttaaatctcctccagttt

SEQ ID NO: 288951 - DNA, 612 bp, Homo sapiens
gtgttagtattgttatctatagttttaataccgactagggtaagaagtgcaattcccagttttaaaagtaaatatttgaaaacattagttttgggacttgtagcccacaaagaatttaggatttactccaaactgcagaaaaaattcaagaacagctaacaacagatatactatagtttttcttttgaagtatatttttttctctctccagtccccattttctattaaaaacaaatcatgatagaactgatttgtttaaaaaayaaactatagtcttattgtacttggcctgattatgtgcataaagtgcagcgagaataattattttttcacataggcttttaaaattggctttgatgggactctgttccataaggaatctcagataagactttttaaaagctgaggctagccatgggtttgtatcctcgaatacttaggagctgggtaaattcttctcctctggaggtcctaagatcacttggggctcgtgggtctgttagaaagtgatattctttagttaccacaggtcaggaaccttgtacagggactgtacagacaagatatgaggccagatttctcaagagggtcttagtgactctgagtcaactt

SEQ ID NO: 288952 - DNA, 622 bp, Homo sapiens
gctgcttaagcattctatgaggacaaagttagctcttggtgggtgttaggagcctgctgcctttttctttcttttttccttccttccyttccctcccttctttcttttctttttttttcattggtttttttttttttttttttttttttgagatggagttttgcacttgttgcccaggctggagtgcaatggtgcaatctcggctcactgcagcctctgcttctcgcgttcaagcaattctcctgcctcggcctcccaagtagttgggattacaggcgcccaccaccacgcccagtggctgtcctaatgaagtgtgtaggaaagaactgagaggcaccatattgagctgggaatgcaagagtttcttatcatcacacagtaccctttttgctgaactcaatccagtctgctgcatggcagttaggagtcagtttgaatggctttggttttgacttccaagtctgtcacttactagctgagcgaccttgggaaagggacttaccttctctctgagcctcagtttcctcatttgaaaagtcatgataatagcatccatcccttaagatcatggtagagagtagatggaagaatgtacattaagtgctgggcacaccgcctggca

SEQ ID NO: 288953 - DNA, 527 bp, Homo sapiens
agtgtgtaggaaagaactgagaggcaccatattgagctgggaatgcaagagtttcttatcatcacacagtaccctttttgctgaactcaatccagtctgctgcatggcagttaggagtcagtttgaatggctttggttttgacttccaagtctgtcacttactagctgagcgaccttgggaaagggacttaccttctctctgagcctcagtttcctcatttgaaaagtcatgataatagcatccatcccttaagatcatggtagagagtagatggaagaatgtacattaagtgctgggcacaccgcctggcatgctgtaaggattcagaaagggtagctattgtgtgatttcaaggtccactctgtagccagccacrgaccctggtggactgaacaaagggggatgaacatgataataaaagacaagagacaaaagggtatatttagaagaaggggtcgggggcaacttgcctctagtggacaagggccctgagctttacacagccctccgtatttattggtagaag

SEQ ID NO: 288954 - DNA, 527 bp, Homo sapiens
agtgtgtaggaaagaactgagaggcaccatattgagctgggaatgcaagagtttcttatcatcacacagtaccctttttgctgaactcaatccagtctgctgcatggcagttaggagtcagtttgaatggctttggttttgacttccaagtctgtcacttactagctgagcgaccttgggaaagggacttaccttctctctgagcctcagtttcctcatttgaaaagtcatgataatagcatccatcccttaagatcatggtagagagtagatggaagaatgtacattaagtgctgggcacaccgcctggcatgctgtaaggattcagaaagggtagctattgtgtgatttcaaggtccactctgtagccagccacggaccctggtggactgaacaaagggggaygaacatgataataaaagacaagagacaaaagggtatatttagaagaaggggtcgggggcaacttgcctctagtggacaagggccctgagctttacacagccctccgtatttattggtagaag

SEQ ID NO: 288955 - DNA, 604 bp, Homo sapiens
ttaatgttgagaataaatatgactcatcartcttgggcagtggaggtgggctgaagaaaattgttaatttacagggtcacttcactatgggagcctgaacagaaatgtcattttaaaagttgtgaccctattactgaatttactgttttagatggtgtgctgttagactggactcaatggaccaggggcttggctgaccctatccaggtcagacatttgacctggtgggccaagagactcacatgacctatctgccatgttcctgatgggattaagaggcagagtgcaagagaagtcttctggccagggagcaggagagggaagggagaaaacactggagtgtcaggcagagtgagggatagccagtaacctgttactaaggcttagttactgaaaggaggttcagagccaggaaggtggttctgaccttcgagagcgaccaaatcttctgaagaagagtgttcacaacaggaggtccatgatagaactgagacacaagaatgaaataaagccctgctcgggtagctgccatagacactgtagcttggttacattggacatggtggttcattcacatagtcagtggttttatatgtcagaaact

SEQ ID NO: 288956 - DNA, 590 bp, Homo sapiens
tgtataaattttggaatgagactgtcaatctctacaaaaatatactgtgattttgaatatattaacctatagcttaatttggggagagctgacatctcaacactatcagtttttctaatccacaagcatggtatatccctccatttaagtctttactttttctaagcaatattttgtagttttctgtttacaagtcttgcgcatattttgttaaatttattcctaagcactttatgattttaaccttttattataaataatactgtttttaaattttaaatttccagtagttaatttctactatttagaaatgaattgattttttgtgtattgagtttgtattcagcaaccttgmtggactaaccagccaggaagcagaaaccacatcagtcatctgaacagaacattttaataaagtttaaaatatatatttaataaagtattattaaatagtgaaagggattagctactataaggagtgagagagaactctaagcaatccaggaagggcaaatatggggattcgcaactaccacaaggactaaggcagagtatccaaaagtagaaataagaactcagaagagtcttag

SEQ ID NO: 288957 - DNA, 569 bp, Homo sapiens
cctttgagtgtcagcctctcatcaatggctgaatggatcaagaatataagtactccaaggactactctgaggagtgacctcttctgtttcttgacctcccctgcagaattaggccaaagttaccttccatgggagcttgcttggtatgtcatctttttgctcggccacatttccccgtgacccagtcagtttttccagggaacagtttatgatacatcattttcacatgaatcctcatgtcagtatccactcctggggaacctgctctactgagagcaatgtcaaaatcaccttaagaaattaattgtatatcccataagtacaagacccatagcttacatacacaaccytaaaaattgttttcgcacactactccttgagaaccactaaaacacatcaagcaaagagtaagataagattctgtgtaaagatgcctaggtccttaaagatagtttgcaaatttcatgtagtaaataaggatggatggagaattttaaagggttctgcttgactacatggtttatttcattatgttttagtattaagcctgaataattggaaaacatgtt

SEQ ID NO: 288958 - DNA, 580 bp, Homo sapiens
gacagtagtacaaatctagacaattasttgtgctatgagggcatttacttgggttaatgtgggagaacatgttgttggtaactcaggaagagatgacactctgaagggcaattaggcagtttggtgccaagaaaatatgttcatttatttcataaactactgagtacctacttcatgccagacactgttctaggccctggggtagagaggtgaacaaatccaagtgctttcactaatggagtctacattctaggagagaagacagacaataagcaaataaacacataacgtaagtgatttgagaaaaatgatgtcagaaagcagatagaatgtggcaagggctgttgttgatgcattaacaaggagaggtctttctaaggaaatgatatttgagaagcgactgaatgaagccaacataggaatatctaaggaaagggtgtttttggcagaaggaacctgaagatggcaacaggctttgtatattctgggagtagcaaggccaggccagtgttggaggaaagggctgatggtgaggaaaaaagactcaagaatgagaatggagttggctcatgtgagggtt

SEQ ID NO: 288959 - DNA, 578 bp, Homo sapiens
ttccccacttcatgtttttgtttgctttgttgaagatcagttggctgtaagtatttcggtttatttctggtttctctattctgttccatcagtctatgtgcctatttttataccagtaccatgctgttttggtgactatggcattatagtatagtttgacatcaggtaatgtgatgcttccagatttgttctttttgcttagtcttgctttggctcttttttggtttcatataaatttcagaatttatttttctaattctgtgaagaatgatggtggtgttttgatgggaattgcattgaatttgtagattgcttttggcaatatggtcattttcacaatattgattctacccatccatgagcatgggatgtgttttcatttgtttgtgtygtctatgatttctctcagaagtgttttgtagttttccttgtagaagtctttcatctccttggttaggtatattcctaagtattttatttgtttttgcagttattgtaaaaggggttgagttcttgatttgattttctgcttggttgctgttggtgtgtagaaaagctactgatttgtgtatactaat

SEQ ID NO: 288960 - DNA, 1161 bp, Homo sapiens
ttccccacttcatgtttttgtttgctttgttgaagatcagttggctgtaagtatttcggtttatttctggtttctctattctgttccatcagtctatgtgcctatttttataccagtaccatgctgttttggtgactatggcattatagtatagtttgacatcaggtaatgtgatgcttccagatttgttctttttgcttagtcttgctttggctcttttttggtttcatataaatttcagaatttatttttctaattctgtgaagaatgatggtggtgttttgatgggaattgcattgaatttgtagattgcttttggcaatatggtcattttcacaatattgattctacccatccatgagcatgggatgtgttttcatttgtttgtgtcgtctatgatttctctcagaagtgttttgtagttttccttgtagaagtctttcatckccttggttaggtatattcctaagtattttatttgtttttgcagttattgtaaaaggggttgagttcttgatttgattttctgcttggttgctgttggtgtgtagaaaagctactgatttgtgtatactaatwtaaccaaaccaggatggctattatccaaaaaacaaataaaaaatgttggtaagaatgtggagaaaagggaatcctccaactctgctggtaagaatgtaaattggtgtagccactaaggaaaacagtatgaagattcctccaaaaactaaaagtagaattaccatataaccctgcactctcacttctgaaatacatccaaagcawctgaaatcagtacgttaaacagatatccgcacacccatgttcactgcagcattatttacagtagccaagacacataaacaacctaaatgtccattgatgaatggatacagaaaatgtggtatatacatacaatgactattattcagtttttttaaaagaaggatatcctgccatttgtgacaatagcggatgaacctggaggacatcatgctaagtgaaataagccagacgcagaaagacatatactgcatgataccactcatgcgatgagtcagtaatagtcaaactcacagaaacaaagagtggaatggtgggtggtttccaggggctggtagtggagagcagggaatttgtagtcaaagggcacagtgtttctgt

SEQ ID NO: 288961 - DNA, 506 bp, Homo sapiens
gtaggtcataatcaacaaatttctgacacactcctgggaaggataactaatttgttgagtgaggtaatcaggacatataatgatatctgtaggctgaactaacagattaagtccttcaagataaaatgtaaccactttagaaagtcacataaaagacaatggtagtcagttcattccaaactaatgcctaacactgattgagcacttaccatgtgccaggtactattttaagctctttacatgagttatataatttgcacagcaactatctggagtaggcactggacatagtctccctttacaggtaagaaaattgagttgtagagagactttttttccccaaagtcacacagctggtaaatggaggaggcagcctatgagcccaggcagtttggcctgtttaatgctaccccatagtgcattgctcaaaaagctaacrcagtttttggccatgtcaatagaaatattgcatccaggtgagaattaataagagtctcagtcaacat

SEQ ID NO: 288962 - DNA, 462 bp, Homo sapiens
tgccagctaaatgagcgttcccatgtagccctactgtaaactctgtttacagttcacttgccttctttatgctgagattaaattatgtgattgccaacaaaatttaattgggtaggaggaggttacattatttcaaattttgtacattaagagaggctcaaaatattatatgtcacataatcttgaattcatgtaatttatgcaatgtggtgtcactataatttaggacgttataatactcatcctttctacaataccccaacacactaccactgtcaaatgtatgctatttagtaaatgtataaggaggaacctagtgaggcttgggtactataatgtacatttcacyttagcccacctatagaaaattttggttttagtaaaattgggcactggtgtcagatggctatgtcctgttttcacacaggccaactcttatgaattgaatgaagttttcatttc

SEQ ID NO: 288963 - DNA, 531 bp, Homo sapiens
aagcatgtgaataatttttaataagtaaatcctttattccaagcaaacctttcattggattacattgaggtttgaataagaaattgtatgaaaatggcttagaaaaatacctcatcaataagtaggcaataaaatgtaactattaatcattatttagcacatgctgtgtcatttaacccacggaaacagaggaggcactttaacaggccatgctatccccattttataaattagaacaatgaagctcaaaggtgctgctattttctctaggtcatgtgaagactgagcaatgggaccaaattagaattcagagtttgtgaccccttctcagaacgttaatcttcctttcttaatcaagtctcacctcttatacaaagtctgggacgctttgatcaagggtcagcaaactttttctataaagcgccaaaaagtaaatattttagttttttccggggctaaaggtctctgccacaactattcaactctgccgytgtagcacaaaaaaagccacagacaatacacacacaaata

SEQ ID NO: 288964 - DNA, 569 bp, Homo sapiens
attttccagactttaccctatccatgtagcccctgtactattagtttttttctcagtttcaaataaatcaatttattttacttaccctgtcctacataataatacctttaatattattgttatactaattatattttttcctatcacacatgataataaatgcccacatacctatcgaaacataaattgtaactattataataaaatgtttctttgtgtaccacctagcatcatctcagacatcaccggtggtgggtattcccacttttggaaacactgcatttgacaaagggtatctagcatgctttccacatcrcgtgatgcttttatgctcccagcagtacctggcaccatgtcaggcacacacatggtatgggaagcccttacatttacattgcactttatacttttcataatatttcaacatacgtaaaaaggagaggagcatgaaggagagaatctccttaaaagtttgcataaactcagcaatggagaagaataactgaaagatcccaggaaaggaaccaaaccacctgccaaggaaactttcttggccctggagccctgtt

SEQ ID NO: 288965 - DNA, 569 bp, Homo sapiens
attttccagactttaccctatccatgtagcccctgtactattagtttttttctcagtttcaaataaatcaatttattttacttaccctgtcctacataataatacctttaatattattgttatactaattatattttttcctatcacacatgataataaatgcccacatacctatcgaaacataaattgtaactattataataaaatgtttctttgtgtaccacctagcatcatctcagacatcaccggtggtgggtattcccacttttggaaacactgcatttgacaaagggtatctagcatgctttccacatcacrtgatgcttttatgctcccagcagtacctggcaccatgtcaggcacacacatggtatgggaagcccttacatttacattgcactttatacttttcataatatttcaacatacgtaaaaaggagaggagcatgaaggagagaatctccttaaaagtttgcataaactcagcaatggagaagaataactgaaagatcccaggaaaggaaccaaaccacctgccaaggaaactttcttggccctggagccctgtt

SEQ ID NO: 288966 - DNA, 616 bp, Homo sapiens
ttaacatatacattaccttacataattatctttttttgttgttgcagcatggacacttaaaatctactttcttagcaattttcaaatatacaattatatggttattcactgtagtcaccataatgtacactagatctcttgaacttattcttcctcaytaaaatgtgtgtcttttcactgacatctccctaatcccctcaccccctggcctcttatgaccaccattttgctctctgtttctatgagtttgacttttttacatttcacatacaaatgagatcatgtggtatttgattttctgtgcaaaggaatgggtttgtggataacatttccccctgttgttttttgtttccatgtactgcccatattttcatattttctataatgagtatacatttctttacttctcagaaaaaaaaaatctttaacaaataggaataaaaacttcacttgtatcagctactgacctcccatgccctcagattatattgagggttggggagatgtgagagaatcatgatgatgaggaggagaacccaggccttcttttcaggcttaatacctgcctcactgccccccgccctctgccaccaattaatgaagaaatctacaaact

SEQ ID NO: 288967 - DNA, 576 bp, Homo sapiens
tgtttcagcactgaccaagttgttaagttaaatattraaagctgaaagccaatggccttatacaaaggctggagtgtaaaaaaagcccaccaagagttttgcccaggcctttcctgggccttgaagtataacaagataatgaaggaattcttaacaggacccatttatgattcatcaagttttactggggatctgaaggaaaccccccaggcctccacaaacaagttaattgggcgtctgaaggaactccccaaacctccatgatttagcaggagataagatcagggtaatcatcccagtacctggaccaatctagattaaataaatttactaaggctccagagtaaggttttcaaaactttgactttagttgtagattacaagaggttaatcacttatgtctttagatgcatgcatacatacacatagacatatagcttagaagatatataagctctggaaaactttgtaatattgaattattctggagacattttcccagccttctccctgtgcccagttacagaaataaactcttgtttcccagttcatctgcatctcattactgggcccaga

SEQ ID NO: 288968 - DNA, 624 bp, Homo sapiens
tagttgtagattacaagaggttaatcacttatgtctttagatgcatgcatacatacacatagacatatagcttagaagatatataagctctggaaaactttgtaatattgaattattctggagacattttcccagccttctccctgtgcccagttacagaaataaactcttgtttcccagttcatctgcatctcattactgggcccagagaacaagcagccctaccttcggtttkgtccgagaacaagaggacttttggtttggcttacatagtactttttgtttggcttgcaccgtatttctactttttttattgtttctaatctgtttttgccttgcccacttgctctgggaggtgactccagtgagctaccttgtaactggctgccagatgggtttggccaacttaagacatcagtagaaaattgaagaattgcaagaaagagaattcagaggattttttttcctgcttgctcctttctgtgctctgtctctgggcaacagtcttaagcagcactttctgtagcttgccagcactcagtgggctctgataacttgctttcttctccttttccttcagccctgcaaggcggtaatgcactgcactgctgcttatcactgcaa

SEQ ID NO: 288969 - DNA, 420 bp, Homo sapiens
caagcatcagactaacttttctgagaagcaaatttaatcttgccccacattttttggtgtcccatacaaactgcgagatgaagataaaacctttaacaatctcacttctactttgctatgcagcctgtmccctgtaggcttcatgcactaagagtactgaaaaactgtgactctttcagggtatcaaactttatccacacagtttcttctccctaaaatgcctttgccaccatttcttgactcctgtaagcacacctaagtgctttcctctctaggagaaagttttcaggccagaaaccatgtctaaaaagactgaaaccagtcttttgtagacttccatcaactagcccagagggtcttcagcaaatcttaattgaataagagattaatgtttggcaatatggtcattctaatatttta

SEQ ID NO: 288970 - DNA, 420 bp, Homo sapiens
caagcatcagactaacttttctgagaagcaaatttaatcttgccccacattttttggtgtcccatacaaactgcgagatgaagataaaacctttaacaatctcacttctactttgctatgcagcctgtaycctgtaggcttcatgcactaagagtactgaaaaactgtgactctttcagggtatcaaactttatccacacagtttcttctccctaaaatgcctttgccaccatttcttgactcctgtaagcacacctaagtgctttcctctctaggagaaagttttcaggccagaaaccatgtctaaaaagactgaaaccagtcttttgtagacttccatcaactagcccagagggtcttcagcaaatcttaattgaataagagattaatgtttggcaatatggtcattctaatatttta

SEQ ID NO: 288971 - DNA, 1004 bp, Homo sapiens
tctaaaaagactgaaaccagtcttttgtagacttccatcaactagcccagagggtcttcagcaaatcttaattgaataagagattaatgtttggcaatatggtcattctaatattttatttcgatgtgtacacygagacttattttaaatttattagatataaaagaaaacagatattgcctttgatgttttcaataaaaatgaagagatttgtaagggaatggggcagctgtgttcacactggctctcaatttggcctttattagagattaactggttatttacctggagtctgtgcttggaatatctcaatgagggcaacaaatagttcattcaatattaaccctaatttggatatatttaccttaatgaacaagcaagtgatcgtaatttgtttcattttctttaaccacagcacaggaaatttatctggaagtatttccttttgggcaggcaatttttgtggacatatttatgaagcacagtcaggatgaatcagaccatgaaggctcaatgtttacagatgaaaataataattacatgwggaatggggcagctgtgttcacactggctctcaatttggcctttattagagattaactggttatttacctggagtctgtgcttggaatatctcaatgagggcaacaaatagttcattcaatattaaccctaatttggatatatttaccttaatgwacaagcaagtgatcgtaatttgtttcattttctttaaccacagcacaggaaatttatctggaagtatttccttttgggcaggcaatttttgtggacatatttatgaagcacagtcaggatgaatcagaccatgaaggctcaatgtttacagatgaaaataataattacatgagtagagcagtgaaaggaggaggggaggcagcttgttgatgcctggagattattaacgttagaattggcaactaaagacgtttatggaatctctgtttctaaggaacttttgggcaagtcagttcaccacttta

SEQ ID NO: 288972 - DNA, 460 bp, Homo sapiens
ggaatggggcagctgtgttcacactggctctcaatttggcctttattagagattaactggttatttacctggagtctgtgcttggaatatctcaatgagggcaacaaatagttcattcaatattaaccctaatttggatatatttaccttaatgaacaagcaagtgatcgtaatttgtttcattttctttaaccacagcacaggaaatttatctggaagtatttccttttgggcaggcaatttttgtggacatatttatgaagcacagtcaggatgaatcagaccatgaaggctcaatgtttacagatgaaaataataattacatgagtagagcagtkaaaggaggaggggaggcagcttgttgatgcctggagattattaacgttagaattggcaactaaagacgtttatggaatctctgtttctaaggaacttttgggcaagtcagttcaccacttta

SEQ ID NO: 288973 - DNA, 637 bp, Homo sapiens
gacacagatacatgttgatggtatgggaatttgccatattttattttggtacattctcttggatagttcagttttgtcttcaatttactgatgcataacagattttaaggagtaaatgacaatgctgcaattcttcatttacttttcttgataatctctcttttattcagtaggaggatggcaattagttttccacaaaggctatgtaattctcttatgactactactgttaactatagtagtcatcctttttctgagatttcactttctgcagtttcaattactgtggtcaactgcagcccaagcataggtgagtacaatgaataagatattttaagaaagagcacattcacataaattttcttatactatgtgttgrtaattgttcctttttttatttttgttgttaatttcttgctgtgtctaattgacaaattaaattttatcatatgtacatatttataaggaaaagatagtatatatagggttcagtactatctgagtttcaggcatccactggggggtcttagaaagtatctcccatggataaggggaaactactggactttggtttgtggttttgcattacaaaggaaccatggtaggtgaaacaaacttataagcaataattaaatta

SEQ ID NO: 288974 - DNA, 581 bp, Homo sapiens
aaaaacttttatacatctaattttgtttgaattttttgagctgtggttgtctagaattcactgagaagcttgtgtcttagratcctaaaaaggtttcctctagactgggataaattagtatatttttgaaacagtcaaacaagaatgtctttatagactgaagacaaactttgaactaaagatattgtgttagctgcttaagataaatacaataaaatatttttatataataaagtagctcagtattctaaagcttccacatataataaaattattaaatagcaaagattcttcatgagataagaacttttttttgtggtcttactcgtgtgggttgtggtgtgaaatgatctgggtataaattaagtgcatagcaaggaaagttgcaccatagaagatttttataattaataagtaccttaaattgtacttccaaatcctataaagtattacttgtatttagagaaatctactatatctctcattcactggcagatatcacggaaacattttaaattttggcaactgcttcaggttaaatagttagaattaaaaattcacaacagaaagattaagttcat

SEQ ID NO: 288975 - DNA, 405 bp, Homo sapiens
ctaaagcttccacatataataaaattattaaatagcaaagattcttcatgagataagaacttttttttgtggtcttactsgtgtgggttgtggtgtgaaatgatctgggtataaattaagtgcatagcaaggaaagttgcaccatagaagatttttataattaataagtaccttaaattgtacttccaaatcctataaagtattacttgtatttagagaaatctactatatctctcattcactggcagatatcacggaaacattttaaattttggcaactgcttcaggttaaatagttagaattaaaaattcacaacagaaagattaagttcatcatctgattaagttaagtaataaaatatgtgcatagtcacaagaatttaatacaaataagatacatgtata

SEQ ID NO: 288976 - DNA, 405 bp, Homo sapiens
ctaaagcttccacatataataaaattattaaatagcaaagattcttcatgagataagaacttttttttgtggtcttactcgtgtgggttgtggtgtgaaatgatctgggtataaattaagtgcatagcaaggaaagttkcaccatagaagatttttataattaataagtaccttaaattgtacttccaaatcctataaagtattacttgtatttagagaaatctactatatctctcattcactggcagatatcacggaaacattttaaattttggcaactgcttcaggttaaatagttagaattaaaaattcacaacagaaagattaagttcatcatctgattaagttaagtaataaaatatgtgcatagtcacaagaatttaatacaaataagatacatgtata

SEQ ID NO: 288977 - DNA, 581 bp, Homo sapiens
agcccgagaaagttacagaaaaatttttttttgtttgttcgttttttgtttttgttttttgagatggtctcgctctgtcacccctgctggagtgcagtggtgttatctcggctcactgcaagctccgcctccagggttcatgccattctcctgcctcagcctcccgagtagctgggactacagacgcctgccaccatgcccggctaatttttttttttttttgtatttttagtagagamggggtttcactatgttagccaggatggtctcgatcccttgacctcgtgatccacccgcctcggcctcccaaagtgctgggattacaggcgtgagccactgtgcccggccagaaaatatttttaaaaattaatcaaaacctggagttgctgtgatattcatctaaaacgtccagttataagccaaaatgttataagacaagcaaagaaacaagtcagtgtagcccatactcagaaagaggaaaaaaggaacaaacagaaactaattctatttgagtatagatgttagatttagcagttaagtatttcaaatcagctaatataaagatgttgaatgataaagaa

SEQ ID NO: 288978 - DNA, 620 bp, Homo sapiens
aaacaatacaaagtatgttctttgaccataaacagggtgaattgaatatcaacaacagaaataaatttgggaaaatcccacatacttgaaaattaagcaacagagttccaaaagtaatttgtgagccaaagaagaaaccagaactgaaaacacgccaaatcaaaatttatgaaatgcagctactgtaaagttgagtaagtattttgtatctttaaayaattatattagaagaaagatccaaaatcaacaactgaatgttctacctcaaaaaggtaaaggaagaagagcaaattgaacccaaataattagaaagaaaaattaaagaaagaaaaaaatgaaacaaaagtagagaaacaatagagaaaatcaataaaatcaaaagttggttcttgaaaaacaatcaacaaaactgataaactattagctaggaaagagattacatgaatgacaaaaaacaggaatgaaagaaggggcattattacacaccctacaagaaactgattgactaaattgattgtaaaggaattctatgaacaactttgtgccaacaaacacatagacaacttagattaaatggacaaacttctcaacaaattaccaaaatttactcaagcaaaaat

SEQ ID NO: 288979 - DNA, 1184 bp, Homo sapiens
gttttgactttattgaatagttcttatttaccgggcattttcatgagagctttgtgtgtgtttgtttattgaattctcatctaagcaaacccactatgaagtaattccactagtattcttatttcatagctgagtacactgaggtgccaaaagaatttgaataacttggctaacatcacaccacaagtaaaaatgcaagactaaggaattttgttttcatctttatgttttcagatttaggctttatcacttttacctgactgatttaatgactaaaaggaggaaggtaatgagagactcagtgaaaacagaaaacataattatgattctctatttttgttagaatggatggcctgtcagacagattagttagcagaagacataaggataccactgggaaacatcctattggttttcaaggtgtaagagtaarttcggtcaaatagaggaaaccctggaaaattgctaaagggtaagaattaggccatggtttttaaactacatctcagagtctctcaaacaccctagaacacaaacatgcctaaaggatgaagaatgcaatttacaaatggagcatgttccagaagttcatttctaaggtaggctwtattctatcagcttttcaggactcaggcacagcttccagctgtctggatgcctccagcgtagacttaagaaccactttctccaattgtttaggaatgttttcaacttgttatcaccaatttgggaaattttttacataacatagcagctaaaatagccacaaaaatatcacaagtctcacagccattacaaagggggaaaataacactaatgaggcagttaggtcaatwacaaaaattaacacctgggtttttctcgactaggaaatagggagtatcactgattcacacataaggttaatccctaagtgatttaagttagagtgttatcttgggactaatggtgtatttgctgagctatttgtcaaagcaaggatgtggataagacatttttatttcttcagatgtatagtgaatgatggaagagtctaactcaggggtgtccaatttggctttcctgggccacactggaagaagaagaattgtcttgagccacactgaaagaagaagaattgtcttgggccacacataaaatacactaacactagccatagctgatgagctaaaaaaagtcacaaa

SEQ ID NO: 288980 - DNA, 1152 bp, Homo sapiens
acaggtcttcatccttctgttctgtacaacagctgaaactcaagattatttctttaggggaaacctaaacttaagcatattcatgaaatgcaatgctcacccttggttccaatggaaccaacatgtaaagcaagatcaactcagtaataggatccttgcccrttaatggacattaggaatgtgggcaaatttcaggatggctattataatcattgttctgtctctttatctaaatgccattcaaagaagctgggactatatcttctttttctcctgaagttatgaaatggtcagtacttacagagctgaccacgttgggtagagattccacattcacatgcctacaccatcagtgtagtactggtcccatatttaataactaatacatgtgtacatcctgtattgagttaaactacaaattaacacatgtaaagtgcattgataagcatagcctctgccagaacattccagattttgcccattttcttcatcaccatccaactgaacagggtaagacggtgcttaccataccaaggaggaactwatgtaactttcccaagatgatagagtaaatggcaaatcaaactcacagtggtctgatagcaaagtccatatccttaaccagtataccttaaagcctcccaggagctgctgctctacccacagataatggggaacattccccaaaggcatttggacatatagatggtaaaaagagcagggtggacactgcttggccaaaaataagcacatgatctttatcaaaagttttacagtaccacctctcaccaacagtggggaagtatatccatttatccacacactggccaacacttgatatcactgaccttttttagttttgactttctgatggttgaaawaaatatcactttattggccatttgtactgatttttcagtaataggttagatttgactttgactgatttctaatgtccatccattcaaagacattttccaaaggaagggcctattttctaaaggaaataagaaaacagctttctgataaagtgatatttacatggcttaaaaatggaatttaatatgccattattattcagaagatagcagcacttttttgactcatgaagttaaaatgacagaaagtatatttaatatgcttatggtatgg

SEQ ID NO: 288981 - DNA, 569 bp, Homo sapiens
tcataaacgtgctcagaacacttacattagcttacagttgggcaaactcatggggcaacacagtgcactgtacagtatcagctattgaccctcatgatagtggggcttactgggagctgcagctgtggctgtccagcattgagagagtatgataccacatatcgctagctcaggaaaatatcaaaatttaaaattcaaagtatggtctctactgatggtgctttcataccaccataaagtaaaaaaaaaaaatccaaagtcaagscattgtaaatcagggaccatctgtttgtcctagagaaatttttacacatatggacacagacatgtgtgagaatgttcaatacaatatttttatttagcaaaatactaagagcaactttaatgtcaatcaaaataggacatattcataaaaggggatacatagcagctaaatggattagtaagacactacatttatagtgactaatctctaaacaataaaagctgaggggaaaaagttacaattgtggtaagagttttggaaggatatgtaataaatatataagtagtatctctgggaactgaga

SEQ ID NO: 288982 - DNA, 452 bp, Homo sapiens
gcattttaaaataaatgcattgttgctccctaagattgttcattagcatagatcaagcacatttgtataagaattttagctatcaatataatctaaaaartgtaaagatgtgcttttacctcttttattgcaagttggattttgatcacaatgagttctgatatcagatgctatagtcaatgacatctaacagtttcttttcagtgaattactacaggaagctaaacttacctgtgtatgtcacaaacattaaagcagactgaataatagtaatagctctaacttttgtgtaagtgctattcgtcataaatctactagttgtgctattttattttattcattcatttgttttgcaaatagttaactatgactcagaaagttaaatacttggtcataatgccagtaagtaactaatgtaggaaagaagtgcatattttcctgatttcaaagtc

SEQ ID NO: 288983 - DNA, 452 bp, Homo sapiens
gcattttaaaataaatgcattgttgctccctaagattgttcattagcatagatcaagcacatttgtataagaattttagctatcaatataatctaaaaagtgtaaagatgtgcttttacctcttttattgcaagttggattttgatcacaatgagttctgatatcagatgctatagtcaaygacatctaacagtttcttttcagtgaattactacaggaagctaaacttacctgtgtatgtcacaaacattaaagcagactgaataatagtaatagctctaacttttgtgtaagtgctattcgtcataaatctactagttgtgctattttattttattcattcatttgttttgcaaatagttaactatgactcagaaagttaaatacttggtcataatgccagtaagtaactaatgtaggaaagaagtgcatattttcctgatttcaaagtc

SEQ ID NO: 288984 - DNA, 452 bp, Homo sapiens
gcattttaaaataaatgcattgttgctccctaagattgttcattagcatagatcaagcacatttgtataagaattttagctatcaatataatctaaaaagtgtaaagatgtgcttttacctcttttattgcaagttggattttgatcacaatgagttctgatatcagatgctatagtcaatgacatctaacagtttcttttcagtgaattaytacaggaagctaaacttacctgtgtatgtcacaaacattaaagcagactgaataatagtaatagctctaacttttgtgtaagtgctattcgtcataaatctactagttgtgctattttattttattcattcatttgttttgcaaatagttaactatgactcagaaagttaaatacttggtcataatgccagtaagtaactaatgtaggaaagaagtgcatattttcctgatttcaaagtc

SEQ ID NO: 288985 - DNA, 555 bp, Homo sapiens
acaattatatttttattctgatttgattatgaaaacatttagagaccacttataactacattttttccaatctttttctcctattttcagccttacttcatccccttgggaactctattatatagttatggtatattctccttacatttacctcaacacaaacacacacacacacacaaatacacacacaaccatataaattcatataaatataaggtgatgttttatgtatggttttctaaaattatttgactgttattagaatttcagtgtattttataactggtttttacaaaaactatttttaaccattcattactgaaaaaatgtttattatttccacattttaatactgtaattagtggcacactgtatgctctgatataccatttcttatgcaggcataccttgttttatagcactttattttattgtactttacacatattatgtctataaattggaggtttatggcatccttgccttgaacaagtctattggcaccatttttccaaagrgatgtgctcaatttgtgtctccgtgttacattttagt

SEQ ID NO: 288986 - DNA, 586 bp, Homo sapiens
aatttttcttatcttttattctaagagttttatagcttcaagttttatgtttaagtctttgatttagcaaggtgtataaataaaccctcactaaaagaaactgttactactgaagttcaatatgtaccttagtaaaagaatttttacttgaacatttaaagaacatattaaaagcagcactattaatgccaaaaacatcctagggagtaatatgtatcatcgacyctttatatttcatagaaggtagctgacttcaattctacaaaacaaaagctatgagaaaagctctactttctacccaaaaccaaatttttctagcttctgcatataaaacaaggagtgaggcacatttctgaacagaaggagacatatgtgagtgagtatcttaggaaccctgcattctctgcctttggagaaactgttcctggatgtacatgtttacctcagtcatgagataagtgatagaacacttgggtaacatctacagcttttcctatgtgtgtctatatgagtaaattcaattcagtggtaaaagtgttacaaaacacatttgccttaaacctaagctaagttattaatcaggttt

SEQ ID NO: 288987 - DNA, 586 bp, Homo sapiens
aatttttcttatcttttattctaagagttttatagcttcaagttttatgtttaagtctttgatttagcaaggtgtataaataaaccctcactaaaagaaactgttactactgaagttcaatatgtaccttagtaaaagaatttttacttgaacatttaaagaacatattaaaagcagcactattaatgccaaaaacatcctagggagtaatatgtatcatcgaccctttatatttcatagaaggtagctgacttcaattctacaaaacaaaagctatgagaaaagctctactttctacccaaaaccaaatttttctagcttctgcatataaaacaaggagtgaggcacatttctgaacagaaggagacatatgtgagtgagtatcttaggaaccctgcattctctgcctttggagaaactgttcctggatgtacatgtttacctcagtcatgagataagtgatakaacacttgggtaacatctacagcttttcctatgtgtgtctatatgagtaaattcaattcagtggtaaaagtgttacaaaacacatttgccttaaacctaagctaagttattaatcaggttt

SEQ ID NO: 288988 - DNA, 578 bp, Homo sapiens
ggacacatttgggggattccattgtaacaaatggtttggtctaggagtattcttcatcctaatagacctgagattctctttccacactggcacacactgaggcagatggacacaactggcaaaaagcacctagccacaacgaggaggtacaacaaagagactttatattctggagactccactctatccccaggagatgccgaatggcccaacctggggaagtctgttatgtcccataagccaaacaccacyagcagggacacatggaaacactgtgacatcagataaaccaagcagatcattgcaaagcctctaaaattcaaactgtcattggaatcagagaccacagaatgaggccaagacctgtatgctaaacttaagcagggtgaatgcctattaaaataaaagttttaaatagaacctagagtgtcctaacctaatagacaaaatatccagggtacaattatagtcagggtcataaaaagaaccaaggaaattacaacttgaatgagaaaataccaacaatgagataaatcagatattagaactatttgacaaggatattaacgcagccacca

SEQ ID NO: 288989 - DNA, 584 bp, Homo sapiens
taaactttcagtgctcatttgatgtcaagcaattctttgcttgtctatggacaatgagaaactttgctgattggaaacgcccgtacctaaccatgccaagtagacatcttctctgaggtcacaccatacccttttgcagtgctgtggagtagctctggtcctttcttcacaaggcctgctgaaatatcagatgtattagtcagtgttctctatagagacagaaccaatagaaaagatagagagatatatagatagggatataaatatggatacagacatgaacatggagatagatagatatgagttgtgattcttaaggggaattggctcacatgattatgaaggctaaatctcttgacaggcggtctgtaaactggagaccctgggacgaaggtgccctgtctyagtccaaatccaaaagcttcagaaccagggaagtttatggtgtaattctcagtcccaagcatggagagcctggagttctgatgttcaagggcaggaggacaagagtcctcacttcaggagacggaaagtgttttgctctcctttttttgtcttttatccaagagcccagctcattagat

SEQ ID NO: 288990 - DNA, 505 bp, Homo sapiens
catttaactcctatactgtcccagggttgtattaataactgtgtgcttaacaatctcctaaataacttgggagcaaagccttgaggcagaaagccagattcactttgccttacaagtggggaggctgtcacagtgcactgagtgctccactacagctgtgtagccaagatcagcaaggatgtaatgtaggcaccaaagcttctaaaacttacaatagaaatctgtgtatttttctcacatttaaggtgttcagtgaattggatagaattactctgtattttacaatgcttaacttctctcaattaaaattgacttattagatattttgaacatattttattgttcccttatcatttttcttgaaataygtgacagatatattttaccttttggaaccttaatactgagactgaagaattactatctgccactgttaaaatgcatgcttattttctttttttgtaggacattcttctacataatgttgcgtcagtagaataatttt

SEQ ID NO: 288991 - DNA, 571 bp, Homo sapiens
tgggacaagctggagggcagcctcagaggctaagggctggtagggcaggggctgaaccttaggcagcttccctggcagcacttgtagkccagcttctaggaggcagagtctgggtgggaacacctgaggatgaggaggtattagagcagaaaccagagctgggcagcgggaacagagaggaagaccaacaggaaggacactgctgagggaaagacagaagactgtggacagggagagggcaggggagaaaggcccaaaggaggccctgccttcgggccaccaggaaacaagaggcaccctatcctgttctgtagtgggtgggttttaaagctctgtgtgttaatttcctatccaaaagtccttttaaaaaatagatcataatcccagcactttgggaggctgaggcgggtggatcaccctgaggtcgggagttcgagaccagcctgaccaacatggagaaaccctgtctctacaaaaaatgcaaaattagctgggtgtagtggtgcatgcctgtacttcagctactcgggaggctgaggcacgagaattgcttgaacccggcaggcggagg

SEQ ID NO: 288992 - DNA, 617 bp, Homo sapiens
ctgaagcctggtgtattatgcttaagtaactagtgggatagaatctctttaagtgtagttcagatgatgggaacttgctttttatagagcaagatttcagacccttaaaatagtttgacagggatgttgagaaatgattggccagaagaacatgaagtttgtcatttaagtgtgttatattttgtttactggttttatttattatttatttttatttttatttttgaaacagagtttcactcttgtcgcccaggctgaagtgcaatggtgcaatctcagctcactgcaacctccacctcctgggttcaagygattctcctgcctcagccgcctgagtagctgggattacaggcacccacaaccatgcccagctaatttttgtatttttagtagagacagggtttcactatgttggccaggctggtcttgaactcctgacctcctgtgatcagcctgccttggccttccgaagtgctgggattacaggcgtgagcaatcgcgctcggcccatgtttactggttttagatttagatttttttttttttttttttttgagatggagtctcgctatgttacccaggctggaatgcagtggcgcgatctgggctcactgcaa

SEQ ID NO: 288993 - DNA, 634 bp, Homo sapiens
aggtcagaaaccttatacagggactgtgtaaakaaaatatgaggccagatttcccaagaggcttttattggctctgtaaatcaactttgattccttaaagaaagcatgccattccagtcaaagccttggtaaaataaccagtttctacaatcgtgtcctgttacaaaagaaaacagattcttatcatgcttatgcaaatgtctatactaccataaattgagaatactcacaaatagttcccaaattctggagaagtcaggtagaaagaaatatgctccaaattttgttcacaggagtatattttaccaattgttaaaggctgtaaatagctcaaaagataagttttcttagttctggataagaaaaaggatcagcaacattttaagcaaaaaagtaaaaaaaaaaaaaaaaaggttacttcagtcttttattagttcagtccattcagttaacttttgttctgcttcatatccatgaacatttcagctctccatgagagtcctgaaagtttttcccctttacacttgtgtcatcatcatctccaaagttatcagaaacttgcattcaagagtacctgtcaaagttttatagctgattataaaaccaccttccaaagtggatcaaaatgagacaa

SEQ ID NO: 288994 - DNA, 634 bp, Homo sapiens
aggtcagaaaccttatacagggactgtgtaaagaaaatatgaggccagatttcccaagaggcttttattggctctgtaaatcaactttgattccttaaagaaagcatgccattccagtcaaagccttggtaaaataaccagtttctacaatcgtgtcctgttacaaaagaaaacagattcttatcatgcttatgcaaatgtctatactaccataaaytgagaatactcacaaatagttcccaaattctggagaagtcaggtagaaagaaatatgctccaaattttgttcacaggagtatattttaccaattgttaaaggctgtaaatagctcaaaagataagttttcttagttctggataagaaaaaggatcagcaacattttaagcaaaaaagtaaaaaaaaaaaaaaaaaggttacttcagtcttttattagttcagtccattcagttaacttttgttctgcttcatatccatgaacatttcagctctccatgagagtcctgaaagtttttcccctttacacttgtgtcatcatcatctccaaagttatcagaaacttgcattcaagagtacctgtcaaagttttatagctgattataaaaccaccttccaaagtggatcaaaatgagacaa

SEQ ID NO: 288995 - DNA, 584 bp, Homo sapiens
gatccacacattagtaaggttttgaaaagcactgctctagctgtctcataaagaaaggggcaggaagctaaatatcyaacacagcctattcaaccaagaaagggaagataagcaataaagtactaaaagtatatagttaagaacccatttcccttttagaagacattgaccgatagagactgaattccaggtggtgagagggaaaacaagctgcatgttgacctaggcttgaatattcttatgaaaaagctcacctcaattgaacacaaacatttaagttcaatttattctccttgcattctacctaatcctttccagttttcaaaaatgaaaatgggtgattctcgatgttaaggcttaactgctcagtaatattcactttataaatacagctaagcaatgaccaggaaaacccagcatgtcaccactgtactcacatgtgaagtccaaacatctttataaataactaagtgcgtacttctcttatcaaaaggaaaacaaagaaataaatataacaaattccaatgcaactaaaataaacagcagaaacatcacttcactgtatgaaaacacagcagaaatta

SEQ ID NO: 288996 - DNA, 579 bp, Homo sapiens
aaactggactttattatgatttaaaaatttctctctgcaaaagacatcgtccagagaatgaaaggacaagttacagaatgggagaaaatatttgcagaagacacatctgataatgaactgttacccaagacatacaaagaactcttgaaactcaacaagaacataacgaatctgatcaaaaataagccaaatatcttaacagatacctcaccaaagaaaatatatagatggaaaataagtatatgaaaattatcttttatgatctgacatcatatttcatcagggaaacacaagttaaaacaatcatggcctaccactacacacctattagaaattccaaaattcagaacactgactacaccaaatgctggtgaggatgtgaaacaatgggaacyctcatccactgctactggtaatccaaaatgatacaaccactttggaagacagtttggcggtttcctacaaaactaaatgtacttttatcatataacccagcaatcatgttccttgatattcacccaaaggagttgagaacttgtatgtacaaaaaaccctgcacgtggatgtctatagcagctt

SEQ ID NO: 288997 - DNA, 608 bp, Homo sapiens
aaagcaacttagaggtttaaatgtaatatgttcattgatttttctcatttcatatatttattgagcaacagctacatgctcttgtgctaatgtaagagacggaaaacacaacaatcaaacaaaaaccaagaaaataatgggatacttgctctatctgctatgtagaaaataaagtatgtggtaatgtctggagacctactttgagctgaatgatcttcattaagtgacatttaaaataagatctgaatgatcaggaagactctaccatgctaaaatcttgaggacaagtatytaaggcagaataaactacaaattcttggccttaaggtaggaaagagcttagtgtgttcctggaatccaaaaaaaggtctgaatagctgaagcttattgacaaagaagtggtagaaagggggaaaaagtcacatgtttaggcagaatgctgtaaggtaagtccttgttgctcttggttagttaagtctattttatgcggtaggaaatgggaaaccatcaaggggacttaaatagtagtggtctgatatgatttccatttttaaaagatcatctggcttccagtagcagctctgagacatcaaatattgttttttggt

SEQ ID NO: 288998 - DNA, 519 bp, Homo sapiens
ttttaaaactcatctaaaaaatattaactttactgtttcattctctccctacacaacttatctaattatccttttaaaatttttctctgataacattcatatccagaccagtttgaaaaaaattaataaatgtgaccacaygatatcaattattaaattattttacagcattgatagtctattcacactcttccgtacccattaatttaaaaggaatcagcaaactttttcttacagatatttaacctaatttcttgctaatgaaaaatattccatgattgccacaatacatatttcttataattcacctgtgtaatgccttttcacctcatagtaatcttatagactgttaatattataattttatcttttgtcatatttcccattttgctttaaaaatctgttattatccaagtcttcaaaacatttcaaatacttcccatacagtttcaataatcagccgatttccaaatataaaaaccaagaaataacataattgcattttattactatgtatcc

SEQ ID NO: 288999 - DNA, 645 bp, Homo sapiens
aaaatagtcttagttcagcaactacaacaaactgaaacttaaaacaggagacacggtcaacacttgaatctatccacatccatactcgagtgtggcctacagtgtttggaagggaatcatatgggaaatagaccttcagttgagattcaaaggatgggcatgatgagttttaaaagattcaaaacaggacacgaatggtaaacaaattaaaaaggaatggatacacatgatatgcttagagtcaataaaggaaccagtctggttatacagactgttttcttatcatagccacatggcctcagtgccctaaaaatgtccccaacaattaggcctcycacttcctacactaatctggtgctctcctactgctcagggcattgaaagggatgggtccagcctaagcactgaacatgtcttctaaatcaccttcctggcaggaagcaatggtagggtaactagcttacttgagacctgagggaaatcactgctagttaaataagaacacataaaattgagggagaagaccacagatgttaactatagcatggtttgaaagaactatttgtccttagagtcccatatattcttttctttcagtattcactttagaaagtaattgattccagtcttaaatcataagtagaa

SEQ ID NO: 289000 - DNA, 559 bp, Homo sapiens
agagtaacatctaggtaatactttcagctaattaaaggagatataggtcaataagaatatgcacagttgatctgaaactattgaatatgatgttcagaaatctcacttagtcatgtcttttaaaagtcctataatgattttattatctgattccatttaattgtgatgtattaaacaaaaagaacaaaatggggagaacgtttagaaaaaatagtatgcttagtcatgataaccatatatgaacaaatttttatggaaaataccataattaaaaattagtatagagccttccataagagaagcattctttttaaaaaatattttcaatagttacctatttttttktgtgtgtgtgtaatcagaaaaatattttatttatttatttattttttatatatttttttattcaaggtaattttttttttttttttagtatttattgatcattcttgggtgtttctcacagagggggatttggcagggtcataggacaatagtggagggaaggtcaacagataaacaagtgaacaaaggtctctggttttcctaggcagaggac

SEQ ID NO: 289001 - DNA, 547 bp, Homo sapiens
caatgcatgcctcctggtttatctcaaaaaaaaatggactctgctcccctgtagttacttcaaaaagcatggacaaagagaaatgcacaccacataactaaatgaattgttgtctaccttgattatgaaaccaatgtcacaagcatcagttacacttgttaattcaagagtctagttctattttacttgttatgctcttttttacaccttttattttatcctctttatttctcacattctaataatgctaattgggctggcatactagtcaggaccttagctggaaataatgacacagttagtataacttaagaaagatttaataaagtkactaactacaaagctatagaaactacaaaagggagtgttgaaccctggaaaaaagataggcaactgctaaaatcaatagacctaaaaactttggaaagggaagaagttaccagaacttggaaagaaagtgttgaatagaccaaggcagcttggtggagcagtgccatttagttgaggaacatagctgttctgatgcacctcactgggggaagctcgc

SEQ ID NO: 289002 - DNA, 550 bp, Homo sapiens
aacaaaatccatggaataaaaatgttaattctaaaagtgttaaaagcagagaccacaatttaaaaactgtaataaagaaaattttataagattctacrtaactcatttgaagaaagtatatcaaataataatttaattaaaattatttttaaaaaagaattaagggctaattttatatgtagtgctttataatatacaaagagtagttttcataaattatttcaggtaaccagaatgacagatgtcaatacagtgttttggcaatcaaaaattatgccatttttatcttttaatttattagtcataatgatagtaaaaacagagttttaattttcaccactgctgtctggaaagttaactttaaccttctgtggcaaagagaaaagtatgacatctgaaagcaatctaatgaaaacgacacaggatgaattttttaaaaaacttataaataggagaaatagtgtcgttttatccaatattaccaaaatatatgagaagaaagtagcttttacttagattctataaaagctcttcatgcatttttatataa

SEQ ID NO: 289003 - DNA, 550 bp, Homo sapiens
aacaaaatccatggaataaaaatgttaattctaaaagtgttaaaagcagagaccacaatttaaaaactgtaataaagaaaattttataagattctacataactcatttgaagaaagtatatcaaataataatttaattaaaattatttttaaaaaagaattaagggctaattttatatgtagtgctttataatatacaaagagtagttttcataaattatttcaggtaaccagaatgacagatgtcaatacagtgttttggcaatcaaaaattatgccatttttatcttttaatttattagtcataatgatagtaaaaacagagttttaattttcaccactgctgtctggaaagttaactttaaccttctgtggcaaagagaaaagtatgacatctgaaagcaatctaatgaaaaygacacaggatgaattttttaaaaaacttataaataggagaaatagtgtcgttttatccaatattaccaaaatatatgagaagaaagtagcttttacttagattctataaaagctcttcatgcatttttatataa

SEQ ID NO: 289004 - DNA, 1330 bp, Homo sapiens
cccagcactttggaaggccaaggcaggaggatcacttgagggcaagagatacagatcagccctggcaatacagtgagactccaactttccaaaaaaaaaaaaaaatatatagcttctggtggtggcacacacctgtaatcccagctgtgtaggaggctgaggtgggaggattccttgagcccaggaggtcgaggttgcagkaagccatgatcatgccactgcactccagcctgggtgacacagagagagacactgccattaaaaaaatgaaattatacacttactgtagtcttctagtacaatgtactatatttgaactgagtggttcaaagatattttcctgacacaatgataaattttaggcaaaaaatattattttgaaattttatgtttttaattttgaaataacagcaaacctacaaaaaaattacaagtatawcaaagcatactgaatttgatttaaaagaaatatgacatttctactaacctgcttcattctcaaccaatcagataaagggattagaaatggcaagctacaattacagtctaattaataattctcattatgaawtgacagtaatatcacttatatgtacatgtatagttctttgaatgttcttggcagacatgcataatatattaatgcacattttttatgtctcttgattaatatcccagaatatactagacatgctttaaaaatcagaaacagaaacaaaaagtacagaggaaattgataacatagtttttttaaaggagattcaaatattctagtctcaaatctcaggttatggtataatgaaatttctatacatattgtatgaatatttatgcataggtattgaaatagttgacctctaaagtccttgaccattctaagagtcwcaaagcatactgaatttgatttaaaagaaatatgacatttctactaacctgcttcattctcaaccaatcagataaagggattagaaatggcaagctacaattacagtctaattaataattctcattatgaattgacagtaatatcacttatatgtacatgtatagttctttgaatgwtcttggcagacatgcataatatattaatgcacattttttatgtctcttgattaatatcccagaatatactagacatgctttaaaaatcagaaacagaaacaaaaagtacagaggaaattgataacatagtttttttaaaggagattcaaatattctagtctcaaatctcaggttatggtataatgaaatttctatacatattgtatgaatatttatgcataggtattgaaatagttgacctctaaagtccttgaccattctaagagtc

SEQ ID NO: 289005 - DNA, 445 bp, Homo sapiens
caaagcatactgaatttgatttaaaagaaatatgacatttctactaacctgcttcattctcaaccaatcagataaagggattagaaatggcaagctacaattacagtctaattaataattctcattatgaattgacagtaatatcacttatatgtacatgtatagttctttgaatgttcttggcagacatgcataatatattaatgcacattttttatgtytcttgattaatatcccagaatatactagacatgctttaaaaatcagaaacagaaacaaaaagtacagaggaaattgataacatagtttttttaaaggagattcaaatattctagtctcaaatctcaggttatggtataatgaaatttctatacatattgtatgaatatttatgcataggtattgaaatagttgacctctaaagtccttgaccattctaagagtc

SEQ ID NO: 289006 - DNA, 1071 bp, Homo sapiens
caaagcatactgaatttgatttaaaagaaatatgacatttctactaacctgcttcattctcaaccaatcagataaagggattagaaatggcaagctacaattacagtctaattaataattctcattatgaattgacagtaatatcacttatatgtacatgtatagttctttgaatgttcttggcagacatgcataatatattaatgcacattttttatgtctcttgattaatatcccagaatatactagacatgctttaaaaatcagraacagaaacaaaaagtacagaggaaattgataacatagtttttttaaaggagattcaaatattctagtctcaaatctcaggttatggtataatgaaatttctatacatattgtatgaatatttatgcataggtattgaaatagttgacctctaaagtccttgaccattctaagagtcwcttagtcttaactcatttcagtattaactcggaagtccacagtccaaagactcatccaagacaaagtaagttccttccacctatgagactgtaacctcaaaaacaagttatttatttccaagatacaatggggtataggcactgggtaaatattcactttccaaaagagaaaaattggccaaaacaaaggggctacaggctcatgtaagtccaagtccaaaaaccagcagggcawtcattaaatctcaaaactccaaaataatctcctttgtctccatgtctcaaatacagacaacactgatgtaagaggtgggctcccaaggccttaggtagttcctttcttatggctctgccagatacagcccctgtggcttctttcatgtgttgacattgagtgcccatagcttttccaggttcacagtgcaaactgttgttggatccatcattctggagtctagaggatggtggccctcttctcacatctctactaggcagtgccccagggagagctctgtgggtgggctccaaccccatgcttacccccaaattgcactagtagatgttctccatgagggctctacacctgcaacagacttccgcctagacattcagccattctcataca

SEQ ID NO: 289007 - DNA, 681 bp, Homo sapiens
tctacacacacagaacacatatcactttcagcttccaggaatcagccgagcaggtagagaacgaggaataaagtccaaacaattgggtaattttaagatgctggtctcctacttgcagctcaggaggagggcttcgtgagcaacaattcttcagacagtggtttggacttaggagtgattttaagatgctggtctcctacttgcagctcaggaggagggcttcgtgagtaacaattcttcagacagtggtttgaacctagcacttttgaggctatactctcagcttgcctaagcaatgttatctttttcaagaggcttttgtgacacaagtttaattacttaaggacagatactctacttcaggccacagagggtgacaattgcttttgcatgttttaaatatgctatctaagaaaaatatagttcaaakaaacatttaaatcatcattccctctggatgcatactttaaaacaaaatgtaaacattggtggttgttgccttatcttaaatttaaaaaaaagaaaaaaaaaaccttcttaaagtaatcaattagaatcagttcctccaaacagagttttcattttcaccacctattcaaaagatatttgggttaattccaggaggcagcgcttgcagtgagccaagatcgtgccactgcactccagcctggacaacagagc

SEQ ID NO: 289008 - DNA, 565 bp, Homo sapiens
ttgccttaagccctcataactgctgacagtcaaaacacttatttgcaaatataaagatcttgcattcatagaactcagtacattgttatttctatgttgaaatagatatttggccttctataacttaaattttttaaaaaaccatgtaaaccagaagccaatatacggtgtgaacagaaaacaagtcatttacctcatatgtttctggctttctaaaataaaataactgctagaaaatgaaagcagtataatatcgctctttattttagtctgggttctccacagaaacagaaccaatatgatatggatatagtttatggcataaatatgtatatacacacacaygtgtgtgtgaagagagacagaaaaaaaaaagatacagatttactgtaagtaattggctcacataattatggaagccaagtccaagatttgaagttggcaagctggggagccaagagagccaatagtatatttccagttctagtccaaatgcccgaaaactgggagagctgatgttttaagttcctgcccaactctgagtgaaaaagcaggagaagatcag

SEQ ID NO: 289009 - DNA, 576 bp, Homo sapiens
acttagaataacttttttttaagttacaatgtttatgtaagtctacttgactggttgaaaaatgtattggattacacttttctgttttctttggtaagcattaygtggtcaaagctctgagagttgtatacagaatgtattatcaatatcactactcagctatgtgcaaacatcagtcttgcattatctcctgacctagacagcatctgctgcagccctttcacagtgtacagcagatggtcttcaagggcccatttggcattttcttctcaacttcctaattgcagggttattccaggacagagctgattccttccctgtacctgcagatgttctcttggagtatcactaaggcaggttcttcatacagcatgttaaatctgctaatgcttgtcctttatctataatggcctataggacttttgggaggccaaggcaggaggatcagttaaggttaggaattacgggcaacatagcaagaccccattctttaagaaaggatatgaaaattagcaaggcatggtggtatacgcccatggtctcagctactcaggaggttatatggctaatgtttgt

SEQ ID NO: 289010 - DNA, 576 bp, Homo sapiens
acttagaataacttttttttaagttacaatgtttatgtaagtctacttgactggttgaaaaatgtattggattacacttttctgttttctttggtaagcattatgtggtcaaagctctgagagttgtatacagaatgtattatcaatatcactactcagctatgtgcaaacatcagtcttgcattatctcctgacctagacagcatctgctgcagccctttcacagtgtacagcagatggtcttcaagggcccatttggcattttcttctcaacttcctaattgcaggrttattccaggacagagctgattccttccctgtacctgcagatgttctcttggagtatcactaaggcaggttcttcatacagcatgttaaatctgctaatgcttgtcctttatctataatggcctataggacttttgggaggccaaggcaggaggatcagttaaggttaggaattacgggcaacatagcaagaccccattctttaagaaaggatatgaaaattagcaaggcatggtggtatacgcccatggtctcagctactcaggaggttatatggctaatgtttgt

SEQ ID NO: 289011 - DNA, 576 bp, Homo sapiens
acttagaataacttttttttaagttacaatgtttatgtaagtctacttgactggttgaaaaatgtattggattacacttttctgttttctttggtaagcattatgtggtcaaagctctgagagttgtatacagaatgtattatcaatatcactactcagctatgtgcaaacatcagtcttgcattatctcctgacctagacagcatctgctgcagccctttcacagtgtacagcagatggtcttcaagggcccatttggcattttcttctcaacttcctaattgcagggttattccaggacagagctgattccttccctgtacctgcagatgttctcttggagtatcactaaggcaggttcttcatacagcatgttaaatctgctaatgcttgtcctttayctataatggcctataggacttttgggaggccaaggcaggaggatcagttaaggttaggaattacgggcaacatagcaagaccccattctttaagaaaggatatgaaaattagcaaggcatggtggtatacgcccatggtctcagctactcaggaggttatatggctaatgtttgt

SEQ ID NO: 289012 - DNA, 585 bp, Homo sapiens
gatatctaacaatgcaaccctgcatcacttctctttacccaggcattaaaaacaattctcaattttcaaacatactgtatgtcacatgtgttatcggcaaatgtattyttccatcaaataaacattacggtaatgattgggttgccagtccagtcactacaagcctatttgaatcacaatgtacagaaatctgttaggaagaccactccacaaactatccatcatgtgtaagcatgtttctctttaggaagtatattaaaaatttcatcctggacaaccagaaatacttcctgcttcttccacttccctaatttactcaaaaactggggcatattacaatttcttgctcagcaacctggctctcattttttaggctaaagaagtcatctatctgaacagaatctagaggtcaggactgaaatgaacacttaggctggataaatgaaaagaggaaagagctgataagagtatttggactactgatccactgaaagtgtttagcacacacaaaaaaatgtttttccatttctcctgtctggctttatcataggttgaacaccccttgtacaatgaatcccaatgcaa

SEQ ID NO: 289013 - DNA, 554 bp, Homo sapiens
atcaatctcaggtaggacccaatttcccttgcatttaaaagttccccaggtgattcaagtataaattccagctaaaggctgatattcacattaacaaatttaagcatatcaattcacactcctccaacattgtaaaaattgtctattcagtctaaaattgtgtattatccttattttaaccttggtcaagtaagtgacaatggtatccattatcatcttaatttgcatttttttattcaaactgaaaattttccaaaatattcgttatacatttgtaattttccttttattaattgcctcttcataktccatgcccatttgttcacttgcaatgttcaggtttttattattgtcaacaataatctatgagaattattctgccaaatacagcagatctgtcatttatcttttaattttgttgatgttgcaggttatataaaaatgtaaaataattgaatctacttttttcatatagttttctattattattattatcctcatttaagccagatgtcagctgatatcactatacttcttaaaaccaaactaaaacc

SEQ ID NO: 289014 - DNA, 505 bp, Homo sapiens
actgttggtggaaatgtacattagcgcagctattatggaaaacagtacgaaagttcctttaaaaaaaaaactaaaaatttaactactatatgatccagcaatcccaatactgggaataaatccaaaacaaagaaaatcaatatgtcaaagaaatatctgcacttctatgtttattgaagcactattcacaatagttaagatgtggaatcagcctaagtatacatcaacagatgaataaagaaaaggtgacatatattaacaatagaatacaatttagtgattaaaaaaaaacttgtcattctcagcaacatggatgagcttggagaacactatgttaagtgaaataaaccaggcattgaaacataaatacyatatgttctcacttatttgtgaaagttaaaatagttgatctcacagaagtaggggctaaaacagttattagtagatgctgggaagggtaggggtttgggttataagacttacgagattcctaagcaaagcagtg

SEQ ID NO: 289015 - DNA, 613 bp, Homo sapiens
actgaagcgaggaatataaaatatgtcaaattacttcaaaatgactcaggcttagcacagaaaatgcacaaaggagcatacgtctattcacattgtttactcattcratagctatttatagtgcaacatataaaatcctagaagcttagggaactatattaatgattagccctgataactgttctcaaggaatttataatcttatcctcagttatatacaggtccctttcacgagttttcaagttttgcacaatttgaagtccttgaagcactatctgagaaacttcattataataaaacagaagttttctggctataaaaataacattttaaaaaaattatctgcgtcccgatgagagacaaaggaatcagttattttttccttttatagttccctaaatcccctggaatcatactctcagctcccattgtatttttgtgatagttctttttaaacatctacctcaactcctctactccagattcacttctttaatgctgtctgaatggctcaagattaattttctatactttctctttgaacaaattcttagaaatcaaaatgtcaatgatcctgaacaaaattactctccaaacactggcttgtgccagg

SEQ ID NO: 289016 - DNA, 421 bp, Homo sapiens
agcatacgtctattcacattgtttactcattcaatagctatttatagtgcaacatataaaatcctagaagcttagggaactatattaatgattagccctgataactgytctcaaggaatttataatcttatcctcagttatatacaggtccctttcacgagttttcaagttttgcacaatttgaagtccttgaagcactatctgagaaacttcattataataaaacagaagttttctggctataaaaataacattttaaaaaaattatctgcgtcccgatgagagacaaaggaatcagttattttttccttttatagttccctaaatcccctggaatcatactctcagctcccattgtatttttgtgatagttctttttaaacatctacctcaactcctctactccagattcacttcttta

SEQ ID NO: 289017 - DNA, 1105 bp, Homo sapiens
actgaagcgaggaatataaaatatgtcaaattacttcaaaatgactcaggcttagcacagaaaatgcacaaaggagcatacgtctattcacattgtttactcattcaatagctatttatagtgcaacatataaaatcctagaagcttagggaactatattaatgattagccctgataactgttctcaaggaatttataatcttatcctcagttatatacaggtccctttcacgagttttcaagttttgcacaatttgaagtccttgaagcactatctgagaaacttcattataataaaacagaagttttctggctataaaaataacattttaaaaaaattatctgygtcccgatgagagacaaaggaatcagttattttttccttttatagttccctaaatcccctggaatcatactctcagctcccattgtatttttgtgatagttctttttaaacatctacctcaactcctctactccagattcacttctttaatgctgtctgaatggctcaagattaattttctatactttctctttgaacaaattcttagaaatcaaaatgtcaatgatcctgaacaaaattactctccaaacactggcttgtgccaggwttaaatacagagattcttgggctccctgcccagtaatttggttcaaagccttaggaccagaaatctgtattttttatgaagtgtcccagttagggaagtttctccaattccctactgaggcaggattagaatagatgatagaaccatataattgtataatgtatatttactttcatatattactgtttaatgatcctgaatatagtttatgtgtctacaagtaactttttaactaacccttttgcttawatttataatatccatctaaggaaacaattcagctattcttatacagatatatgtgaactcagaggactcaaccaatcaatattttgtctggcccaagagttagtggatcatgcaatcagtagcccttccagaagagggtggaaacaaggcctatttgtatttttatatttttatttaaaatgtgatgaaacaagaatctaagttgtgacaatattgaaaccactgatctaaaccatttgtct

SEQ ID NO: 289018 - DNA, 491 bp, Homo sapiens
ttaaatacagagattcttgggctccctgcccagtaatttggttcaaagccttaggaccagaaatctgtattttttatgaagtgtcccagttagggaagtttctccaattccctactgaggcaggattagaatagatgatagaaccatataattgtataatgtatatttactttcatatattactgtttaatgatcctgaatatagtttatgtgtctacaagtaactttttaactaacccttttgcttatatttataatatccatctaaggaaacaattcagctattcttatacagatatatgtgaactcagaggactcaaccaatcaatattttgtctggcccaagagttagtggatcatgcaatcagtagccyttccagaagagggtggaaacaaggcctatttgtatttttatatttttatttaaaatgtgatgaaacaagaatctaagttgtgacaatattgaaaccactgatctaaaccatttgtct

SEQ ID NO: 289019 - DNA, 504 bp, Homo sapiens
atatctgagcccaatgtttgtgatcaagataattttctttaataaaccaagaagtttgaaccaagaaaattctgttagttttaatgactaagacatttaattttctcagacctctgtaaaatttatcacatatagtaaaagaagactaatatcatccaatacaattacatgcatatccactatggtatactggaaaatcaaactgcytgaaattggattataatctgttagcagattaatacgttattttttggtacagaaaaattgatagcattgatagaagagaggagagtattttcatttttcatggttcttcagggacaactggtaacggcttagtagtttcttcagccatattagctcaaacagatagtaaccactaaaagcctcagaatttatatcagcgttatttttataaaaacacaaatgtatatatacccagatatttgcattgtgtccaggcctggctacataatttatgggaccagtacaaaataaaaatgt

SEQ ID NO: 289020 - DNA, 504 bp, Homo sapiens
atatctgagcccaatgtttgtgatcaagataattttctttaataaaccaagaagtttgaaccaagaaaattctgttagttttaatgactaagacatttaattttctcagacctctgtaaaatttatcacatatagtaaaagaagactaatatcatccaatacaattacatgcatatccactatggtatactggaaaatcaaactgcctgaaattggattataatctgttagcagattaatacgttattttttggtacagaaaaattgatagcattgatagaagagaggagagtattttcatttttcatggttcttcagggacaactggtaacggcttagtagtttcttcagccatattagctcaaacagatagtaaccactaaaagcytcagaatttatatcagcgttatttttataaaaacacaaatgtatatatacccagatatttgcattgtgtccaggcctggctacataatttatgggaccagtacaaaataaaaatgt

SEQ ID NO: 289021 - DNA, 594 bp, Homo sapiens
atgtgcattgacttctcttgagaaatgtctatacaaatgccctattaartacctaatttaaatgtgtttttacagagaattcaaattaactacacttattcagtatatgattcagattaattatgcccaagccatttggggcttttgatactgtttctatttcaggaagcagaatttggcatcagtgtagtcatttcaaaaatgagttcctaatatagaagataaaaatattctgccataaatatctatagatataataaaacttaacattctataatgtggatgttgtatttaggcaactcaaatttatttctctcaaaataataatgtaatactaaactgtttatcatttaactgtttatcatttaagactttaatgaagcatttttggaaagaaggaatttaacatttagagactaacgttattgcaaaggtgctatagaggtaacttaatcctattcccttggtatgtatgtaaagaatggtctcagaaattaaattattatgtcctttgattaaatattaaactagctcaggctgtatatttatgaccacacaagtgatttagatgtatagatatcttctccaatctac

SEQ ID NO: 289022 - DNA, 594 bp, Homo sapiens
atgtgcattgacttctcttgagaaatgtctatacaaatgccctattaaatacctaatttaaatgtgtttttacagagaattcaaattaactacacttattcagtatatgattcagattaattatgcccaagccatttggggcttttgatactgtttctatttcaggaagcagaatttggcatcagtgtagtcatttcaaaaatgagttcctaatatagaagataaaaatattctgccataaatatctatagatataataaaacttaacattctataatgtggatgttgtatttaggcaactcaaatttatttctctcaaaataataatgtaatactaaactgtttatcatttaactgtttatcatttaagactttaatgaagcatttttggaaagaaggaatttaacatttagagactaacrttattgcaaaggtgctatagaggtaacttaatcctattcccttggtatgtatgtaaagaatggtctcagaaattaaattattatgtcctttgattaaatattaaactagctcaggctgtatatttatgaccacacaagtgatttagatgtatagatatcttctccaatctac

SEQ ID NO: 289023 - DNA, 594 bp, Homo sapiens
atgtgcattgacttctcttgagaaatgtctatacaaatgccctattaaatacctaatttaaatgtgtttttacagagaattcaaattaactacacttattcagtatatgattcagattaattatgcccaagccatttggggcttttgatactgtttctatttcaggaagcagaatttggcatcagtgtagtcatttcaaaaatgagttcctaatatagaagataaaaatattctgccataaatatctatagatataataaaacttaacattctataatgtggatgttgtatttaggcaactcaaatttatttctctcaaaataataatgtaatactaaactgtttatcatttaactgtttatcatttaagactttaatgaagcatttttggaaagaaggaatttaacatttagagactaacgttattgcaaaggtgcyatagaggtaacttaatcctattcccttggtatgtatgtaaagaatggtctcagaaattaaattattatgtcctttgattaaatattaaactagctcaggctgtatatttatgaccacacaagtgatttagatgtatagatatcttctccaatctac

SEQ ID NO: 289024 - DNA, 455 bp, Homo sapiens
agctgtgatggcaccactacaccccagcctgcatgacagagtgagaccctctccaaaaaggaaaggaaagaaaaggagaagggaggggagggragggaagggaactaatacaggaagagttaaccacaaagcaaggtaaggaatctatattgccaattttcagtcacataatctctcagaataccacataaatcccatcagtttgcttccaattacatctcagataagttatagaagacaaaagattattagtataattatgcatgaatataattaatgggtataattacccaaaggataattatgttatcaaataattaaataaaataataaggcataggaaaacaaaacttccaaaaatagcaacatagtgtcttttaaatataaaacataaaatattcttggaattattttcattaagtcattttatttattcactttcagagaggcaactc

SEQ ID NO: 289025 - DNA, 622 bp, Homo sapiens
tggtgctaatgtgttaaggattaaagaatatattctcagagtgactttagcaagataatggaagattcccagctcatgttctccccacacgaatgacaaactacagccatcagaggcaaaagtgcctgtgtgggagcttttgaatccaggtagattgtgaaaccctcctgaagcccagtactgaggacagccatatggagaaggcagacccatacacgagtggcaggcttgctgagcacagttctggctgcagagcaaaagtagtcccacctccctctggactcagcttcaaccctacttggctgtagtttctaaatgagctccttccaccattgcaattcatgtcccctaataacaggccctccaacctcagacacaatccaggattctgaagcaggtcctcactaccatagtccagagtcagtcctgccaacccaggaaactggtgggaaacacacctcttcatgtccccagtaataagcctggggacctttacctcactacagatgctgaagcagccctgtgmctcagctccagctctacttgatcatatcctagatttagtcttaccagagatcaatcctaactactcatgatgtataatccttttaaggtgaggtta

SEQ ID NO: 289026 - DNA, 375 bp, Homo sapiens
caaaaaccttctggaaaaattcaaaattagctgacttcatgggtaaattctaccaaacattcaaagaggaattaatatcaatcctttttaacctcttccaaaaaatagaaaaagagggagtactttcaaactcattttatgaggctgctatcaccctgatacaaaagcaaaacaaagacaccatgaaaaagagaaaatcgtgggccaatacccttgattaccatagatgcaaaaattctcaatataatgctaacagctagaattcaacaccaccttaaaataattrtacatcatgaccaagtgagattttccctgggatgcaacattaattctatatatgcaaacaaatgtgatacatgagattaaaaaaatttt

SEQ ID NO: 289027 - DNA, 620 bp, Homo sapiens
agctatttgttggggagccctgctctctgggaactcagcgaattaacagcaggatgcctgaggggtaggtagtctaccacctagggagagcagaacagggaggacagccagcttttaaaactctgctcttaacaaaaaaagaaagaaaaagaaaacaatcggctttattatgaacttcataaggacaagaaccaggttttgcaatcactcaaggtatctaatacagtggccctttagtctaatttatcaatttttttcttttatagtgagcctttttgtgtcgtgtttaagaaatctttgcctactctgaggtcatgaaggtggtctcctatgttttcttcaaaagctttattgctttacctttcacatttagatggatttaaaaatccatctggatttttgttgttgttgttgttatgatgtgaggtaatttttcacatgaatatacaattgatccagcacatttattgaaatgactggttgggcacactgrctcatgcctgtaatcccagcattttgggaggccaaggcaggaggactgcttgaggccaggaatctgagactagcctggccaacatagcaagatcctatctctatatattaaaataacattttttaga

SEQ ID NO: 289028 - DNA, 646 bp, Homo sapiens
ctgttaacaacaaagactcttgtactggtgactactakgcaatcatcagccctgggaattggaaggaaagccacatattacctattgaatattgctgaatgttgcaaagtagaagatagaggagtttgtttatatggccaacgtttattgagggctaaactacatcttagtcactcttctagacactggcttatccaggcaaagataatgcaaaagcacaagaaagagaaaagaaaaccccacaaggaaccatggaagctgtattagtttgttcttcattgttgtaaagaaatacctgagactgggtaatttattaaaaaaaaaaaaaaaaaaaaaggtttattctggctcatggttctgcagaccgtacgagaatcatggtgctggcatccgctcttggtgatgcattgggaagcttctaattatggcagaaagtgaagggggagcaggtgcatcacatggtgagcaagaaagcaagagagaaagagaaagacgtgccagtctgttttcaacaaccagatttcatgtgaactcatagagcaagaactcactcattaccacagagagggcaccatgacatttgatatggtttggctgtgtccccaccaaaatgtcatcttgaattcccatgcattatgagagggac

SEQ ID NO: 289029 - DNA, 646 bp, Homo sapiens
ctgttaacaacaaagactcttgtactggtgactactatgcaatcatcagccctgggaattggaaggaaagccacatattacctaktgaatattgctgaatgttgcaaagtagaagatagaggagtttgtttatatggccaacgtttattgagggctaaactacatcttagtcactcttctagacactggcttatccaggcaaagataatgcaaaagcacaagaaagagaaaagaaaaccccacaaggaaccatggaagctgtattagtttgttcttcattgttgtaaagaaatacctgagactgggtaatttattaaaaaaaaaaaaaaaaaaaaaggtttattctggctcatggttctgcagaccgtacgagaatcatggtgctggcatccgctcttggtgatgcattgggaagcttctaattatggcagaaagtgaagggggagcaggtgcatcacatggtgagcaagaaagcaagagagaaagagaaagacgtgccagtctgttttcaacaaccagatttcatgtgaactcatagagcaagaactcactcattaccacagagagggcaccatgacatttgatatggtttggctgtgtccccaccaaaatgtcatcttgaattcccatgcattatgagagggac

SEQ ID NO: 289030 - DNA, 565 bp, Homo sapiens
cattgagtccaaaaaccttccctggaacccagggccttcactcctctggcctttacatatttgtctgcttttgaaagagagaactttttctaaaccattattcaagtgaatactgaaaagaaaatgacagactgttttggaaatccaaaaactatgcacgcctaggactgtgaccattattagcatctagtattcagtggatattgaatgcatgcagaaaaggagagtgacttatctcatttttgttggaaaattatatttcaaaacccctatttctaaaagaacgtttgtggaatcatcacatcacagtcaccagagggctyctttaaaatgcagatttcagacacttattgaatcataatcccttggaataaagactggaaatttctatttttaaatagtactcatagtgattattaagagcactgatattccagaaccacatctctaaaatctcaggtttctttccctgtttgattttgagaactgtgaaatgcctaggtctgggaacaaagagatcccagaaaaattcagaaattccagtgccttacatacttcttcagag

SEQ ID NO: 289031 - DNA, 603 bp, Homo sapiens
gaaaatgttcttctaccatcctcccttcataacatgctgttacctatggaataaaatatatgctttatagattagtcgtctctgctgtttggctttcgataatcaaagatagggttttatcctagaagaaaactacaactctctccaaaagcctgacttcctcaaaagaaaggcttgacttctgaaactatgatatccaataggagatgttaaaagtccattcagctactcgcctgatttcatccttctagttagtgtataagttctcattgattcctgaatatggaagaacmgttctgagcaaagagagcattacgtctgttaataatcagattatgcactgaaatatgttatgtgattcaatacttttggtaattctcaaggtaagaattagcatttccattttactgttgaagaaataggcacataaagtgtgaacaatgtgcccaaatcacaaagcttaatgaagtgtgtaagtgtatcattcaaaattcagtctgtctaacttcaaaactgaactgtaatgaggaattcctagaaatatccaaaccagataatcttgccaatcctcaatttctacattcgtcaaatgaaaccatgacc

SEQ ID NO: 289032 - DNA, 662 bp, Homo sapiens
ggaggcccatttgcctgttttctcagtgccagttcttgccctttccttcctctgctctgatcactgcaaaccacacttcttggcatccctcactcactagtttctccatartttcacccagaggaaaacactgacatgaaatctggaggttagagaagggaagaagtcaggatatttctcccactctccactttgggagtgactccccaacctggctgcaattcctccgtggtccagcttcccccagacagtgtccctgcctttggttctagttctccctggctggttcctcctccaagattacaggtcctggcaggtggcacagctctcggattccagtcagaaactttcctcccttagtcacaaccttaagaataatgtgatttcctgcaattttgaatctctgagttgtctcacttcccacttcccactctgcacaccccactctgattagttccccacattgaactaccgggcatggtcctgttttcctgcctggctgtggactgacattgaattctcagagtgtgacataagtaggtttctgggcttctggcacagattttcctggaaactaaagcattaatgacaaagaaggaagagcactaggggaagaatttagagtctgggttcgacttccagagcctcactacctgctgtgc

SEQ ID NO: 289033 - DNA, 648 bp, Homo sapiens
aatctgtagcaagaggcagcaatatgcagcacataatcaagtatatttgcacaaactaaaattgaatatatgacatataattatatataattgaatattcagtatacatgtatgattgaatctgcaagttagatgtgcacaggatttgatgccatcatatttttcatatatacagaatatattaatatttatgctacaaaattattaagtaaacaatgttgtagttccaaatagctttaagaaattggactttgccaagagttttaaatttctgtgttacccttcctgctagcattcctccatctggcctaccctaggttaacgctagcttgcattttgctttgctttytgattttaatacatatgtcagtattactaaacaatatattgtttagttttgtttgtattttgagctttatataaatggcatcatatggcatgcatttttgtgtgagtcacattttttgcccaacatatgtttacaactgtgtgcatgtgggtatagttcatttatttttcagtgctctacagaaagtaatttttcaactcaaggtattcctttcctaaaattaattacttttgtctaatttagccatgtagtacaaatgcatcaagatagaaaatgaacattaactgccgcaacaaaca

SEQ ID NO: 289034 - DNA, 552 bp, Homo sapiens
tcacatcttacaggaagatatagacatatgtgataaatagtgtgatggagaagcagaagaagttacggtgttaaggagatgcagcacagagtaagagctttttgttttgtttctcatacaccactgatattctctgactggcgtgtaaacctcggtgtcaactagatgaagaagaaggagaagagtctttatgaccaacagacacacagatgaaaagcccctggggtgggactgagctgggcacttctgaagaactaaagaaagacactgggggctgcagccaagagagcagaaggagttggtggcagcatggtcccagtgtacttggccatcctggccacattgagaattgtaaccttaaccttaraaagaacacagagtcattgaagggttctaaactagggaatgatgcaataagatttgcctttttaaaagattcttctggcagctgtttgagaataaaataagaaaggcaagaaaggattttggaaagccaaccagcattccaaggagcagtttagttgaaagatatggtggctttaaccacactga

SEQ ID NO: 289035 - DNA, 553 bp, Homo sapiens
tgatgcagcaggagccccatgctcctgggcacagctgcagttgcccaactgtggctccagatctgggcatctctgcactcttgggggcccaggaagtcccctgtccccactggctcagaattggctgctcctgcccttgggcagtgcctgctccagtgcagagcgaagttgtggccaagcccaggtgctatcacagcctagccagatgtgcattcacttgggggtgctgacacaccagccccctgccacctcagccctctctggactttgggcaacaacaagcatgsgagggaggccagggggctgaggcagcttggcacaggcctgtgggcacccctcagcatggacagcctgggtgctgtggatggcatgttgatggttgcaggaagcagataggttcctaggtgggaaggggtgggtcccctgtaaaaactcaccttcaagccagggactcccaactgaagcctgggagtcaggctgccagttctgggtggagtccacaacctggagaaagaatttatggtgccttttccaggcccacccatggccaccc

SEQ ID NO: 289036 - DNA, 615 bp, Homo sapiens
aaaaagtcacttaaattctgagccccagtttcccatccaaaagtgatgaattcctgccttccaaggtaattttaagcattaaatacaattcagagggtggcacattgaagaaagtaaatctttatttggagaacagctatgtgccttgtgtccgatgtgtgtttttgtgagttcccatgcattcatcactacgttaggattccagcaaagagcaaacattaaaatcaagtctacgattatgaggtcttgacaagtggagttctcaattcctggagaaagacagaatttaattttattgcaaaagatgaatgactgcaggatatcaagatatttgctgccagggagatgaaacagtgagtatcattccccagtatcctcattgtattttatcctgttagctccaaagctgggtctcaagctatgcatacccctcccccagtaaaaaatagattattctctgaaaagcaaaaattaccttcatgtattttctgaatgatatgctacgctatcattctcatgaaatgcttttcattatcttgtcctgaatcatygtattattgtagtatctcctggcctcttaagcacataacacagtgaagttgattctactattag

SEQ ID NO: 289037 - DNA, 560 bp, Homo sapiens
atttttaagtttgggggcatgatttggaatcaaatcacagccttagagtcatagggccttatctgggacgttcaggttggatttggcccaaataaaataatgcattcctctgcaattaacatcctggctagaccttattttggctgagacaagcctagcaggtggctgggtaccaaatcaatgaacagcatttcctggccaagggtaataagacagcacttccccccaccaaccctccccttctcacaacttcccaaagccttttctcatcctatttgttcagcaaattctaatggcagccattagctaccaagagatgtatttgattttggaggtgatgcaggtggaaaggccctttcttcttactttgggaatatgataacattgtcctgcatctcatcaaatttagctgagtttatttgttactttctttttgtgaccatggatgccataagaaatgatcctctatagactgtgcttaacctataggttgccttatggggtcctggggagatgtttktgtaaatccaaccgattttccaatgaactcccaaggttat

SEQ ID NO: 289038 - DNA, 540 bp, Homo sapiens
agctctgctagttaccacctgtgtggccctggatgcatggcttaacaaatacttgcctcaaagggctaaaatgaaaactcagttaggcaatgtttgtaatgtacctagctcagtaggtgttccaaagtttgcctctttctccctgyccttcctgttgtaaataaagtattcagtagaaactaaagacttgtaaaatgaaaaaatggctgtggtgtgacccaagacagatgtggcaaatttttattcgttattcatcaaaaaaaatcattattaaattcttacatggtgtggtttataggaccagtatgggatgtggtgagacatacaaaattgagaaactgacagattctaacctcaggaagatttcaagtctaatacatgataaaagacatatattcaaaatattaaagagtatgtcaggtcataatttgtgacctagaagtggtgccaataattattttggaatctcagaagataaaagatgatataaagttgctaccaatgaagaaagaattgtgggctggatataacaacacacag

SEQ ID NO: 289039 - DNA, 1115 bp, Homo sapiens
agctctgctagttaccacctgtgtggccctggatgcatggcttaacaaatacttgcctcaaagggctaaaatgaaaactcagttaggcaatgtttgtaatgtacctagctcagtaggtgttccaaagtttgcctctttctccctgtccttcctgttgtaaataaagtattcagtagaaactaaagacttgtaaaatgaaaaaatggctgtggtgtgacccaagacagatgtggcaaatttttattygttattcatcaaaaaaaatcattattaaattcttacatggtgtggtttataggaccagtatgggatgtggtgagacatacaaaattgagaaactgacagattctaacctcaggaagatttcaagtctaatacatgataaaagacatatattcaaaatattaaagagtatgtcaggtcataatttgtgacctagaagtggtgccaataattattttggaatctcagaagataaaagatgatataaagttgctaccaatgaagaaagaattgtgggctggatataacaacacacagwcagagatataaaaaagcagtttgctttatttcttgttttataaataaggccaattaaacattttatggcattgtcctgatactctgattttagcaaccctttatcttttatcttcagcctgtgagatcctagtgactttccgctttcctatctgaagaattaagattaaaaaccactgtcaagagctgaaaagtaataaaagtaacttcaggttcacaaaagtctgaaattgagatatcctgctgtatttttattttcttgtttcagaagcagagtgattagatagatggtaagaagctgcwtattagatgcattaaagtccatcctccttcagagtaacactcattgtaactctaatatttccaagagtagaaggtgaaccacgtatcctcaccacattttggtttatcaacacttattaaacaacacaagagccctgtctgctctaagttgagagctcaagctttgccaacagtaacgtgaggactttgtaataatcactgcattagtgtccaggcaggaaatggaattctactcaaaaggatttaacaaaagataatttatgaccattgat

SEQ ID NO: 289040 - DNA, 589 bp, Homo sapiens
gcttattagatgcattaaagtccatcctccttcagagtaacactcattgtaactctaatatttccaagagtagaaggtgaaccacgtatcctcaccacattttggtttatcaacacttattaaacaacacaagagccctgtctgctctaagttgagagctcaagctttgccaacagtaacgtgaggactttgtaataatcactgcattagtgtccaggcaggaaatggaattctactcaaaaggatttaacaaaagataatttatgaccattgataaaaataagggaattaatgatgtggaggcactcsgagactagcaatagcgataagtcattaccctgcgaggaaaggacagtgggaggaaatactgttaccgtagtctggtgagcacagaaggagagagaagaaaactctctgcaggaattctagtgtcaaaagatgccaccactaccaaattgcaacactgaaacagggaggggcaggagtgtaagtatcccaaatcctctctcctcaaaccctccaaacaccccaatctccagatgatgtcttccattggccaagtcaaaccataaaccagggaaccaacaaa

SEQ ID NO: 289041 - DNA, 589 bp, Homo sapiens
gcttattagatgcattaaagtccatcctccttcagagtaacactcattgtaactctaatatttccaagagtagaaggtgaaccacgtatcctcaccacattttggtttatcaacacttattaaacaacacaagagccctgtctgctctaagttgagagctcaagctttgccaacagtaacgtgaggactttgtaataatcactgcattagtgtccaggcaggaaatggaattctactcaaaaggatttaacaaaagataatttatgaccattgataaaaataagggaattaatgatgtggaggcactcggagactagcaatagcgataagtcattaccctgcgaggaaaggacagtgggaggaaatactgttaccgtagtctggtgagcacagaaggagagagaagaaaactctctgcaggaattctagtgtcaaaagatgccaccactaccaaattgcaacactgaaacagggaggggcaggagtrtaagtatcccaaatcctctctcctcaaaccctccaaacaccccaatctccagatgatgtcttccattggccaagtcaaaccataaaccagggaaccaacaaa

SEQ ID NO: 289042 - DNA, 553 bp, Homo sapiens
aaggagaaaagctcattaattgcttaaaatatgatgatagcaatccttggcctgataattattcttattttatggaagaggaatctgaggttcagagaagttaagtgacttttctgagtcacagagttagtaaatggcagaggcaagattaaaatctcaggaatattccattttcaagggggtgctgtggaatgctgaatggctctgattaatggagtgagaagaatttggagttcccaggcaaggaggagtaatgrtttgagagagaagtcagaagagggatggagacagcgtgtagataaggtgaaagtggtgaattccctttcttcctgcattaccccctccccccatcattttgcattcattcatcacagttgatggtatctgctacgttttaaatttgctggatcacttgcatgtgcttcgtctcccctctctgtcccatacatttgcagtgaattttatatatgtaccaattcttagtgctgagtaaattttctggggtgggagggatgcgggggaaggaagggcctcttaaaaggggctaagtttc

SEQ ID NO: 289043 - DNA, 553 bp, Homo sapiens
aaggagaaaagctcattaattgcttaaaatatgatgatagcaatccttggcctgataattattcttattttatggaagaggaatctgaggttcagagaagttaagtgacttttctgagtcacagagttagtaaatggcagaggcaagattaaaatctcaggaatattccattttcaagggggtgctgtggaatgctgaatggctctgattaatggagtgagaagaatttggagttcccaggcaaggaggagtaatgatttgagagagaagtcagaagagggatggagacagcgtgtagataaggtgaaagtggtgaattccytttcttcctgcattaccccctccccccatcattttgcattcattcatcacagttgatggtatctgctacgttttaaatttgctggatcacttgcatgtgcttcgtctcccctctctgtcccatacatttgcagtgaattttatatatgtaccaattcttagtgctgagtaaattttctggggtgggagggatgcgggggaaggaagggcctcttaaaaggggctaagtttc

SEQ ID NO: 289044 - DNA, 548 bp, Homo sapiens
gcattggctttgaatgtgtatgaatgggcaaatccacacagtggcatcagaggatatttgtctccccagcagctagccccgattagcttcaggcatcagtcattctccaaagccaccacccatcaggggctggttatcttgccctttgcccgggcttttgatcagagggcaccaggcamtaaaggcacagataggaagatcttccttagggattcatgggacggcttcaaaggtcggaaagcaatttgcagcttttgtgtggaagaccacagggtttggggagggagcgactccagttggtggggagctaattagggccagtaactggccacttcgatatcacttgaaagctatatggatgatgtggtggggagcacggagaccactttgttctcagcaggcagctggctgccactgtgtaagtggcaggtttgggaaacgcggtatggaaagactggtacttaataaccctcaggagatttgtgaaatggactctccatgagtggttgtcctgtatttacattttgcagtatgttgcaccaaggcta

SEQ ID NO: 289045 - DNA, 548 bp, Homo sapiens
gcattggctttgaatgtgtatgaatgggcaaatccacacagtggcatcagaggatatttgtctccccagcagctagccccgattagcttcaggcatcagtcattctccaaagccaccacccatcaggggctggttatcttgccctttgcccgggcttttgatcagagggcaccaggcaataaaggcacagmtaggaagatcttccttagggattcatgggacggcttcaaaggtcggaaagcaatttgcagcttttgtgtggaagaccacagggtttggggagggagcgactccagttggtggggagctaattagggccagtaactggccacttcgatatcacttgaaagctatatggatgatgtggtggggagcacggagaccactttgttctcagcaggcagctggctgccactgtgtaagtggcaggtttgggaaacgcggtatggaaagactggtacttaataaccctcaggagatttgtgaaatggactctccatgagtggttgtcctgtatttacattttgcagtatgttgcaccaaggcta

SEQ ID NO: 289046 - DNA, 548 bp, Homo sapiens
gcattggctttgaatgtgtatgaatgggcaaatccacacagtggcatcagaggatatttgtctccccagcagctagccccgattagcttcaggcatcagtcattctccaaagccaccacccatcaggggctggttatcttgccctttgcccgggcttttgatcagagggcaccaggcaataaaggcacagataggaagmtcttccttagggattcatgggacggcttcaaaggtcggaaagcaatttgcagcttttgtgtggaagaccacagggtttggggagggagcgactccagttggtggggagctaattagggccagtaactggccacttcgatatcacttgaaagctatatggatgatgtggtggggagcacggagaccactttgttctcagcaggcagctggctgccactgtgtaagtggcaggtttgggaaacgcggtatggaaagactggtacttaataaccctcaggagatttgtgaaatggactctccatgagtggttgtcctgtatttacattttgcagtatgttgcaccaaggcta

SEQ ID NO: 289047 - DNA, 566 bp, Homo sapiens
acaacaacacaaccaatacacacaatatttccattatcacacaaatttccctcgtgccttttgctggtgaaacccccccatgaccccagacctgacccctgcaaccactgatctgaatttttacttttttagagttttgaataagcaaggtcatataatatgtattcatttctatctgtattcttttgctcagcaaaatatttttgagattatttcatgttgtgtatatcagtaacttattactttttattgctgaggcatagtagtaatagtagttgtattaataacagatacacgacttgtttatctactcaccagtcgatgaacatctgggatgtttgcagttttgggtgattgcaaataaaggtgctatgtacattagcatacagacctctgggtgaatatacattttcatatttctttaccaarggggtgaaatttctgggttctatggttaagcgtatatttaacattttaataaactacacaaatttttaaagtggttttaccattttattttcccaacatcagcataagagggttctagtggctccacgtttgtgaaa

SEQ ID NO: 289048 - DNA, 539 bp, Homo sapiens
aaataatatttcatgagtacctaatgatataaataaataatagagcaaataaataaaagtggaaagagaaagctccrtcttaaagtagaatttcagtgaataaaagtagaagaaataaatacaaaatcaccatgtgacaaataccaggtaatcattgttttaggcaaggatcatctatgaatataatgaatgggtgaaaatatcctgagaaatagggtagtaatatagtgtcaaaatatctcttggaaagatacccattaattataaagagaaaacagttactatagaggggagaagtctggcagttaccgccttagcaaaatgatcaaagttaacattttggggacaaattgacatcatttgcctcctaattcaacgccatgagaatgacacattatcacttgtgcagtgttcttgccaaaaatgcataacctgaatttaattataaagaaatatcagacaaaccagactgaggggcattcttgacaaagaactagataggactcttcaaaagtgtcaaagtcatgaaagaaaagacc

SEQ ID NO: 289049 - DNA, 539 bp, Homo sapiens
aaataatatttcatgagtacctaatgatataaataaataatagagcaaataaataaaagtggaaagagaaagctccgtcttaaagtagaatttcagtgaataaaagtagaagaaataaatacaaaatcaccatgtgacaaataccaggtaatcattgttttaggcaaggatcatctatgaatataatgartgggtgaaaatatcctgagaaatagggtagtaatatagtgtcaaaatatctcttggaaagatacccattaattataaagagaaaacagttactatagaggggagaagtctggcagttaccgccttagcaaaatgatcaaagttaacattttggggacaaattgacatcatttgcctcctaattcaacgccatgagaatgacacattatcacttgtgcagtgttcttgccaaaaatgcataacctgaatttaattataaagaaatatcagacaaaccagactgaggggcattcttgacaaagaactagataggactcttcaaaagtgtcaaagtcatgaaagaaaagacc

SEQ ID NO: 289050 - DNA, 539 bp, Homo sapiens
aaataatatttcatgagtacctaatgatataaataaataatagagcaaataaataaaagtggaaagagaaagctccgtcttaaagtagaatttcagtgaataaaagtagaagaaataaatacaaaatcaccatgtgacaaataccaggtaatcattgttttaggcaaggatcatctatgaatataatgaatgggtgaaaatatcctgagaaatagggtagtaatatagtgtcaaaatatctcttggaaagatacccattaattataaagagaaaacagttactayagaggggagaagtctggcagttaccgccttagcaaaatgatcaaagttaacattttggggacaaattgacatcatttgcctcctaattcaacgccatgagaatgacacattatcacttgtgcagtgttcttgccaaaaatgcataacctgaatttaattataaagaaatatcagacaaaccagactgaggggcattcttgacaaagaactagataggactcttcaaaagtgtcaaagtcatgaaagaaaagacc

SEQ ID NO: 289051 - DNA, 539 bp, Homo sapiens
aaataatatttcatgagtacctaatgatataaataaataatagagcaaataaataaaagtggaaagagaaagctccgtcttaaagtagaatttcagtgaataaaagtagaagaaataaatacaaaatcaccatgtgacaaataccaggtaatcattgttttaggcaaggatcatctatgaatataatgaatgggtgaaaatatcctgagaaatagggtagtaatatagtgtcaaaatatctcttggaaagatacccattaattataaagagaaaacagttactatagaggggagaagtctggcagttaccgccttagcaaaatgatcaaagttaacattttggggacaaattgacatcatttgcctcctaattcaacgccatgagaatgacacattatcacttgtgcagtgttcttgccaaaaatgcataacctgaatttaattataaagaaatatcagacaaamcagactgaggggcattcttgacaaagaactagataggactcttcaaaagtgtcaaagtcatgaaagaaaagacc

SEQ ID NO: 289052 - DNA, 505 bp, Homo sapiens
tggtatctagcaagagaactggcacatactaggttatcaattcgtgtaaaatgaaaggagggaaggaaggaaagaaggaaggamggaagaaaggaaggaaggaagggagggagggagggaagaagggagagagaaaaaagaggaaggaaggaaggggaaggaaggagggaggaagtgggagagggagggagggaagaaggaaggaaggaaggaaagaaggaaggaaagaaggcaggcaggctcagactctgattcagaaggtgaagaacagtttatgactcttttttacagcaaaagggtagacatgaaagtattgatacatgtccctgaactgagcaggcctgattctatatgtataaaaattcagtcactccaggtgtgagtaggtctctagacacagagaaggtaggttctagaattttctattccaatggctttaacctgagaattgcatttcacattttagtagtcggatcttgtttacattgtgttcccagtccaagta

SEQ ID NO: 289053 - DNA, 293 bp, Homo sapiens
ctctaatgtggatgaatatatagttccctagaatatgtagtgttttcagaaaagaaaaggcttcatgcacagtgattaagaacatggaccctggaaccaaactgcttacctacttagctgtgtgaccttggrcaagtcacctaacttctctgtacttcagaaaaatgggactagcaatagtacttgtcccatgaggtcactatgaagattaaaatggattaatatttgtaaaataaaaatacaactttattaaatagataatggagattatttgtatgtgcttatgaataatg

SEQ ID NO: 289054 - DNA, 579 bp, Homo sapiens
tgagtttctctattttcctattttatcatttcagatcaggtaaaagtgtaaaatactaaatggatataatgtatagattggctagacttagaagagttcatacaaggatatgaggaatttaaatctcaaaaatgcattttagcatagccctccttaaggaatatattgatgtagcaatgttaatagcaagtacagctttctttttgattatgtgtttggtttctaagaaaaaaaaggatggaaaaatggtaaatctatatttgattcatgtatcataagtaaatttatttcctctgaaagggagatgggataatttggaggaaataattctgaaaattttctattaaaacagcatggtgtatctctcttyatatataaaattatctgaagaaaacatattaaatttaaaggaaataagataatgctactacaaattttcctggaaaaatataaatgcaatcaacaaagttgaaactatttttttctatgttttgcaaaccatctgtaggtaggaaaataaattgtcctgcttagagctgactgaaaccatgattaaaatgagcaaaaattacaaatata

SEQ ID NO: 289055 - DNA, 579 bp, Homo sapiens
tgagtttctctattttcctattttatcatttcagatcaggtaaaagtgtaaaatactaaatggatataatgtatagattggctagacttagaagagttcatacaaggatatgaggaatttaaatctcaaaaatgcattttagcatagccctccttaaggaatatattgatgtagcaatgttaatagcaagtacagctttctttttgattatgtgtttggtttctaagaaaaaaaaggatggaaaaatggtaaatctatatttgattcatgtatcataagtaaatttatttcctctgaaagggagatgggataatttggaggaaataattctgaaaattttctattaaaacagcatggtgtatctctctttatatataaaattatctgaagaaaacatattaaatttaaaggaaataagataatgctactayaaattttcctggaaaaatataaatgcaatcaacaaagttgaaactatttttttctatgttttgcaaaccatctgtaggtaggaaaataaattgtcctgcttagagctgactgaaaccatgattaaaatgagcaaaaattacaaatata

SEQ ID NO: 289056 - DNA, 644 bp, Homo sapiens
cattaatttgtaacacgtgatggcacaaaaacaaaggacattttaagtcttcattaatggactggaagagaaaaagcaggctcattaaattctccactgttactcaattagaaagtttcccacactggsaaagacagtaaaattacacaaacagatctagagagtgtgagttgatgtgaacaagaataaaactatgggaatttaacccgatcaatgacaaggtaatatacttgaaggagataaaataactataatgtatttgaaggatagtgtgaccaacgataactagaaatttcagggtaaatacacatagaagtaaacattcaatctgacacaaagcgcctatagtccatattggacataagatcccaacataggaatttaaatggcaaaagtggagtacatgtaatgaaaaccatacttacatagtggttaagaacctggagtctggagtcagagagctcgagtcccaaccttcattctgccattcagttacacaaattaacttacttctctccacttcattcccctaatatataaaatatagataataacttcttttctcacgggaatgaagaatataatcctggctgaggaacctaatacagtgtctggaactcaaggaccgatacatgtcagcaatt

SEQ ID NO: 289057 - DNA, 559 bp, Homo sapiens
gaggtttttgaacccagagatatctttatgaaaaccacatgtttaatcattatactgctgtcctaggtttccttttggacatcaagtggactgtacatgatttaaaaataaatgtctaagttttgtgcctttgagagttcaaaaatttatttgttttagcaggtaccattatattaactaatatatggggcctctttgggtcagtatagtagtacagagttatactactaggttaatgatatagtatggagttagcccaagactatgctatacctgacaaaagaaagcaacataagtgtacttgtcctttaatttaggcccttgcttttacataccttcatttatctttgattgtcttaagaactaagcaattgttacaaatataaatttgaaataaattyacttttcaaaataaaatagatgtcacaaaatacttttataaaatggtggagagggtagagtagatgttgtgtattaggaaatccaatatacttattaagaagtatcttataatttcataaaagggaaatcactactttagcacatcattaatgccaaa

SEQ ID NO: 289058 - DNA, 597 bp, Homo sapiens
cagcacaaggttcctataatggagagttactgacaccaggctatatatttattattattaaaaactggtgaagatattctactgtgaggtcactcaggatataatcactgstttcagagtggtttaattcaaccatttgaaatttggctgatgaatttatattttgtcacaaataataatgcaatttgtttttgtctaataacctcatttacattttcacattgctagaagcctacagaccttatttttaatgtttttctgataacataagtaacaaatgttcattgttgaaaatatgtgaaaaattcaaaaagcccaaagattaaaataaatcatgatgcatactataacccctgagtttaacatgcagacagatctacttccagtttttctgtagacaatataaacatatattcataacatgcactttaaattttatatgcgtacaatgtatgtgtatgtgcaaacttttaaagtaaaactagatgtatattttacatgccactttgcaacctaccacttttctttccttcttttttttttttagccggatgaaatcttgtttattctgaaacataattggtcaacaataaacat

SEQ ID NO: 289059 - DNA, 549 bp, Homo sapiens
agcaataagagaatgctgtgctggtctgttgtttgccctcggatctattctttggcctcttcctactcttccctgtatcaaaaggtgttgaactccacagactgcatttcccagtctgtcacatgtcagatggcttccaaactggatttggtcaataggaggcactgatgggagattgaagggctggagggagaagccaaggtatttctcccctccctcctcaccttgcttttctggcaatagtcatgtgtcatccatagtcatggattcttctaaatagatctactaaggcttcagtttccaccagctgatcccaactcctgagcactcataagccacctccttcctctgtgcttccagcctaygggtggcttcctaccattgttaatccatgagttgccccactattatatgtttggcttctgctctctcaacatctatataacctattccctgcattaaaatccctctgttgaaatgcttgagtggtttctgcatgttggctagtctctgaccaatatggatgcaaatcacacatcataatctata

SEQ ID NO: 289060 - DNA, 580 bp, Homo sapiens
ttttcacatattcttagggtggaaaatcctatacccagaacttaaaattcacttggtaccattttaagctgtgactgtacctagctaggggccacctaggtaggtgtcataagtaggtccatctgcttgttctccctttggtctagggtggcccataattcagttcactgtcctaagatatcagaagattttaaggagtgggtgtagtgaatgcacagaaaaagccggcctagcctagcaggaatatggtgtaacaataaaatcaactaattagttcatgctgcttcttggtagagagcagtgattctcaattttggatgcataatagattccctgggcctataataatcctgatgtccaggctgcaccccagactacttaaatccaaaactttgaggaggggaacttaggcataagtaatgttcaaactcccaaacaatyccaaggatatgtacagtcaggatggagactcactaatttagaccagggcttctttttttaaatttttttattattatactttaagttctagggtacatgtgcacaatgtgcaggtttgttacataggtatacatgtgcc

SEQ ID NO: 289061 - DNA, 969 bp, Homo sapiens
tatctttgtgtaaaatgggggacaatggttccagaagtctccagccaactttcccttgaatctcattgaccaagattgcctcgctgtcccagtcctaaaccaatcactggcaaaagagatagaaccaccgcaataggctcaaaccagttaagatttaacccttgaggtgcagatgggcctgcctttcactaaagcatatggacacttgctttagagggaaaccaatattcttcaagcaaagaaaggagtggtaaggtcttgtggagcaatgagcagtgctatgtagaccttccatgaccaacytaaatttcaccccacatcctcaatttcttcctcactatcttgctctttttttcctttatagttcttatcccttttaaaaactgtattatttgctccttgtttattttcttcccccatcactgtaatgtaagatctgtgtgggaagacagtttgtctgaaggtgctcaataaatgtttgctgaatgaatgaatggtgttwctccgaatttacacacctagcataagacttgcatttatatgaagcactagataaattattccagaaatagagtactcaatatattattctagaaccataaaaagaatatggaaataattttctcaaagccccttttgaaaggagggaaagagagaacagcaaggatagctatccctttttgttggtgactgctgcagtttcttcccctcctgcttattcatctttattcttttcagcaagaattaagatttccagattttgaagctattggctcatcttgcaggaggccatcatggcaggcaaaatctttactctgactttcatctccctatatttctcgacacttgtgtggatgcttgctgtttttgtttacataatcagaacagcaatgttccccaggaaaacwttttttttttttgcttttctatgaaacttcttgaaattagatgggcccctaaaaaaaagat

SEQ ID NO: 289062 - DNA, 609 bp, Homo sapiens
tactatggctagagtcatggtggaggaaatgcagttctgtaccagttcaactacccataatatttttaatattttaatattttttacctcatgttttttccataggttatttcatgcaaacttaatacaacctgttatcccacatttatatctctagctcagacctttctgctaagatccaaattcatgttgccatctgccatctgtcatctcaatgacagaagtataagaaacctcatatttcaatttttttagatggggtctcactgtgttgcccaggctggcctcaaactcctaggctccacctcctgagtagctggggctacaggtttgccccacagtgcccaactagaaatttgcatttctgaaatggaatattgatctttcttgcyaccccttaccattctgcaactcctccaatattgtgagcctaaagctatggcattgctatttgtttagttctcatcccacaaacttgagattcattcttggtatctccttccttcctaccctcttacactcaattgatcatcatgttttgttgattctactttttgaatccacctctttctctccatctctgtcttaagcatcctgattcatgtaccc

SEQ ID NO: 289063 - DNA, 358 bp, Homo sapiens
ataaatcagtaaatgatcccttgccactgtggtgtgtgtrtatgtgtgtgtgtgtgtgtgtgtgtgtgtgtgtctgtgtgtgtgtcctacagcctaatggaaaaggggatgcaaggaatagaggaaaggagaaagaagggaagaaagaaaaacagaaaggaaggaagaaaggagaaaaaaagaactagatatatagattaataaaattattctattcagggtctcctatcttcctctcctaaaataaaagtagtttcctctgtcaaacaactttggatggaggacttttctgtttgaagtgatctgagtaagatgttcactaattggacagtatttccacaataattcatagctgggg

SEQ ID NO: 289064 - DNA, 526 bp, Homo sapiens
tacatggtaggatttgtgtgtgcaaataagagcttctgtgataagatttgtgtgtaaaaaattcaaatttttaaatgtgatgtataagagcttacttytacagtctcatttctcacacttcttaacttagaatttaattttgtataagtaacttttgtaattcccaatgtttatatgttgtctccttactcactttgtaccttctgtatgcagtactcttcctcatgttcttataacatattcgatctaagggtcagcttttttagcaaacttgtttttcctcttttctccccccagttagattaggcagaccttcattttatttccatagcattgtgagcatctctgtaattttgtcttttcatattgttttaaaagtttctttggggagtatttttttggtttctgatctatgtaaatgtttcaataaacatttattaaaagaatgactggtaagtatattcatatgtttactaaatagcattctaaggagtataaacttcagagtttcaatatcacagacata

SEQ ID NO: 289065 - DNA, 526 bp, Homo sapiens
tacatggtaggatttgtgtgtgcaaataagagcttctgtgataagatttgtgtgtaaaaaattcaaatttttaaatgtgatgtataagagcttacttttacagtctcatttctcacacttcttaacttagaatttaattttgtataagtaacttttgtaattcccaatgtttatatgttgtctccttactcactttgtaccttctgtatgcagtactcttcctcatgttcttataacatattcgatctaagggtcagcttttttagcaaacttgtttttcctcttttctccccccagttagattaggcagaccttcattttatttccatagcaytgtgagcatctctgtaattttgtcttttcatattgttttaaaagtttctttggggagtatttttttggtttctgatctatgtaaatgtttcaataaacatttattaaaagaatgactggtaagtatattcatatgtttactaaatagcattctaaggagtataaacttcagagtttcaatatcacagacata

SEQ ID NO: 289066 - DNA, 622 bp, Homo sapiens
tggaaacaagacaaagatgccctctatcactactactattcaacatagtactggaagtactggccagagcaaccaggcaagagcatctgtattaatctgttgcatgctgctgataaagacatacctgagactgggcaatttgccaaaagaaaaaaaaagtttattggacttacaattccatgtggctggggaggcctcacaattatggcagaaggcaaaaagcacttctcacatggtggcagacaggagaaaagagcttgtgcaggaaaacttccctttttaaaaccatcagatctcatgagacttattcactatcacaggaacagcacaggaaagatctgcccccatgattcaattacctcccaccarcttcctcccatgacaagtgggaattcagaatgagattagggtggggacacagccaaaccatatcattccaaccctgctccttcccaaatctcatgtcctcacatttcaaaaccaatcacatctttcccacagtcccccaaaatcttaactcatttcagcattaactcaaaagtccacagtccaaagtctcacctgaaacaaggcaagtccctgccacctatgagactgtaaaatcgaaagcatgttagttact

SEQ ID NO: 289067 - DNA, 622 bp, Homo sapiens
tggaaacaagacaaagatgccctctatcactactactattcaacatagtactggaagtactggccagagcaaccaggcaagagcatctgtattaatctgttgcatgctgctgataaagacatacctgagactgggcaatttgccaaaagaaaaaaaaagtttattggacttacaattccatgtggctggggaggcctcacaattatggcagaaggcaaaaagcacttctcacatggtggcagacaggagaaaagagcttgtgcaggaaaacttccctttttaaaaccatcagatctcatgagacttattcactatcacaggaacagcacaggaaagatctgcccccatgattcaattacctcccaccaacttcctcccatgacaagtgggaattcagaatgagattagggtggggacacagccaaaccatatcattccaaccctgctccytcccaaatctcatgtcctcacatttcaaaaccaatcacatctttcccacagtcccccaaaatcttaactcatttcagcattaactcaaaagtccacagtccaaagtctcacctgaaacaaggcaagtccctgccacctatgagactgtaaaatcgaaagcatgttagttact

SEQ ID NO: 289068 - DNA, 508 bp, Homo sapiens
gacaagtaaggcaaaaaatagatggatagaatttctttttaaaggactctgaggtttacaatttaagaagaggtgaggtgacaaggccttaatgaaagatgagtagctcagctgtgctactgtaaagcaataaatgcaaatgtgtcattaatgtgaggcctttatttacataaacttaaaaataataacaataaccaaacagtaataaatagcaggtaaaataaaaaattagaaaaataaaagcatatcatttcttctattgtgtttttattgttctataaaaatggaaatcttgatcctttaagaaatttgttctttgtagaattgtatggaacaaatgggagactgatagtttctagtaaagaatttgatyctattatgaaattgaaatacagcttcaaaaggcatggagctggacaggtatagacatggggaaaatcatgaaatggcttcattctgtttgggaaaagcttgtcacagaaaaactgaaaatctcaaccactctctt

SEQ ID NO: 289069 - DNA, 530 bp, Homo sapiens
atcacttgagaaactttcgtgaaatctttcattsctgatgctgttaaatactcactttaaaaagaatcaagaatgattatggatatcatcaaatacacattgataacttcagtaaggatttcagatttcaaggtttttaatatataaaatcatcacattttatagtttagattttattgctggatttgtaatgaattggtcataaaatcatttcctttagttccttttttattatgattatatggttagatatgttattgaaaaattgacattattttacaattgcaggagattaccatgaaaactggcaaattctttggagcaaacaatcataattggggtctagggggaggtgtatggtattgaacactaattatactccagaaatgctggattggtggttgacatttttattaaaataaaaatacagaaaaaattacctgtttctagcatgaaatttgttatttaccaccaagctttggttttcaaaattgcacttatcataatgtctaatagaaaacctgaacctt

SEQ ID NO: 289070 - DNA, 606 bp, Homo sapiens
ccattagaaagttagtagtgcttttaaaattattcttgtgctcaagtcaattgataaggacactcagctactccaagactacatagagatttcttcccaccattgttccaactgcattttattacctatttgtacaactaaacatgtatgctttcagcaagaaggtagatattatatggatgcaaagataatttaactataacacatggtatattgaaggaaactagttctcactttaattttgaaaacatttttgctggaatgttaatattaatgagaattaacttttatgtttgtattagctttgctatttctatatagtaaaagaatacttagaatcaggaacaaagtgagagcttgggatacaatcagatatttaaattactttttaataataaaagtagaaggctgggtgtgctgtctcacgcctgtaatcccaacactttgggagactgaggtgggaggattacttcaggccaaaagttcgaacccagmcttggcaacctagtgagactctgtctgtgtcaaaaataaaaataaaaaaaatcaaccaggcatcgtggtgtgtgcctgtagtcccagctacatgggaggtaaaggtggaag

SEQ ID NO: 289071 - DNA, 606 bp, Homo sapiens
ccattagaaagttagtagtgcttttaaaattattcttgtgctcaagtcaattgataaggacactcagctactccaagactacatagagatttcttcccaccattgttccaactgcattttattacctatttgtacaactaaacatgtatgctttcagcaagaaggtagatattatatggatgcaaagataatttaactataacacatggtatattgaaggaaactagttctcactttaattttgaaaacatttttgctggaatgttaatattaatgagaattaacttttatgtttgtattagctttgctatttctatatagtaaaagaatacttagaatcaggaacaaagtgagagcttgggatacaatcagatatttaaattactttttaataataaaagtagaaggctgggtgtgctgtctcacgcctgtaatcccaacactttgggagactgaggtgggaggattacttcaggccaaaagttcgaacccagccttggcaacctagtgagactctgtctgtgtcaaaaatamaaataaaaaaaatcaaccaggcatcgtggtgtgtgcctgtagtcccagctacatgggaggtaaaggtggaag

SEQ ID NO: 289072 - DNA, 598 bp, Homo sapiens
tttccttccaatcaccatgccccagccccattaaaggtaaccactgcttcaatttctaaaaacattaattcatttaccctggctttgtagtttgcagtaatgacattgtaggtgaagaaaaatattacatttaccttcttaggactttccactgggcctgagaattaaactgatatgaaacatagcaacagcgtaaaatcacgcaaatttatttaatataaattttatgtgatacaggagccctcctaagcaaataaagacacaaagaagcaattagagtcaaatgctgttatagtatatccacattttacagttttacactataaagtgtaatgaaytgtaaaagcttgaaaaggcaaagatgcagaggccagggtagtcagttaagtaaagttaggatagctaattgagctactagggagataaaaattagtttaacaggatttgtttgcagaaacttctctaggttttcacttcctattcttgacaatgagaatattactttcttcctggtatagggagactatctttgacatagcgggggttatatctcctgctttcactaaatgttgtttctgagattcatttattttattgt

SEQ ID NO: 289073 - DNA, 568 bp, Homo sapiens
aagtgacacaaatattaggtatttgatagtattctacaagyatggttggcactgtttaatgaatatcaatgtattattttccctctgttcctcagttctatattgaagttttatgtgataattgaaacatcttggtcaccagaagttgactttatttaagaaaattttatttaattaattgattaaatgtttttaacttaccagatattcttgctttttatatgtcaagtactattgtattgcatccttgaaatacaaaacatcttgggaaaatctctgttctgttaaaattccttagaggatgttaatttgctcattttatcagaaaattaactcaggtgtgaactgatatttgtgtgggcagtgattccaatgttagtttaagtttcaaaaatgtttccaggctatttgggttcatcatgagcatgggccactccaaagttaagagacatgagtgatgctttatgtcatagttctcttctcacagcctttgcatgatgtgtgctctacttccttggatctctttcatgtatgtatgcacagcttattgattaacctagtccttgtg

SEQ ID NO: 289074 - DNA, 412 bp, Homo sapiens
tccgcataaatatagttaactgatcttttacaaaggagcaaaggcaataaaataaagcaaagacagtcttttcaaaaaattgtcttggaaccaactgaacaatccmcctgcaaaaatatgaataaagacacatgctttatattcttccaaaaattaactcataatggctaggcatggtgactcccccctgtaataccagcactttgggaggccaaggcaggaggactgctggagcccaggagtttgagacgagcctgcataatatagtgagaccccatctgtagaagaaatcttaaaaattagccaagcatggtggtgtgaacctgtacttccagctattcaggaggctgaggtgggaggcttgcttgtgcttaggaggcagaggttgcagtgagccaagatggcatcccta

SEQ ID NO: 289075 - DNA, 605 bp, Homo sapiens
tattgttttggttttgtttggagattgtttaaatactgaaatatggtcaatttagattgttgaagtttatctgcagataaaaatagtaaattttaccataaggtaagcggtggaagaaaaaaaataacacattcttttacatcaatattaaagagcaagaaarttttgttttagtatttttttatagataaaaatgcatatttaatgtgagaggctttatttaagtgaattcttaatcctttgttagtgttcaatgaaaagttcccattttataaatttccttcacatagtttaagtctgtctgtttatcctaaatgtatctgtgactaatataaatgagattttcatctctattaatcaacatttcaataccagtaattacttggtcagccctttctttgacttacatttttgctgctgtggtagaaatcaagcacactggaaaatgaaaatgaataataactgacatcaagccagctccgtgagtttgtacaaaattgtatttcctaaaagtcactttcagatactagtctgttgcacgcaacaaaacggttcacatttccatgcttactctgaaactgaccttaggctgctgtcttaattga

SEQ ID NO: 289076 - DNA, 560 bp, Homo sapiens
acatattattttccaaaagaaaactttctaatttaataaataaattttcaattgaagaaaaggttgtaagctaaaagtatgtttatctgcctgaaacatgactgggctgaagattgtcatcagttagagaaagtcaggctttggttctgccaatgtttgtcttttagaagatagctaggaagacctataatagtgaagaataaataatataactatgcttacgtattttgatcacttatattctattttcattctcacaataaccctatggagtaagattctctccgctcatttttgatgagccagctgcagttgaaccagggtaagtaacctgcccaaatcctagaattagcagagggaagaaacaagacsagaactgatcactccgtgttttatacctcactttcacaccatccctggattcaaatttattggctttgaaactggcactctcttggaaatgtttgtgtttatggagactttttgttaagtataccaggaaatgacagtagaagagaccctaatcccaggatgttctaaaaggagaagagattaaaatg

SEQ ID NO: 289077 - DNA, 560 bp, Homo sapiens
acatattattttccaaaagaaaactttctaatttaataaataaattttcaattgaagaaaaggttgtaagctaaaagtatgtttatctgcctgaaacatgactgggctgaagattgtcatcagttagagaaagtcaggctttggttctgccaatgtttgtcttttagaagatagctaggaagacctataatagtgaagaataaataatataactatgcttacgtattttgatcacttatattctattttcattctcacaataaccctatggagtaagattctctccgctcatttttgatgagccagctgcagttgaaccagggtaagtaacctgcccaaatcctagaattagcagagggaagaaacaagacgagamctgatcactccgtgttttatacctcactttcacaccatccctggattcaaatttattggctttgaaactggcactctcttggaaatgtttgtgtttatggagactttttgttaagtataccaggaaatgacagtagaagagaccctaatcccaggatgttctaaaaggagaagagattaaaatg

SEQ ID NO: 289078 - DNA, 507 bp, Homo sapiens
gaagggtaggtctaaattagctgactataggttatattaggaatgaaacatgcagttttcaaaaaataggcaaaggaggattagagagggaagtatatagcaactttagttgacatctgtcattctttgtggtatctagctactgaaccttttcctgtgtgtgtgaaatccaccaacttttgaggcaaagcacacatccaactttagaagtagaaattgctagataattgctttctgtgtttgtcttttacattgagttcaggcagaggatatagggcaatcagataagcacattcaaacttttgaatctgaagggaatgaccaastagatagatatggttgcaatggggtcagctaaacttattttctaaagttgtccatgggtatagcttcattaaaagcatccactttttaagtattgatgatagcagggaaacattcttaatatctgtaataaatcagtttagcagcataattttgaatatttttctccaaaaggcatgactt

SEQ ID NO: 289079 - DNA, 603 bp, Homo sapiens
cttacaatattataattcttttttggtctttaaaaaaatcataaatttttctcctcttgggtagctttttttttcttcatcttctaggcaagagagaaagactagagcaatctggagtggcacaaatgccttgacccacctggaataatcctctaacaaagtacgttgccctgaaacacaaggatttgtcatggagagtgtgctcagtgtaattcaaaagagctattcttccctaccaactgccggaaccatgaggggatccttctttgatattcaccacaaggacctcgtgagatgtctagaggtaaatcccataaaagctttggggtcctctaagactacascccccgggtacccagaaagtttatattcttgcgctagtgtacactaaacaaatttaagttagcagtgcattattggaatagatatgtgtattgatgatttttactttcctctacttatcaaaaattatcttcttttcttcgtttaaatttataaataacaaatcttcaataaagacataaggactcttaaactcaactgtttctcatacacagttacaacatatgatatattctgcttgttttttaaaaccatagttgc

SEQ ID NO: 289080 - DNA, 442 bp, Homo sapiens
ttaccaaacgatttaggcacattttcaattcctgtgttgcatttttaatagttacattaaaagtgaatactgtagggactctctcatacacacatagggaaaatgaggtattctggagatacagctktgatataagtaaaagctttaaagagacagctatttaattatgcattaatataaatgttgaataagagatgttcggtaatgaaaagagaccctattacagattatatcctactcaccctattaatgtttagttcctgttactggttgttgggatcaccaaggctggacagaccagaagaacataattaaatcagctagtttcttgggagatgggaggtttgaaggaaattgatgtctgtatagcaaaagttagccattgatataaaatggccagaggttcacagtgaaggattgtgttgttttattgcttgatatg

SEQ ID NO: 289081 - DNA, 439 bp, Homo sapiens
atttggagtgtgtatgacacaggtgaagactttgaatgtgatctccacacgttttcttcatagctcaagtaggtacttycttaacacagagattatattataaaatggaactcaggagatactaaaggcaataggtctttcctttcttccttaagttttacaatctttgaagagacttaagtacctataaaggaccacatcttgagaccctttcatctatttcctagaccagtggactcctgaatttggtgtgagtataaaataagaaaataatcaaaaaaattaaaatttctataatttggcaagatcataggattcaaatttaactctgatttaaggaataaaggtataaataattattgtactcccaagttggtgatctgacatatatatcagctacaggtgtagaaaaccagtttctactccagatgcacttgct

SEQ ID NO: 289082 - DNA, 1067 bp, Homo sapiens
attatttgcatttcagcacttggatttcaacaaggtatttcattgacctaatttaaagagagacatctaagggaggtaatctcagcactgtggcaggacactaggcaaggttgggggcagacagatcaaaatttgtgtgatcacgtagatgaagtccaggttggggtcaaagttgtctgggatccagtgctactgtttgttctgagtcacacatccctcatcttaaaaaacaaaaaagttgaaggtgatttttttctaatacttatcattcaataattttattttgtttcccacaactaaggtatctattcaatatcagtcttcttttcacacatacacacacacacacacagatacacactttctctctctcccttctcaatttgccccatcytgtccttctccaactaaataagggctaatatattcattaattagaatatgtgaatattcaaataaaatagaaacaaagcttwgtatctgccattacagtattatacataatagtttcactgtcctaaaatattttatatttttcacttatttaatactttcctcatcctctacgcccagccctggaaacaactgatttttwtttttttttttaccatctctatggttttgacttttccaaaatgtcaaataatttttattatagtatacgtagcatttccagattagattctttcacatagtaactagttaagattcatccatgtcttttcatgctttgatagtcacttctttttatcactgaataatactccaacttgtatgtagtttctttatccattcacttttgaaaaccatcttggttgcttctagtctttgttgattaaaaatagagctgctgtaaccatccatgtgtatatttttgcaaggacataattttttgcttcatttaggtaaatatgtaagaccaagagtgctagattgtacagcaagaagagtttagctttcccagaaaatgtcaaactattcttcaaaggagctatgtcgttttggattctcaaaggcaatgattgagagtttccggttgctctgcattcttgctagcaatttgcatt

SEQ ID NO: 289083 - DNA, 591 bp, Homo sapiens
gtatctgccattacagtattatacataatagtttcactgtcctaaaatattttatatttttcacttatttaatactttcctcatcctctacgcccagccctggaaacaactgatttttttttttttttttaccatctctatggttttgacttttccaaaatgtcaaataatttttattatagtatacgtagcatttccagattagattctttcacatagtaactagttaagattcatccatgtcttttcatgctttgatagtcacttctttttatcactgaataatactccaacttgtatgtagtttctttatccattcacttttgaaaaccatcttggttgcttctagtctttgttgattaaaaatagagctgctgtaaccatccatgtgtatatttttgcaaggacataatttttygcttcatttaggtaaatatgtaagaccaagagtgctagattgtacagcaagaagagtttagctttcccagaaaatgtcaaactattcttcaaaggagctatgtcgttttggattctcaaaggcaatgattgagagtttccggttgctctgcattcttgctagcaatttgcatt

SEQ ID NO: 289084 - DNA, 642 bp, Homo sapiens
ttttaaaacagtgtttttttcttttatagatatatcttcatcaccattgatgttcctcaaaattcaacccttgggtcctttttcttgtctgtccgtgcatactaaaaagaaaaattaaaaaacaacaataaaatggcartaataacgttagtgctaataacccaaaaccttatcatcactatcataagagtaacagtaatcgttaatatttattgttaaataatagttattctaacaaccatttcggaaagcagaactatcatctcttcagcttggaatctccaatgtctagcacagtaactggaaaaaaaatacatggtaaaatatttgttaaaatttaactctaaccatttctttctcaggatgaatagttattgaaataaactgttcatggtagcaaacacctggttccgacttctttgcaatcatgcatctttaaaaatcccctttcttttggacagggagtaatgaccactcctttctcaaagcctaatttataccataaatgtattaaaaattaatttcataaaggagagaaaatgattaagctccaataaatgtccagcacacctaggaaaatgtgaattattgaaaatagagtctgcattgaatcttaaaaacctggaacaactaactgcttgt

SEQ ID NO: 289085 - DNA, 642 bp, Homo sapiens
ttttaaaacagtgtttttttcttttatagatatatcttcatcaccattgatgttcctcaaaattcaacccttgggtcctttttcttgtctgtccgtgcatactaaaaagaaaaattaaaaaacaacaataaaatggcagtaataacgttagtgctaataacccaaaaccttatcatcactatcataagagtaacagtaatcgttaatatttattgttaaataatagttattctaacaaccatttcggaaagcagaactatcatctcttcagcttggaatctccaatgtctagcacagtaactggaaaaaaaatrcatggtaaaatatttgttaaaatttaactctaaccatttctttctcaggatgaatagttattgaaataaactgttcatggtagcaaacacctggttccgacttctttgcaatcatgcatctttaaaaatcccctttcttttggacagggagtaatgaccactcctttctcaaagcctaatttataccataaatgtattaaaaattaatttcataaaggagagaaaatgattaagctccaataaatgtccagcacacctaggaaaatgtgaattattgaaaatagagtctgcattgaatcttaaaaacctggaacaactaactgcttgt

SEQ ID NO: 289086 - DNA, 642 bp, Homo sapiens
ttttaaaacagtgtttttttcttttatagatatatcttcatcaccattgatgttcctcaaaattcaacccttgggtcctttttcttgtctgtccgtgcatactaaaaagaaaaattaaaaaacaacaataaaatggcagtaataacgttagtgctaataacccaaaaccttatcatcactatcataagagtaacagtaatcgttaatatttattgttaaataatagttattctaacaaccatttcggaaagcagaactatcatctcttcagcttggaatctccaatgtctagcacagtaactggaaaaaaaatacatggtaaaatatttgttaaaatttaactctaaccatttctttctcaggatgaatagttattgaaataaactgttcatggtagcaaacacctggttccgacttctttgcaatcatgcatctttaaaaatcccctttcttttggacagggagtaatgaccactcctttctcaaagcctaatttataccatamatgtattaaaaattaatttcataaaggagagaaaatgattaagctccaataaatgtccagcacacctaggaaaatgtgaattattgaaaatagagtctgcattgaatcttaaaaacctggaacaactaactgcttgt

SEQ ID NO: 289087 - DNA, 1226 bp, Homo sapiens
ttgggtctctgtcttctgtccttggatctgattgggctttctgtatgttttgaataagaaaatacgaaggaggcgatgctgcctgtatcagtacctaggtaattcagagaccagtagtttcaatttcctgtctcttagaaagttgccttttggaaaacacccctagatgcctggccctagaggaagccaacactagtctaacagtcttggaagaaagtgaaaccataacaggtggttctgaaagatgaaacatctgggggaaggaatgagaggggaaggacaccaagacactaggtccatgagacaagatgctatcttggaagaggataccctagccccagatgttcactsatcttatgtgaatcaagggtaatccacctaattgacatatttttgaacatctgaactacaatgtcagaagggcaattaaagtttattttaagcattaagttttgaggtattaaaaatgacatagcattagacaactggaacacaattttgtccctagaatcaggatgctaccttaacaaaacgtttttaaaaattggcattggttttcggtctggtcaatgtactggaactagagtaggtttgaagacattgwaggcactgtaccccctgggaggattcctttcaccgttgtccttagggtcaccctggagtaaaggagtatggctgctgctatccactgtgaactcctgtcaacttttcgaaatgattaatgggaaatttgggcccaaattttcttcccctgtcagttggccattggaaagttgacttgagacgataaaaaattgttaaattaacatagatttttgttaacatgtaattgaattgagacactgctatagaggtgcagcagagggtgatagttttttgttttcattttttaatatttggtttagacggtaaattttaataaaaataccatgtatcaggagacaactcaaaaactcaaatatctttgataacttctaacaagaatttcattaagtcaacattcaaatatagatttcagagtcagattcattacactaaagaggccatgatgattgtttgacattagggacatccagtcccttgattcctgccatagacwtagaatggcacagatgcccacacaacatgttcctgagtttcactgtaactactgtcgacttccttttcttttctttttttttgagatggaatttcactcttgttgctcaggctggggtgaaatggtg

SEQ ID NO: 289088 - DNA, 610 bp, Homo sapiens
ttaaatcaggtctgacatctgttttgtaaataaagtttacaggggcatagctttgccattctgtttacatattgtctatgattgctttcaagctacagtggaaaaattgagtagctgcaacagaaactgtataacctacaaacctaaaatatcactttctggccctttatacaaaatattttcacacccctactataaaagatatcaaaaagaatatcatacttctactctcaaaaaacatgcatgcaaataattgtgtatacatttatacagacattcagaagttaaatatatagaggggtatgacaaaagagagtagygagagattaatgtcagcttaactcataaggaaatgtttgatgaatcaagtggtatttgaactgaatcttgaaatatttggaaggttccaatgagcatggaaaggagagagtgttgacccaagttggaaagtgtgctgtttcggttaggaataattttagcagcaaggagccagaaattaggaataggctaaacaggtcagggtttacattcttcatacaataagaaaactggagagaagctaattctaatttgtttgccacagatcaatgattttaaccgccctgtgatt

SEQ ID NO: 289089 - DNA, 610 bp, Homo sapiens
ttaaatcaggtctgacatctgttttgtaaataaagtttacaggggcatagctttgccattctgtttacatattgtctatgattgctttcaagctacagtggaaaaattgagtagctgcaacagaaactgtataacctacaaacctaaaatatcactttctggccctttatacaaaatattttcacacccctactataaaagatatcaaaaagaatatcatacttctactctcaaaaaacatgcatgcaaataattgtgtatacatttatacagacattcagaagttaaatatatagaggggtatgacaaaagagagtagtgagagattaatgtcagcttaactcataaggaaatgtttgatgaatcaagtggtatttgaactgaatcttgaaatatttggaaggttccaatgagcatggaaaggagagartgttgacccaagttggaaagtgtgctgtttcggttaggaataattttagcagcaaggagccagaaattaggaataggctaaacaggtcagggtttacattcttcatacaataagaaaactggagagaagctaattctaatttgtttgccacagatcaatgattttaaccgccctgtgatt

SEQ ID NO: 289090 - DNA, 438 bp, Homo sapiens
gtatgtctttatcaacagcatgaaagmagattaataaaccatgggaaaatgggtagaattgagaatactcaattgcatttattgagttggtgaatactatattcgaaaagaatgaatctagaatttagttttggacatattgagttttaagtgtctgttaaatgaagatttgaagatattggcagttctgtggtcaattcaaggacggaaatagaaatttgggataatcaccatatatatatttagtttcttaaaagtatgataccagtgaaatcatcacagaaatgaaactcatagaagactaaatgttcaaggtataatgccttagggctctccagaattcagaattcacgctaaacaaaataaacacctgaaagaaataaaggaatttccagtatgccgaactgaaaactagatgaatatggtgtcttggaagtc

SEQ ID NO: 289091 - DNA, 438 bp, Homo sapiens
gtatgtctttatcaacagcatgaaagaagattaataaaccatgggaaaatgggtagaattgagaatactcaattgcatttattgagttggtgaatactatattcgaaaagaatgaatctagaatttagttttggacrtattgagttttaagtgtctgttaaatgaagatttgaagatattggcagttctgtggtcaattcaaggacggaaatagaaatttgggataatcaccatatatatatttagtttcttaaaagtatgataccagtgaaatcatcacagaaatgaaactcatagaagactaaatgttcaaggtataatgccttagggctctccagaattcagaattcacgctaaacaaaataaacacctgaaagaaataaaggaatttccagtatgccgaactgaaaactagatgaatatggtgtcttggaagtc

SEQ ID NO: 289092 - DNA, 438 bp, Homo sapiens
gtatgtctttatcaacagcatgaaagaagattaataaaccatgggaaaatgggtagaattgagaatactcaattgcatttattgagttggtgaatactatattcgaaaagaatgaatctagaatttagttttggacatattgagttttaagtgtctgttaaatgaagatttgaagatattggcagttctgtggtcaattcaaggacggaaatagaaatttgggataatcaccatatatatatttagtttcttaaaagtatgataccagtgaaatcatcacagaaatgaaactcatagaagactaaatgttcaaggtataatgccttagggctctccagaattcagaattcaygctaaacaaaataaacacctgaaagaaataaaggaatttccagtatgccgaactgaaaactagatgaatatggtgtcttggaagtc

SEQ ID NO: 289093 - DNA, 596 bp, Homo sapiens
atatgcatatatatatgcatatacatgtgtgtgtatatgtaagtgtgtgtgtgtgtatatatatatatatatatatatggagctgaagcaagagttacaatggtaggaataaagattttaacttcagttatgtaaaggaaaatctggaaatagttcattcgtgtttgattagatcaataaacaacaatgggatgacatttcacacctattagaatgcctaaaattaaaaaagcactgagaactgcaaatgctggcaagaacatgaaacaacagaaactcttatttatttctggtagtaatcccaaatggtacaaccactttggaagagagtttggcagccatttcttacaaaactaaacatactcttatcatacaatccagcaatcatgttacccaaatgagttaaaaacttatgtccacataaaacatacagacagatatttatagtagctttattcaaaattgccaaaacttgaaarcaacaaagatgtctttcagtaggtgaatggataaataaactgtggtacatccagacaattaaatattattcagtgctaaaagaaaatgagcaatcaagccatgaaaagacatggggg

SEQ ID NO: 289094 - DNA, 670 bp, Homo sapiens
gagggccaaaactgtattcacaggcttatgttccccagggtaagtagaggaccattttctcgagtttcagcaaaacactgggcagctctttcattgccctcatcttaaatttggttctcagacctaaacccattcctatggccagaaggatgcagtatccaatgttgatggcacctyaacttacctagatggatggacttagcatacagatcatgggttcctaaaggaaaattgggtgctgttaccagaagagggaggaatggatgctgagcagatacatgcatcctttaaaggatccccgaacttttctctcttgtgtatgcacacacatgaataaacacacacacacacacacacacacacaccccttaaactgtaattacaacttctctatatgtgattagaaaaaacattaagattccaacaggccagagataacagatatatgcagacaacagaaaataaaaatccttacctgcatatgagaaaaaaatgtgtccataaaggaaaagaaattagaacactaatgaggtaccatgtttcaaccaaatctagcaattgttctctgaaatgaacagctagtacagtgtaaattattgtcagtttctttggagcattttattcaacttatatcgctaaacttaaaaagtgtgtttatgtatactgatct

SEQ ID NO: 289095 - DNA, 619 bp, Homo sapiens
taatatttatggagaatggtatatgcgtggtgtgtaaagtaaatgttctaatgattggcatacactagtgtctgaaataagtagcacatacattaatgttattattattattactttgccttttgacaagctcatctagactcttgggttgcattttccatctttgactagttagttgataaaatgtttcagtgtgttttagtgaggaccaatgctctgtccacaaagtggcatatactgagaattctcctacagaaaatcttaagaaacagtacaggataacattcgggtttggatatcaatggtgttatgttagtagtcaaggctcttaatcaaacactttttggctattttgagtaactgaatgtctttattccctccagcattgttcaattcctgtttgttcaaytgagcaaataggaatgagatacctacaatgcaccaaaaacagtgataaaccctggggaatatggagctgagtacaatatagttgctctgcgtttctaagaattgtatatggaacctatggagcagagagatcatttgaaagtgattgatactcctttgctccccatcctcactcaccactttacccagatgcaataatcgcaagagtggg

SEQ ID NO: 289096 - DNA, 608 bp, Homo sapiens
tagtctactttgcaaatacctatagccaaggatgcagattaatttaagaaaagttactgaatccttctaaaacaaacaaaattattcaaacctcactgtggatttaggccagtgaaggaagccaaggggctattcaggaagagtacaattctgtgattatctgataagcaccacctgataaattgtaaggtaagagacataattgagttaytatttcagtttaagaaacagaaaaattaatttctttaattctcagtctatcattctagaacttttaggggtaaactctggaggccataaagacatgcatttgtgtataaaacatttttcctctgggtcagtcacaacacaaacagtggtagttctgtatttgactctttgtccagaaatacatggaatcatctggaagttccatggattatataaattgcatgtttataatagttaataataaagataagaacatatcttatttattgattgtctcatatgcctaacacaagagtaagttctccactataatatctacagattatagtatctattgactcacagtctgtttagatccaaagtctgcaggatttctttagagtgtccttttaatacta

SEQ ID NO: 289097 - DNA, 1161 bp, Homo sapiens
attatacagtatcttaaataaatgaactgctaccacattcaacagcatcagtaagtctcacctaaaatgtgttgttaaatctagggggtgattatatgggtacrtttgctttggaaaacacataattttacatttaagatctttgcatctctctctctctctgtgtctgtctcttacacacatacacctacacacacacacacgtgtgtgtattagacttcattaaaatttttatttaataataaagtaagggtgaaattctgtgcacatttactcctcttgtctcctactcaaggcacactgccgcctttgtaccctttgtactctactggggtacctcttcgtatgtgataggattggttctctttaaaatcatgcaatatggaagatcagcatttgctccagctttacacaaaaaaatatatatttttttttctttttgagacagagtctcactctgtcatccaggctgaagtgcagaagagctatctcagctcactgaagcctctgcctcctgcattcaagtgatactttgacctcagcatcccaagtagctgggattacaggctcccaccacgaawattatacagtatcttaaataaatgaactgctaccacattcaacagcatcagtaagtctcacctaaaatgtgttgttaaatctagggggtgattatatgggtacatttgctttggaaaacacataattttacatttaagatctttgcatctctctctctctctgtgtctgtctcttacacacatacacctacacacacacacacgtgtgtgtattagacttcattaaaatttttatttaataataaagtaagggtgaaattctgtgcacatttactcctcttgtctcctactcaaggcacactgccgcctttgtaccctttgtactctactggggtacctcttcgtatgtgataggattggttctctttaaaatcatgcaatatggaagatcagcatttgctccagctttacacaaaaaaatatatatwtttttttctttttgagacagagtctcactctgtcatccaggctgaagtgcagaagagctatctcagctcactgaagcctctgcctcctgcattcaagtgatactttgacctcagcatcccaagtagctgggattacaggctcccaccacgaa

SEQ ID NO: 289098 - DNA, 1160 bp, Homo sapiens
cacaccaccattctaaaggtaacctataattttgcctaagactctagccttggccatttcatggtctgagtctagagataaagcaagcaatatttagacaaaatcatttgtcagtgtggaagagcagtcataggcttttcagacggcaatggacagactgttctggcagctaaatcccctccactaagctgatrccacatttcagattctcatacaacaacattctatttctgatactgaattctatattagttagtaattaagctcagctacatttaatagactatccagtgaaaaatggcttacacaaagatggggcaatgtttacaagtatcaaaagaggcagagcaagcaatattatcattccactctaatacagcaattttctaagtattcatgtgaacacaggaatctccaagaccctgatggatgttcaatgtctacaccatttatataataataccataattgttacttgcctttttgcaaggtgtggacactggcattaatgacacaaaagaaacagtagtgaaaactgttggcattttagtacaaatcaaggcaatggaawagtaaacactgacaaagttttgtccaatgtgctgcaatctaagatttctaaaatgcaaatcccattattttgctttttatcagttatcatccctattggacataatatagtagaaattacttaattaaagattatttgttttgaaatatagcttacattactcagtaaaggatctgaaatacctcatttagcatcttttttaaatttgtcaaatataaacaataacagctgcctagcccatttgcaggggtggtgagggttacatggtgtctgattctgggcagggaaaatagtcttttataataaactggtctggtgtcaaataaactcaatgcaaatatgactcatatatatacttttttttttttgagacagagtctcattctgtcacccaggcttgagwgcagtggtgtgatcttggctcactgcaacatacacctcctgggttcaagggagtttcctgcctcaacttcccaagtacctaggactatgggcacatgccaccacacccagctaattttttatatttttagtagagacagggtttcactgtgttagccaggattgtctcaatctcctgaccacatga

SEQ ID NO: 289099 - DNA, 537 bp, Homo sapiens
tgttgtctgtgagccagtcaggcctcttttgtgggtttatgtgttccacaatatgtacaaagatggtmaataataagttgaaaagaaataaaatggagcaataaaaagttcaaggcttgacacaccactaattaatcataaggctgaaaaactatagcagatggatatatactagatagaagaggatttttttctttgtgactggaagtggtacaccaaatccaggagcatatgtgagtcatatttgagagaggaagggacaacatgaagaattctgcctgagaaccagctgttgtgtatgagaccagaaatgagtctattaagaaaggctgtctgaggacagactgagggttgatgggagagatggctagaagacaaagctaaacagcctaagttgtagaccatgatcagttaaagtgaattgtgaagagtatgatataatttggagactttattttctaccaaagaaatcctgtgttccagagtgggctggtgtcctgaaagcagggctcagcccagaatagtggaggagctgga

SEQ ID NO: 289100 - DNA, 604 bp, Homo sapiens
tgttggtatctgctgggcactttggagttttaccaactggatgccatttaaaatcaaatttcctgcctggggatttcagtcacaaattcaaatgaatggttatgattctcagggaagatttttcccactcctccaaatatcaagttaagacttgtaagttttctcgctgttcccttctgcatagtgggtttattttagttttaatacagttttgtattgtagaatagttacagatttacaggaaagtttcagttaagtacagagagttccatatactttgcatctagtttcctttattcataacrtcttatatttgtatggtacatttgtcacaattaacaaagcaatattgatagattattatgaactaaagtccacaatttattcatatttcctcagtttttacctaacattctttttctgtcccaggatcttatttaggaaaccatgctaccttttatcaacatgtctccttgggcttctcttggctgtgacagtttcttagactttccttggttttgataaccttgatacttttgaagaacactggtcaagtattttgtagaatatccctctatttggattttctcattattaaactgga

SEQ ID NO: 289101 - DNA, 588 bp, Homo sapiens
tcttgcctcagtactgtgccttaggagaccaaggcagcagcacattaaaataaatcctyaggcagagctgtgttacctggatctgatgccaaaccctgtgacttttctatcacacctcagagcacgctcgagccatcttccctttagcaaggggagctggtcgattgctggatttagacaactggttcctccagggagagtttgagaattgctcggagctgggtaggtgtgtgctagcattgccaaaatcggagtaaggtaggaaggcaagtaggaggccctgagctgagcctagggagggggggtatgtatctgaatgtgtgtggggaagtgaggagggtagaagtcacacaggacagacacccaggggcctccagagacaagttttgcctcactgatgctttttcactgacagcaccaggccatcaggcacatatgacatgagacaggtccaggacctgagatgcagctcccacttggtgatgtagggctcttgacagcaggaaggcccaggctaaatgaacctctagaaatgattcctgctttgagttccagtcctgatggaaccttgtgatctgctcaagcact

SEQ ID NO: 289102 - DNA, 588 bp, Homo sapiens
tcttgcctcagtactgtgccttaggagaccaaggcagcagcacattaaaataaatccttaggcagagctgtgttacctggatctgatgccaaaccctgtgacttttctatcacacctcagagcacgctcgagccatcttccctttagcaaggggagctggtcgattgctggatttagacaactggttcctccagggagagtttgagaattgctcggagctgggtaggtgtgtgctagcattgccaaaatcggagtaaggtaggaaggcaagtaggaggccctgagctgagcctagggagggggggtatgtatctgaatgtgtgtggggaagtgaggagggtagaagtcacacaggacagacayccaggggcctccagagacaagttttgcctcactgatgctttttcactgacagcaccaggccatcaggcacatatgacatgagacaggtccaggacctgagatgcagctcccacttggtgatgtagggctcttgacagcaggaaggcccaggctaaatgaacctctagaaatgattcctgctttgagttccagtcctgatggaaccttgtgatctgctcaagcact

SEQ ID NO: 289103 - DNA, 615 bp, Homo sapiens
ttccaagacaataaaaaaaaatttcatgtaacatactgttatagttctcacaaccagcctgcccacccccacttctaatcagagtaacaatgtacatagttttaaaagtcaaatggaattcacaagattaataacagaagaaagcagttgcctctcctattcatcctaatgctgtgtcccatttcycaaaggcaaacatccaactttttctatttctcttgataattacatttttatttctaaataatgtaaatgtataaccacttctggatttaaaaatttgtacttattatttattgctttcccaacacagaaggggagaattggatctttcaccaccctctctccctccacccaccgtaccataaatatttccttcccccaatctaatatagttatttaatacttttgattagatagtgtatctgttattgttgccatgcaaatgttaacagtcaagctgtaatgattacatttctgttcttgaataactttttgttttccctgggatcaatctttgctcattttggttgtttgtttaatatgtaataaatacataattcatcttcagactccttaacaaaattatcaaactcccctcagtaaagttgaaca

SEQ ID NO: 289104 - DNA, 615 bp, Homo sapiens
ttccaagacaataaaaaaaaatttcatgtaacatactgttatagttctcacaaccagcctgcccacccccacttctaatcagagtaacaatgtacatagttttaaaagtcaaatggaattcacaagattaataacagaagaaagcagttgcctctcctattcatcctaatgctgtgtcccatttctcaaaggcaaacatccaactttttctatttctcttgataattacatttttatttctaaataatgtaaatgtataaccacttctggatttaaaaatttgtacttattatttattgctttcccaacacagaaggggagaattggatctttcaccaccctctctccctccacccaccgtaccataaatatttccttcccccaatctaatatagttatttaatacttttgattagatagygtatctgttattgttgccatgcaaatgttaacagtcaagctgtaatgattacatttctgttcttgaataactttttgttttccctgggatcaatctttgctcattttggttgtttgtttaatatgtaataaatacataattcatcttcagactccttaacaaaattatcaaactcccctcagtaaagttgaaca

SEQ ID NO: 289105 - DNA, 568 bp, Homo sapiens
gctggggccctaactctcccctgggagctgagagcctggggcttatccctcagtgctgatcttcccctaagctatggataacatgctgcagggctctgagttagagaaagaagcagcagtcagaccaaaggccaggcctgaggggcagtgagttggagggaaaccaggtcctgtttgtcttctgtaccttggccagaggccagagatgaggctagtggagatggggacttgaaagaaagccctggagccaagagattctaacaattaccgaaaaaggaaaccagggttttaattatccccccaaactgggggtttcttcktacttttacatctattcttggcctcagaatttttttaaaaaaagttttgacaaaatgcagaagtaagcaaaagttctgtagaaactgggaggacgtctaacgctgggtgaagacagctgccttgctcaaggtcatgcccttctgagaatggccccatccaatgactgaaggagacagggtgtaaaagcccagtcatttcaagccaacataggatgttttatctcgagtttcctgtggggtctgccaag

SEQ ID NO: 289106 - DNA, 613 bp, Homo sapiens
tgaattccagccacttggcatgaaacagaaacatttccccaacacaggactctattagctattatgaaacacaaatagctcacttcacttgagaccatactgcttcttcttttctcctcctccaggaagtctgccctgatttaaagggtttattctcctagcatgtatcaaatatcacaaatgtcagtccaaatattgagataaatctttttcatttgcacagggctttataattttccaagcataattacaaacatgaactttctgtttggaaggtcaaacagaaaactattttgacaacagagatataygggcatcaggggcatcaagagactttgcctttggtgtatgtgtgtgtgagtgtgtgtatgtgtgcgcacgcacatgtgtgtgtgtgttttgggggagggtcacaaatgtaaatggccagacccttttaaagaatgacaagtgcttggcaatgatcacatgcagtcaagggaagcctgcctgtgggtacctgctggtcagggctctagaaatgagaggcaaaggagaggcagaggctgaggcagggggaaagtctaatgtttagctcaaaggaaagaggactttggagaattgagataacaac

SEQ ID NO: 289107 - DNA, 1134 bp, Homo sapiens
  misc_feature (1)...(1134): n = A,T,C or G
catacagtattctgggagctcttagagacccatgttaagaggagctggtctgttgccactaaggccgatttagggataagttagaggcaaagcaatcaagctcagtgacgtcggatcccactctgagacacatgggctgtctcttcctctccagcatccaatgcctctgttccaagcacttctccctttcggctgttaagaattagctgctgcagctgcatctgaattataccttccttatgtgggagcagaaacagagtgcctggacccatctcccttctaagaagaccagaacacatattcaaggcaaaagaaaatactgtggagaatctcttggcccctagagctcacagctgtgtgcagtcgtttgtaggaagatactgaaactcttgaccttttcaagggaatgtgatgggcagataggagcccatgttgggagtcaggcagcgtcccgtaaatcatcctacraaagtactcaactggccccacacatttctagcaataaatggtcggccacccagaaaggaatgcctaccacagcgttctacccaaaggtgatatgataaaacgatggaacagacttwccagatcaataggacactgatcacctcataaaatcacgttgaggcagcagggggctgctggagggaggctgcctagcaccagcactgagtcccctgagggcaggactcttggcagagccccatgctgccaacctgcccctgcccaagccctcctgccacctcttaggagcccaaagcaacccggttctcattttcaggctctacggctccatggatagcwgtccttgcttatgactatgagttgggagcaccctttctggagcagcctgggccccttggtcaggccacctaccacagtcttccaaggctcaggccactgctgagtagagtgtaagtgacacaggtagtccccaggaaggaccggaattccagacagagaaatgtggcatttaccattggtcagcagagccacttgcaaattatttctcagtaaatggtataggtgcagttgagggagagagaagctgagaatcctctgtgcacatgcttggcctgcacatgagcatctgctcaatcccttgcannnnnnnnnnnnnnnnnnnnnnnnnnn

SEQ ID NO: 289108 - DNA, 550 bp, Homo sapiens
  misc_feature (1)...(550): n = A,T,C or G
ccagatcaataggacactgatcacctcataaaatcacgttgaggcagcagggggctgctggagggaggctgcctagcaccagcactgagtcccctgagggcaggactcttggcagagccccatgctgccaacctgcccctgcccaagccctcctgccacctcttaggagcccaaagcaacccggttctcattttcaggctctacggctccatggatagcagtccttgcttatgactatgagttgggagcaccctttctggagcagcctgggccccttggtcaggccaccyaccacagtcttccaaggctcaggccactgctgagtagagtgtaagtgacacaggtagtccccaggaaggaccggaattccagacagagaaatgtggcatttaccattggtcagcagagccacttgcaaattatttctcagtaaatggtataggtgcagttgagggagagagaagctgagaatcctctgtgcacatgcttggcctgcacatgagcatctgctcaatcccttgcannnnnnnnnnnnnnnnnnnnnnnnnnn

SEQ ID NO: 289109 - DNA, 426 bp, Homo sapiens
tcaacttttatttcagattcagaggtacatgtgcaggttgttacatgggtatattgtgtgatgctgacggttggggtgcaagcctacgtagtgagcatagtgcccaatagctagttttttaacccttgctccccacctcttttcctcctgtggtagtcctcagtgcccattaaggaactctgatttcttacccagaattcattccaccatgtaatagaagaggcgatgacacacagcatgcttcctctcaagtcctagagcatgtggaatmaatttgtatctgtcacctcttccacaatatagattgtctatttcattgatttggctttttgccaatatgatatggcaaaggtgatgagatgtcactcccatgattacatagttttgttatataggactctgtcttagcaggctggagaaagagag

SEQ ID NO: 289110 - DNA, 637 bp, Homo sapiens
ggccattaaacttttgggcttcaagtatatgggagccaaacaggaccctatagcatgctaagccttaaggacaacaggaaaaacccatgacaagaggcaaaatgctctargtgcaagcataagttgaagtactgaaaagttgtatttacttgaagtcagtcaacactcaagcagagatggttaacacagtgatgactgaaactagagacaggagacaagttctaagagaatcaagtggtatacaaaaggtgcctgctacagtccaccccttgcactactcaaatattcttgttctctcaagtatgtctggttcccattttacaatatggagcttccatttttgtgataacaaaatggactcaattcttctcagagaaatcagatacaaatacaattgaccaaagagtctttttcaaattggtggccatgtgcaacctcttaaaaatgaaaagcaagagggttagagaaataagatacaatccctatagctagctatagttacaaactgtaattgatactcatatctctctcttgccgtatctattctatccagacttctctcaaatttggccaacacttctgttggtctggactgcttgccagttgaggtaagccaggatttcatccccacaaagtc

SEQ ID NO: 289111 - DNA, 599 bp, Homo sapiens
aagtttctttgctgtgtcagtcatctttcccagagggggatgtaatattctcttcataatattcagcccctctcacaagttggcagctcctttctctcaacttatattcttagctaagaatgtgttcacakggattttttaaaagcctccccaaatacctgtttactgactttctcagagcgtttctgagatggcacaaggatgtgtggtctctgaagtcagcttcttcttgctaatgaggctcagctcagcacctctccccagcactccaggcaggggttgggggagcccgctctgcccctcttcctgtccccagggcagacactcattctcggctaagtcctgtcccggctggaactggtagcatctttcaaggccttgtctcagatgccttcctgggttggcttcccggatcaggaccccacatgggtctccacatttggctttagagtcttggctttgcccttcccccagctttggtactgttttgtatgactttattaaaaatgttaagagatattttctggtataaaaaatacctgagatttttctgctttgacaaatgttatgatgtcaagtattggatctagtcttggggt

SEQ ID NO: 289112 - DNA, 516 bp, Homo sapiens
acaacaaaaacaccttaagaaagcaatacaaagagttcaacagagacaggaagtgagggccaaagaggttttctggaatataacaccaaaaatgaaatagtgcaaaagaggaagaaatgaaatagtacaagtcattaagtgattctttgcttgctggatgatcactcttttagagggaaatgaaaacgaggacatgaaatggaaagggctaagttattatctttatgttttagtgcataagcaaaaccggcacccattctggcaacagaaacagctggtatggagccaatggcgtggtttgttatggggttgggctgggctggtgcccagtgtaaattatcaggcatataaarctgaggctagaagttggtcagacaagtaagaacaggactgtggttagagactttcaagtgaagcagacaggtaagggtgggaagagcattaagtttattgagcattcaccatgggcctgcttgtgtttggagtgcaaatatgagtgtatgtccaaagtgggag

SEQ ID NO: 289113 - DNA, 557 bp, Homo sapiens
actgctgcccagtcacaattactcatctctcagaaacacctagaaataaactgatcctcttcctggtggacagaacatgttctattccccgttcattcaattcccaagggaagygaatgctcaatttctctgctgttttatcctgcagtcatccagcttctaagagtgattctggagtcgtcttgctggttatctccatcggatttcttcagtacaacactagccccctcccacccttcattaacatagattggcatcctttataagacaagcagcccaggcagctgggtgatcatttgagtgacaagagaagtggattctagtctagcttagtcacaaactcgctataggctcagagacaagttacaacttctctgggcttcagtagctacaccttttaaggtacacgatgttctctgggggagggatagcattaggagaaatacctaatgtaaatgatgagttgatgggtgcagcaaaccaacacggcacatgtatacctatgtatcaaacctgcacgttgtacacatgtaccctagaacttaaagtataataat

SEQ ID NO: 289114 - DNA, 541 bp, Homo sapiens
aatgtaaatgatgagttgatgggtgcagcaaaccaacacggcacatgtatacctatgtatcaaacctgcacgttgtacacatgtaccctagaacttaaagtataataataataaaaagaacaggtaaaaaaataataaaaaaaagatacacgaatctagatcttctgatttggtaataaccgaaggggggtggtgggtaacagattcagggaaaaagagaaacgggaaaactatgcttcrtcaacaaggcaataatggtgaaccaatgtgtgtttagaggccctatatgcttgtgttcagagtattccattgtgtctttgctatccgaagctgctcagggacatagtcatgaatcaagacttccagtaaatgcctctggaacgtggaggaatgagaacctggcaggaagacagtgcagggcattgtctggagctcgttcctcttggttgcgtgactgcccattatgactgtctgatgatggcaatgtgatcatttgtctagcaattacaaagcatcttcattttactgcctcttttaatgt

SEQ ID NO: 289115 - DNA, 1022 bp, Homo sapiens
gggaatagggaggcttgaggagaaagagagacagggaatgaccagtcagtggagcagttggaatgcacactacatttatggattgatttgccatcttatttggtcatacttcatagtgctccaaaacaattgcaatagagscatcaaagatcactgaccacagatcaccacaacagacataataatgatgaaaaagtttgaaataaatattgcaagaattaccaaaatgtgacacagagacatgaagcgagcacatgctgttggaaatagacttgcttgactcagggttgccacaaaccttcaatttgtaaaaatacacagtgtctgtgaagcacaataaagcaaagcacagtaatattaggtatgtcagtatagaggtgtgtgtgacaggcagttacttcatataaatattatgctatttttctggattttatgatgcttgtgatwtttaaaaaatctaataagcaaaacattcctggttgtgcagaaggcttggagctactcttcactctaaagcttcccaaactcagaggtattagataaggttttcttggccaaaccatgtgccaggtcctctgatgaaccatctgctaggaatctgtccttctgtaacactgagccaagagctccagwtggggctatgtaaggactctagtctggatagagaaggcaaagggataacgatgggcatgttttcaaatcattgtgcctgggagccaccaaggacatcaccagataatgtcccttcaggccttcttagactggtgaaatcactgttgacccaaggatggaatacctaagcccaacaagtccctaagacaacttctgtgtgtaaattgggaacagatgttaccatatgaataaaatgaaaaaaaaaattacaaaacctcaacctgctgaaagacaaaagttttaactttaatctacaaagttaaataggtgagtgcattttcttttcttaaaataacttgcttgctaagggaaaaggtgtgcaaatttctcagactcaaaagtgcatccaa

SEQ ID NO: 289116 - DNA, 557 bp, Homo sapiens
atggaatacctaagcccaacaagtccctaagacaacttctgtgtgtaaattgggaacagatgttaccatatgaataaaatgaaaaaaaaaattacaaaacctcaacctgctgaaagacaaaagttttaactttaatctacaaagttaaataggtgagtgcattttcttttcttaaaataacttgcttgctaagggaaaaggtgtgcaaatttctcagactcaaaagtgcatccaaggaaaacagccaagctytacagaccgcccatcatccacctgcaagttcttatgacagaccctggggtggttaaaactgtaatgtctcaatttggaatgagttgtccccttttgaaggacccatggggtaagggttccagttgaattcctagggcagtcttgtacaatgcctcacttgctgttctcatactgttccatgatagggacaaggagcatctatcaaaaaccagcttggtttcttggtctgtgaaccagctcagaagaccaatcaccaagattttcaaaccctgcagaaaagaaaaaaaaaaaaaaaaaaaaagcag

SEQ ID NO: 289117 - DNA, 510 bp, Homo sapiens
actacgtggctggcactgtctaaatgccttacatgtactaattcatttaatttttatgaccatcctatgacgtcaataatcaggctgattttacagatggaggaaactcaaacacatagaagctgagtaactygcccaagatcatctcagtctgttgggaaggaaactggagcccagagtccaggtaccagaattcaggcccatcgccaccgttctatactgtctttccatttatttcaggccctgaactttattattcagccctcaaattaaaaaaaaaaaaaactatgaaaattaaaatttttttcaacatgtacctgcaatatgacctactgtgatctgaattaacttggtggcaaaactgtactgaaacttgtgtgagggtattatttatagtcttacttcatcccagttgctgagaataatcatgtttgctgtagaaacattaaaatgtttgattaaatggtgttgcctaatattctgctgtgggtattgttgtaatatatgtgc

SEQ ID NO: 289118 - DNA, 524 bp, Homo sapiens
ccatgaatgggaaaaagaacagaatgctctttcttaggtaggaagataagactccttaacaaccatgttggcttctctaatgtctgtatagcaatggccaagtttttctttagtgcctccataatctttttggaacactgacccatacttacggcaaggaaaaaaaggaatggttaagactattactgaaagctgttgggctctcttttaactaaaaggtgtagtcctaaagcaatcaccatctactcaaacctgtctgggaagaccaagctacagctttctcgggggtctattacaatgtttaatacttcttgctacaatctgttctctgtgtacttatgaattataataagcttgttcaacttagacacataaatgtcacctttgaaaatgaayatttgtatattccttaaaaaggtaagataaaaaataattcagttaaataggcaatgtttaattatgagctaggtcctataataatctcctatatgcagggaattacttgtgctaggttgcttattaaa

SEQ ID NO: 289119 - DNA, 579 bp, Homo sapiens
taaacataacttttctctatcttcctctgttccccaaaggaaggggtctcaggatcatcattcattcattcatttgacaatattttttcagtgcttagtgtatgccaggcaatatcttaagttctgtagttataattgtgcacaaaacagacacagtctgcccttgaatatttacactcagagagggagaaattatttttgcatatactttttgaatattataaattctatgaaaaaatataaacaagattaggaaattgagggattagggaatgtgggtggggctattatctcagattaaatggtcagagaattttctttgagaagatattttaaaaagaaatggggaagcaaataatggagatgtctgggggtattccagaccagcaagtgcaaaggccctgggaagtgcttggtgtgtttgaagagcaacatggaggcactgtgccatgaattaggaggcgartgctagcaatgagcccccagggaggacaggggccaggtcactagagaatgaatgaactcctcttttattctgaataagatgtgaagccattagaatgatgagcagaggcatgt

SEQ ID NO: 289120 - DNA, 647 bp, Homo sapiens
ctgggtgagtagcaagtttaggaaggcaacccaagagctcagttttgaacaagttaaagttgaaatgtttataaaacgtccaagtggaaattcttggaaggcagtggcacacaatggatgactctgaagggagtctcactaattarttggggagtcagtccaccctggaaataactattttggaatggcctgcatatagaccatggggttgggtaaaaatcatctagagtgaatgtagagaacaaagaggtccaaggattaaaccttgagacatttgaagagatgaggacaaaaagcaaaagagagaaaaaagcaatgatgggtaaggaagaagaagaatcaagagactgtggtggcccagaagcccctgcttcaggaaggattaccaggcagatctggggaccccattgaggtttatggtcatgaacttcaaatgagacttgtttctaaatggctggagaaaaactagccacatttagctactgggatatgagcatgaagagatgaaaagttgaatttaaaaaaaaaattagattcagggggtacatgtgcttgtgtgtttcatggatattacatgcataatggccggggattgggcttctagtatacttatcacttaaatattggatttagtaattaccagtagg

SEQ ID NO: 289121 - DNA, 504 bp, Homo sapiens
ttagaatggaatccaagaactgggaactgaggtctccagccttgctggagaggaacactgaaagacagtcaaatagtcagaagtcaggcctcacacctgtatataaggtctagataaagccatggtttaaaagtcttgcatgctgttgttttccagaaagtgctagtccttagtgcctgggagagttggtggatcccagcaaccatgtgaagtgtcagggctcagagtgaagctatcaatcatggcacagctagacctcaaggcctagagcaggccaayagtcaggagaagaggagaataggcagaggaaaaatcaaaaccagcaccaagactcaaggcataaagaataaggagactttgtaattaagacacacttctcaaagagaagatctcatataaagctcctgaggaagcaggacctaaagaatgggttgctggagtgtactcagggtaagacttgggagaggaaaataagtcaatcctgctttgggaaaatgcatctca

SEQ ID NO: 289122 - DNA, 504 bp, Homo sapiens
ttagaatggaatccaagaactgggaactgaggtctccagccttgctggagaggaacactgaaagacagtcaaatagtcagaagtcaggcctcacacctgtatataaggtctagataaagccatggtttaaaagtcttgcatgctgttgttttccagaaagtgctagtccttagtgcctgggagagttggtggatcccagcaaccatgtgaagtgtcagggctcagagtgaagctatcaatcatggcacagctagacctcaaggcctagagcaggccaatagtcaggagaagaggagaataggcagaggaaaaatcaaaaccagcaccaagactcaaggcataaagaataaggagactttgtaattaagacacacttctcaaagagaagatctcatataaagctcctgaggaagcaggacctaaagaatgggttgctggagtgtactcaggrtaagacttgggagaggaaaataagtcaatcctgctttgggaaaatgcatctca

SEQ ID NO: 289123 - DNA, 1137 bp, Homo sapiens
aacagctaccgtttattggccgcacaccatgtgtcagacatttttatggattatctcattcgatcctcacggcagccctatgcagtagatcttattagccctttttcagatgaggaaacagtgcaaagaagctagcagacttgcctaaaatcacccagcaaggcggtataaagcagaattctcactgagttctgtctgctttccatcgcatgctctcctacccaaattagtggtgaagatgtaaatctctggyttttaattaacagcatctatcataatgttgcttggtgaatgagctataacaataatagtaatcatcgcaaagatggacctagtacatactacctgtcaagcaatactctgagtgatttacatctatcagtttatataactcttgcagcaaccctaagaggtaaaaaactgagctacagagggcataagcaacttgccccaaagtcatgtggtcagtgaaaatttaggagttggagtcaagcatcagactcagagagcctggcttctgagcccagactattgwtatttttcagaactcatttctaaaattgatttaatataaaattattatctttacttaaatttcttggcaaagctcaataacaaaataataaatcataccagtacttgcatttcatcaagacaaacaagtcactacttaacattaagcttgcaaacatcacctccacttaagacctatatttgtttctgcacagaaaaagatggagaaagctagttaaccgaactaagattgtcttaatctgatactaataatacaaatacatttttatgtaaaaccacaccaatactttgaaagctttattaaataaaacaatttctgggaatacagacaatattaatttcctcaaaacacaaatttatagtttttcaaagctgatcatcacagatcaagtaggcttgtcctattaattcaatatctaccattcaatawctacccatcatcaaaatgctcaagtgaaaagcaacattcagtcaattgacttacatattttgcctacatgttaccaaatatgtatttatttaataacacctgagtacagatgtggaaaattattacattctttcttcattcataaattttcatagatatcatcaagactgcct

SEQ ID NO: 289124 - DNA, 597 bp, Homo sapiens
tcaggaaacatgaagacttctgtttttatttcaccattttttctttaaatgtcctgtgtaacaggtgtgtcttgttttccacccttgactsttgggcatatgtcacgttttagttttgttttttgttttttcataaaacacctcttacaaagaaatgcatttattaataaaatctgaacttagtttgacccatttggtgaaaatgaccataatgttttcctattctttattgaatttagtcatttcctagattttaatcaatgttgaatttgtccttccatggcatatagagaaaaagtggaaactggtcaggaaatgggaaaagggaaaccaagagtatttaaaccatatgtcaaaattttctcaaatgtgcttttaaccgtggaacatagaagatgccaatttgggttgaggggaacccaattaggtttgaaatttttggaaataagtcctgtatgagaagagcagatgcaggctcagagggtaacaaatcaatttgggtatgtggtgtgtcatataggcagtcactgaagccatcatagggatgccatatggaaagaaacaaaggaggtgaaggagaaaggaaggaaaaagcac

SEQ ID NO: 289125 - DNA, 621 bp, Homo sapiens
gattgaaccatgttttattagatgtttctatcaagtgaagcacaaactcctccatgcctagaccctggacagtctttattaaaattgttacttyagaaatttcgaggcctgatttaactatatggaattcatacatcatgtctgtatgtagtttagcatccttgttgcaaaatcagcaactttaatttttcatttaattagaaagaacaagggtgtaatatttcaggaaagacttactagtatgcccaaataacttccatctggtgaaccagcaacaccatagagaatgcagtgatggtggcctctgacattgcatcactaataaattgtcaagttatcctgataacaagctcttctgtaaactccctaactttgtctttttgcattcaacatctgtgggaacatagtagttgtccatattattgattttcatgataaagaatatgggttaacacataggctaagtccattgggtcaacaatactaatttaaaagaggcctaaatgtatgtcttaaaaataaaatcaatatttcatcatttttatagtgttttatctctgagacatatgcccatttccccaaaagagttgtagtttagaaaaaaatatctgtaatatgtaa

SEQ ID NO: 289126 - DNA, 621 bp, Homo sapiens
gattgaaccatgttttattagatgtttctatcaagtgaagcacaaactcctccatgcctagaccctggacagtctttattaaaattgttacttcagaaatttcgaggcctgatttaactatatggaattcatacatcatgtctgtatgtagtttagcatccttgttgcaaaatcagcaactttaatttttcatttaattagaaagaacaagggtgtaatatttcaggaaagacttactagtaygcccaaataacttccatctggtgaaccagcaacaccatagagaatgcagtgatggtggcctctgacattgcatcactaataaattgtcaagttatcctgataacaagctcttctgtaaactccctaactttgtctttttgcattcaacatctgtgggaacatagtagttgtccatattattgattttcatgataaagaatatgggttaacacataggctaagtccattgggtcaacaatactaatttaaaagaggcctaaatgtatgtcttaaaaataaaatcaatatttcatcatttttatagtgttttatctctgagacatatgcccatttccccaaaagagttgtagtttagaaaaaaatatctgtaatatgtaa

SEQ ID NO: 289127 - DNA, 621 bp, Homo sapiens
gattgaaccatgttttattagatgtttctatcaagtgaagcacaaactcctccatgcctagaccctggacagtctttattaaaattgttacttcagaaatttcgaggcctgatttaactatatggaattcatacatcatgtctgtatgtagtttagcatccttgttgcaaaatcagcaactttaatttttcatttaattagaaagaacaagggtgtaatatttcaggaaagacttactagtatgcccaaataacttccatctggtgaaccagcaacaccatagagaatgcagtgatggtggcctctgacattgcatcactaataaattgtcaagttatcctgataacaagctcttctgtaaactccctaactttgtctttttgcattcaacatctgtgggaacatagtagttgtccatattaytgattttcatgataaagaatatgggttaacacataggctaagtccattgggtcaacaatactaatttaaaagaggcctaaatgtatgtcttaaaaataaaatcaatatttcatcatttttatagtgttttatctctgagacatatgcccatttccccaaaagagttgtagtttagaaaaaaatatctgtaatatgtaa

SEQ ID NO: 289128 - DNA, 605 bp, Homo sapiens
atttataattaaaatattgacggattggctactatgcatctacctcagctcactgtttaatttgggtgttaacttgcccggggaatatctctaagaaagatgccaataactcattagcagcttataaaggatccttttacttttcttccaagctattttaaaatgcaacagttgggagatttatcaagcatttgttattataagttattactgggtgtttcttataacttgcctgagggtggcagcatttacaggggtctctctaattttccagtgactccccaaatgcacaytatgactttcatttttattttgaaggaattcaaggaaatttaatatcctaagagggggtgcaaattgtggagagatagatatcatggaaatggaaatgttccattttacattattcacagagacagctaaagagccttgctggcagccaacacattgtttagagtgtctctagaaagtctgtgctaggagtagtgggtgagggggaagacttggtgcccctggcccttctagtggtctgatctcaggacattccagcctcacctggtccctagtgatccaagatgaagcagtattaaaggagagccacttct

SEQ ID NO: 289129 - DNA, 565 bp, Homo sapiens
tcagcctaaacagacatggaaagaaggaccatctatggagcagaatcagtctcctgactccaaaggatatgagagagggtgtagaatggtagggaaaggctggatagacccgggttggaaccctgcctctgtatcttaytttccaagtgtccttgaccttggtatgttacataaacttagcaagtccaagtttcctgtttatgacaaattacatcaataatatttagtccatagggttgttgtgaagaactcaaaaagattgtttattaaattcttgcctgacatctaataaaggttcagggccgggtacagtgtatgtttcgggaggctgaggcaagaggatcccttgaggccaggagttcaagaccagcctgggcaatatagtgaaatcctgtctctacaaaaaactaaaagattagctaaccatgatggtgtgcgcctatagtcctagctactcaagaggctaaagtaggaggatcatttgagcccagaagttcaaggttacagcgagctataattgcatcactgcactccagcctgagcaacacagcaagaccctgtcgcc

SEQ ID NO: 289130 - DNA, 562 bp, Homo sapiens
tttactaaaaaatacaaaaattagccgggcgtggtggtgggcacctgtaatcccagctactcaggagggcaaggtgggagaatcacttgaagccaggaggtggaggttgcagtgagctgagatcatgccactgcactccagcctgggtgacagagttagaccctgtctcaacaaacaaacaaacaaataaaaagaaatagaatagatgaattaaaagaaatcacttagaaatcccagaagtgacttccagtttcagctctgacatataacaagcttggaagtcatcacttctgttcctacaaccagcaacagctaaacaaactgaaaattagcaacttttcctgaatccatcagagaactaaagagacaggtgaattcagggttcagattatctgsagtgggatatgtgggatttataaactggtaaaaacacttttacggtaattttgttgaattgctgaagactgagtatggactagcaagagagtgagagagtctaggggcccagtcttaggaggtccccacaatttcgtaaattttatctccaggaaccccaccagat

SEQ ID NO: 289131 - DNA, 533 bp, Homo sapiens
ctcattcagaaagtgaccccggtagaatgtaagcyccaggagagcaggaactgtcggctttgttcatcgctgtatcaagcacatgttagatgttttttagaaaaagcatttgttgattgaaagacacaatgtggtgtcgaagggaaagccttggatttagaatcctcggacatcgactgccactcccctagctgtgctgtttgtcaagaccactttatctctttgaatcttagcatattggagaaataatcttagagtaatacgtattgaagacaataatacatattggagaaaataatctttaccttaactttactatcttgtgaatttcaaacacgaatttgtgtgacgatgttcagaaactgtgaaatgaccttcagatctgaaatataatggaggacaaatgccttggagtagatgctgaatttgagactaaaacccaagtccacctcaaacacggttctttcttactctgtcaccaagcgctctaacccagactgtttgaccttgaagtaaggtaaggacagaggaag

SEQ ID NO: 289132 - DNA, 557 bp, Homo sapiens
ctacgtgggctttagaccactaattctcaaccctgattttgatatatatttgtcatcaattatcacaggggatattatgaaattttaaaaacacatctaggttgaatttagtcattttaatatacatttatagtgtttaaatcatattttgggaaatatgacatgtaagtctttttcctgcaaggtgactcatatccagaaagccagcattccagggcattttgtaaaagctcaaaaagcaatatcttttagtgagtgaagccttcaaatctttgtctattaattaaaccatatcagtaatatagtatttaaaattgtataggtcatcctttgttttggtagccttacttctataaaaatgtcctaataaaattatcagagatgtgcattgaggatgcttratgccatattatcaataatagtatgaaaagtagagagaaactaaaagtacaattgggattgcattaattttggcctgttcacatggtggaaaattaaagagctattaagagccatgttgcagaaaaacttttcatgacatggaaaagttttccaac

SEQ ID NO: 289133 - DNA, 583 bp, Homo sapiens
tagtatcagaaattattttataatagaagttagattttaataaatgttttggctgaatggcttctattttcctaagatttctaaagttacaagaattaagagatcctagtcttccatgttctctttgattccttttaaaagagacaatgcgtgatgtgtagtaatgaagtactataccactgacagaatttagttatttaatttagtacttaaatatttttattaaattttaagccagaatgtgggaaagcatataggaaaaccttaggtattctgctttctgtaataaccccaatagctttctctagcttctagaaaggcccaacttgtcacacttaaacttccaagtccagtgtgttcttgttctccagctttccaaaactgctctgggctccacgtcccagaacacagagaacttcttcaccttctatttttggtcctgaaccaatgagcgaggagacatcaaagagcctataaatcccttcctcttggtccccaaygacagatgacagtaaatcacttttgttctccccctcaagacggagtcttgccctgtcaccctggctggagtgcagtggcacga

SEQ ID NO: 289134 - DNA, 614 bp, Homo sapiens
gaaataattactgaagtatgctctttaaaataacattgctaacacactgcacagtaacaccggtcaagcacagtgtggcaagttactgaatttgaatataatttgttttctgtgaattctacatattttattttacacatgtgaaaatattgttttaagaaaggatctatagactttatgaaactgccatgggagtccatggcgcaagaagaggttaaaatcccgtactaaaacgcaagctccaagactttttctcttatgttctttgcaattgctcatctcttctgctcaagagtctaccacgtggtgggatttgattaatttcaagaataacctaaggccagataggacttggttatttacatcctctcctcaccctggcattcagctcctcactttccctgagggccacctttcctttattcaccataggtggcatattcattaaaggaattgcatcccttcgaatgactgaagataacattccggaaaatcctgccaacaggtaagggcttttstagacacaatgccaaaccttcaatacgtccctgttaggaggaaacagcattaaaaagcaaaaaccccaaactgaaacattctaacaagaaacaaac

SEQ ID NO: 289135 - DNA, 557 bp, Homo sapiens
tttatataacattttatccaatgactgcagaatatacattcttctcctcagcacatgkatcattctcgggatagaccacgttagctcacaaaacaagcaaacattcaaaaaaaattcaaaaaaattgaaatcatatcaagtatcttctctgaacacaatgaaataaaactagaagtcaataacaagaggaactttggaaactatacaaaacatttgtttatatctccattgtaacttactgcatactgccttgtattttatgtttatcttttaatcatctagaccataataagttccttgaaggcagagactgtgtttgtggcctcttggtaattgcaaaggatgccaagtacaacacctggcacagggcagatgctctttgaattgaactcaattggactgaattatcttgggttgtctagcaattaaggcactagtttaaatgaaataaatgcttttctgtgatatattaaacttcctcataccagatattgggcagcgctgccagacccagagactgaaaatacaaagtacaatatgggatatatgacttgagt

SEQ ID NO: 289136 - DNA, 557 bp, Homo sapiens
tttatataacattttatccaatgactgcagaatatacattcttctcctcagcacatgtatcattctcgggatagaccacgttagctcacaaaacaagcaaacattcaaaaaaaattcaaaamaattgaaatcatatcaagtatcttctctgaacacaatgaaataaaactagaagtcaataacaagaggaactttggaaactatacaaaacatttgtttatatctccattgtaacttactgcatactgccttgtattttatgtttatcttttaatcatctagaccataataagttccttgaaggcagagactgtgtttgtggcctcttggtaattgcaaaggatgccaagtacaacacctggcacagggcagatgctctttgaattgaactcaattggactgaattatcttgggttgtctagcaattaaggcactagtttaaatgaaataaatgcttttctgtgatatattaaacttcctcataccagatattgggcagcgctgccagacccagagactgaaaatacaaagtacaatatgggatatatgacttgagt

SEQ ID NO: 289137 - DNA, 571 bp, Homo sapiens
gttacaagaagaagaggttcagggatgcttcggactgacagggttcatatctgtaatcaacagaggctgattctggctgcttaagcatgaaagagtttactaaattaatgttgggaaacagatttgttgtgaaggctaggagccaggtttaaagctgagccccaaatcacatcatagaactgatctgaagagaaaattgctgctgccaccactaaatcttggaagtttgtactgccgctattttctcaccatgaatgtggtttttctgtaacttactgctgccaggagggaaggagccgtcccttatctccttccttttgcttcaaagctcctacgtccgtgtttgacatgagaacatcgcatgcctaaaggagctgggaaaagcaagtacgtagcattttccattcatatgaagaaggaatttttgctccccttccctcattaggactcattaagtggagattcctcaaacrtggaaagagtgtctgaatctaggcagcaaatatctaccatacctgtttcatgtcattaataccacagggcttccttcctctgcacatgaacctaagca

SEQ ID NO: 289138 - DNA, 571 bp, Homo sapiens
gttacaagaagaagaggttcagggatgcttcggactgacagggttcatatctgtaatcaacagaggctgattctggctgcttaagcatgaaagagtttactaaattaatgttgggaaacagatttgttgtgaaggctaggagccaggtttaaagctgagccccaaatcacatcatagaactgatctgaagagaaaattgctgctgccaccactaaatcttggaagtttgtactgccgctattttctcaccatgaatgtggtttttctgtaacttactgctgccaggagggaaggagccgtcccttatctccttccttttgcttcaaagctcctacgtccgtgtttgacatgagaacatcgcatgcctaaaggagctgggaaaagcaagtacgtagcattttccattcatatgaagaaggaatttttgctccccttccctcattaggactcattaagtggagattcctcaaacatggraagagtgtctgaatctaggcagcaaatatctaccatacctgtttcatgtcattaataccacagggcttccttcctctgcacatgaacctaagca

SEQ ID NO: 289139 - DNA, 504 bp, Homo sapiens
catctctgtagattttacatagagtagggtaatcattctgaatattagttacaagtctcagaaaaaagcaggttatttgtgttttggagtggattggattatgaataaacaggcattaacctttcccattagtttttcttaaagtctaatattgaaatgcatttgtattcctaataataaggcatgtatgggaaactggaaagaaaggagattttatttctggtctcttgtttttcatttttgtcttctcctagatccagaatcttctctaacttgcttcaaagattggtgattctgtcagagtccaaagctcccatgcttcacattgttttctgccttcctccaccttcccaaagtatctcaagcttgccaaatcatacatttctatcacctcttttctcatctgccacatacttattcttttctttggccttgtttcccaaactaccactataagaagaaartgggccgagtgctatggctcatgcctataattccagcact

SEQ ID NO: 289140 - DNA, 550 bp, Homo sapiens
atagttaatactaagtgtcaacttgactggattgaaggatacaaagtattggtcctcagtgtgtctgtgagggtgttgctgaaggagattaacatttgagtcagtgtgctgcaaaaggcagacccacccttaatctgggtgggcayaatctaatcagttgcctgtgcagctagattatatacaggtagaaaaatgtgaaaagagagactggcctagcctttcaccctacatctttctcccgtgctggatgcttcctgcccttgaacatcggactccaatttcttcagttttggaactcagactggctctccttgttcctcagcctccagatggcctattgtaggaccttctgatcatgtgacttaatacttaataaactcccctttatatatgtatatctattctattagttctgtccctctagagaactctgactaatacaggtgtctactgctaaagtgggggcattgactgggaaggaacagtatcattaaaattgggatgggaacacacgggcagactgacgaatctggggatactcagctcctaa

SEQ ID NO: 289141 - DNA, 605 bp, Homo sapiens
agtttgctgattgtaatgaaacacagcaacccctggtcaacattctttattctctggtcttgcttgagcaatttttgaaaacatgtgggttcctagggctccacccagagctctcaaattgttggatgagtggaaaaggtcccaaaccttcattttgtgctggagacgtatagtttcaaaagttccctatggattgccccaggctggatgattagaatctcttggcctgggacttttctgctcacccaaacattttaggacttcactgtctgtggatraagtgccataaaagtgcaatagctatgttttttgtttgtttgtttgtttgtttgtttgaggctttgaagcaggatcttgctctgttgcccagggtagagtgcagtggcatgatcttagctcactgtagtctcgaactcctgggctcaagcaatcctcctttttcagcctcctgagaagctggaattaaagatgtgagccgcttgagttgacatttaaatgacccttgatgaataagtcggattttcaggcacacctgctcttcctttcctgggaggccagcttttgctgctggtcaagttatcctctgggcactggcacagttataa

SEQ ID NO: 289142 - DNA, 575 bp, Homo sapiens
cagctcaacagcagatctccaagctacccaaatccactgggtaatcaaaaacattccgtaagctgctgtatgacttttttctttcctcccgcaaacagcagtagcaggattaatgtcaacacacactcccccataccacccccacacaggcttagcctgtttaactgcaattactctcctgaacaagattcttgttgccacttggcaaagatgaaaagaagagagggtaaagagcacagactattcatataaataaatacaaagtaccttatgttattcgacactttccacatttcaaacrttttcacatatttgatccttacaaatcaatgaagaggcagaggaggtattgctgatcccattttacagatgaggaaagctgaggctcagggaagtgaagtggctaaccaaaaagttatatagctcataagtggatggaacccacactcatatcttctgactctattgcagagttctttctgctgtgccagatgtttgcacactcaactcaaaaaaactggtgacataacttttcaaattcccttatatctacctgtaagttgcaaagtctccca

SEQ ID NO: 289143 - DNA, 498 bp, Homo sapiens
catcattaaaatatagaatgtaggttatattttatttttatatgtttttatataatatgtattcattttataatcagaaaaaaattaagatttttttcctacggaactgaagtgtcaagtgaccctttataaagacctttataaagacttaaatgacaaatgacatatttttcaggacactaggccaaaccaaagatacgatatcctttcctaatattatgaagtagattttggcacccaaagcacatttatatgtgtagaaagcacatttatatcagtagaaagtaattagtagtggttggtttattagagatagaatttagataattagagagaagatttgggggttaggaactacaaggtaaggataaatgacagaattatagtcaggaacctgaaaaggctctccaaatatatctgtgtaatagaacatttccacagagtgcaaaggatcttcaacttytaaaaccctgtgatataaatgattaatacatccag

SEQ ID NO: 289144 - DNA, 486 bp, Homo sapiens
tggggtggctattgaagaaaaagagaactatagacagaaggaaacaagtataggaaaagaaagtgttgatgagagcaacatgttcctagagcctgcatgtggtatggaggaaaaccggacattcccacctacccacactgtggcctgcagacttgctgagaggatcagctgactcaaagagccctgacatgggatcaagaacacaaacagaccaccagtggccgtggcagttcatgtgcatgtgcatctgcatgatctttcgtccccttctccttcacttctcactgagtggccttgctggtgtgsctggagccacttggcccatgaggcacatggggtcacctgctcctaactcagaaggtatcttcttaatgcattggcttcaaaatcagtagagaaaataagttctgtgttctctagcagagtgggtataatttggcattcagcaaatcaaatatcaaaggaattttagtctgctatgaacta

SEQ ID NO: 289145 - DNA, 600 bp, Homo sapiens
ttggcttcaaaatcagtagagaaaataagttctgtgttctctagcagagtgggtataatttggcattcagcaaatcaaatatcaaaggaattttagtctgctatgaactatgcattctactgagtgccaaaaccaaatataatatacagacagtcttattttattctgcttcactttattgtgtttcacagatatttcattgtttacaaattgaaagtttatagcaactctgagtctaagtctattggcctcattttctccaacagcatatgctcacttcatgtctctgtgtcacgttttggtaattctcgcaatatttcaaatttttattattattttatctgtcatggtggtctataatcagtaatctttgatgttactattgtaactgtttgggggcaccacaaatcacgtccatataagatggcaaacttaataaatgtttgtgttctgactgctctaccaactggtcattcccttctttaccctctcctccaggcctcccaattycctgagacacagcaatattgaaattatgccaactaataaccctaaaatggcctctaagtttttaagtaaaaacacgtctctcactttaaa

SEQ ID NO: 289146 - DNA, 509 bp, Homo sapiens
tcttcccaatgtgctacatgcaccgggccaacccctttaatgaaggggaaaatccattctttcaccaagtacagtgaaaaatagtagcaaagcaaagaactttacctccaagaaaaaaaaaactgcaaatggtctgactcagtgaatattcaggcagtcaatagataatctaaatttgcacctgtttttaatatttaaacacaaaaatgcaccctaaaacaaatgtgatcctggtgtattcgtatctaaaatattaagttctccactaactcattactctcatcaaaccagcattggaacatttgacttagatcayctagctttcaatgcagtttatcaccaattacactttattatgtgtttttccataagagttttaaattttttaaaaatctagctatatgttatatgtacaacatgtagtgtaatgaaagaaaaaaggcactgtgaaaaggcttttgggttatgacacaagctcagtttggttcactttccatctcttgtattcc

SEQ ID NO: 289147 - DNA, 646 bp, Homo sapiens
tccatgcaaatgaaaaccaagaaagagcaggagtagctatatttatattacataaaatggatttaaaggcaaaaaacagaaaaagaaacaaagaaagtcattaatgataaagaagtgaattctgcaagaagatataataattgcaaatatatatcatccaacactgaagcacccaaatatataaagcaaatattattagagctaaagagaaagatagaccccaatacaataggtgggaacatcaatactccacttttggcattggagagacctttagacagaaaaccaacaaagaagaactatcacacttaattggcattacagaccaaatggtctatttgatacttgatatttacagaacatttcatccaatggtggctgctgcttctcagtacatttttctcctcagtacatggataattctcaagaatagagaatatgttagaccccaaaatcagtcttaaaacattaaaaaaaatggaaataatatcaagtatcttycctgaccacaatggaataaaactagaaatcaataggaagaggaactttggaaactatacaaacacatggaaattaacaatatgctcctgaatgaccaatgggccaatgaagaaattaagaaggatattgaaaaattcattaaaac

SEQ ID NO: 289148 - DNA, 559 bp, Homo sapiens
agaaaaatgaaatgagacccctatctgttgccatatacaaaaatcaaataaaaatagattaaagatttaagtctaagacttcaaactatgaaacaatgaaaagaaaaaattggagaaactgtccaggacattggtctgggcaaagatttctttggtaatatcccacaagcatggagaaccaaagcaaaaatggacaaatgagatctcataaagttaaaaagcttctgtacagcaaaggaaacaatcaacagtgtgaagagacaacccacagaatgggagtatatttgcaaactatccatctgacaagcaattaataaccagaatatgtaaggagctgaaacaactcaataggaaaaaaatccaataatcagattaaaaaaatgggcaaaagatctcartagacattgctcaaatggcaaacaggtatttgaaaaggtgcttaacatcagaaaagtgcaaattaaaattacaatgggatatcatctcaccccaattaaaatggctttcatcgaaaagacatggcaaggatgtggagaaaagggaaccctcgtactgttgg

SEQ ID NO: 289149 - DNA, 587 bp, Homo sapiens
ttttcacttttagaaggctacagttgtgggtttacaatttgttatttcctgccatttccaagatggttgcataatgaaagcataccacattttaattttcaggaacagtcacttaggtagattaataagcaggaatatctaattgtcaacttggggctgggaggaaggagtatctactttcaaactgagactgttgggaaccatcttgaaaggcagcttttagtaaatcaagagataacttccttcagaatgatctctgcagagttcccatttccttctggtgtcacacacttagacatggcaggagagatcttggcccttgagctttttkgtgtctaactgcatgttactccataggaggtataacaagagacatgaaagaatcccactcactggttttatttccactctttgtttataccttcactgccaatgagtaaggaataggagagaaacatacctcttaggtaatatagagaaaatattgctttgattttatctactgcaattattgaatacatttttcatttgaccaataagaatctctctttccgaaaaaaaaaaaaaaagcctaaaacaaacacaaa

SEQ ID NO: 289150 - DNA, 587 bp, Homo sapiens
ttttcacttttagaaggctacagttgtgggtttacaatttgttatttcctgccatttccaagatggttgcataatgaaagcataccacattttaattttcaggaacagtcacttaggtagattaataagcaggaatatctaattgtcaacttggggctgggaggaaggagtatctactttcaaactgagactgttgggaaccatcttgaaaggcagcttttagtaaatcaagagataacttccttcagaatgatctctgcagagttcccatttccttctggtgtcacacacttagacatggcaggagagatcttggcccttgagcttttttgtgtctaactgcatgttactccatargaggtataacaagagacatgaaagaatcccactcactggttttatttccactctttgtttataccttcactgccaatgagtaaggaataggagagaaacatacctcttaggtaatatagagaaaatattgctttgattttatctactgcaattattgaatacatttttcatttgaccaataagaatctctctttccgaaaaaaaaaaaaaaagcctaaaacaaacacaaa

SEQ ID NO: 289151 - DNA, 587 bp, Homo sapiens
ttttcacttttagaaggctacagttgtgggtttacaatttgttatttcctgccatttccaagatggttgcataatgaaagcataccacattttaattttcaggaacagtcacttaggtagattaataagcaggaatatctaattgtcaacttggggctgggaggaaggagtatctactttcaaactgagactgttgggaaccatcttgaaaggcagcttttagtaaatcaagagataacttccttcagaatgatctctgcagagttcccatttccttctggtgtcacacacttagacatggcaggagagatcttggcccttgagcttttttgtgtctaactgcatgttactccataggaggtataacaagagacatgaaagaatcccactcactggttttatttccactctttgtttataccttcactgccaatgartaaggaataggagagaaacatacctcttaggtaatatagagaaaatattgctttgattttatctactgcaattattgaatacatttttcatttgaccaataagaatctctctttccgaaaaaaaaaaaaaaagcctaaaacaaacacaaa

SEQ ID NO: 289152 - DNA, 461 bp, Homo sapiens
aattatatacagaggagtagagacataacccatacagtggcttatcataatatgctctttaaccctacacaaattcaaatatatgttgcttggtaagaaataatttaagtaatagggggaattcagcccaccatttttgtcaataagtatatggcctagagtaagtggaagctgaaatagaatgcattactctactctcccttagccaatctcagttcatttgtgctgaaaaataaaattgtccctatgaccaattttactgggtgttcataagcagtatttattatacccaaattttggsttgcatactaactacagaaggtaacctgaatgtaaaatgcaaattcactatttaaatattgacgaaaattttctcctccaagaaaatgtgagaagttcaattgcccttttgtgtgatgccagatattcatgaggttagcaatgaagatgtaatgagccac

SEQ ID NO: 289153 - DNA, 546 bp, Homo sapiens
acggatacaccataattgtttatttatctgttgatggacttttcagttgtttctaccttttgcttattgtgaatagtgctgctgctgtattcaccatagcaaagacatggaatcaacctaaatgtccatcagtgtcagactatataaagaaaatgtggtacatacacatcatagaataccatgcagccataaaaaaagaacgcgatcatgtcctttacaggaacatggatggagctggaggccattatttttaacaaattaacacaggaacagaaaacaaataccacatgttctcacttataaatgggagctgaatgatgagaacacatggacacatagaagggaacaacacactggggcctatcagagyggggaggatgggaggaaggagaggatcaggaaaaataactaatgggcattaggcttaatactggggtgatgaaataatctgtacataaccctcatgacagtagtttacctatatagaaaacctgcacatgtacccctgaacttaaaagttaaataaaaaaatagtgctgctgctat

SEQ ID NO: 289154 - DNA, 489 bp, Homo sapiens
accgctactttactaaaggcctatttactgcagttccagttacccagtatatcatgtcaacctttctacagaaaatttataggacattctagaaggcaaaaaaaaaaaaaaaactgtgaggagacaaaacaagcatcataaccagagatagatatggtagaaatgttaaaattatcagactaggatttttttaactgcaattaatatgctaaggttaatggcagaaaagatgagtaacaagcggagagacgaamattctaagaaagaaccaaaagacatgccagacatcaaaaacactgtagtagaaatgaagaacgtctttaatgggctcattagtagactggacgtgactaaggaaaaaaaccccaagcttgagtatgtgacaatagaaactttccaaactgaaaagaaaaaagactaacataaaatccaagaactgctggacaacaaccaaagaggaaaccaaagaggtaacatatgcacaatggg

SEQ ID NO: 289155 - DNA, 360 bp, Homo sapiens
ttggtattatacattctatgggtttggaaaaatgtctaatataatggcatgtatccaacattatagcatcatacagaatattttcactgtcctaaaaatcctctgtgttccacctattcagccctaacttaccccaatccatgatgaaacgttttcatacacatgttctctctctccagataacctcatccagggcagaactctgggcactasgttttccacaaaacatgagtttaatgaggtggcaatagacatggcctgggactatataaggcagtgtagcctagtgtctaagagtgcagctgggagacaaactactcagggtcatattttggctcatcttttagtgctgacttactg

SEQ ID NO: 289156 - DNA, 625 bp, Homo sapiens
aataatatttttctctctcgggaaaaagtagatagaaaactgtaattgttgtctcttttcctgaagtaaggcaaagatgtctctatgcagctttcccagaggtaaatattgcattgtataacagatggaacagataatgctggcaaattcacatgtgaagattctatctacaacagctgctattaaacttcagcttccaccttaatcactattataggttgaattgtgttcctcaataaaatgttgaagtcctaatccccagtatctaygaatctgactttacagaaataggagttaacaatgatcaaattaagatgaggtcattagagtggctcctcatccaatatgactagtatctttataaaaaggggaaatttggacacaaagagaaaagacaatgtgaagacacagagaaaaggggccatgtgactggaacgaggcatctacaagacaaagaacaccaaggattgccaacaacaccagaatcccagagaggaaaaaaggatccactagagcctttagaagaagcatgcccttgcagacacctatatttcagacttctagcctccataactatggggtgaatctcttttgttttaaccagtttgcgtacctttttactgaa

SEQ ID NO: 289157 - DNA, 371 bp, Homo sapiens
cctgtctcaacaaaaaaataaataaataaacttggagtccccacatggttggtaagaattctactactaaaatacacttctctttgagaacacaaggaaaaacatgcttacaattcatttactaaccaaaataataacaatacatttggttaactctgggggttagtgaatcaagtagctrgagtaaaaatgtatcttatgtaattgctatccatatcagaaatggataatcacaggaatttctttccacatagaggatagtggaagaaaagactagtgtgccatcaagggtgtctcccattgtgcttcctcatgatggtggttctctgacttatgtttggtaaagggaacattttttaattcatgttttc

SEQ ID NO: 289158 - DNA, 556 bp, Homo sapiens
aaagcaacaccaagctgaactcagctgatgtccacggaggaagcatagacaggccctagcaagaggggcattacccatctcagcaatcagaacttgagttttggtaagccttgccactgctgggtaaagggctctgggttcctaaataaacttgaaaggcagtctaggccacaaggactgcaagtcctagtcaagtcctagtcatgtgctgggctcagagccagtggatctgggggacatgcaacctagtgagacaccagacagggcagccaagagagtgctttaccactcctcccccaacctcaggtagcgcagcttgctgctccaaaagaaactsctttcttccacttgaggagaggagagggaggagtaaagaggactttgtcttgcaacttggatatcagctcagccacaacaggatagggcattagacagagttgtgaggcccccattccaggccctagctctcaaatgatattgctaggtacaccctgcaccagaagggaaactgctgccttgaaagaaaggacccagtcctgggcaggattaatcacct

SEQ ID NO: 289159 - DNA, 560 bp, Homo sapiens
taatctcactcacaattgccagaagagaataaagtaccaaggaatacagctaaccagggacatgaaagacctctgtaagcagaactgcaaaacactgctcacagaaatcagagatgacacaaacaaatgaaaaaaaaaattccatgttcatggataggacgagtcaatatttttaaaatgcccataatgcccaaaacaatttatagattcagtgctattactattaaaataccattaagattcttcgcagaactaagaagaactatttaaatttcatatggaaccaaaaaagccaaaatagccaaagcaaaactacacaaacagaacaaagcaggaagcgtcatgctacctgacttccaactatactacagggctacagtaaccaaaagaacatggtactggtacaaaaaaagacacacagaccaaggaacacaataaataacccagaaataagacctcacatctacaaaccatctgacctttaacaaaactgacaaaarcaagcaatgggtaaaggatttcctattcaataaatggtgctggaataactggctaaccat

SEQ ID NO: 289160 - DNA, 1049 bp, Homo sapiens
ggcaaatatttcataatgaacatgccaaaagcaactgcaacaaaaccaaaaataggcaaatgggatctaattaaactaaagagcctctacgcagcaaaggaaactatcaacagagtgaacagaaaacctacagaatgggagaaaatgtttgcaaagtgtgtatctaacaaaggtctaatatccagaatttrtaaggcacttaaacaaatttacaaaaaaaaaaaaaaacaagaaaaggtgggcaaaggacctgaacagatacttttcaaaaaatggcatacatatggctagcaagcatatgataaaaaagcttaacatcactgaacattagataaatgcaaattaaaaccagaatgatacactgtctctcctcagtcagaatggctattaataaaaattcataaaattacacatgctggccaggttgaggagaaaatggaatgcttatacactgttagtaggagtgtaaattagttcaaccattttggaaggcagtgtggggatttgtcaaagacctwatttcaaacagagatagaggtaacaatccaatttcaaaagaatacaaatgtgtgactatttgtgaaaaataataatgtaaaatgcttgtgaaatgataaattcctatggggtagctatgaaactcccgcttgaaactcatgaggaacattgctcaccacttcactggctgaatttgtctcacactgtctcaagccaaaggttcggcttttactgaagagcgatgtcttctcaacatatgaaatgttaataacccctgcagtaggagactaacacttatctaggaaacactaaaagtttctcaatattctcctctttcagcatataaaaaagatggttttgatctcaaggaacwtaggattgaaagcacagtgtatgattctgacagactccctgaaaacttaaccattttcaaacactcagatatacagggatatttcttgctgtaaatactacatctcaataaaattagcaaaatcagaagggattgttgcagaacaataccactttttaaaaaataaaaaaatgttgat

SEQ ID NO: 289161 - DNA, 626 bp, Homo sapiens
tctgtgggcccaggattttcaatgctagtcttctctatcctggtgaattcagggggatgttctagtttttaagtggcttctggtagtgcttttgttggaagagtgatgcaaggggattttctattctgccatcttggtgacgtcacttctaaactctctcattaaatcaagaaaattatctctgcggtgggaaaaaaggtttccacagtaagacctaagcttctttgtattcacagtatttacctgcttaaaataattttttagatagccagtaaaaatygtgttaaagcactaattcttaaagtctaagatgactatgtaagggaaaatgttataaatagaaaaaataatagaaaatattgggtcgaaagttaatcaacctgaaaaaagtatcatatatatgaaaacctttcagaagtggatgccataacacaaacaggaacacagaatggcaacccagtattaacaactaggagtaggctcccctagaaagcattctcttccttaccttccgtgtcacttttctctggcttccttttcccacatccagtctgtcctgcttcaaacatttatacactctgcctcaaaggtgactttattaacaaattgaatcatgtgcctcctct

SEQ ID NO: 289162 - DNA, 626 bp, Homo sapiens
tctgtgggcccaggattttcaatgctagtcttctctatcctggtgaattcagggggatgttctagtttttaagtggcttctggtagtgcttttgttggaagagtgatgcaaggggattttctattctgccatcttggtgacgtcacttctaaactctctcattaaatcaagaaaattatctctgcggtgggaaaaaaggtttccacagtaagacctaagcttctttgtattcacagtatttacctgcttaaaataattttttagatagccagtaaaaatcgtgttaaagcactaattcttaaagtctaagatgactatgtaagggaaaatgttataaatagaaaaartaatagaaaatattgggtcgaaagttaatcaacctgaaaaaagtatcatatatatgaaaacctttcagaagtggatgccataacacaaacaggaacacagaatggcaacccagtattaacaactaggagtaggctcccctagaaagcattctcttccttaccttccgtgtcacttttctctggcttccttttcccacatccagtctgtcctgcttcaaacatttatacactctgcctcaaaggtgactttattaacaaattgaatcatgtgcctcctct

SEQ ID NO: 289163 - DNA, 626 bp, Homo sapiens
tctgtgggcccaggattttcaatgctagtcttctctatcctggtgaattcagggggatgttctagtttttaagtggcttctggtagtgcttttgttggaagagtgatgcaaggggattttctattctgccatcttggtgacgtcacttctaaactctctcattaaatcaagaaaattatctctgcggtgggaaaaaaggtttccacagtaagacctaagcttctttgtattcacagtatttacctgcttaaaataattttttagatagccagtaaaaatcgtgttaaagcactaattcttaaagtctaagatgactatgtaagggaaaatgttataaatagaaaaaataatagaaaatattgggtcgaaagttaatcaacctgaaaaaagtatcatatatatgaaaacctttcagaagtggatgccataacacaaacaggaacacagaatggcaacccagtattaacaactaggagtaggctcccctagaaagcattctcttccttaccttccgtgycacttttctctggcttccttttcccacatccagtctgtcctgcttcaaacatttatacactctgcctcaaaggtgactttattaacaaattgaatcatgtgcctcctct

SEQ ID NO: 289164 - DNA, 512 bp, Homo sapiens
tcctgctgggacttggtccttcccttcagggcagtaggttcccttctggacaaggtgtgtctagatatattttccagaccctagagactggaataaaggcctcatgactctgccctgtaccctatccttctgctgttgagttggtatccaagtttcaaagcagagtcattttactgtttcctctcctgcctcaagtggaaagaaggggtctgctttggagttgtgaattgtgcttcctgagattggggaaaaatgatgcaagtactcctttagccaccccagctgktgtctcactaagttggcggcccctcaagtccactggttctgtgcccagaacagcactaggacttgcctaggagttataatccttgctgcttagactgcctttcaagtttatgtagcaccccagagcactttagcccacagtagcaagacttgacaacactcaggttctgcctgactgctaggatgggcaattgccctctggctgggattagtctaaatagtccctg

SEQ ID NO: 289165 - DNA, 588 bp, Homo sapiens
ttttttatttttaccattttctttccattctttcttacattatccatctctgcttacattatccatctgttcttacatgttgtctattttttattggaaaacttaacatagtaaatatgtattaattcaaattaattttaaatttttcatctaataatttccaaatctgtgtcatatttgagtccaatcctgatgtttgctttgtctcttcagattgtgtttttctcttgcctttttcatatcttsttgtaacattttcgtgtgaagtattatttaattatttggataatagaaactgagccaaataggctttcagtgtcaggtggtgtgttattctggctaggagctagactgtattaatgtttttgagctagatgatattaatgattaatgttttttgtggccattggtgttagaaacttgtttcctttgctgaccttgtttatgtttctctcctgatccctctgtttttctataagtattacttcttaaatagaagctgtgtcttattgctctttcagttctaatccactgttatactggagccctattgataccgtggtaaggtggagaggaggggaacattgt

SEQ ID NO: 289166 - DNA, 1204 bp, Homo sapiens
aactcctgacctcaagtgatccacctgcgtgggcctcccaaagtgatgggactaaaggcgtgagccactgcacctggctgaaaaggacatttctctaagcattcatgctggcagaaaccacccacccacattcgtcccaggagccatctgtatcagtccattactgagttgagccctttcccttcctaacaaaggccactggtttggttactgagattccttctgctagatggctttttttttttaactttccccagtaatatttttaacattctgtgtataatttttatacagataaattgagtattagggttatgttattttacaccagggaggatttgtcttaacaatttgaagacttaaggtagaattaggtaacttttaacacaatcagtggttgaattgatttgaagctagccttcagtcrtttttcatttatctttgtttccagtatatgttaaacagataaatttttagtataaaggaaacaaatattataaatgtccaagtggaatccatagtcttggagaagtagtctattttaagagttcatgactcatacaatgttaggaggaagtgtgaatgggttagaaaaagattgacctgaaataactaacatagaccgccaggaagataatgatwcaccaattcttctcacaacaactctttttttttttttttaaagaattgggtcccttaacttaacacctaccttcgtaagacagacaacattctatgtttccaaagtgcattagtgtccccacatgtactctgatgtttctggttcatttattgatttagaaaaaaggtagccccgtggaaaggcacaaatcgaaagcagtttaaacattttacattgcttttcattttaaaattcaagaggtgcttcaaaagtttatctcttaagtacgtcgctttttaacaaggaaaggttagcaactgtaaaaatattgtcaagaaatgtggaaacaactttatctccttgttatgagtattgtgagttagaatattgtcatggaatatgttcctagagaatgaagaagtttctacattttaaaaaaccctgttaattatatagtttgaatatatcaatctagaagcagtgcttcagttcaaaagaagttgtctgtggcaaaacttggaaawaattaatcttgaatctcattactgcatcgtctttacttcagagacctcttcattctcc

SEQ ID NO: 289167 - DNA, 535 bp, Homo sapiens
ctacagacccaagaagtttattttgccctcatatgagaaactaagacaatttaatagaagagaaagaaagagatttagtgtacttggagcatttgaattacaatatagtttgggtctgcatccctgcccaaatctcatgtcaaattgtaattcccagtgttggaggtggggacaggtgagagatgattggatcatggggccagatttcccctttactgctgttctcatgatagtgaatgagttaatcacaagatctggttgtttaaaagtgtgtagcactaccccttcctacacttctatcctcctctggccatgtgaagaatgcctgcttcccccttcacctttgtcaagattgtaagtttcctaaggcctccctagccatgctttctgtctagcctgcagaaccatgagccaatgaaacctcttttctttacaatttacccagtcttcagtatttctttacagcagtgtgagaayggactaatacaaattaataatgaaaatgcacattttataagataattgtaactatgaa

SEQ ID NO: 289168 - DNA, 583 bp, Homo sapiens
ctagtttgtcattgcagtggctcctagacattgctttatgaggaaagaaaagaggaaagaggatgagcctagatacaaagggaaaggcttgggaaaaagaaactacatccatgatttttatagtgcctcttttgttactattgttttgtaaataarataggtagcaaatccagtcattcaaaattataaataaccactaaagggagaagtcaatgctcactttagcttggtttctgctgttgttctttatggtgtgcatttgtgtttacggtactctccgaaatagctcttcacagctactttatgtataagctctttgtcacatctaatggaacttttttgaagttgtttgcatcaacttgaatctttagttgttccctaagttcattctggaatggctgaaaccacttataaagaagaaagtattaagggcattgagttacccaacgtattagttgttatcgctgaattctacttttaaccaggaatatactttggtcttcgttcaaaagcacatcatttttttgtaattaaaatatatatggagacaatatagtctttaatttagttattaagaatattg

SEQ ID NO: 289169 - DNA, 580 bp, Homo sapiens
ccatttgtccccactgccactactcccttacccccattaagaacccatgggtttatatatttttaaatatcttaaaatatgtaaatatctaagtaagttcttcactcctattctatcttatggagaccctttttaaagagtgaattttatagagacataggaaatgttagtttgcattgttttcactttgcccctatagttttttaaaaagcagattcactttttacaagaggaagaatttggattagtgctggatacatactgttttgacttgtaaaatgactctttaatagaaatggacaaagaaaatatgctaataaaayaacttaagtatgtgtatgtgtgtgcatgctaaatttttttttcttctgttctcttcattttgtgctcatcatcaattgctgctatttactgtggtgcatttttcctgaacacctgctgtcaaatgcatcaagtcttttcttgcacagtgctacaggtttttgcagaactgagcaagcccaacattagacagatagcctaaagactgattgatttatttgttttaatacaaatatacgctcacatgttgacatacaga

SEQ ID NO: 289170 - DNA, 599 bp, Homo sapiens
actgggaattataaaagcaaagtattgtctgaagaaaccatcatatattcttttcacctctttattccaatccagaactgtttctccatgaaagctttattttagaattcagtgttactgttttctataatttttaaaacttcaaatgtgtagttcctgaaatactttaatagcagaatctttcccctccatcaaataaagccgtatgtgggaagcctattatattggatctactttggtggggtscctgtcctgcatgcctcttcctcctgcccgggcatgctgcatcctgtgaggcaccttggagattccacagagcagtttaaaaactgttactgtagcaaaaacactgctgaacacatggcttcattcttatttctcagaaacataacatgagtacccattagtttcatgaactcacagaaacaaaacattcttgtgacatggcttgcatagtgggttgtatacctgtgtatctgtgaaatgaacactaaaagtccatcttgacaagtttgcacctatctgaatatattagtttccttttaaatgaaaagtcattgccttggtttcaaataaaaattggaacctctagtttttac

SEQ ID NO: 289171 - DNA, 518 bp, Homo sapiens
cttaatgaatagtaaatatattttatcttctttatgattttattaaccttttttctctagctcactttattataagaatacagtatataatacatataaaatacaaaatatgtgtcaggctatgttattggtaaggcttccagtcaataataggctattagtagttaaattttttggagagtctcaggttaaaggagaatttttgatgtgtgtagggtttggcacctctagcccccatgctttttgtgcatcaactgtaattcattttgcctgcatgataactgcttattttttaagatatattttgaagactcaaaataatatcatgttgatatagaaacattccatttccatttgtaattaaaattgaaaaaattttaattcttccatttaccttgactatcacaaatacatgtaatgattttttaaacccagtctagagctgaaccarttaagacaaaattgacataacagatttgcccacttttccattaaatatttttatccctaatcaggcc

SEQ ID NO: 289172 - DNA, 613 bp, Homo sapiens
taatatcattacaataaattcctccttttggattcaaattggctttccatccctagcagttcagccctaatatacagcagatgtcacaactgatttcacatatttggagaaataggagtagctgagacagaatttagtctrccttgctcagagacattcacagatagtgtgaaaaccactcatgagtcccctttgcttaaagttaccctggtcatgtttattacagcatgtaaaggtacatagccttaaagtcttttcaggacttgggatttttcttaaagaaaacaaatcaagagtgttcattaaaagattgatataaaaaattaataattctgaagttaacccaaaacttaatgtaatcttccattggaacatttgttgatgtgtgtggggggtttaaattccacaaatattattaaaatgagcaatcagcagcaagatgttttaaaatattttgtttcagcatgtaaaatctcgttttattacagaattattttgttaaaggcacagctatgccaggttgctgccagagtgataggatcataacagcccagttaattttaaaagactcacaagtggtaggccttggaactactgatggcaacatgtacat

SEQ ID NO: 289173 - DNA, 577 bp, Homo sapiens
catcgcgtgtatatactacaatyggttcatccactcttgcactgatggacacttggctgtggctatgaacatgggtgcacatgtgctggtttgagtccctgctttcaattcttttgggtgtagactgaggggtggaattgctgggtcatatagtaattctatgtttaacttttttgagtcaaacagtggctgaataattttgcattttcatcagccatataggaagtttccaatagttttgtttttttttttcaattaaaaaaaaaaaggtggccagatgctgtggctcatgcctgtaatcccagcactttgggaggccgaggcagatggatcacttgaggtcatgagtttaagaccagcctggccaacacggcaaaaccccatctctaaaatacaacaaattagctaggtgtggcggtgtgtgcctgtagtcccagctactcgggaggctgaggcaggagaaatacttgaacccgggaggggagtttgcagtgagctgagatggtgccactgcgctccagcctgggcaactccatctcaaaaaaaaaaaaaaaagggaaaggcaccagggacaggc

SEQ ID NO: 289174 - DNA, 659 bp, Homo sapiens
acagcatgggaaagacctgcccccataattcaattacctctcactgggtcccgcccacaacacatgggaattcaagatgagatttgggtcaggtgcagccaaacgatatcagtccctgaggattctagattctagagagtctaagaacgctcaattagagcctggtctccagattactacagaggaatatttgtcaaggtaggcaggcaggacatacttagctctttgtttacttggttctaagccttaaggattcagccctatggaatgggggtccatctgtgctctgcacccccaaacatcaagggctgacctggctcaaaggcatggatgagtgcctgagctagggtctgtccccagctcttgctcttrtggcctccttctttctgctcctctgcctcgtttcttttcttgtttttgttttttgattttttgagatggagttttgctcttgtagtccaggctggagtgcagtggcatgatcttggctcactgcaacctccacctcctgggttcgagtgattctcgtgcctcagcctcccgagtagctgagactataggcacttaccaccacgcccagctaattttttctatttttactagagacagggttttatcatgttggccaggctggtctcaaactcctgacagcaggtgat

SEQ ID NO: 289175 - DNA, 552 bp, Homo sapiens
taatttatagaggccaatgccatyggaagaagaaggtattacatttgctgagaaagagacacgccacaccaagcagggccatcggggaagccacagtggaagacggggaggggaaagcccagcttggagccttttttttttttttttttgagatggagtcttgctctgtcacccaggctggagtgcagtgttgtgatcttgactcatggcaacctctgcctccagggttcaagtgattctcctgcctcagcctcccaagtagctgggattataggcgccagccaccatgcctggctaatttttttgtacttttagtagagacagggtttcaccatgttggccaggctggtcttgaactcctgacctcaggtgatctgcctgccttggcttcccaaagtgctgggattacaggcatgagccaccgcactcggcccaactcttaagtaaattgtgcgcttttcccttgttaatctgtctcagtcagtttacttgttaggcccagccacagaactccacgggggagaaaggagtttttcctcctctaaacaggaa

SEQ ID NO: 289176 - DNA, 552 bp, Homo sapiens
taatttatagaggccaatgccatcggaagaagaaggtattacatttgctgagaaagagacacgccacaccaagcagggccatcggggaagccacagtggaagacggggaggggaaagcccagcttggagccttttttttttttttttttgagatggagtcttgctctgtcacccaggctggagtgcagtgttgtgatcttgactcatggcaacctctgcctccagggttcaagtgattctcctgcctcagcctcccaagtagctgggattataggmgccagccaccatgcctggctaatttttttgtacttttagtagagacagggtttcaccatgttggccaggctggtcttgaactcctgacctcaggtgatctgcctgccttggcttcccaaagtgctgggattacaggcatgagccaccgcactcggcccaactcttaagtaaattgtgcgcttttcccttgttaatctgtctcagtcagtttacttgttaggcccagccacagaactccacgggggagaaaggagtttttcctcctctaaacaggaa

SEQ ID NO: 289177 - DNA, 552 bp, Homo sapiens
taatttatagaggccaatgccatcggaagaagaaggtattacatttgctgagaaagagacacgccacaccaagcagggccatcggggaagccacagtggaagacggggaggggaaagcccagcttggagccttttttttttttttttttgagatggagtcttgctctgtcacccaggctggagtgcagtgttgtgatcttgactcatggcaacctctgcctccagggttcaagtgattctcctgcctcagcctcccaagtagctgggattataggcgccagccaccatgcctggctaatttttktgtacttttagtagagacagggtttcaccatgttggccaggctggtcttgaactcctgacctcaggtgatctgcctgccttggcttcccaaagtgctgggattacaggcatgagccaccgcactcggcccaactcttaagtaaattgtgcgcttttcccttgttaatctgtctcagtcagtttacttgttaggcccagccacagaactccacgggggagaaaggagtttttcctcctctaaacaggaa

SEQ ID NO: 289178 - DNA, 576 bp, Homo sapiens
tcaacaacgttttgttgattaaatattaaaataatacttttgacttactaaattaagtatattattaaaattagtctctcttgtttcttttacttttgtaatacagctactagaaaatttagcattacctatgtggcacagattatattttggattgcacgtatctagagaggcaagaactatttggaaaaattggacctaccaggttgcctcatcttcatttttctaagatattatgttaagagccttgattatgataatgataacagtggtgatgatcttggtaatttttgcatcttgacattgtatctttataccttcttataattttggtgttcaccttatgtttgmtatactgatgctagaatttgaaaagtcaaacattttggcttcataacaatgacagcttcctgattttcctaactgctatgaaatgttaaatggccatggccaaataactcaagaatttcatattctgtatacttcaatgaaaataaaaatgtttactcattaactctaaataaaaccatcaccaaattagttgtaaataactaggcagagaaaaaattataagtt

SEQ ID NO: 289179 - DNA, 280 bp, Homo sapiens
acaaagaagattatttaatttatccaatattcaagatcctttctactttgtgtttaaattaccttgctggtcttatcttctagtgtttcattcctctctggtcacagcaaacacttgggagactcamtggctttgctgatgctatttcatcctgttttattctattccgtctaattggcatttctttccactcaatttagcccattgaatttttttgacaaacagcccaaatttgctacttttttgaatcctttcctgattttgcttggccaatttagtt

SEQ ID NO: 289180 - DNA, 1224 bp, Homo sapiens
caacagactttccctccaaggaaaatattttcaattaaattgtaatcatgaaaattgtaatatgttggttgtaaagactgatatttcatgtgaaaaaaagcatagctgtttaatccttagaattttcaaagagaagttgttcatrttctcatgaacaacattgtaattttaagcagaaataaattgaataaaagcagttaatccaactggatagtttttatttaagaataacagatactttgtggtcaaattttatagtcacagataattttctgatttgtaaaggactattcttatataaaaattgcattgcaaactgagaatattatagagaagaaaacatagctaaccattattgagcaattactatggaccaggagctgttttactcattttaaatgtatctactcacatagcccaatagattactattattataatatagtataatttttattttacagatgagaaaactgagacatggagagattacttctctacaggtacaggagtagtgtctggtaaacctggaatgtgaatttaggttccagaatctgtggagtaaccactattgttatttatgtgtgtatgttacctaaggagatagttcttcataattttatwgcaaaattataaaccatataaaaaagatataatccccaataatatttttttctccatctcaaatcattatatttttcgtggatatattgaattatcttatcttactttctgtggccaaagtaccagagtaatatgcttctccttaagcattttaaaaatatattccaggtacagaaaatcacacaaaataaacatctatagctcaatagtttgtcacaaagagaacgttcatataaccaccagccaattgtgacaataaaacatttcatatttttaaatttttcattttcttttaggtaattaatatatttatatttaaaattgtaatttcttatttgttctatgagttatttagaagtgcattatttaatatgcaacaaggattttctagttatcattttwattaatttttagtttaatttattttcagcaagatacgatgatgtgtatgatttccaacattaaaaattatttataaagaccttctatatggcacaacatatggtcaactttggtaaatgtctagtgcatacttgaaaagaaagtacactctgcagtttaaggagtgcgatatcttcaccattaattttactgattgtg

SEQ ID NO: 289181 - DNA, 531 bp, Homo sapiens
tgttagttggcttgatttaacatacctgtgatatatacatagatccaacatatgttgttgtcagtactttatactgtctcaatcaagaagcaattaatgtcaaattgtctcaccttttataatgctaacttcgaaaatttgatcacggtggtcaccaccagacctattaatttccaacatgttttcccctttgcaaatagcaattaagtttggggtggatatttgaaactgtgtaaatatcatgattatcaacaaatttcactaaaaaatgttagcatttatttaagatcttttcctattcaatttttccactggagttgtagaaaagtaatttttaaattttttggagaaaggcagtgcctcacgcctataatcccagcactttgggaggccaagggctggtggattacttgaggtcaggagtttgagaccagctggatcaaaaaggtaaaaccycgtctctactaagaataaaaataaaaacaaattacaaaaaaaaaaaaaaaacctagctgtgcatggtggcatgca

SEQ ID NO: 289182 - DNA, 623 bp, Homo sapiens
ctcacatttgttatcttaggttattctaccactggccatgcagtcttgttttctctccttgatgaatgaactgtcctaattctaggttataaatgagatgttcaaactgtagggtgcctctttactgaaactctgacttctgagaacagatgacaatttttttagtagaaacacaaagacagatatttctgtcttctacagaaaagatatataaatctcagctatatataaaatctagaatgttgcatattttcaccccaatttatggaaacttttctaatgttcaattttaccttttcaccaacttaccagcattgaaacaaaagtgtctctaactattcccacctgcgtcgaaatcacctggttgtacttgttaagcctgcagctccctggcttttacagtgtaactgctttgtccagctctgcaagttggagcctgggaagctggcgggtaaaaataaaagaatgaatgaatgaatgaatgratggatgaaccaagtcgttctcatataaaattcctgccatggatcctttcttttcctctttatttaaatcttcagttcagaaatatatcattttctacccacattactgcatcttctctttctacttccaaaacacat

SEQ ID NO: 289183 - DNA, 481 bp, Homo sapiens
tactatgaactgaattttgtgcccccaaaattcatattttgaaacctcaaatccttaatgtgactatatttggaaaagggcctttaaaaaagcaattaaggttaaatgaggtcataatgrtagggttttaatctgatagggttagaatctttgtaaaaaaatacacaagagagctcatcctcttgctgtgaggacacaccaagaaggtggccatctgcaagccaagaagggaacagacaacttgacagccaattctgttcctcactaggaaaagaaatgtgatgtcagactaggttatggcctcacctatttcaataagcttgaataacatctttggctcactaggaacagaattgacagccagttctgttcctcactaggaagaaaattggctatcaggtttatatgactttagacttcccagcttctagaactataagaaataagtttctgctccataagcacccaggctatagtattt

SEQ ID NO: 289184 - DNA, 565 bp, Homo sapiens
gagggtcttatgttcatctgcaatcaaataaggtagatcagagagtttatttatagccagtttttactcaaaatatttttaggttctgtggctgtttttcaggaaaaggagttctggtttctatgacccaccttggggaagagggattccagtttctatagccagcttcagcggagaatgggactgagaaacaggagracaggagaaggtcagagaaaaacttttgcttctccggctgctgctgaggcctttaatttggggtactgttttctgaaccccaacggtttatatgcaatgacccaaatggatgatattaagtatggtgttcccgatacctagaatatgtaggtcaggaacaaaagagtgacagcatatctgggtcctatcactacccatctgggaactcaattatgaacttttgtttctcagtccacaatcttaaaccgtaccagttaaaggttctggtttacaggtcgagaaagcgtctattagattaggttaactgaaagctatgagtgacatctgatcattttagtattctcttgctggtgtactgggggccaac

SEQ ID NO: 289185 - DNA, 565 bp, Homo sapiens
gagggtcttatgttcatctgcaatcaaataaggtagatcagagagtttatttatagccagtttttactcaaaatatttttaggttctgtggctgtttttcaggaaaaggagttctggtttctatgacccaccttggggaagagggattccagtttctatagccagcttcagcggagaatgggactgagaaacaggaggacaggagaaggtcagagaaaaacttttgcttctccggctgctgctgaggcctttaatttggggtactgttttctgaaccccarcggtttatatgcaatgacccaaatggatgatattaagtatggtgttcccgatacctagaatatgtaggtcaggaacaaaagagtgacagcatatctgggtcctatcactacccatctgggaactcaattatgaacttttgtttctcagtccacaatcttaaaccgtaccagttaaaggttctggtttacaggtcgagaaagcgtctattagattaggttaactgaaagctatgagtgacatctgatcattttagtattctcttgctggtgtactgggggccaac

SEQ ID NO: 289186 - DNA, 615 bp, Homo sapiens
cggcaatgcactgagctatgatgtgcatgagctagaacccttacatacacatttatgaatttacttaagtttttattcaaattaaagtcttacaggaaatattacacacattataaaattaattattggtcattaatttagtacttaatggccatcaaatattaggaggcaacttctayataaggacagaggcgagcaaaaggacaatgacaagcacataaataagggttatttggggtaaaaaaatatatagcagaaagaaaaatgactggaaagactataacacatgtaggtaaaagacaaaggtagagaatggttagtaacttaatctgtgcatttgtactaatacccagcaagacccattgtttgtacatcacagcttgccaacagtgctggttcagccactatttggagtgaacacgtagtagtttttataactattatttcgtgtaatataatatgcaagataacaatatgaaacttgtaaaaataattaatgtgaattatctgcaggatatcatctttgttctcagacttagggacttcagataatagaaaaatagcatttagagtctgtatctgccaacattttcctactcattataacaatggtgt

SEQ ID NO: 289187 - DNA, 615 bp, Homo sapiens
cggcaatgcactgagctatgatgtgcatgagctagaacccttacatacacatttatgaatttacttaagtttttattcaaattaaagtcttacaggaaatattacacacattataaaattaattattggtcattaatttagtacttaatggccatcaaatattaggaggcaacttctatataaggacagaggcgagcaaaaggacaatgacaagcacataaataagggttatttggggtaaaaaaatatatagcagaaagaaaaatgactggaaagactataacacatgtaggtaaaagacaaaggtagagaatggttagtaacttaatctgtgcatttgtactaatacccagcaagacccattgtttgtacatcacagcttgccaacagtgctggttcagccactatttggagtgaacacgtagtagtttttataactaytatttcgtgtaatataatatgcaagataacaatatgaaacttgtaaaaataattaatgtgaattatctgcaggatatcatctttgttctcagacttagggacttcagataatagaaaaatagcatttagagtctgtatctgccaacattttcctactcattataacaatggtgt

SEQ ID NO: 289188 - DNA, 663 bp, Homo sapiens
ggatgtcactcaaaaagctaaaaattgacctaatatatgatacagcaatcccactgccaggtatgtacttaaaaaaaaaggataacagtacattgaagagatatctgcactcccatgtttatggctgcactatttacaatagacaagccttggaagcaaccctctgtgttcaccaacagaaaaatagakaaagaaaatgtgttagatatacacaatggagtactaatcagccctaagaaagaatgagatcctgtcattttcaacaacatgaatggaactggaggttattatgttaagtgaattaagccaggcacagaaggacaaacttctcatgttcttacttacttatgggaggtaaacattaaaacaattgaactcatggaaatagagaatacagtgatggctaccaggggctagaaaggatagtgaggtcatggggaggaagtgtggatggctaatgggtacggcgtagtttttagaaagaatgaataagatttagcatttgatggcacaacatggtggcatcatactgagaaactgtattttactatagtcaaatagccaccatgttgtggtggctataatatttggccataattttaattggccattaaatttggccaagtaatatggccaaataataattagccataatttactata

SEQ ID NO: 289189 - DNA, 579 bp, Homo sapiens
atttgaggatatcttccatgaaaatttcctaaacctcactgcagaggtcaacttcaaaatcaggaaatgcagataaccccagtgaaattctacacaagaaaaacatccctaagacacatagtcatcagattctccaaggttcaagtgaaacaaaacaygttaatagcatctcgaaagaaggggcagatcaccttcaaagggaaccccattgagttaacagtgggcctttcagccagaaaagattgggggcctatattcagcattcttaaagatcagaatctccaaccaataatttaaccaataatttaacatccagtcaaatgttcataagcaaagaccttttcagacaagcaaatgctaggggaatatgttgccatcagacttgccttacaagaggtcctgaagggagtgctaaataaaaaggaaagaccattatgagccattacaaaaacacacttatgtatacaccgttgtgacactataaataaatcacacaaacaagtctgcataataaccatctaacaacacaacaacatgatcaaatctggacatatcaatactaaccttgaatgaaaatga

SEQ ID NO: 289190 - DNA, 538 bp, Homo sapiens
attgacattaattgtttaaatgttaggcgaaaattcactagtgatgccgtgtggttccaggccattcttttttgggaagtttttgattaacgactcaaaatgctttctcattattggtctgttcatattttctatttcaatatgatttaatattggtagcttgtttgcgtctaggaatttatccatttcctataggttatccaatttgttagtacataattattcatagtagcctcttatgatcatttgccatttttgcagtmtcagttgcaatgtcccatctttcatttctaattttacttatttgagtcctctcctatgtttttcacagtgtaggagaaggtttgtcaatattgtttattttctcaaaaatcaacttttgttgataatttctattattttttggtctttatttcatataactatgctctgatctttgttactttcttctttttactcagtttaagctttattcttattttccagctgctgaaggtatatagttaggttgtttattggataccattcttttccgtta

SEQ ID NO: 289191 - DNA, 538 bp, Homo sapiens
attgacattaattgtttaaatgttaggcgaaaattcactagtgatgccgtgtggttccaggccattcttttttgggaagtttttgattaacgactcaaaatgctttctcattattggtctgttcatattttctatttcaatatgatttaatattggtagcttgtttgcgtctaggaatttatccatttcctataggttatccaatttgttagtacataattattcatagtagcctcttatgatcatttgccatttttgcagtatcagttgcaatgtcccatctttcatttctaattttacttatttgagtcctctccyatgtttttcacagtgtaggagaaggtttgtcaatattgtttattttctcaaaaatcaacttttgttgataatttctattattttttggtctttatttcatataactatgctctgatctttgttactttcttctttttactcagtttaagctttattcttattttccagctgctgaaggtatatagttaggttgtttattggataccattcttttccgtta

SEQ ID NO: 289192 - DNA, 574 bp, Homo sapiens
tgagcaatcacagtacctggttttaacttcatattgctgaaaaaggcactgaagaggttagaataaacacccttgcattacctacaccagccccaaccatccctcagcagtggctgggtggcatggagaaagaatctgtgcacttggaggagatagagtacagtgattgtgagactttgcattttttaattttatttatttatttagagacagagtctcgctctgtcgcccaggctggagtgcagtggtgtgatctcggctcactgcaacctccgcctcctgagttcaagcgattctcctgcctcatcctcccgagtagagtagctgggattacaggtgcccaccaccacgcccggccattttagacttcgcatttaaacccattgctgccctgtcacagcaaaaagtgacacaggaccaaatctggctagcacccaggacagcgtaattagactagccygggggcaaatcatctaccccaggagtcagaactttagttttggcaagccttaccaccatgggctaaagaactctggggtcctaaagaaacttgatagtctttccttcaggagct

SEQ ID NO: 289193 - DNA, 574 bp, Homo sapiens
ctgccatcagaggctgctacaattcatagatggaagagaaacaagtttaatcaaggtcacaccaggattagctctagctctgtgagagagtgccaggggatgtttaatacccacacataccagacaagaccttggtttttacggtctcacctcaaagaccctcacatactctactctataattaatttacctcagaaagggtgaaggttagtacagctgggattttaaaggaagttttaaattcttcaattacaacacatagacraactaagtatgttgtagtttacactcatttttaagccataatcataaaccttataaaagtaattataaatgtaattcaccttttttcttgcattgttttcattgctttccctcccttccttatttcttccctctctcttttcccctttttttctttctcctttctctttcttccttcactccctccttccttcccccttttctccttccctcctcccttccttcctttcttcttccttcccttcctcccttcttccttccctcctccctgtcttccctttcttgctttcttttcaattagacctcaatg

SEQ ID NO: 289194 - DNA, 490 bp, Homo sapiens
gttttgttttgtttcgttttgtttttttgagatggagtctcgatctgttgsccaagctggagtgcgttggcaaaatcccagctcactgcaacatctgcttcccgggttcaagcgattatcctgcctcagcctcccgagtagctggccaccacagccgccggccaccacgcccagctcatttttgtatttttagtagacacggggtttcaccatgttggccaggctggtctcaaactcctgatctcaagtgatctgcctgcctcagcctcccaaagtgctgggattacaggcataagccaccgcacccagccgaaagcaggttttgaagatgagaaaggacctataccagtcctgagtataggaccctgcttgggctgagggagaggcaagagcctgggtagccaagggacaagtgtgaggaccctgcatgagggcaggtagaagctagagaaggatgaggagaaagtctcagggtcctggtcttgtctgg

SEQ ID NO: 289195 - DNA, 569 bp, Homo sapiens
aggctactgtttgttatgtttatcttttgatataggctaaattttrcacacacacacacacacacactgtacccccaaattaatatgttgaagccctaaaccccaatgtggctgtatttggagacagggcttttaggaagtaaataagattaaatgaggtcataagagcagagtttgaattttataggattggtggccttgtaaaaagaaaaagagagatatgtctctctctctctttatctctctctctctctgtgtgtgtgtgtgtgtgtgtgtgtgtgtgtgtctccatgtatacacactaaggaagggccatgtaaggtcacagcaagaaggcaaccatctacaaaccagatagagagctttcatcagaacctgaccaaaattcctttgttattattattgcttaaataaatttctgctgtttaagccacctattatgtggtattttattaggcagcctgagctgactaatacatctttacttttccatatgtaatatttctgtttcacttttaagatttactctttattactaggttgcagcatttggtcgtgctgtgcttttg

SEQ ID NO: 289196 - DNA, 569 bp, Homo sapiens
aggctactgtttgttatgtttatcttttgatataggctaaattttacacacacacacacacacacactgtacccccaaattaatatgttgaagccctaaaccccaatgtggctgtatttggagacagggcttttaggaagtaaataagattaaatgaggtcataagagcagagtttgaattttataggattggtggccttgtaaaaagaaaaagagagataygtctctctctctctttatctctctctctctctgtgtgtgtgtgtgtgtgtgtgtgtgtgtgtgtctccatgtatacacactaaggaagggccatgtaaggtcacagcaagaaggcaaccatctacaaaccagatagagagctttcatcagaacctgaccaaaattcctttgttattattattgcttaaataaatttctgctgtttaagccacctattatgtggtattttattaggcagcctgagctgactaatacatctttacttttccatatgtaatatttctgtttcacttttaagatttactctttattactaggttgcagcatttggtcgtgctgtgcttttg

SEQ ID NO: 289197 - DNA, 553 bp, Homo sapiens
atattttatatacatatttactatattttgtgttcttcattcatttgtaatatccaagtttccaactgtataatcctttttttctgctgtctaaaggacttcttttcaaatttcttgtagtgccagttactggaaataaattttctcagcttttatgtacatataaagactttttcagagtgtcaccctgctgttttggctcacattttttaacgagaaggctactgtttgttatgtttatcttttgatataggctaaattttacacacacacacacacacacactgtacccccaaattaatatgttgaagccctaaaccccaatgtggctgtatttggagacagggcttttaggaagtaaataagattaaatgaggtcataagagcagagtttgaattttataggattggtggccttgtaaaaagaaaaagagagatatgtctctctctctctttatctctctctctctcygtgtgtgtgtgtgtgtgtgtgtgtgtgtgtgtctccatgtatacacactaaggaagggccatgtaaggtcacagcaagaag

SEQ ID NO: 289198 - DNA, 527 bp, Homo sapiens
attttgaaatggccctgcaaagccatttgcagggggaaaatctacattctgtagagaatccctttccctttccaggtcttttccctgatccaggagagattttaccaagagtctggcacatttttaagtctcataaaaaacatttataatctattctctctgaagcctgctacctgtagtcttcatctgcatgacaaaagccttggccctcaaacccttatcctaacccagacactcctttctgttgattccaggtcttcagataatagcttaactttttcaaccaattgccagtcagaaaatttttgaatccacctatgacctgtaagcatccccacttcaagttgtcccaccrttctggacccagccaatgtacgtcttacatgtgttgattaatatcttatgtctccctaaaacatataaaaccaagcttaagcccaatcaccttgggaacctactctcagaacctcctgggtctgtgtcacaggtcatggtcctcacatttgactcagaataaatctcttcaa

SEQ ID NO: 289199 - DNA, 563 bp, Homo sapiens
cactctttcatgatctatcactgtctcttgcaaagggtaaggattggctttttaaagagcagagatttcacagttagtacttccataaagcagtgtttaaactgccaaakatggcataaaaaataaattttcgtcctcctccaatgtctcaaattcatcaggattgtgtgctgtgggtggaagtggaggaggaagggaagggcggtggtgagggagagttgaaaggccaggagttctgaggttataaatatacagtacaataacccgaggtcacaaccaatgctgagacagcagcagcactccaggttgaggggcagacctcggaatgcttggagtttctgttcactcatgctttcttccctccccgccctcaaatctagccagcaatgaaatccttcaaaccacttacagttaggaaagctcaagacattccacaagttcctggttttgacatggttaaaaataacagaaaataaaaagggatctcacagaatttatagttctagagctgtggaatagaatcaagaaatatagaatgatgatggtatttagctcttacacag

SEQ ID NO: 289200 - DNA, 430 bp, Homo sapiens
ttttcatcctgcaaaatgttcttaatgtcttggttcctaaggaaaaagttttgggagtggagaggggaagatgttcagccttctcagtgctgaggctgggagaagggcagggttaaatgtgacccatcacctctcgctttggccagaacagacccctgtcagttagccacagggccaagagactgcayaaagctccacacctgcactcctcatgtccttatccccatggcagtataagccatatcacgtttcatgttccaactcatgttccaaaggagcagctctcaatttctagggagtcagggtaaagtagggcatttggcaccaatgacagatataattgtgtgtgtatgatactcttttactcattaacaacggcaacaggagctgctaaaaatcttacagaacaagattcatttttttaaaagag

SEQ ID NO: 289201 - DNA, 1014 bp, Homo sapiens
taaatcaaaagctagaaatgattaagcttggggaagaaggcacatagaaggatgaaacaggctaaaagctagacctcttatgctaaacggttagccaagttgtgaatgcaaagaaaaagttcttcaaggaaattaaaagtgctattccagtgaatgaacaaatgacaagaaagcaaaagaggcttcttgatgataagagagaaagtttgagtggtctggatagaagatcaagccagccacaacattcccttaagccaaagcctaatccagagccaggtccttaatctcttcaaatctattaaggctgacagaggtgaggaaacagcagaagaaaagtctgaagctggcagaggttcaatcatgagacttaaggaaakaagttgtctccataacataaaagagcaaggtgaagcagcaagtactaatggagaagctgcagcaagttatccagaacatctagctaagataattgatgaaggtagctacactaaagcacagattttcaatgtacaaaacaaccttttattggagggagatgwacagttgagacctactgctgagaaaagaagatttatttcaaaatattaatactcattggcaatgcacctggtcacccatgagctctgatagagatgtacaaggagattaatgttggttttgtgtctgctaacaaaacatctattccacagcccatggatcaaggagwaattttgactttcagtattgttatttaagaaatacattttgtaaggctagagctaccatagatagtgattcttctgatggatctgagcaaagtaaattgaaaatcttccataaaggatttaccattctagatgccattaagaatgttcatgatttatatgaggaggtcaaaacatcaatattaacaggagtttggaagaaattgattcccaccctcatggatgagtttgaggggtttaagatttcaacgaaagaagtcactgcagaagtgatggaaatagcacaagaactagcattagaagtggagcc

SEQ ID NO: 289202 - DNA, 609 bp, Homo sapiens
atttgcttgctatttttcattaagcataaatctaaagaacaatatgcactttcaaagtcttttgaatttgcttgactgtggatgagttggaattgtaaccccaggttccagtccagtacctgcaaaaaattagaccaaatgaaaaagaatttaggcagcagttgagaaaatatattaacaagaaccagtacactttagttgctggatttcactgcctttggccatattctgagtcatactgtgtcagtgagcataacaacttttgttcctttaacattggagtggattgttgggtattatataggctagtgaattattcatagaaatttgaattattcaaatatattcaacaaatttctcttattctgaagcaataaaatataaattaattaatactygacagttctattcaatgttttgtcaaggagctttctaatactataaaagtaaatttactaggccttgagtattctaaaatgctgttgtcactgctagctttaaacatgtaaggacatagaagcaacaaaattggccaaggacaaagagagaatgtgtcagcactgaaactgaagtcttggatccacatctgggtgttacattaccaaacag

SEQ ID NO: 289203 - DNA, 581 bp, Homo sapiens
taatggcaggatgggtttctcctgaggtctctctccttggcttgtagagcccactttcttgccgtgtcctcacatgactctttctctgggcatgtgcattcctagtgtctcttctccttcttataagggcatgagttctattggattagggccttacccttctgaccttattttagcttaattacttctttaaaggggtgtgtgtaaaacttttattttagattcaggaggtacatgtataggtttgttgcataggtatattgtgtgatgttgaggtttggaatataattsatccaataacccaggtagtgagcataggaaatttttcagcctaaagcccctatctttaaatatatcacatttaaaggtactggaagttagagcttcaatgtatgaatttggccgtgggggtggacacaattcagcccataacatgttgtgataacatagagttatcacaagtattttctatactttattcatatatttgctattccttgaagtttatggtttcttgattttgaaatagtgttgtcttcaatccttagctttcaatctccactttcaatttgtctagtgct

SEQ ID NO: 289204 - DNA, 585 bp, Homo sapiens
atgctttacaaacagctgttggctaccaaccctgaagtatggctagaaatcaaattattttctaaccaaggatgataaccatccaaaacaatatttattttcaggatactaactttagtacacatggtagtcccaacaaatcccaggcaatttatagcaaggcgtgtgaaaaggctgaaagttcttagctttaggcccccatttatttggaaccacttataggaacaacctagttacacccttgagacaaccctgactcaaaagaaagttttgcaaatgagagccatctcccaaaagcactcccaaggacagtccrgcctgaatatcaatcaggctcatttggagtcatcagatgcacttaagcagaagccagttgtcaagcactgtagtgcaggtatttttaaaagctgagcacagcagaggctcccccataaattctggctggcttcaagttgttgcctggagctatattgcagaacctctgatgtagtgccagaggggtcactggaggattgtgtatttactcgaaggtactctaaccctcttgtctctgcccataagtcatagcactgaaatgcatgtatt

SEQ ID NO: 289205 - DNA, 644 bp, Homo sapiens
ctacaacatctgcctatgcatccttggtgagaactctcatgtggcttttcctatttgcaaggatggctaggaaatatcatttttggtttttaatctaagcaaattatttttaatccaggcaacaaaatgacaaagtgagaaagaaagtaaaagatgaatgcagtggtgtgctccaaatgacttgtactggctgtgagagctgaaggtgayattttcagattctttgcaagcttatcatgaaacacattggtagcctgaaattggccatggtgggagtatttacgttgcaaaaattgtcaaacactgaaaattaaggccctgcccccttttgtggagaggcagttgttaaacttttaccagcacaccactgaatattggataggcaaatgggagtccctgctactgaaggctttttttttttttgtcttactatgtttgtcacttatttctgactttactggttgagacttattaacacataggtaggtaatcttttgaaatacttgttgttttaataatcctcctgtctttattctattgagttttattctttctgcagagaatgtacaagttgtttcttggtaataagttagaagagtcataaaatattgtgaatttctgttctagacatttaaaaggtttta

SEQ ID NO: 289206 - DNA, 511 bp, Homo sapiens
ttgtataatatatcatattagccaggcattgtcatatgtgctgttgtcccatctactaaggaggctgaagcaagagaatcttcctccaggcttgagcctggtagttcaagtccagcctgtgcaacatagcaagacccccatctctaaaaaataaaatgaaattacrtaatcaggaaaaacaggaaaacattcacttttactcaatattttattaaatatcataagccagtacaaagagtcaagagaaaaactaatagatacaaagattggaaaggaaggaacaaaaactatcatttttcatagatgttatgtatacatagaaaacccaaaagaatctgtagaaaaaatattggaattatgagtttggcaaagtggttgggcaaaagatgaattcataaaaatcaattcatttatatacaccagccacaaagagcaaacggcctctaaatatccatttgcaattgcaacaacaaaaaaatgtacttcagagcaatctcacaaaaaatatgca

SEQ ID NO: 289207 - DNA, 586 bp, Homo sapiens
attgtgaattgccttaattagagaaactgtagtttgttttgtctttaaactttgttcctagctttcatattggaagatacccttgcatatttctccacatgagaacttatgtctgagagagtctcttctggttattttattaccgttgatcttytaacaatgtgggagttaagcgtgccagccccctgtgcagtcaaaaatctgcacataacttttgactcccccaaacttaactactaatatcctactgttgaccagaaaccttaaagccttactgataacataaaccattgattcatatgtttttatgttatacatattttatatatatgttatatatatctatatatatagctaaagaaaagaaaatgttattaagaaaatcataaagaagagaaaatatatttactattcattaagtggaagtggatcatcataaaggctttatcctcatcatttcccatggattaggctgaggaggaagaagagggttggtcttgctgtgtttcagagaagacagaggaagaagaaaatttctgtataagcagacccacatagttcaaacccatgttcaaggtgacactgt

SEQ ID NO: 289208 - DNA, 557 bp, Homo sapiens
tcatggtcataaagaagggaacaacagacactgggttctacttgagggtggagggtgggaggaggcagatgatcagaaaaaaaataactattgagtagtaggcttagcacttgggggatgaaataatctatacaacaagcacaagtttacttacataacaaacctgcacatgaactcctgaacctaaaataaaaggtttttaaaaaagaaatgacaggttacaagggaaaagaccaccaaagaaaggactacgtctcccctaatagctcccagtttccaagccccatcaatgaatattgagttccaattcactttgtagttcctcactcttaaatatgagttgacacccaatgatcactaacatttgaagaaagtctctaatacaaaagacagacaaaatgaagaaaaacaattgtggaaatagaraacgaaaggagcagcagaaaactaagaaaagtaataactcagaaatataacacattacatccataaaacgagaacatgcacatgtatacagatgttcctctacttatgaaggggttatgtcccaataaact

SEQ ID NO: 289209 - DNA, 511 bp, Homo sapiens
aaacaaaaaaatgaaaaacccaaaaagttgcacaagaaaggaaatatgatcatacaataccatagagctcagtggtcaatgaatagtagttatatagtcatgataaaaccactaaaaattgattkaactccaaacgttgaggaagggaaaaagaggggaagtgtgtagttgtacgtatgtgtgtatgcatggatgatgtgggttgaattgtaaaagatctaagtcctccattgtaagaaatcaatggataatatctttaactgaaaaattttgaaagagcatcacttattaggacatagacacacaccaaaacaaatatctaagagcattgaaagttgctgccttggggtaataggaattgggagtggagatggataggacaggtaaaaattaacatttgacaaaagagtgaatactatgagtattagtcagaatattttagtcacttcagttactttaaacttcttcaaatcaacattcaatactaaaaggaggtggaagagtgcttgta

SEQ ID NO: 289210 - DNA, 579 bp, Homo sapiens
tattatcctttccttaaaagctaattggcaaacaaaatataaaaagatatataataatgcaggtcagtgtatgctgtgttccaaatatgtgatccagacaaaagtggttctgcaatttgaagacgagaaaaatcacagaggacaggagcaattaggaaaagcttgcagagataagacatgaatggaccttggagaatatgaaaggagagaaaagggcatcctggggggaaaatgcaatgaacagagactagaaacaaaaaagatgcgtggtctaaatataatttgttatcctagataggaycctgaaacagcgaaaggactgtagtatgaaaactgatgtttagtcaaaagtaatataccgacattgttttcttaactttcacaaatgtagcatgataatgtaagatgttaactttaggggaaactggataaagagtagacatataggaactctctgtaccaacttcatatttttttctgtacatctaaaaattattccaaattaaagtttatctttaaaactgtgcatggtaagttcatgaactagtgagtaaacaaatacagccaaagctcagaatt

SEQ ID NO: 289211 - DNA, 595 bp, Homo sapiens
tggctattattcgttatgaaaagctaacaaatataataacattataacatattaatatattttaacaaaattatgttaatatatttaataaaaggcataaaatacctaagaagtaatgagatttgggtatttattacttttatttttaatctgatgtatttaactgtaagtttctaagtttcaataatttaaattttatttgaggctgtgcttaactactgactcataaaatttatgaaaattttacagtctgttcaygggagctggcatgaatcacctccagcatactgttgagaatatctctgaaatttgttagctcatccacatactgtgaatatctttgtttttaacaatgaaagcctatttctaaaaactcgtcagaacagttgagagactactatttttacatacatgaaaaagacactcattgttctatgtaacagaatgaaaagtgctgattgagatactgattggagaagcactcatcatttcctttgaattgtggttctttcagataaaatgctagctgaccatcttgagctgtgcactttttaaaatttgactcataaagacttcagtatttatctcaaaaaga

SEQ ID NO: 289212 - DNA, 571 bp, Homo sapiens
ttattctctctactcttgggaaagttcctgaataaaaaatacagaggtagccgtcactcacctctataaattggcattgaacagggtaggtaaaacacaggaagcaaagctrtgtaagaaggaatacttagagctaattacaagcaaaatttattctttgtctgcctaatgccagagtattctatcaattcagtttaaaaacaaaactaaactaacacaacttaaaacaccttcttacattcttcctttagagggggtccagaaaaacaacatagcttcaagtatattcttaatgtatatgtgtccacactgaaaactcttttgaaattctaagaaaactttggagacacttaaaccatgacacattttccagggagtatttcaggaattctttaaaaaaaatattttgataagatgtaaaatcaaacatgtcttctcccaaatgacccagaaacttttacccaactattgcccagttgtgattctattcattactgagacacaattctgaagatttaattttacctcattgggaacatgcacttttagaagacaattaaaaaggacacaa

SEQ ID NO: 289213 - DNA, 545 bp, Homo sapiens
aaactcttttgaaattctaagaaaactttggagacacttaaaccatgacacattttccagggagtatttcaggaattctttaaaaaaaatattttgataagatgtaaaatcaaacatgtcttctcccaaatgacccagaaacttttacccaactattgcccagytgtgattctattcattactgagacacaattctgaagatttaattttacctcattgggaacatgcacttttagaagacaattaaaaaggacacaaaactttggagcctaaatcacagaagaaacaagagctacactacttaaggaaagggggaagaagaaaggctacttctgtttgtgatgcattaacataaatggctgaacttgaattactagcaaactgctaatatattagtaaccaaaaattacttctaagtaaaagtcaaattatgtaaatatttgttttatatgtcaatataaaatacccaataaaaacacccaaatatgggttattaattttaaaatgagtgagacctgtgcaaaatttcactcatccttgttctg

SEQ ID NO: 289214 - DNA, 545 bp, Homo sapiens
aaactcttttgaaattctaagaaaactttggagacacttaaaccatgacacattttccagggagtatttcaggaattctttaaaaaaaatattttgataagatgtaaaatcaaacatgtcttctcccaaatgacccagaaacttttacccaactattgcccagttgtgattctattcattactgagacacaattctgaagatttaattttacctcattgggaacatgcacttttagaagacaattaaaaaggacacaaaactttggagcctaaatcacagaagaaacaagagctacactacttaaggaaagggggaagaagaaaggctacttctgtttgtgatgcattaacataaatggctgaacttgaattactagcaaactgctaatatattagtaaccaaaaattacttctaagtaaaagtcaaattatgtaartatttgttttatatgtcaatataaaatacccaataaaaacacccaaatatgggttattaattttaaaatgagtgagacctgtgcaaaatttcactcatccttgttctg

SEQ ID NO: 289215 - DNA, 566 bp, Homo sapiens
aaataataaaatgatgttcttcactttgctagcatttcatattttcaatacaaataagttctggcattattcraaacagagaaagaaaactagaagcgtagtcaagtaaattatggtaataaacttgatggcatattatgcaggtataagattatatttatgcatgataaggattaatatgcagaaaaaaattataatactaattggaagatactaactttgtatctaccgcattaaagcatcatgaatattttaatgtttatgtaaggttgacgagatttctattgttttctatcttcctttttagatatgtagttatggattataatgtgtaatgtaaaccaaaagaaaacatatattatttgagctaatgggttacctaataacatttgtttaaatatattttaacctaatccacattttctcaataagttggagtagcattttaaaaaataaatatgattagtttaaaatctttttctaatgaagccgtgttacatttaaatttagtgggcatttttatggcctacaatagcatatgaagtttttatttacatgaagaaaag

SEQ ID NO: 289216 - DNA, 566 bp, Homo sapiens
aaataataaaatgatgttcttcactttgctagcatttcatattttcaatacaaataagttctggcattattcgaaacagagaaagaaaactagamgcgtagtcaagtaaattatggtaataaacttgatggcatattatgcaggtataagattatatttatgcatgataaggattaatatgcagaaaaaaattataatactaattggaagatactaactttgtatctaccgcattaaagcatcatgaatattttaatgtttatgtaaggttgacgagatttctattgttttctatcttcctttttagatatgtagttatggattataatgtgtaatgtaaaccaaaagaaaacatatattatttgagctaatgggttacctaataacatttgtttaaatatattttaacctaatccacattttctcaataagttggagtagcattttaaaaaataaatatgattagtttaaaatctttttctaatgaagccgtgttacatttaaatttagtgggcatttttatggcctacaatagcatatgaagtttttatttacatgaagaaaag

SEQ ID NO: 289217 - DNA, 545 bp, Homo sapiens
taccaatacaaaatcattctgtatgaaaaatatttttgtaataatgctactttaatggtcattcataagcatgtaattacacttttcggtaacacctaggatatccagaaaagttagtcactcaattacatcttttctgccatacattaattatataatatatatttattttatattttcaaatatctaacatgatagtatttacatttccctcatattaatcaccccattatyttactcaatttaaatatttctaaaattaatattactattgaaaaataatatatcttcttttctggaggtatattaactctttcatgcaatgacgggcatatgaaaattttcttttctcataaaacttctaatagaaaaatgtgatctaattatatattttggaaaacaatcatattgctataaattataactgctgctctgggaacaatgtaaagagaaatctaattgtttatgacagtgttaaactcttataataagaaaaagtacataatcggttaatggttcatgatttctcaattataacttaataa

SEQ ID NO: 289218 - DNA, 545 bp, Homo sapiens
taccaatacaaaatcattctgtatgaaaaatatttttgtaataatgctactttaatggtcattcataagcatgtaattacacttttcggtaacacctaggatatccagaaaagttagtcactcaattacatcttttctgccatacattaattatataatatatatttattttatattttcaaatatctaacatgatagtatttacatttccctcatattaatcaccccattatcttactcaatttaaatatttctaaaattaatattactattgaaaaataatatatcttcttttctggaggtatattaactctttcatgcaatgacgggcatatgaaaattttcttttctcataaaacttctmatagaaaaatgtgatctaattatatattttggaaaacaatcatattgctataaattataactgctgctctgggaacaatgtaaagagaaatctaattgtttatgacagtgttaaactcttataataagaaaaagtacataatcggttaatggttcatgatttctcaattataacttaataa

SEQ ID NO: 289219 - DNA, 621 bp, Homo sapiens
tgtcagaggaaatccactgtgaccaggaccccgctggattagtttcttagggatgctgcagcagagtaccacgaaaaggagccttgaaacaacagacatttattctctcacagctctggagcctaaaagtccaaaatcaagttgccagcagggccttgctcccctctgaaggcttaggggagatgattccttgcctctcccagcttctaatggtccagtctttccttgcctttggcagtctacctccagcctttgtctccttcttcctgtggccttcgtccctgtgcatatgtgtctgtgctctctcccctaaggacaccgtgagccactggatttaaggcccaccgtaaatccaggattatttcatctggaaatccttaactaattacatctgtaaatacctcacttccaaataaagtcacattctgaggttctgagtgaacataaattttgggggacrctattcaaccccctgcacaccctcagacataaggaagagatgcaggcccttactctgtctcccactcttcaaacagcttcacagatcacaaacacaaaaatatgtccacacatgccaggggcacaaacaaaaatgtgtatgtattaaagaacgcatgagca

SEQ ID NO: 289220 - DNA, 596 bp, Homo sapiens
gcatggtacagttttttagttccttagaagttgtgtcagtcttgtcactgaaagtcccatgtcccagaaaaccctttcatctcagctgggctggttggtaaccctatccactaagcataaatgaaagattcaggaaaaaaaaaaaaaacctgtgactaactgtggaaacattaaataattataatgttttcaatatttttatatttaaatggaaaaactaaaggtcatcatcaagtgaattaaaatatgacagagaaacctaatcagtatgtactatttacagagatctattacacatgaaatatataaacaagaggaagacaaaggcatggttaatataaaccatcgaaaaagatggagtactggtttatactaatctcaraattctgtcctctcctctatttattctacttctctactagccaatgcgaacagtgagaatgaagagatgattatcctccaggctcccctggccagaataaaaataactaaattacctatactcttgggtcatgcacacattatcctgcatctaaacaatttgccttttgatttttcttctactgccttaatcttagtgttgtattgctgtgagc

SEQ ID NO: 289221 - DNA, 629 bp, Homo sapiens
tattaaggctcggggagcaccagtagatgcagagggaaaagaaaccttcgcctaaaggtcaagtgcagcaacacagctcagtgagaccagtgaggagctgaggactgaaaatgtctcagggacctctcactcctgccaccataatgatttctagaaatctcattgcttagaaactacttgggaagaaaggagaaggtgaagggatgggagataaccaagaaagcatgtgcacttaaatagaccaagttaatctgcagaaggctaagcttgaaacagaagtagagtatgttacttagaatgggtctttttttccattactgttcaaagaaataggggcttataattagatttcatttcctaatgtaattacatcttaaattatatctgatttatggtgtgtaaattttaaagccactttaaatacagatacttgatttaagaaagtgacatgtacaaagtcagatgagggtttgagaggggagagctcacttatagttgggagcttaaaaggcgacatttgaacaaagccataaaggatgtgtatgatttttaacrggagagaaaaggaagagtgaagaagggtattttagaggcatgatgctggagtagaggaacaggggcagcaaggg

SEQ ID NO: 289222 - DNA, 586 bp, Homo sapiens
agctcacagcaatacaacactaagattaaggcagtagaagaaaaatcaaaaggcaaattgttgagatgcaggataatgtgtgcatgacccaagagtataggtaatttagttattcttattctggccaggggagcctggaggataatcatctcttcattctcactgttcgcattggctagtagagaagtagaataaatagaggagaggacagaattctgagattagtataaaccagtactccatcttcttcgatggtttatattaaccatgcctttgtcttcctcttgtttatatatttcatgtgtaatagatctctgtaaatagtacatactgattaggtttctctgtcatattttaattcacttgatgatgacctttagtttttccatttaaatataaaaatattgaaaacattataattatttaatgtttccacagttagtcacaggttttttttttttttcctgaatctttcatttatgcttagkggatagggttaccaaccagcccacctgaaatgaaagggttttctgggacatgggactttcagtgacaagactgacacaacttttaaggaactaaaaaa

SEQ ID NO: 289223 - DNA, 576 bp, Homo sapiens
tgtaacagtacgttgttagccttggggttctggccaagttccaatttgagcaattaattttatttcagtgctcagccctccctgaagtttcagacaggaaaggtgcgttctttgtcttcctcagcaagtcactcctgatggtgaagcagctgttgctgccttcccagaggagagaaggttgagaattggtgagaaagcttcctggctctttgagggagctgcttgcagagtgatctgggacaaaaggcatccttgggaatgtgaggctttttttctttttttttttttttttaactacagcagtctccaagccatccatcactcctcttttgaaccactggcttagcacagaacaaaatgggaagtgattgtgttttcttgaagagctgtttctgaatgtgatggcttcctttgaagcccagtcaaagggatgtttttattttgtttttgttttcctgaaatcccaycagtttccctcacctcctacaagacctcacaccacagcctaccatcatgcctgatacctaagtagctgccttcacagctaacaaaagacaaagaaaacacagatgcaga

SEQ ID NO: 289224 - DNA, 606 bp, Homo sapiens
cacccaaattcacttggagaggttccctgtgacatgctctaacaagtcagaaattcrgtaagtgtagttatatcctgcaagtgattttgaaaaggtgtagagaataaccctttctagatgcatactctatgttttacttggcccagacaacagtgtttgatggaatgataattggatgttgatgaaaaacatcaatcatcattgcattgtgacttgagttatatttgtttaatgttaaactttcagttgtgaaataaaccattccggctggggaacagatgattttgtttctaaaacttcattctttcacttattaggcaagagtgagtcattccttataacaactgggcttattgaaaattccagaattactcacacaggtttgaagcatttttcatgtaaagaaaacatccttttttttttttggttgctgactgtaactatcctttctaaagctcatggttctggtacagccctattgctaatactgttattgtccaggcatgctttatgtatatttgtattcttccaaaacaggtcatctatactgttctgggatcaactacctttgtattcatttcttagtggccaatgtcagcctcacaa

SEQ ID NO: 289225 - DNA, 606 bp, Homo sapiens
cacccaaattcacttggagaggttccctgtgacatgctctaacaagtcagaaattcagtaagtgtagttatatcctgcaagtgattttgaaaaggtgtagagaataaccctttctagatgcatactctatgttttacttggcccagacaacagtgtttgatggaatgataattggatgttgatgaaaaacatcaatcatcattgcattgtgacttgagttatatttgtttaatgttaaactttcagttgtgaaataaaccattccggctggggaacagatgattttgtttctaaaacttcattctttcacttattaggcaagagtgagtcattccttataacaactgggcttattgaaaattccagaattactcacacaggtttgaagcatttttcatgtaaagaaaacatccttttttttttttggttgctgactgtaactatcctttctaaagctcatggttctggtacagccctattgctaatactsttattgtccaggcatgctttatgtatatttgtattcttccaaaacaggtcatctatactgttctgggatcaactacctttgtattcatttcttagtggccaatgtcagcctcacaa

SEQ ID NO: 289226 - DNA, 633 bp, Homo sapiens
tgtttagagaaaacagctcacagattcatttctttatttaggtatgtaccgagaaacattttgaatggtcaaactaagactttatttacatagttatataattttctttcatcttgggatttcaaagagctttgtgatgttgcgtttygagttgattaagcctcacagcttcactaaacactgtattataatattacagatgaacagaagaggcagaatttcagtttcttgggtggattttctttatgtttgaaattagctaatgaagaatgcatgatgctacatataaagattttcgtttttttttctaagatacagtttttgctttgggataattttagatttagaaaatgttgcaaaaatagtacatagttttaatacattttacccagtttctcctaatgttaacaccttatagaattgtgcataattcctcatttatttaattttttgggtgcattactactaaatgggtacattactactaaatatgctactgactttatttggatttcaccagtttttccattaatgtcttttttgtgttctgggatccaacccaggatttcaccttgcatttagtcctcacatcttctcagtcaccttgggtctgtgacagtgtctgagactttc

SEQ ID NO: 289227 - DNA, 469 bp, Homo sapiens
tttgaacttctgtctgacaacaaatcctgtgtttttaacatgatactagtataaatgtcacaagatgtgttcaaagaaaatgctgtatatgtctaaaggagatagctagcacgtccaactgaagtgttaggaatctgatatcaagaaagaagaaactgacccagcttttggcaggttgtatttaaataatttaactcaacaaatattcatgtgagcacctaccttgtcaaaatacagcagtgggctaaacctataacagcttgttracttcaaatttgagttggaaatgagtaagtaagcaatttaggcaaaaggctctagatggaaagataccaaaagaacagggatgtggtgttggagaagagatctggaatagtagtcaacttggacttgtgggatgcactatgcaaacaattagggagaaaaggaattggaaaatactgggtactcctacattatggaggcatct

SEQ ID NO: 289228 - DNA, 532 bp, Homo sapiens
gaagagccttcttaggaaaggactatgctaaatagacataaaatgcttgtagagtaattcaaagaattcaaacttttcaataggacctacccctgaggatttcttttctaagctcaaattcttcttaaggactttcctggatgatactgacagtcttcagtggacagcccaagctaccagtcttttaggtggatttagccaccattattaacattaaggccaatggtctatacgaatttcctacttaatgtgtgataatgaaggtcttggttttttctaaaagctcaraattgattttgggttcaaatttctaaaccagactactttgcttttttcccttcccctccttcaatatttcatttcttaaaaaattcttcccatgtacccccagagacaagttctttgcaggaccatgtgctgtggcatttatgatgaagaatatgcactcctacaattgtatacagacgaggttatcttgaactttgggccatgtttcaagacacacatgtttatttagacatcgggcttatct

SEQ ID NO: 289229 - DNA, 591 bp, Homo sapiens
cccactgagttctaccatatttaactgtatctatatcacagtatttagaattttattatgttaatactgcactcaagtcataattatatcatagttgaggacaaaaactatattttataataatttatgtatttttataatatataaaaaactatattttatgataattattttttaatctttataatgcttaccacattgtaagaacatagtgatcattaaacagttgatcaattggttgacataactgattacactgtagttcttcataaacacatttacatactgaaaagccacaggttattttgatcagtgcctcagtggaaaggcttatatgaaagaaagaaacactggctaagatgaagagggaagaatttctasacatggagaatagaatacaatggcttaaaaataagctaactggaggcacagtgaggtaagcggagtaggaattaggtgccttttgggtagaataaaggatataagctagaatgtagcccagagggctatctatagttttgagaaacagtagaaggtgctgagccacaaaattaaagtagggacttaatatgagggaagagccactgcatg

SEQ ID NO: 289230 - DNA, 1147 bp, Homo sapiens
cccactgagttctaccatatttaactgtatctatatcacagtatttagaattttattatgttaatactgcactcaagtcataattatatcatagttgaggacaaaaactatattttataataatttatgtatttttataatatataaaaaactatattttatgataattattttttaatctttataatgcttaccacattgtaagaacatagtgatcattaaacagttgatcaattggttgacataactgattacactgtagttcttcataaacacatttacatactgaaaagccacaggttattttgatcagtgcctcagtggaaaggcttatatgaaagaaagaaacactggctaagatgaagagggaagaatttctacacatggagaatagaatacaatggcttaaaaataagctaactggaggsacagtgaggtaagcggagtaggaattaggtgccttttgggtagaataaaggatataagctagaatgtagcccagagggctatctatagttttgagaaacagtagaaggtgctgagccacaaaattaaagtagggacttaatatgagggaagagccactgcatgwtgccaacagtaatcatacatttgataaacgacatttgggcactaggcactgacaggagaggtctctcttgtatattataaaacacactcgaaactctttacactgtagccagttaatattgtttatgataaaaatatgatggtgatagtaatgacaaggctgatggcatttattccattcaagaagtgaccgcaataattaattaaggtaagaataagtaatactaatacaaagaaaggcwctatatcaaaagctgtttcaaagcccaaaggagtccccattttaacagttaatgtggttaaaataatttgttcaaaataaatagtgccatccaacaagagctcttcaagttcacaaagcatttacttttcttggatgcatcggttatttgtttcttttgatctaacatgagttcattttctattaccatgtagtctttcccatttcaaatatcctacaccggttggttaaaaaaaacattaataataaaaataaaaatataagccacctttcaagaaacatttacacgttactgaaaccatgtactgaaaatgg

SEQ ID NO: 289231 - DNA, 634 bp, Homo sapiens
ttaataaagctactaacaaaaagcactgccaacarttggaaggaataatatatctcactagcataagtgccactgttttaaaaaataaaaagattagaatcaataaaatagaaaataacataatagtattttgaatatgtttaacttatattattgttattgttactattagtttatcaagagaggccacagtataactgctaacaggtgactggacatttgcgtttggatgttaaaagtgatctccatatttgaaaaggttggtcgttcttgcctttaccagaagggctttccaacagtaaaatggaccctctcaaaagagaactttcattcagttttccacagcgtttatgactgactattctccatgaaatatgtacttggcttcgctggctgcagcagggctggagcactgaggctggactggcacctgtgccagaatgttctggaattgaacaggtgggtggtgactgtttgcccagtcaaggaagtgacaaagaactgaaagtgcagtcaggcacaagagcctctgggaagtgccaaatcaaattcccagacacctgtgcaaatatgctgtcaattaaaagttgctgggcaggaagagaaggttcaagtgtaaactcaaagagatgca

SEQ ID NO: 289232 - DNA, 634 bp, Homo sapiens
ttaataaagctactaacaaaaagcactgccaacaattggaaggaataatatatctcactagcataagtgccactgttttaaaaaataaaaagattagaatcaataaaatagaaaataacataatagtattttgaatatgtttaacttatattattgttattgttactattagtttatcaagagaggccacagtataactgctaacaggtgactggacatttgcgtttggatgttaaaagtgatctycatatttgaaaaggttggtcgttcttgcctttaccagaagggctttccaacagtaaaatggaccctctcaaaagagaactttcattcagttttccacagcgtttatgactgactattctccatgaaatatgtacttggcttcgctggctgcagcagggctggagcactgaggctggactggcacctgtgccagaatgttctggaattgaacaggtgggtggtgactgtttgcccagtcaaggaagtgacaaagaactgaaagtgcagtcaggcacaagagcctctgggaagtgccaaatcaaattcccagacacctgtgcaaatatgctgtcaattaaaagttgctgggcaggaagagaaggttcaagtgtaaactcaaagagatgca

SEQ ID NO: 289233 - DNA, 1168 bp, Homo sapiens
agttgctgggcaggaagagaaggttcaagtgtaaactcaaagagatgcagcttgggggacctagcggagataaagttgaaagtaaaggctatgatgagtggcatggaattatctctgccctaatgagcgagcaattgcttcaactgtttagtggaggtcagagcatataaaatctaaactggcatgtgagcagtgtgtatattgtggtccaatcatgccatttttaatgtagacttctgatatcttctacttgagtgtcagcactttatgtacaaaagtaaattctgacttaaatttatattctacatyatgtctagaagaatgtcttgcacatattaggtgctcaagagatatctgctaatcattagcactgttcagcatcagaacaggcagccttctttgacggtaaacattacatccctggaggtatttaagcaacgtctcattaacaagtgtgtactgcaaattagaaaaggtttaataaaacatctgttattgaagccatagaaaaattgaacttgaggacatccaaaattgatttcaatccaagaatcaaagattccatattctwttagagaatcagataatccctttactaaatggcatcatcaaaaatgttactttttccctcaaaatcaaaatataaacattgggggagaatctatcttaaataaaagcaagaaattaatcataaaaagaatttgcttgaaagtgtcataattttgcaacggttttacttttcttccatatgtgtaagggagaaaaatgtgcatgtataaacataggctgttttaccttcaagtgactccaagaaagagtcatttttcaaaacagagtatttatatgtaaaacctgcataatagtagtaatgactgttttttgtttagtttttaaaaagcagcccacctaaatgaattcctacctgccagacagaattggagttagctaaagaaaaagaatacagggacaggatggggcgctaactaaaatgccttttccaaattctcaaaatgcaactacatggactattcaaattaagcattgaatataaggttcagaggaaaawtctgttacagaagcagtagacaaagagacaagaagtgataccaactgcttcccttctttttgtacattttccaccttgaatcccaaagaacaacgttccaaa

SEQ ID NO: 289234 - DNA, 555 bp, Homo sapiens
tgattttctttttaaataaatagaggcaggatctcaccatgttgcccaggctgatctcaaactcctgggcttaggcagttctctcacctcagcctcccaaagtgctggaattacaggtgtgagccactgcaatcggccagcattgatattttcatgagtccttttttttttttctgttgcttttcccatttggggtatattatttaactggacggcacacattttaraaattgtctaaatgtgagttaggatttccatattttcaggctaaaagctgtatgtacacatatgcactcataatatgtcacttgctgctacctatcctgcactgtgtaaaatctgtgtaaaaatcttaaaacaaagggtcttttctcaatttaagaaaaggaaaaaattctttctatctctacaatagtaagtatgtgagacaggaaggaaaatttatatttatctacctctttcttcaaagaaaaatgtttaaataaatgaatagcagaaggagatatgacataaaaccccaaatatcaagacactcacaaagagagaaggaagaca

SEQ ID NO: 289235 - DNA, 573 bp, Homo sapiens
taaaaatatgtgccaatcctatacctgaaagtgaaaggacagtgtctatcatcattaaaacacacaaaaataaaaaccactggtagaatgaacacataaagaaagataaaagactcaaagattaccactacaggaaacaaccaactcacaatggaaaacaaaaagaaagaaaggaacaaataatatacaaaacaaccagaagctaactaataaaatgacagaaataaaccctcacacatcaataattaccttgaatataaattgattaaattttccatgtaaagaatatagattgacagaaaggattaaaaaatgacccaattatacactgtgtatgaataagaagctcatcttatccgtaaagacacaaactgaaagtaaagggatggaaacagatattccatgtaaatggaacaagaaaaaagcaggagyagctatatttatatcagataaaagagacttttaaatcaaaaacagcaaaagagacaaaaacgtttatgtataatgatatataatgataaagtgatcacttcagcaagaggatataacagttctaaatatacctgacaccag

SEQ ID NO: 289236 - DNA, 573 bp, Homo sapiens
taaaaatatgtgccaatcctatacctgaaagtgaaaggacagtgtctatcatcattaaaacacacaaaaataaaaaccactggtagaatgaacacataaagaaagataaaagactcaaagattaccactacaggaaacaaccaactcacaatggaaaacaaaaagaaagaaaggaacaaataatatacaaaacaaccagaagctaactaataaaatgacagaaataaaccctcacacatcaataattaccttgaatataaattgattaaattttccatgtaaagaatatagattgacagaaaggattaaaaaatgacccaattatacactgtgtatgaataagaagctcatcttatccgtaaagacacaaactgaaagtaaagggatggaaacagatattccatgtaaatggaacaagaaaaaagcaggagtagctatatttatatcagataaaagagacttttaaatcaaaaacagcaaaagagacaaaaasgtttatgtataatgatatataatgataaagtgatcacttcagcaagaggatataacagttctaaatatacctgacaccag

SEQ ID NO: 289237 - DNA, 463 bp, Homo sapiens
tctgacctggggttcctgggctcacggatgccaaggaatggaatcttgggccaggtggtgagtgttacagctctattagaarccgtgggtcacggaagagaatggtggaacccagtgactagtgttcagctcgattaggatgaacccaggcacttagccatgtgggaacaatggcaagcctttagcccaattgggagtggcaatgggcaccttgctggatcaggagcacagcagacaccctgccagatccggaagaatggaagtcagcggcgggtctgcgatggcagtgaaacagcagtggtggacagcaagccaagctctgctcaaaccgtaacaaacatggaccagaagattgcagttgcaagatttaatagagtgaaatagagtgaaaacagagctcccatacaaggggaggggacccaaagggggttgccattgctggctcgaatgcctgggtttatat

SEQ ID NO: 289238 - DNA, 594 bp, Homo sapiens
acatcctccaggctcatccatgttatcacaaatgacagaatttcattctttatttatggctgaataatattccattgtgtgtttcttcatattcatgtttactttatccattcatttattgatggacatttaggctgatttcaaatcttggctattgtgcatagtgctgcaataaacatggaagtgcagatatctcttcaatattccgatttcccttctttttaayatgtatacccagtagtgggattgctggatcatatggtagttttatttttagtttattgaggaacctccattttcttttctataatgggtgtgctaatttacattcccattaacagtgtatatgggttcctttttccccatgtctttgcaaacatttatcgttttacttttaggtagtagccatttttaccagtagaacataatatctcattgtggttttgatttgcatttccctgattattagtgatgttgaacattttttcatgtatctattgtctatttgtatgtattcttttgagaaatatctagttaggtcatttttaaattggattattggtgggatttgttttgctattgagttgttcaagt

SEQ ID NO: 289239 - DNA, 637 bp, Homo sapiens
atttaagcctctaattcattttgatttgatttttgtgtatggtgagatataggtcctagtttcattcttctgcatatgaatatccaatattccaattagcatttattgaagaaactgcccttccccartgtacatctcatgcttttcaatgacattttatatttaatttctatgagtatttcacagttctcgtgaggcatgttgcaaagtactaaagaatgatctgtgtgctacagtgtctctttctccttagatgctggttttctcatttgttgatatttgcacctcattttatggcgtgtgtttcctcccaactattagatggattttgattgtttgctcatcttttcatttatctctgtgtgaatattgcttctatttgttttatactccccgtggtgattgtaggggagagaagtgatattctactaggtgagataattggattatttcatattagacatctgttctactactaaaagtgtttatttggacatacatttaaattttttctacatatttcttaatagtatagctttatttccctttccaatgtttcctttattctcaatattgaagcaaatataatacaaaaattacttttcattttctttaatgctcttataagtactgtaca

SEQ ID NO: 289240 - DNA, 540 bp, Homo sapiens
ttatattctcccaacaaggtacgagggttctaagttcttcatgtccttgttattgacaactttttgattttatccatctgagtgcacgtgaggtgatacttcattgtggttctaattttcatttccctaatgactaatgatattgagcatgtgtctatatgcttattgtatatcatgctatacattctttatagtatattgtgcttatgtgtataacttggacaacagccttcaaataattttcccattttaaaaaaatcaataaactttattttttasagcagtttcagatttatagcaaaattgtactgtaagtacagagagttcccatacttaccataatctccccaacatcccacatcagagtggtatatttgtgacatttttcacaatcaatgaacctatattgacacatcatcatctaaatccataggttactttagagttcatgcttggtgtttcacatcctataattattgacacatgtataatgacatgtgttcaccatagcagtgtatactaactacatgatagtttaac

SEQ ID NO: 289241 - DNA, 1452 bp, Homo sapiens
tgtaaatatttataattttatgagattatatctgcctctttagtcgaacatgttatgtattattttgctgttaatttatttgaacagctaccacaatgatgctaatctgtagcagaattttaattaatgttatttagctgaayggttttgaatacaaaaggatgttgcagtccagtgcaatgtgaaatgcaggacagaagaagagtattattactttttgaatatcaactatattctagatactgtattagtgattacacatctttcctttgaccctcaacataatattgcagggtttgtatttatgttaccatttgacaggtaaagacttgggctcaaaatgaaatattaaacaactcaatcaaggtcaactttaatgctaattggttgagtcagaattwttaagtggtttggatctattccagtatcaaattaactcttgtaacctatagtcttttccattattaccaataaacaacatatttctagccctggatattagaatttggatgcatccaattcttttgaattacctattttgagaaattagaccagggaatgcctctatgctcataaactaatcatacacccatgtcaaggggtccagwgttgttgaaggtaacaaggacctcagagtgaaagcaaccttgcttagaattctagttctgatgcttactggctgtaggacttctcatgcctagtttttgtttgtttgtttgtttttccctgaaatctagtttttttttccagtgtaaattgtaattccatcattaacacaaaaaattcttattaacccatgattatatatcagacaccatactaaactctgaggttcattagttaaagcctctatgtacatagaattagcattaaaagaagaatcaaataataaatgggaaaatgatttagtttattgagaaaaaggagtgtttctatccccacaaatatattaaggctgagacttcaaagcatgaataaagataatcaggagtgggagtttgagactctgaaggaatacaagtgcaagggtttagaggtttgagaaggaatawtgtaaatatttataattttatgagattatatctgcctctttagtcgaacatgttatgtattattttgctgttaatttatttgaacagctaccacaatgatgctaatctgtagcagaattttaattaatgttatttagctgaatggttttgaatacaaaaggatgttgcagtccagtgcaatgtgaaatgcaggacagaagaagagtattattactttttgaatatcaactatattctagatactgtattagtgattacacatctttcctttgaccctcaacataatattgcagggtttgtatttatgttaccatttgacaggtaaagacwtgggctcaaaatgaaatattaaacaactcaatcaaggtcaactttaatgctaattggttgagtcagaatt

SEQ ID NO: 289242 - DNA, 598 bp, Homo sapiens
ctttctaattctagcagtaagcaatctttattcacaatgtaaatgaactaattgaaaagaataaacatctaattgggatgcagtttcagtaaaaattttcttttgcttaatgattattttttaagtataaaatacttttgtgtttactttttcaattctataataataatagtaagtccagaaaagactagaaaaatatttcccttcttattagaagattagaaagttagaactttatggtcacaggagataaataaaatgcaattcaagtaatatgttttatttttatagagagatatgatgcagtagcaaacatagaaagaaaatacaagttcaaggtataaaaagaaaaatgttactttttaactattaaaaatgactgttcacatatttttaaaatatctgttgtcttagtcttttcttctagtaccttctaatctctcaatatctaaatagtggtgtatcaaacatttaacccctagattgcttcactctgcagtcttcacaaattcattgtggcctcatctagtataaatgttaaaaataccataaaacataaacatrtgaacttatgtctgcagcctgaacctcctctgta

SEQ ID NO: 289243 - DNA, 623 bp, Homo sapiens
tatcttgctctactttttttttcttaaatgttctgtttaatgagagtgatgcagtagggtgagttgctgtatagtttatttttaaataggtgaagtgagattgcagtatctttaaagaatcagcaagaaaaaatgttaaattttaagctaaccacaattctacagaacctattcacctgttgcttcactgagaaactttaattaattaatttttaaatattctatatacaatctttgccaaattaaaatttaataggttctttttataattatatcagttgatgtcccctggtgtattagtttgttagcctgactgggtgcagtgttctaaacaacagaaatttattttctcaccattctggaggctggcagttggagataaaggcaccggctgggctggtttccttggacgcctctgcttagcctgaagacgctgccctcttggtgtcctcacaagacaccaagacatgttcacacccgctatctctcaatgtgttctagaatcttcttcttataaggatggcaatctgattggatgagagtatatccttacagcctcattttaagttatttacctctgtaraagccctatctccaaatacagtgacattctgaggtagtgg

SEQ ID NO: 289244 - DNA, 571 bp, Homo sapiens
acctgaggtcaggagttcaagacaagcctggccaacatggtgaaacccatctctactaaaaatacaaaaattagctgggcatggtggtgggtacctgtaatcccagctacttgggaggctgaggcagaakaatcacttgaactgggaggtggaggttgcagtgagctgagattgcgtcactgcactccagcctgagagaaaatactgagactcagtctcaaaaaacaaaacaaaacaaactttattatgtgtcagactgtatgcagggttcatatagaggattttattttatcctgtggtagtagctattgtactctttcattaatgggaatattgaagcttataaaaattaaataattaggccaaatcacaaaactagatgagaaaactcggttgaacccagatagttaaccacagaaagttataaattaaaatttttttttaaaataccaagtaaaaatcacaagttgtggaaaaacacatacagttatgctgttttgttaaatacatagaagtatataaagcatacgtatatttatatatgtacatatgtatgtgtatgtatatgtgt

SEQ ID NO: 289245 - DNA, 571 bp, Homo sapiens
acctgaggtcaggagttcaagacaagcctggccaacatggtgaaacccatctctactaaaaatacaaaaattagctgggcatggtggtgggtacctgtaatcccagctacttgggaggctgaggcagaagaatcacttgaactgggaggtggaggttgcagtgagctgagattgcgtcactgcactccagcctgagagaaaatactgagactcrgtctcaaaaaacaaaacaaaacaaactttattatgtgtcagactgtatgcagggttcatatagaggattttattttatcctgtggtagtagctattgtactctttcattaatgggaatattgaagcttataaaaattaaataattaggccaaatcacaaaactagatgagaaaactcggttgaacccagatagttaaccacagaaagttataaattaaaatttttttttaaaataccaagtaaaaatcacaagttgtggaaaaacacatacagttatgctgttttgttaaatacatagaagtatataaagcatacgtatatttatatatgtacatatgtatgtgtatgtatatgtgt

SEQ ID NO: 289246 - DNA, 571 bp, Homo sapiens
acctgaggtcaggagttcaagacaagcctggccaacatggtgaaacccatctctactaaaaatacaaaaattagctgggcatggtggtgggtacctgtaatcccagctacttgggaggctgaggcagaagaatcacttgaactgggaggtggaggttgcagtgagctgagattgcgtcactgcactccagcctgagagaaaatactgagactcagtctcaaaaaacaaaacaaaacaaactttattatgtgtcagactgtatgcagggttcatatagaggattttattttatcctgtggtagtagctattgtactctttcattaatgggaatattgaagcttataaaaattaaataattaggccaaatcacaaaactagatgagaaaactcggttgaayccagatagttaaccacagaaagttataaattaaaatttttttttaaaataccaagtaaaaatcacaagttgtggaaaaacacatacagttatgctgttttgttaaatacatagaagtatataaagcatacgtatatttatatatgtacatatgtatgtgtatgtatatgtgt

SEQ ID NO: 289247 - DNA, 547 bp, Homo sapiens
agtgctatggtaaaataatgaataaaacatgaaacatcaaagaatagtttttgtagcccatttgacagttatacacaattccattttagctgggcaatgctgctgggaaatactttaggatatttccacaaatcagatgtttaagctaaaaggaacaaaataaaaatatgaaataaagatggtgatgataacaatgttaatcatcatcattatttcccagtaagcatttgaaataattttaaatctaatatgtcccctccctcatgtttgtatgcatcatacacagaagcctgcatgcaatgaagatagaaaacacatactgtgcaaggaagtccaktctagcttaatgtttctaaaatttggctatgagtgcaaatcttgtagggaagttttctttgttacatattttaatattggctccagagccctctttcagatattttgagtcagtgagcttaagaaggagctgggaaataaatatctataaaaactgctgagaagactcaaagttggatagtcagttttggaaaccactaacttaggacca

SEQ ID NO: 289248 - DNA, 575 bp, Homo sapiens
caaagagatggctccaaggtcttcaagaaaaaatattactgggttataagactgccagaggcttattttgcttttttaaaatgtttatacacatctctacaggagagagaaagaatttacaattactaattttcaaaaggaaattaagtaaagagaaagatggtgagtctcctcatttgacaccagggaaaatgcatttaaaaaatatatatatataaaatatatatttatatattttttgatatacaaataatgtatatataaataatacatataaattatatataaatgattatatatatgtagttatccttattcaagggaacacaatgatatggtttccttttatcatcttaaatatatataggggaacgcttcatctttttttttatagcagatggcaagggaaggcacataccaaagtggtagccagtcagagatcacctctcctttgccatctggagattgttatctgcttttcaaagatactatttttaccaatgccaagcttggtaaaattcttaagatgtaattcagtctaatcatagatatmgctagacaagactggtcctatg

SEQ ID NO: 289249 - DNA, 588 bp, Homo sapiens
ccacccaaatctcatcttgaattgtaatcccataatccccacgtgtagtgagagggacccagtgggaagtaattgaatcatgggcgtggtttccaccatgctcttctcctgatagtgagtgagttctcatgagatctgatggttctataagcatctggcatttcccttgmtggcactcattctctctcctgctgccttgtgaagaggtgccttctgccatgattgtaagtttcctgaggcctctccagccatgtggaactgtgagtcaattaaacctcttttctttataaattacccagtctcaggtatttcttcatagcagtagaagaaaggactcatacatgcagctattagggtaatgtttcaaaaagtatagatacaggtaaaacttaagtagctgtaattcatcaatgcttaatcaaactctagtttttcttaatgtgcttgctccataagtatttcaattctcaggaacaaaattgacaggttaaactgaagattgaacataagctactatctttgcttccttctaaaacttcacttacatgagaataagtggataacagagatgtacttccataaaacaaa

SEQ ID NO: 289250 - DNA, 588 bp, Homo sapiens
ccacccaaatctcatcttgaattgtaatcccataatccccacgtgtagtgagagggacccagtgggaagtaattgaatcatgggcgtggtttccaccatgctcttctcctgatagtgagtgagttctcatgagatctgatggttctataagcatctggcatttcccttgctggcactcattctctctcctgctgccttgtgaagagstgccttctgccatgattgtaagtttcctgaggcctctccagccatgtggaactgtgagtcaattaaacctcttttctttataaattacccagtctcaggtatttcttcatagcagtagaagaaaggactcatacatgcagctattagggtaatgtttcaaaaagtatagatacaggtaaaacttaagtagctgtaattcatcaatgcttaatcaaactctagtttttcttaatgtgcttgctccataagtatttcaattctcaggaacaaaattgacaggttaaactgaagattgaacataagctactatctttgcttccttctaaaacttcacttacatgagaataagtggataacagagatgtacttccataaaacaaa

SEQ ID NO: 289251 - DNA, 569 bp, Homo sapiens
gacttttcatagtaatatgctgtgcaaaagcatgacatttgaaaatacagttgatcaggaaagtatcaactgcaaatctagctcttctttgatggtatgcttcagccagatctacttaktttgtgtatatagtgtgcatatagcttgtacacacacaaacaaacatatacataattaaaacgacatgtacatatagaattatgtgacttcatatatatatatacacacacatacattacatgcatatatatgctgaatatataactatatatccatatctatatcccaaatgatcttaatgtaacctcagctggaaataaattgtgggctcttaccttttcccattgttcacattcggtaaataagttcaagcccctagggaatgtttcttagacaacgccttcacttgggaagtcaacaacttaactataacttatttttaccaagtaattgcctggtaacattttttccttccaggctgttcttttttaagatcaaagacagtctctttcattttataatatgttccacatgaatagcaaaggactaagtatgtatgatggaaacac

SEQ ID NO: 289252 - DNA, 362 bp, Homo sapiens
aaacaagttaatattggccttgaataccatataagaataaaaagacagtcatttgtgttctcacttctcatattttagagtagagaatatgaagtgaacaatattttttttttaaaaaggaagggtctcaagactttttgctggaaatataaatgaaacagaaagcataaacacaactgagagagttagtgtcattgatgataccaaggatattgagaagattagcaatttgcagtggtgatggataggaagaggtgggtgctaaatttagtgttacatgtccatatgcaagtactaacaagttagaaatctggkagaacctacactgatttttttattgttgctgcaaatactcattgcaa

SEQ ID NO: 289253 - DNA, 513 bp, Homo sapiens
gtttcactttattctcatttgtatttaattcataaattgatggtcttctacaatgggctaagattttatcaygttatttatattcctgtcttttttttttttttattttttgagcttttttgttactcttttaaagtaccagttaccctggattttccaattaaatgtgtttcaattccaaatccttttctagttcttgaaaacataagggaccccaaacctaacatatgtaaccaaatcatgctatgatttgccaaaaggaatacatcatcttgctggaatttagctgctatgtccaagatttgtactccctttttataacataatttccttttatggttttatattcactctttttttcttaaatcatccaagcagtctttttttaattgttaagaaaaagtgatataattcttcatttcatcaagcttaagattgtgctataaatttgacatattactttctaagtaggagtttgcttggttaactcaattatagtctgtgtattatagg

SEQ ID NO: 289254 - DNA, 575 bp, Homo sapiens
accttgacttgtttaaaaaaatatttaggtactcgagtcaagagaattcttttgaagatatttttcttgttgaatgtagctcaaaatagatgagatttaatttacctctcatgacagaattttattggtgttcaacaattgtgcaatatttgtcagagaactgggttatgccaggaacaaatgctttagggcatgcaatcagtcagtgtcagcagatacagtgcacagccccagagtgacagtgccaatcaaatttgtgactcctgggagatgaaggaaaggaggcaagcgagtgctccttagtagatacttgcaggagacttcctcatgctgcytttaggcaaccacagtattgcttttctggcaatactgcctgttttagtcttcttgagcagttgtaacaaaataccatatagtaagtgtctttaaacagacatttatttctcacagttctggagactagaagcccatgatctgcttgacagcattgttgggttctcagtgagggctccttttctggctttcagaaggccgtcttcccactgtattctcacatggtggagagaggaaggtct

SEQ ID NO: 289255 - DNA, 605 bp, Homo sapiens
gcacttttctttctttccgtaagcttctccaaatagaatttactgctccagattctaatcaagtatagttatcagcctttgaaaaattatggcaagctggtcgataaaaacataatctcatttttattttattttgaagtatccattttatgtaaggaagctaggaacattttgtgtatgtattatttattttgatcaactcttaggagatttacatagtcaacagcttattttaaaaaatattatgctttttttggtaacatttatacaaactttctgtaaagaggaaagtataagrtttgctagtttaatgcattttttccctcttacattgtttatgatatatttttatgcaaatatattatagtataatttgtgtttatcataattttgggatttttcctccctatgattattctctcacttgtttgggatccccagtcccacagtgttatacaaatgttctcttaaacaatttttgatttttgttatagtttttatacttaataatccacagaaaacttattttttaaaaaatattatttactgttcagggctattgtttctcttgcttattttttagcagctacttttaaccacatctt

SEQ ID NO: 289256 - DNA, 605 bp, Homo sapiens
gcacttttctttctttccgtaagcttctccaaatagaatttactgctccagattctaatcaagtatagttatcagcctttgaaaaattatggcaagctggtcgataaaaacataatctcatttttattttattttgaagtatccattttatgtaaggaagctaggaacattttgtgtatgtattatttattttgatcaactcttaggagatttacatagtcaacagcttattttaaaaaatattatgctttttttggtaacatttatacaaactttctgtaaagaggaaagtataagatttgctagtttaatgcattttttccctcttacattgtttatgatatrtttttatgcaaatatattatagtataatttgtgtttatcataattttgggatttttcctccctatgattattctctcacttgtttgggatccccagtcccacagtgttatacaaatgttctcttaaacaatttttgatttttgttatagtttttatacttaataatccacagaaaacttattttttaaaaaatattatttactgttcagggctattgtttctcttgcttattttttagcagctacttttaaccacatctt

SEQ ID NO: 289257 - DNA, 1671 bp, Homo sapiens
gcacttttctttctttccgtaagcttctccaaatagaatttactgctccagattctaatcaagtatagttatcagcctttgaaaaattatggcaagctggtcgataaaaacataatctcatttttattttattttgaagtatccattttatgtaaggaagctaggaacattttgtgtatgtattatttattttgatcaactcttaggagatttacatagtcaacagcttattttaaaaaatattatgctttttttggtaacatttatacaaactttctgtaaagaggaaagtataagatttgctagtttaatgcattttttccctcttacattgtttatgatatatttttatgcaaatataytatagtataatttgtgtttatcataattttgggatttttcctccctatgattattctctcacttgtttgggatccccagtcccacagtgttatacaaatgttctcttaaacaatttttgatttttgttatagtttttatacttaataatccacagaaaacttattttttaaaaaatattatttactgttcagggctattgtttctcttgcttattttttagcagctacttttaaccacatcttwtcaaattgtttttaaacctattatacatatttctaagtaaatcattgatgagagctttatgaaaaaaatgaatgcattgctattggctaagtgcaatgttctttattaagtataatataaatattcagggtactatagtttccttaatgtttagcctagttccatggctaaggaaatatgacaaattgcagtttgagattttgaaaacactgttttcactggcttaggccacttctgtgaaccaatttttcttgttttttgattcagtgggtacatggctagcgttgttacatttattccttattttattttattttatttatttwttttttggagacagagtctcctctgtgatatctgtattttccactaagtgtgaagggcgtattaaaataatttttcaagaaaagagaaaaaagtaattaagcacttaaatgattttgtttttttctaattcacaggtttggaagttggaagaaaaaaaatcaaaatcattgttcgttgtggtgtttaaaaattacctaaacaaaattgtttawaataaaatagcagaaagctgataaagtaatgtgaataaactttctatatgtatgtgtgtctatatgctatgctaatgtaaagaaatgctattattttaaaacacaattttgccttawgcccatatgccatagctatttttctgcagcttttcagcacagccagatttgttgaaatataactatgaaaatattatgtctgcatcctcactgcccgtttattcacttttcaaagcaatataattttacttcgacccctatccttccacagatacctctgtaaaaatagtcactcataactttcatgttggtatagtcaaaattacttaacagttttgtggcattttcggcttttgtccactctttcttgttgttattctgatctctcactattctccttagcactctgtcctagttttcttataaatcttctagccatgtttatccaacatctttgccttgttcttaaattctaatgcattttgagcttactacttttcccctttggacttttcatgccatacatttt

SEQ ID NO: 289258 - DNA, 526 bp, Homo sapiens
aataaaatagcagaaagctgataaagtaatgtgaataaactttctatatgtatgtgtgtctatatgctatgctaatgtaaagaaatgctattattttaaaacacaattttgccttaakcccatatgccatagctatttttctgcagcttttcagcacagccagatttgttgaaatataactatgaaaatattatgtctgcatcctcactgcccgtttattcacttttcaaagcaatataattttacttcgacccctatccttccacagatacctctgtaaaaatagtcactcataactttcatgttggtatagtcaaaattacttaacagttttgtggcattttcggcttttgtccactctttcttgttgttattctgatctctcactattctccttagcactctgtcctagttttcttataaatcttctagccatgtttatccaacatctttgccttgttcttaaattctaatgcattttgagcttactacttttcccctttggacttttcatgccatacatttt

SEQ ID NO: 289259 - DNA, 1136 bp, Homo sapiens
gcataccatctaaaaccatgtatattcacattttagaacttccataataacacaacacagcttcagtgacttcaataacagaaatgtattttctcacagttttgggaacccaaatcaagacggcagcaggttcagtttcttctgagaagttggttgccttcctgctgtgtccaagcatggcttttttctctgtgtgcgtgyaacccgaatgtctcttccgcttctaataaggacatcacccatactggattagggctccaccctaaaagccccatttttaactgaattacctcttcaaagagcttatctccaaatatacttacattctgaggtactggtggttgagactttgatgtatgaatttgacggtactcaattcaacctaaacatcatggtttttaaaaaccctgactactcccaaagttacatccgggttccttagcttcagatttgtacagaatgtcgattgacacttcaagtcgaatatataacacacatctcaagctccatatgccccaaatggaacagaacatcacctggaaaagccaccgtcatctcttaaatagattattaccattgtcttctaatactttccactttctgccgtcaaccctagccctacwatatacaggggaaatggtctatttttatacttaggatcaacaaaatatagatagccatgtagaagtatgattggacagaaaggatatgatctaatgctgtgagtggggaaacccagcaaaacctctctgtgcagattcttcttggcctctctcagtgacatttcttccctgcgagtctggggcaggaccttctctggaatggaagtcttatgacctacwgtcaaacaagataggtcagataattttttatggccagtttttacacagaaaggcagagggaatgttagagtaatatttttaggttttatggttggctctggggaaaacggattctggtttttatgacctaccttggggaagaaggatttttgtttctgtgcctatccttgggggagaatggaactgagagacaggagggcaggagaaggtcagagataaacttttgcttctgtggctttcattttgaggtattgttctctgagccccaacaaagtaacatgcaggctttttatc

SEQ ID NO: 289260 - DNA, 622 bp, Homo sapiens
gcataccatctaaaaccatgtatattcacattttagaacttccataataacacaacacagcttcagtgacttcaataacagaaatgtattttctcacagttttgggaacccaaatcaagacggcagcaggttcagtttcttctgagaagttggttgccttcctgctgtgtccaagcatggcttttttctctgtgtgcgtgtaacccgaatgtctcttccgcttctaataaggacatcacccatactggattagggctccaccctaaaagccccatttttaactgaattacctcttcaaagagcttatctccaaatatacttacattctgaggtactggtggttgagactttgatgtatgaatttgacggtactcaattcaacctaaacatcatggtttttaaaaaccctgactactcccaaagttacatccgggttcctyagcttcagatttgtacagaatgtcgattgacacttcaagtcgaatatataacacacatctcaagctccatatgccccaaatggaacagaacatcacctggaaaagccaccgtcatctcttaaatagattattaccattgtcttctaatactttccactttctgccgtcaaccctagccctac

SEQ ID NO: 289261 - DNA, 580 bp, Homo sapiens
actttgatgtatgaatttgacggtactcaattcaacctaaacatcatggtttttaaaaaccctgactactcccaaagttacatccgggttccttagcttcagatttgtacagaatgtcgattgacacttcaagtcgaatatataacacacatctcaagctccatatgccccaaatggaacagaacatcacctggaaaagccaccgtcatctcttaaatagattattaccattgtcttctaatactttccactttctgccgtcaaccctagccctaccatacattcttaaacagagtgagcttttttcttttttttatttcaatagcttttggggtacaagtggttttttgttacatgggcaaattatatattggtaaaatctgagattatagtgtacctgtcactggagtggtgtgcattgtacctaatgcgtagatttttatccctgggcccctcccttctgagtctcyaaaattcattatatcgctctgcatgcctttgcatactcataacttccttccgtttctaagtgagaacatacggtttttggttttccacttctgtgttactccacttagca

SEQ ID NO: 289262 - DNA, 534 bp, Homo sapiens
atgattgtcttgatcttactaaatcagtttttaaaaaaaatatatgtttaggattttaattctactactgttcatacatagttactagttattgtcaaattgcttcatttagcacttatgatttatgctttaaaatattatttgtttaagatatatcagacatataaaggagrtgcttaggttgaaatttgtttatttgttcaccacattcattaagagatacttcatggatttacagtatgtgtcgttccagagagccatacatctagttattaattattggggaaactttagtctgtgatcctctgctaaaaataaaatggaatattgatatgtggcaacaacttctaacatttcttcaggcggtatttttaaacactaggtgagagttactaagaatcagaaaagtggttgaatagcatagaagcagattggagagccatttgtgccataaaacaacaggatttggtgtctctaaagatgtaagaaggagagaaatagaaaaattgatgaaggctttgaatagctacatct

SEQ ID NO: 289263 - DNA, 586 bp, Homo sapiens
aaccacagcagtttccaagtttgtctagtctactaattatgtcaaaaaggagaatgggtccgggcacagtggctcatgcctgtaatcccagcactttgagaggctgaggcaggcggatcgcctgaggtcaggagttcgagaccagcctggcaaacgtagtgaaatcctgtctttactaaaaatacaaaaaamttagctggctgtggtggcacacatctgtaattccagctactcgggaggctgaggcaagagaatcacttgaacccgggagggagaggttgcagtgagccgaagtcgcaccattgtactccatcctgggtgacagagaaagacttcatctcaaaaaaaaaaaaaaaaaaggagaatatggaactagttgtcatgattttcttctgaaaccaagattggcttcagtggttattgcatcgtatcttgaattcttataaataaaaaggtgtcattctagaaatttgcattaaattaccatcaattttaaatcttctttgttcacacaatccctcttatcccacttttgaaaaatcctatcattcatatttttagcattatttacataacgtatttacat

SEQ ID NO: 289264 - DNA, 586 bp, Homo sapiens
aaccacagcagtttccaagtttgtctagtctactaattatgtcaaaaaggagaatgggtccgggcacagtggctcatgcctgtaatcccagcactttgagaggctgaggcaggcggatcgcctgaggtcaggagttcgagaccagcctggcaaacgtagtgaaatcctgtctttactaaaaatacaaaaaaattagckggctgtggtggcacacatctgtaattccagctactcgggaggctgaggcaagagaatcacttgaacccgggagggagaggttgcagtgagccgaagtcgcaccattgtactccatcctgggtgacagagaaagacttcatctcaaaaaaaaaaaaaaaaaaggagaatatggaactagttgtcatgattttcttctgaaaccaagattggcttcagtggttattgcatcgtatcttgaattcttataaataaaaaggtgtcattctagaaatttgcattaaattaccatcaattttaaatcttctttgttcacacaatccctcttatcccacttttgaaaaatcctatcattcatatttttagcattatttacataacgtatttacat

SEQ ID NO: 289265 - DNA, 1104 bp, Homo sapiens
aatttattccatctctaaaattgacatttttaattaaatagtttattattttaaatayatagatcacacaaacatactcacacaaacatataatcacaaactcaagtttcaaactgtggatactatgggtcctattatagtaaaaaaatacagacctatatgcaaaaagaaagtctcagaaaagtatactcgaaaagtttggtcattatttctgtatttggtcttttttcttcatctcaatttttgattttttttacactaaatgtgtaccaaagatacactaagatcaacctctcttagtgatgtgcgtttaaactacagatatttctgagaattgcaatgcatcaagtgtctgcaaccctggtacatggattgcatatgggttgccttaaaggagacagaattaacaggaataaacacaaatatgaatggcagaaaatgtgcagatgctgaaacatttatctcatgaccaaccacctatacaaaggagagaccagtaatgaagtcccttaggaagtgacaaaattcccatccaagtctcagaaagcactttcctctgwctcactgcaacctctgcctccctgggttccagcgattctccttcctcagcctcctgagtatctgggattacaggtgtctgccatcatgtctggctaattttttgtatttttagtagagatggggtttcaccatgttggccaggctggtctcaaactcctgacgtcaggtgaaccacccacctcagcctcccaaagtgcagggaatacaggcgtgaaccaccgcgcttggcctgttgttgttgttgttattgttgttttttattatactttawgttctggggtacatgtgcagaacatacagatttgctacataagtatacatgtgccatggtggcttgctgcacccatcgacctgtcatctacattaggtatttctcctaattctatccctcccgcagccccccaccccccaacagcccccagtgtgtgatgccccccaccgtgtccatgtttttttttttaaacttgataattgtttatttattaacggcagaatttgggagccagaggatttaagatacaattttggtttagttcccccttc

SEQ ID NO: 289266 - DNA, 437 bp, Homo sapiens
gggcttcaacttacgatttttggagaaatacaattaaactgtagcaatatcttataactgcttcttattctactactttaccagtgcctgatttgccatatgcaggtaacaggaaagatttaccatattttgctactgcattataaggttacaaaattctagtctgtaatgtcaatccttgccatctgctgctggacaacttccattaagcyaatgatacgtgttctgttacttgaagcaactcagttccaaaagaaaaaaaaaaaaaaaacctggaatcaattgcaattagtttcaaatgtaaattgcaatgacctccaattaaaagtgctgaaaataagatacacaattctcaattaaatgttcttaagtaggcttataaactggcttggctcagtgtgttcatgggacagacattctttttcatcttgttgctc

SEQ ID NO: 289267 - DNA, 437 bp, Homo sapiens
gggcttcaacttacgatttttggagaaatacaattaaactgtagcaatatcttataactgcttcttattctactactttaccagtgcctgatttgccatatgcaggtaacaggaaagatttaccatattttgctactgcattataaggttacaaaattctagtctgtaatgtcaatccttgccatctgctgctggacaacttccattaagctaatgatacgtgttctgttacttgaagcaactcagttccaaaagaaaaaaaaaaaamaaacctggaatcaattgcaattagtttcaaatgtaaattgcaatgacctccaattaaaagtgctgaaaataagatacacaattctcaattaaatgttcttaagtaggcttataaactggcttggctcagtgtgttcatgggacagacattctttttcatcttgttgctc

SEQ ID NO: 289268 - DNA, 214 bp, Homo sapiens
tattctcagattataatgagatttaaaagtaaatttttaatttgtaatcctttggcaraaggttgtccagtaatatctttggacttctcttaacagcacacgtttccaacagtgaattttctaattgtagtattctttgcaatttgtacaggcttagaacctcttgagtcatcaaatgctggttgctttttgcttaatagttacttcctcaatt

SEQ ID NO: 289269 - DNA, 214 bp, Homo sapiens
tattctcagattataatgagatttaaaagtaaatttttaatttgtaatcctttggcagaaggttgtccagtaatatctttggacttctcttaacagcacacgtttccaacagtgaattttctaattgtagtattctttgcaatttgtacaggcttakaacctcttgagtcatcaaatgctggttgctttttgcttaatagttacttcctcaatt

SEQ ID NO: 289270 - DNA, 534 bp, Homo sapiens
atgttctgattaaaaaaaaacaacaggccaggcatggtggctcacacctgtaatcccaacattttgggaggccaaagaagggggatcacytgaggttgggagttccaacctgaggttgggtcaggtccagcctgaccaacatggagaaaccctatctctaccaaaaatacaaaaaatcagccaggcgtgatggtgggtgcctgtaatcccagctactcaggaggctgaggcaggagaattgcttgaacccgggaggtggagattgcagtgggccgagattgcgccattgcactccagcctgggcaacaagagcgaaactctgtctcaaacaacaacaacaaacaacaaacaaacaaacgaaacaatcaactaagcttgctgcaatgtgggaagccctctcttatcctggacataagtgagcagcatgcaagtatagagctggatatgaaaacttagaggaatgaccttgtggaaaaaggctgatctttcttgtaagggttggcatgtggcagactgaacaccatattctggaaa

SEQ ID NO: 289271 - DNA, 1212 bp, Homo sapiens
tctttctgtgcctagcttttctcacttaacataatgacctctggttccatccatgctgctgcgaatgrcatgattttattcatttttatggcagaatagtattccattgtgtgtatgaaccacatgttctttatccattcatccatttagtttgattctgtttttttgcaatggtgaataatgccacaataaacatgcaagtgcaggtgtccccttggtatacagatttaatttcccttggataaaaacctagtagtaggattgctggatcaaacagtagttttatttttagttttttgagaaatctccatactgttttccatagtggctgtagtaatttacattcccactaagtgtatgagttcccttttctccccagcctcgttagcatctgtttttttttctgtttgtttgtttgttttttgtcttttcaataatagccattcttactggtgtaaaatgatacatcattttggttttgagtcgcatttccctgattattaatgatgtcgaaccatttttcaaatacttatcagccatttgtatgtcttcttttaagaaatgtwtttcactccctttgttaaatttattcctagctattttaattttttatagttattgttaatgatattgccttcttgatttctttcccaggtagttcattattgaagtatagaaatgcttatgattttttatgttgattttgtacactgcaactttactgaatttctttatcaaaactaggggttttgtggwagagtttttaggtttttctagatgtaagattatatcaccagcaaggatgaataattcaacttcttcttttccaatttggatgacttttatatctttctattgcctgattgctgtggctaggatttccagtacatattgaataggaatggtaaaagtggacaactttatcttgttccagagcttaaaagaaaggctttcagcttttccccattcaatgtaattatagctgtgtgtttgttatggccagtctttattattttgaggtatgtttcttctacttctattttgttgagagtttttatcatgaagggatattgattttttttccatttttttctagatctattgaggtgatcatacggtttttgccctttgttctgttaatgtgaagtatcacatttattgatttgtatattgtgaaccattttggcattcctagtataattcctactttgt

SEQ ID NO: 289272 - DNA, 547 bp, Homo sapiens
ttcagcttttccccattcaatgtaattatagctgtgtgtttgttatggccagtctttattattttgaggtatgtttcttctacttctattttgttgagagtttttatcatgaagggatattgattttttttccatttttttctagatctattgaggtgatcatayggtttttgccctttgttctgttaatgtgaagtatcacatttattgatttgtatattgtgaaccattttggcattcctagtataattcctactttgtcatggcatattatctttttgatgtgctgttggattcagtttgctagtattttgttgaggatttttgcatctgtgttcatcagagatatgggccggtagttttctttgttgctgtatccttatttggcttactattttgaattatttattcaggattttgtgaacattttttgtttgaatctgttattggagcattacagtgttcctgaagagatgtcatatttccttgattttttcatgtttcctgtgaccttacattgatgtctgcacatctgttgtaatagtca

SEQ ID NO: 289273 - DNA, 547 bp, Homo sapiens
ttcagcttttccccattcaatgtaattatagctgtgtgtttgttatggccagtctttattattttgaggtatgtttcttctacttctattttgttgagagtttttatcatgaagggatattgattttttttccatttttttctagatctattgaggtgatcatacggtttttgccctttgttctgttaatgtgaagtatcacatttattgatttgtatattgtgaaccattttggcattcctagtataattcctactttgtcatggcatattatctttttgatgtgctgttggattcagtttgctrgtattttgttgaggatttttgcatctgtgttcatcagagatatgggccggtagttttctttgttgctgtatccttatttggcttactattttgaattatttattcaggattttgtgaacattttttgtttgaatctgttattggagcattacagtgttcctgaagagatgtcatatttccttgattttttcatgtttcctgtgaccttacattgatgtctgcacatctgttgtaatagtca

SEQ ID NO: 289274 - DNA, 588 bp, Homo sapiens
attaattatactctgatgtatatccccaagtttgacctccatttatttgccaattagtatattacagrctgctattctttttatacctctcttctcaagatcctttactatagcttccaaacaaaaagtaattgatttgtttgttttttgctcctactgcttctcagcaagagacagttcttagttaatcttgagagtgcttgttaattgttgcatctacgcctagaatttttccagtcattttctttccagatgatttttttgctgttgaaggcagaacaggtcaggttatctagctcctggtccagttattcccatacgtatgacctactggtttacggttattttatgtttttaatcggttttctcaagcataccaaggtttcctactgaacttggtcctatttcatctctcctttgattctgtaatcttgactaacacatgtctaggcatataataagtgctacaattttgagtttttaaatttatgaatataaagtatttttctgttaggaaaatactcaaagatgttagcaaaatagttcaaggaatataatggagggttctataaaatacgtttctaaaag

SEQ ID NO: 289275 - DNA, 588 bp, Homo sapiens
attaattatactctgatgtatatccccaagtttgacctccatttatttgccaattagtatattacagactgctattctttttatacctctcttctcaagatcctttactatagcttccaaacaaaaagtaattgatttgtttgttttttgctcctactgcttctcagcaagagacagttcttagttaatcttgagagtgcttgttaattgttgcatctacgcctagaatttttccagtcattttctttccagatgatttttttgctgttgaaggcagaacaggtcaggttatctagctcctggtccagttattcccatacgtatgacctactggtttayggttattttatgtttttaatcggttttctcaagcataccaaggtttcctactgaacttggtcctatttcatctctcctttgattctgtaatcttgactaacacatgtctaggcatataataagtgctacaattttgagtttttaaatttatgaatataaagtatttttctgttaggaaaatactcaaagatgttagcaaaatagttcaaggaatataatggagggttctataaaatacgtttctaaaag

SEQ ID NO: 289276 - DNA, 543 bp, Homo sapiens
taaaaatcaatcacatcatgtatttggttgtttttgaggaatcagacaatattttaattttacagtaaaattctctgtgaatgcaaggtaagcattatttgggcctaagggaacaaaataaaataatattggcattatatggaactgagtgattgtgtgataactagtagaatatgaagaatgcaaaggcagtcttctacaaaytttttatttttaacatattttgtgatgtgtgcatgtgtgttggtggggggacttatttggaaatgggttgttctctgtatctaaagcttttatcaatgagtttatgagctatttaatagcataatacaaaaccaaaaaaaaaaaaactcttagcattctcttttttttagtcttagattagtatgtattggagatagtttaatagttttggcatccttaattcatgtcattcgtttctggctgatgcactggtaggtattcacctgcccatctgaggaacccaattctttaagaacaagatctagaggcagcccctgtcacattctcttgtcaggactc

SEQ ID NO: 289277 - DNA, 594 bp, Homo sapiens
agactgtgataggaataacttagcattaaacatcactatttcaaaaaatgagtaatctctacagacaactttttattaaatttacctaataaattcatgtttagtttatggagggtttattaagtgataatacaacactatgcatatatacagtgctaccatggaaatgataggatggtgctgatggcagaaataaggaaacaagaagggtcatagaaagatgtgcataactagtaatagctaaaatattatttttaaaagaaatttttcccttgaggttgagtataaagcagagttttaaaagaagttgagatagccaggcacagtggctcacacctgtaataccagcactttgggaggcccaagtgggcagatcacctgaatccaggaattcaagaacaacctgggcaacatggcaaaaaagtgtctctaaaaaaaatgcaaaaaaacaaaaktagccagaagtggttgtgcatgactgtagtcccatctactcaggaggctgaggtgggaggatccagtgagcccaggagggtgggggctgcatgagtcatgatcgcaccactgtactccagcctggtcaacaaaacaagg

SEQ ID NO: 289278 - DNA, 594 bp, Homo sapiens
agactgtgataggaataacttagcattaaacatcactatttcaaaaaatgagtaatctctacagacaactttttattaaatttacctaataaattcatgtttagtttatggagggtttattaagtgataatacaacactatgcatatatacagtgctaccatggaaatgataggatggtgctgatggcagaaataaggaaacaagaagggtcatagaaagatgtgcataactagtaatagctaaaatattatttttaaaagaaatttttcccttgaggttgagtataaagcagagttttaaaagaagttgagatagccaggcacagtggctcacacctgtaataccagcactttgggaggcccaagtgggcagatcacctgaatccaggaattcaagaacaacctgggcaacatggcaaaaaagtgtctctaaaaaaaatgcaaaaaaacaaaagtarccagaagtggttgtgcatgactgtagtcccatctactcaggaggctgaggtgggaggatccagtgagcccaggagggtgggggctgcatgagtcatgatcgcaccactgtactccagcctggtcaacaaaacaagg

SEQ ID NO: 289279 - DNA, 575 bp, Homo sapiens
cttcttgctacgtcatcccatagtgaaaggcggaaatgtgaaagagtaggcatgaaagaaagaaagaaaaggaaagaggctggatgaggctgmaatcatccttttatcagcaactcactcctgaacttatccagtcccccagtaattgcatcaatgcattcagaaaggcacgaccctcataacctaatcacctcttgaaggtcctaactctcaaccctgttgcattggacattaagcttcagatacttgaactttagtggacccattgaaaccatagcacctgaaaatgtaaaacaatgctactttctctactcaaattattatgtttattttttcttaaaatgcaaaatgatatcagttagtaggtttattattgttttaaataaacattttcaattcacagttttaatatctaattggtaaataagagagataaaagaatcaaaagaatgaaaagctctctggagcctaaataatatatatgagaacaaagaagtcttgagactaatatgtttaagaacatcaaatgtagtccataattatctttagcccatggctataatctttgaaaggat

SEQ ID NO: 289280 - DNA, 613 bp, Homo sapiens
ttcattgtttgtgagattctctgtgcctaagagttcacattttgtttccttagacaccaaaaatttcatgaatgtttattgcaggctcaggttcatgccctgtgtgccgttgggtgtgggtggacagttttcaaactacctcctccacagaaaccaaacaactgatattctgcattgggaaaacatacagtactaaaacataggtttatgatattttatatttatttatttttatttcaggtttttaatgaagactttactttttaagaacagttttaatttcacagaaacattgagggacagtacagagatttcccatgtatcttctacctccacacatacatggcctgcccattatcagtattcccctgaagagtggtacatattctacagttcatgaatctacactgacccatcattatcagtgaaatgattgtttataatatcatcattatcagtgaaaccatagtytacacaagggctcagtcttggtgctgcacattctatgagtttggacaaatgtataatgacatgtctctataattatagtaacatacaaataattttcactgccctgaaaattgtctatgctcccttgttcatcttttcctca

SEQ ID NO: 289281 - DNA, 555 bp, Homo sapiens
agaagaaaacataatcaataaaaacaggccccaaaatgatagagatgatcttaaaatagctattgtaaatatactccatatattcaagaagaaagatcaaatcattgagataatatatgacccagatgagctcctatgaagaaaaacacagtatctaaaatgaaaagatagtgaatggcataccagcaaattagattaacagcagaagggtttgaaaatacagtttaacaacaytgggcttggggacactgatctgacccctgtgcagttgaaaatctacatataacttttgactctccaaaaacttaattactaatggcctaccattaactggaagccttaccaataacataaacaatgaacatattttttgtatgttatgtgtattatatactgttatttttacagtaacaataaagtaggatagagataagaaaatcacaaggaagaaaaaattgtatttataattttttaagtgaaagtggattatcataaaagtcttcatccccgttattttcacattgagtaggctgaggaggaggaagagaagggttt

SEQ ID NO: 289282 - DNA, 546 bp, Homo sapiens
caattcataagaacaaattaaaataaccattggataattcaaactgtgattgagaggcttatatccttagaagcgtaagaaactgcattaaactcctatagctattaccctgaacctgtaattacatcagcacatttttgctttcttttagggatcatcacagcrtgagagaaaggaggagtggggaaggaaagatagtattcattacattctacagaatgtctaaccatagagtaaacgaacagatgatcggaatgccgttccaataagaacttttcccattgttaattacgtggtcttagaatccttgaaagacaacgtgacagacttaggcatcaagagtatttgggcaagcacaaatcctcttaataaaataaaaatatttgaaaacaaaagcagaaaaactgtataatcaggattttagcccttgacattacatttctgtctcattatgaaaacaaccttggagctaatcatataaaaaccttataaatactccctaccatcaaaggtatttacataaaataataacaatataaaacacca

SEQ ID NO: 289283 - DNA, 546 bp, Homo sapiens
caattcataagaacaaattaaaataaccattggataattcaaactgtgattgagaggcttatatccttagaagcgtaagaaactgcattaaactcctatagctattaccctgaacctgtaattacatcagcacatttttgctttcttttagggatcatcacagcatgagagaaaggaggagtggggaaggaaagatagtattcattacattctacagaatgtctaaccatagagtaaacgaacagatgatcggaatgccgttccaataagaacttttcccattgttaattacgtggtcttagaatccttgaaagacaacgtgacagacttaggyatcaagagtatttgggcaagcacaaatcctcttaataaaataaaaatatttgaaaacaaaagcagaaaaactgtataatcaggattttagcccttgacattacatttctgtctcattatgaaaacaaccttggagctaatcatataaaaaccttataaatactccctaccatcaaaggtatttacataaaataataacaatataaaacacca

SEQ ID NO: 289284 - DNA, 546 bp, Homo sapiens
caattcataagaacaaattaaaataaccattggataattcaaactgtgattgagaggcttatatccttagaagcgtaagaaactgcattaaactcctatagctattaccctgaacctgtaattacatcagcacatttttgctttcttttagggatcatcacagcatgagagaaaggaggagtggggaaggaaagatagtattcattacattctacagaatgtctaaccatagagtaaacgaacagatgatcggaatgccgttccaataagaacttttcccattgttaattacgtggtcttagaatccttgaaagacaacgtgacagacttaggcatcaagagtatttgggcaagcacaaatcctcttaataaartaaaaatatttgaaaacaaaagcagaaaaactgtataatcaggattttagcccttgacattacatttctgtctcattatgaaaacaaccttggagctaatcatataaaaaccttataaatactccctaccatcaaaggtatttacataaaataataacaatataaaacacca

SEQ ID NO: 289285 - DNA, 1176 bp, Homo sapiens
aagagtatttgggcaagcacaaatcctcttaataaaataaaaatatttgaaaacaaaagcagaaaaactgtataatcaggattttagcccttgacattacatttctgtctcattatgaaaacaaycttggagctaatcatataaaaaccttataaatactccctaccatcaaaggtatttacataaaataataacaatataaaacaccaaagctctagttcaagcaaagcaatatgcaattctaaccttcttagtttaaaaacaaatctgaataaaggtcatatacaaggttttcaatatactttccactgcactatttcagcaaaagaaaaattagcagtcgaagccgcactttgaggagatagtaaaatattgtattttgatattaattaatacggtaaatacataaacacttagctccaattatctaaataaatttaattatatttaataacattagtaaccttcctagtacagattaaaattgttacatttatttgcacgcaaggaaaggtaagcagttttctcagaactactcaataagctacaattatagtwggaaaggtaagcagttttctcagaactactcaataagctacaattatagttatttatttagtgtttattatatatgtgtgtgtttgaaacatatatatgatatacwtgtataagaatgtgtttatatattagtatgtttatataccatgttgtatatataacgatattatatgcatatatgtatatatttatatttgagtgtgtgtatatgtagatatgatatctagcactataagaattgcaatataattaatcaaaattattaagattaaggttttatctaggttagaatagcacagcattgatattatgtcatatctctcaattaagttcttatttaatcaaaatcacaaaagaaaacacatcgttatggcaatatggatgtgaaatctctagtgctataaaaaacacaaatctaaggggtatagaatcctaagcatgagattggaatgtagcattgggtatttgaattagtgaatacaaagtcaataaataaatatcaattatatttctgtatactagaaggaaataaataaagggtaaaattcagaaaaatactattctactcataataacaagaaaaatgataaaacacttaagaataattttaaccaaacc

SEQ ID NO: 289286 - DNA, 618 bp, Homo sapiens
ggaaaggtaagcagttttctcagaactactcaataagctacaattatagttatttatttagtgtttattatatatgtgtgtgtttgaaacatatatatgatatacttgtataagaatgtgtttatatattagtatgtttatataccatgttgtatatataacgatattatatgcatatatgtatatatttatatttgagtgtgtgtatatgtagatatgatatctagcactataagaattgcaatataattaatcaaaattattaagattaaggttttatctaggttagaatagcacagcattgatatyatgtcatatctctcaattaagttcttatttaatcaaaatcacaaaagaaaacacatcgttatggcaatatggatgtgaaatctctagtgctataaaaaacacaaatctaaggggtatagaatcctaagcatgagattggaatgtagcattgggtatttgaattagtgaatacaaagtcaataaataaatatcaattatatttctgtatactagaaggaaataaataaagggtaaaattcagaaaaatactattctactcataataacaagaaaaatgataaaacacttaagaataattttaaccaaacc

SEQ ID NO: 289287 - DNA, 512 bp, Homo sapiens
tttcatactcttatgctgaaaacgataaaactttgctatgataaattaatgagtgttacatacattgacaaatatccaaaagttcctagatcagaagattcaatattcttaaattgataactgttatcccaatgataattcaagtatgttttaaaatagaaatttacaagctatttctaaaatacatatgaaactgcaaagattctcaaacagccaaaacaatcttgaaataaaggcaaaacaaaacacaaattgtgaracaagtgctacctgattttaagggttactaaaaaggcagtataagattgacataggataagcaaataggtcaaagaaataaagtatctattcccatattcaatagaaaatgaaaaatattttcaacaaataatgctgaatatatacatacacatatatatgtatgtgtatatatgtgtgtgtgtgtctatatatatatatgtctatatatatataaactttgggatctacctcacaccatatagaataattga

SEQ ID NO: 289288 - DNA, 612 bp, Homo sapiens
ttcttaccattgtatactaatcaacaattgaaaggaataaactactgttacaggcaatgatatggttaggctttgtgtcccaatccaaatctcatcttgaattataatccccataacccccatagtccccatgtgtcaagggagagaccaagtggaggtaattggatcatggggacagtttcccctatgctgttcttttgatagtgagttcccctgagatctgaatctgatagtgttataaatgtttggtagctcctcctgctttcattctctcccctgccgccctgtgaagaggtgmcttctgccatgattgcaacttttttgaggcctcctcagccttgtgaactgagagtaaattaaacctcttttcttcataaaattacccattctcgggcctttatttaaagcagtgtgagaacagactaatacatgcaataaggtggaggaatctcagagatattttgggcttgagaagctgagcacatgttagtacttaatgaatatttccatttataggcatttctacaaaaggcaaaactaaattttagtgcaaataattagaaccttagaggtgaaggttgattgggaagggacagaaaatgagaaaaatgt

SEQ ID NO: 289289 - DNA, 466 bp, Homo sapiens
ctccagcctgagagacagagtgagattccatctcaaataataataataataataataataataataataataataatttactgaaatagcattttttctacacacttttttaaaactggtatcctttactcagaaacagatcatactttaatttttgaaatggctyatccttttaaatagctgaaaactgctccataatatatattatagtttatttggctattctttctttaataaatgcttaagttgtcttcagtatttcattttgcataaacaatgcactttaacaattttgcatagttcaattcctaaaactgtaacactaggtcataagtatacatattttaagttgtgataacctcttgcttattgcccaacaactttcacacccagcaacagaatgagagtgtatcgtttctcatgaagtcattacaactggtataatgagtaaaattacatacttgtc

SEQ ID NO: 289290 - DNA, 609 bp, Homo sapiens
ttcataaataagaaaactgagaccagagagattaaaaagtgatgttgaggaggccgctccgtcaactccaaaattggtagttgataaaattatataattttttactattattctctctttacatttcctctttcctcatccgatataccaagcatcttctgtgtactctctttattatttactaaatgcatcttcaycttctctttttccaattctactggggcttcttgcagagttatacagacaacaaaatagatctgttttcactgacaacagtgatttgttaatttccttaaattataataattgattataatattgtgtataattaatatattgatgtgtactaggtaaagaagaaaatcaatgagcaagtaaatgatagactctaatccttcaatttaatattaattctcatgttaaaccttactaatgttttcagaatttttatatttttggggatctaggaacacatgtattctataaaatacatgcaggacctagattgtagatcatcactaggtattcaattatactagacaatcaaatcttagtgagaattttgaagaggtaaattaaacatcaggcaactaaacagtctttagcata

SEQ ID NO: 289291 - DNA, 2129 bp, Homo sapiens
ttcataaataagaaaactgagaccagagagattaaaaagtgatgttgaggaggccgctccgtcaactccaaaattggtagttgataaaattatataattttttactattattctctctttacatttcctctttcctcatccgatataccaagcatcttctgtgtactctctttattatttactaaatgcatcttcatcttctctttttccaattctactggggcttcttgcagagttatacagacaacaaaatagatctgttttcactgacaacagtgatttgttaatttccttaaattataataattgattataatattgtgtataattaatatattgatgtgtactaggtaaagaagaaaatcaatgagcaagtaaatgatagactctaatccttcaatttaatattamttctcatgttaaaccttactaatgttttcagaatttttatatttttggggatctaggaacacatgtattctataaaatacatgcaggacctagattgtagatcatcactaggtattcaattatactagacaatcaaatcttagtgagaattttgaagaggtaaattaaacatcaggcaactaaacagtctttagcatawgaagagaggaaagaatggggaagactttgtcttgaatctaggataccagctcagtcacaacaggatagggtattgctcagcatccggaggccccatttgaggctctatctcccagatgagatttctagacacaccttggtccagaagggaaactactaccttgaaggaaagaatctagtcctgacagtattcaacwcctgctaaccgacgagcccttgggccctgaataaccagcagtgacacccaggtactacattgagggccttaggtgagcatctgaaactttctgtcttcagataagactcagcacattaccagctgtagtggctatgggacaaaactccttcttgagaaaagcagagggaaaagtaaagggctattttcttgcactttagataccagcacagccacgtgaawaaactatacaaatacaaggaaattaagtgatattctcctgaattaccagtgagtcaatgaagaaattaagaagaaaatttaaaaaaaagtattgaaaattaaaaaaaattattgaaacaaatgataggggaaacacaatatactaaaatgtgtgagatacagcaaaagcagtactaagatggaaatttacagctataagtgcctacatcaaaagagaggaaaaatttcaaatgaacaatctaataatgcatcttaaataactagaaaagccaaaacccaaaattatcagaagaaaatgaataatgatgagagcaaaaattaatgaagctgaaatttaaataaaaaaattaaaaagatcaagaaaacaaaaagttggttttttgaaaacataaacaaaattgacaaaccwccagccaggctgactaagaaaaaaattgacaaacctctacccagactgactaagaaaaataagagagaagattcaaataaataaaatcagaaatgaaaaaggagatattacaacagatactggagaaatttgaagaatcattaatggctactatgagcatctatgtaacaataaattggaaaatctagaagaaatawaggtagttctttttagcagtgtgaaaacaaactaatacaaacaggaacaaagtcacaaggcactaaagggatcaaagtgggattatgaatttcatatacaagaaaaatattcttcagctataaagtctgaacatacatgaagcttacaaatatgttttttctgggggtacttcttaagaaaactatgaaaagaggaactttatgtgaaatctcaggagattatgtgaaagatgaagttgtgagcattaaatatgtgaaattgtggaatacattctaaattatattacaggaatagagtgacagcaaaaagtgtaaaaatggtatgcttcagaatacagaaatatttaaactaaatcaaaaatgtggaagaaaagtaatgggaataaataaaaaawattacatcatccaaagcagctagaaattaaatgatgtaactgaaagtatcattggcagtgcaaagctaaataataatgaaaataatactaacgactaaaac

SEQ ID NO: 289292 - DNA, 579 bp, Homo sapiens
acacttggtctctcctattaccatcttaccacggtatagtatatttgacaccatagaaattaaggaactsacataaatatatatgcattcactaaagtcaatacttcatttatattttcctagtttttacttgaagtctttttattattccaaaattccagccgggatttcatatgacatttagtcatcatgtctccttaggcttctcttaagtgtgacagcttctcagacttgctttgtttttgataaccttgacagttttgagggctactagtcaaatattttgtagagtgtcctttacgaggcatttgtctaattttttttctcatgattagattgagattatgagttttgtggatgaagaccacagaggtaaaagtcattcttatatcataggaagggctgcatcctatcaatgtgacttatcactattgatgttgatgttcatcacctggctgaggtaatgctattcagatttttcaaatttaaagttattctcctctcgccctccatttagtactctttggaaaaaaagtcactgtgcaaccattaaacataattttcataattatttttaat

SEQ ID NO: 289293 - DNA, 579 bp, Homo sapiens
acacttggtctctcctattaccatcttaccacggtatagtatatttgacaccatagaaattaaggaactcacataaatatatatgcattcactaaagtcaatacttcatttatattttcctagtttttacttraagtctttttattattccaaaattccagccgggatttcatatgacatttagtcatcatgtctccttaggcttctcttaagtgtgacagcttctcagacttgctttgtttttgataaccttgacagttttgagggctactagtcaaatattttgtagagtgtcctttacgaggcatttgtctaattttttttctcatgattagattgagattatgagttttgtggatgaagaccacagaggtaaaagtcattcttatatcataggaagggctgcatcctatcaatgtgacttatcactattgatgttgatgttcatcacctggctgaggtaatgctattcagatttttcaaatttaaagttattctcctctcgccctccatttagtactctttggaaaaaaagtcactgtgcaaccattaaacataattttcataattatttttaat

SEQ ID NO: 289294 - DNA, 1119 bp, Homo sapiens
acacttggtctctcctattaccatcttaccacggtatagtatatttgacaccatagaaattaaggaactcacataaatatatatgcattcactaaagtcaatacttcatttatattttcctagtttttacttgaagtctttttattattccaaaattccagccgggatttcatatgacatttagtcatcatgtctccttaggcttctcttaagtgtgacagcttctcagacttgctttgtttttgataaccttgacagttttgagggctactagtcaaatattttgtagagtgtcctttaygaggcatttgtctaattttttttctcatgattagattgagattatgagttttgtggatgaagaccacagaggtaaaagtcattcttatatcataggaagggctgcatcctatcaatgtgacttatcactattgatgttgatgttcatcacctggctgaggtaatgctattcagatttttcaaatttaaagttattctcctctcgccctccatttagtactctttggaaaaaaagtcactgtgcaaccattaaacataattttcataattatttttaatwttatttctcttggtcattaaaaattcagttctagggattattcataagaaaatgtttagattataatctctgtgtgtgtgtgtttgtctgtgtgtgtgtgtgtttgttccaggtttaatataacatacattgtaatgcacttttagcaaatgtagcagtttccttgaatttatactctatattgwactattttccaatacataagattttttaggtagaaatctaggaattacttatttcattctgttagtttaatgtggattgcgtttaaatcaacaccagtttaattccgattgtgttgtgcatatgtaaatgagtcataccattactggattgaaatatacagtagcttgagtactttgcctattcatgcaccacagaatggtattacagcacatattatattatttatattctattgccttgcattttttcttttaggcacctctgatttgaatataattttctttaaattacaaaggaattaattcatcttttgacaaatacactttattcttcctagatattgatcatttcag

SEQ ID NO: 289295 - DNA, 563 bp, Homo sapiens
caagcagacatgtattattcgaaaaagcctccatttagattcatcctatcatactatttgtattctggacatgtttatttgagaaaaatttaaatcttatttctgtctgtgattttatttaagctatatattctaccaaattccccattgcaaatgctttctgttactgattcagattgtattttcataaattattctaattctatacatggagacaactcaaatttaaaatcttaatcagagaaaaatcaaagctgatttatgagaatgaaaacttatgcgttgtcacaacattaggggaaggctgagagacattagaycactcctaactctgagtctctttttgctgctccaggatgagatactttgctgccttcaggccaactattgcatcccacctcacccacaccagacagcttgaacagaaccttttcagacttccttcaaggggtagtctggttaagctaatcacaattctgtgtgttggcatccaggtagagctacaagtaataacactttgtctagggtcattaattgtaaggggatctgataactttaatgta

SEQ ID NO: 289296 - DNA, 461 bp, Homo sapiens
cagctcctgttttaaatgttccagttatactctttctttgatcaagcctcacaggtctttctttctgatgcagggtagaatataaagcccgtataatacagtttggcctcatattctacaactttgccctttgactgcttggcttttgagttgcgtaggacacattactatttcccaaatgctccaaagtcaggaattacacaccagattttccatctaccyaaaatattttttccaagatatttacatggcctggatcccctagttcttaggtttcagctcggagaggccttttctttttattatttgtaaaataccacattcattatatttacaaacatctaatggcctgtgtattcatatatttctttctttcttggttctcacatcaacattaaagtctgggaggacaaaatgtttttgttggtctcccttattgttttcactggtattcctaggac

SEQ ID NO: 289297 - DNA, 560 bp, Homo sapiens
ttgtgaaacgctatactgaagagrgtggaatttctagtaaataaacaagtctggctacagtgatatggaaattggataggaaagagatatgacatagaaatctgttaagaaactgtatcaatagctcagccttcttttcatgaaattctagtaaactaggctcacaggagggaaggtgtattagtcagggttctccagagaaacagaactaatagtacatataagaggggatttaatgtgggaactgattcccacaattatggaggccaagaagtcccacaatatactgtctgcaaggtacagaaccagggaagcacgtggtgtaattcggtcttttcagtgttagtataaaagcctgagaaacatggtgggttggagagaggggttgctaaatttaagtcctggagtttgaagacccaagaaccaagagatcagatgtttaaggacaagagcagatggatgtcctagctctagaagagaaagcaaatttacccttcctatgttttggttctacttgggccctcagtggattggataatactatgcaaattggtgagggc

SEQ ID NO: 289298 - DNA, 607 bp, Homo sapiens
tcaggttctgggctcagcttcctgtttagtggtattatatttgtgatctcttgtggagacattgtcccttgagaactgagatgtctaaaccagctgagctcaaagtggtggtacaggaagacacaatttttactggttcattatgagttaaagtgggataagccactttcattttcacycattgaaaaccttagagccaagagctgaaaagaacagtagactagggaatcattcttggattgcaaaattcagcccaaatcaaggaaaatttcctagtttgaaaacagagaacctgacctgtgctcagctggatttcagaattgctatggaccagtgaatgctacacacctcatgttcctctccttttaaatatgtctattttaattattttgtccctatctcactattgcatgcggggtgtttggggaacggataacttatctttttagtttgtagttctttggttcaagaagaccctcatgcagagaactgtactaaaataatctcaattatatccagacttgatacagattatgaaccatggatttcaagtccgatggcatgactgataagatttggtgggtctggagaaaagataagtgtagtt

SEQ ID NO: 289299 - DNA, 1184 bp, Homo sapiens
aatcacataactgttctgaatttaatatcttcacctataaatataattgtaggaaattatcacatttartgagtatatatcatgctaggcgcttcttgtacattaacccatttaatctttgtattaatttgtgtaaatatatcttttccatcattgtctccccaacctatacaggacccggaacatgatagatgctcagtaagtgtctcttgagggaatgatgcaggcataagttggtattattactaccttagttataaagaaattgatgtgatggctgggagcagtggctcatgcctgtaatcccagcactttgggagaccgaggtgggaggattgcctgaacccaggagtttgagaccagcctgggcaacatggaaagaccccatttctgttctttaaaagaaaagaaattgatactgggatgtgtcatgacactagataaagattacagagtaaataaatggcactgttggagttggaagctgcgctgtctaattttaaaacctttgctcttcttagtaaatgatcttacttctccacccagccaactcttatagaaccattgtgagagttaaaggaaatgaaaatgtgaaagcatgctatgaattctgawcacacacacacacacaatcacacacacacacacacaatcacacacacacagtgtctatgggatatttggagtgtaagacaatggcattttagtaacctgactcaccctgctcaactgatctgagagtgtgtctagaggaccagtgtaccttcagcccgtagcacagcatgtgatacagagtaggcgctcaaaatactawtttcagtgaataaatagaagactggagtgtctagatattgctgtcttattattgaagcttttgaattaatttttaatcactcattttctaaaaaggagcagtgagttttaaagatgagagccaagttgaatatatgcctgagttcaaacgggatctttcacaggctatttggttttctgaatttcaatttaccaaactgcagtaaagagctggtcccagaacagtgctcacccagaacagcgagcacagaatacatactcattctttctccttctttattggtaactttgatcctcagtgacctctttttatctgaacaacaggaaataatcttaggagtcaggacacctgatcttagcactaaatctct

SEQ ID NO: 289300 - DNA, 556 bp, Homo sapiens
caatgactgcaacttatatgatgccattaaaggaatcctgaggaatgaaattatgctggactgcggcactgatacaaaagagctatcaattatcaatgtcccataaatacctatcaattatcaatgtcccattatatggcagctactagaagtacctctctaatcctggccatcaccctaaaagatattattatcaccgtcatccccatattacagaagagataattgagactaaggaaagttaactatcatgtcagcatataaaacatctgagcctgggctcacaacgttatctgtctgaagccagcgcctttgtctcctgccctgcactatgcaatttgctttcttagaaatcagagaagatgaaacccctgatataagtttttttaatttttttgttgggccctgaaagactcagagaaacagattatgaagtaagccatttcaggaggaggtcacagcatgaataaaatgaataaattatgaaaaaatatctttggagatattgaggtgtccartgtgcctaaagaggtgtttggcaatgggctattcatta

SEQ ID NO: 289301 - DNA, 652 bp, Homo sapiens
tttaaattatttatgaaatttggaaaagcattaataaaagtatctgaagtgaggaaagtgttggtcctgctttcctggtgctggtcagacttcaatttgattgaacatataattaagcacatattatatatcaaatccttggagmagtgtacacagattttaagaggactcagcaaacagggaactatgaccacagcctgggtgacagagagagagactctatctcagaaaaaaaagagagagagagaaaatggatagtggtaatagttgcacaacattgtgaatatccttaatgctactgaattgtacgtttaaaaatgattaaaatggtaaatattacatatattttacaattaaaaaaatcaaagaaaaaaagtaaaaacaatctgaaaactatgacatatgtgaaatggttgaaaagatgagagcatttggcctgaggtcatggtacttaatatgcatgtctaattatatgcaattctagttgaggaagagccttcctcctggaaaggagagaaagtttcaggccaatatcttgtgacttgtgaaagcaaagatttgaagcaagggcaggaaagtaacttaggtatggcaaggacaaaggtgtatgcatgcacactctggtgcctggtgtacatgtgtgagcaaaaca

SEQ ID NO: 289302 - DNA, 652 bp, Homo sapiens
tttaaattatttatgaaatttggaaaagcattaataaaagtatctgaagtgaggaaagtgttggtcctgctttcctggtgctggtcagacttcaatttgattgaacatataattaagcacatattatatatcaaatccttggagcagtgtacacagattttaagaggactcagcaaacagggaactatgaccacagcctgggtgacagagagagagactctatctcagaaaaaaaagagagagagagaaaatggatagtggtaatagttgcacaacattgtgaatatccttaatgctactgaattgtacrtttaaaaatgattaaaatggtaaatattacatatattttacaattaaaaaaatcaaagaaaaaaagtaaaaacaatctgaaaactatgacatatgtgaaatggttgaaaagatgagagcatttggcctgaggtcatggtacttaatatgcatgtctaattatatgcaattctagttgaggaagagccttcctcctggaaaggagagaaagtttcaggccaatatcttgtgacttgtgaaagcaaagatttgaagcaagggcaggaaagtaacttaggtatggcaaggacaaaggtgtatgcatgcacactctggtgcctggtgtacatgtgtgagcaaaaca

SEQ ID NO: 289303 - DNA, 1123 bp, Homo sapiens
gaggttcaaaccctccttctgtcacttggccaattgtgtaaccttgacagccaatgaatgttatgcctagcattccacatcttccactatttctgagcttccaaatatgtttctattttttattgctgtgaaacaaaccaccccaatctcccaggcatagaataataatcatttattatcatctccttgttagagggtttactgggctcagctatgtrgttctcactcagggtgtctcaggcagttgaagcccagcagtgtctgtgcctggattcattaagaaggctggttcacatgtctcttggttcatgcaggctattggctaagaccacgctagcaactgtagccagaacacatactggatcctttccacgcgtcttgggcttcctcacagcatggcagttggtttctaagagtgagcattgcaagagagtcaggcagagactacatagccttttacgacctaatgttgaaaatcttgatgggtcactgccacaacattctatgtattatggagtcactaaggtcagcccatattcaaggggaggagaattggactwttctgtaacatcaaagtctgttagacacacaaataagcaggcacagtatgcagccaggagcctagaagtgggagggagcccagtacagccagccagcagcagcaatcccagcccggagggcacggtgtcgctgtgcttcaggatgcgctgtcctctgtgcattccatctgtggaggacacttaccgcctctcctgcacctctccttagtgactccaawctcatctggctttttggtcttaatgcaggatttcttaacatcagcaccactgacatttgggactgggttattctttgatgtggcgttgtcctgtgcactgtgaagggtgagcagcattcctagcttttatctactggagagatgcaagttgcacacccatcctcctccctgtgtcttaaccatcaacagtgtctccaatagtttccaaaagtcgcttaggaggcgtaaaatcacccagggtaagaacaactgcccagggttcccacatccctgatgggtgcttcccctacttcctgaccaagtttgattttactctgatggttcagctctcccttcttagcatct

SEQ ID NO: 289304 - DNA, 619 bp, Homo sapiens
gcaatatgatgtttcaaaggccatacttagtgataggaaagaaaaggcaaaaacagaagctttcttttcatacaagaacaaagagaaatgacatatccagtaccagaaggggrctttttgatggccaagaaaatatgttataattagaagataattacagctttcttctctcaaatatcaattctatcacttcccattgctcacttcagttttgttcctttaatccctaaagttgatcttcggtgaatgagattttctcttccttgacaatcactgcaaaggccatggtccagaaaactgaatgcacctatctttgagcataagttaggccagaagatgagatctaacctttatttttttttaatccaaaactgtcttaagaaagtgggccactcaaagtgaaggcaagaggtaagatcaagcaaataatgcgatgatctaaccatgaaggtttcactgatagtggtcttaagacatttcattctttcaaaaaattgccagccctttacattcttctaaggattggcagccgttcaaaaagaaaaaaggaagaaaagaaagaaagtattacaataagctaaccaaataacagaaagctattaataatatgtttcacaaa

SEQ ID NO: 289305 - DNA, 544 bp, Homo sapiens
tattacttccattttagagatgagaaaactaaggattagagactataagtgatttatatgtagtattcacattcacggtgagtagttgaaataagtttagttattctaaatccaaagctcatggtctttcatcaatataaagaattgatggtgaaattatatcttgcaatttagacctttgtgggaaatgcatatttttrggaatattatctcatgttgctgtcaccacagctcaatgggaaagataacataatatcatgcatggatttcaacctacctcagaataactcagaaaattaggacaatcctttataatatcacagactcactttcctcatctgaaaagaaggatagatttaaataaccttcccttgaaatgctcgaaaacagaatgagttagaatagaacttgaaacatctttcctagcactttctactggccacttgatttcaactcccttttcatctgtcttaatttcataccagcctaggttgaatcagatcatctctaaagttcctttccaggcttaaaattttatttaaac

SEQ ID NO: 289306 - DNA, 452 bp, Homo sapiens
actttgaatattgctataatcaatgaagatttctcttagttttttgattgacaaataattatatatatttatgagttccataatgatgtttcaatacatataatgtatagtaaatgaattaggataattagcatacccaccaactcaaatatttatatctttgtgttgagaatgttctttatcctcctcctagctatttaaaaccatatattttcaattayactcatcctagagtggtataaaacactagaatttattcctgttatctagctgaaattttgtatcttttaacaaatctctccctatattctcttccctctaccattcccagactctagaatcttctgttttacctttttttaaaaaatagagacaggatcttactatgttgctcaggctggtcttgaactcctactcttgagctatcctcccaccttggattcccaaaaagc

SEQ ID NO: 289307 - DNA, 508 bp, Homo sapiens
cctgataaggtggcatacattatcctaaagaaagctaaatgaagccaaaacagagatctaaaaggaggggttttaggttgcaaacaaatgtgcgtgtcttaacatgggtgtgcgaactgtttggagttaaagaattagttattcatagatgcatatataacatactttttacaatgagttaactcagttgcacagaaaaatgtggagcctcctactggattggatgaattgactctrtaagtaaatcatactgtgagtcaatcacaaatttagctctaagcttcctagcaagcaacatgaaaacagacaacttttatcttaaatgatttgaaatactcatgaaacaaaaataggacaatggcacagaagaagtacaactttccttgatactaagatcctataggaatttatcccaatggttcttataaaagagaaagagagaaagtttgtgatatgatgaataaaatgacctacacaacatcctttctataaacctcactaaggtttt

SEQ ID NO: 289308 - DNA, 1161 bp, Homo sapiens
aaaaataggacaatggcacagaagaagtacaactttccttgatactaagatcctataggaatttatcccaatggttcttataaaagagaaagagagaaagtttgtgatatgatgaataaaatgacctacacaacatcctttctataaacctcactaaggtttttataagggtatttctcataacatcaaaatagtctgaatagatattacagcaaaatgaaattcagttttaaaatatccttcaaggcaaggtcttgaataaaattatctcgttattttatgtgatccacgtgtatgttcaaggctatctgaggaggagacaggctgatgtatctcaagcaatcctcccccaatagcatttcscttacctgatctttgtgcaaaggtggagtaatagtggtgagcttggcattgtctctccctgtgagatgcccagagtttggcacatctgtgatttctgtttcatgcagacctgtgtgctgggaaatcagcaagccaagctccagggaaataagcttttctgggaactgaagagccagattataacaaatgcttggatgctagcctgcccatttccaccwaaaaataggacaatggcacagaagaagtacaactttccttgatactaagatcctataggaatttatcccaatggttcttataaaagagaaagagagaaagtttgtgatatgatgaataaaatgacctacacaacatcctttctataaacctcactaaggtttttataagggtatttctcataacatcaaaatagtctgaatagatattacagcaaaatgaaattcagttttaaaatatccttcaaggcaaggtcttgaataaaattatctcgttattttatgtgatccacgtgtatgttcaaggctatctgaggaggagacaggctgatgtatctcaagcaatcctcccccaatagcatttcccttacctgatctttgtgcaaaggtggagtaatagtggtgagcttggcattgtctctccctgtgagwtgcccagagtttggcacatctgtgatttctgtttcatgcagacctgtgtgctgggaaatcagcaagccaagctccagggaaataagcttttctgggaactgaagagccagattataacaaatgcttggatgctagcctgcccatttccacc

SEQ ID NO: 289309 - DNA, 567 bp, Homo sapiens
ctctggggtgctaaaaccacctctgtaagactaataaaaggctactagattgggattatgggaggagcctgaatcctgctaaaatgtagtgatagtttccataatcccttactgaccaggagtcatgtggccagaggtcacaagatttgtgacttctccaatcgttactataaatagcatcactattggggaacctaagattgatctttgagctatttttcaracttttgcatatcaactgctgattccacctagatttgtgactcatgattcaacttatcttgtggctcctcaacccagaagcagactcagtacaggaggactgttttccacacctctatgactgcacccccaacaaatcagcagcacccatcccccacacccctgcccaccaaactatccttgaaaaaccctaacctctgagccttcagggagactgatttgagttacaactctagttgtttcatgtggctggactcacattaattcaactctttactgcaatacaatggtcacagtgaattgatttggtctgtgcagtggtcaagaagaacctgttgggtgatt

SEQ ID NO: 289310 - DNA, 417 bp, Homo sapiens
ctgcccaccaaactatccttgaaaaaccctaacctctgagccttcagggagactgatttgagttacaactctagttgtttcatgtggctggactcacattaattcaactctttactgcaatacaatggtcacagtgaattgatttggtctgtgcagtggtcaagaagaacctgttgggtgattacatctgcttcttcatatgtaatgcagagatgttcagagttaagaccatgtcagggygcttatgggaggcctaaatgaagtgatgtaagaagcattccactccagggtaacttgcattgacaccatggggcctgaggtgggcatggaataaaatgcttaacagaaatagtacaaaaacaaataccagggcctttagcagcagtttccttctctgagccaacaggggaaggggcg

SEQ ID NO: 289311 - DNA, 610 bp, Homo sapiens
ggtaacttgcattgacaccatggggcctgaggtgggcatggaataaaatgcttaacagaaatagtacaaaaacaaataccagggcctttagcagcagtttccttctctgagccaacaggggaaggggcggatggaaccagcyatgggcatgagaggcgagagtgaaatgtccaagggatcttcaaggacagcagaggcattgcgtaggggcagcctgagcaagtccacattagaaaccttcttgagactgtccagagggtaggggacacactttcagtcaagtcttgtctttcagcatggagtgagccagaaaaacagtgatgtctttttctacccctaggccagggaaaccacagtaaacatacgcatcatgttatggctgactgagagtcaatgctagcaatttcagacagacccaatgttataaatttacccaagactatttcaggggccctgggataacagtggtagaaagtgaacccagagacagatgggcaatggcttcaaatattactttcaacactaagtagcatatttggaaagtcacgtaacctctgagcctgtttcctcatctacaaattggagaaaatactgtttcatatggtggctg

SEQ ID NO: 289312 - DNA, 573 bp, Homo sapiens
ggcattggactcaacactctacccacattattccattgagttttcacagcaaatgtgtcctattgtattcccattttacacacggaaaaactgaggctcagggaattgaatggacttgcccagattgttaagtggtggatctgcgaagggaggccagtgagcctgactcagaatttggtgctttaaactatcattggcaattkcacatgaattgtctaccttttctgacagcttcatagagacatgtaaaaatattggtgctcctcatggatctatcttgagcccacttttatgattcttaccttacacacttacaggggggttgatctgttatttcctctgcatgaaattccatgtttatgtttttcagcttcatatttctgtatccagctacctgctgctgtctttatctgcttccctatttaaacttcaactcaacatattcacaactgaatttactcctttttttgtaaatcttctttccctcaaatattccctgccatagtcgaatgacgccctcaaccagccagttgccccagggggaacctgaaaattattcctaaaacctgctgt

SEQ ID NO: 289313 - DNA, 548 bp, Homo sapiens
tgaggagctcaacgttcccatacagagaaacacagaagaacccaaaaccagactcttgagggtaggcgacacggagaagctaggtgacacagagaaggcagaggctgagaggtcccctcctaaccacaagcatcctgataagcagaaggccactgatgactatcgttataaaaaggtcaagaagatgaacaggcagtactgagctgtgcagaatgggatgtaaatattgccttcctctccctctctccattcctcccatgaaaaatggcttcctggactgagaatgctcagttgctagcagasagttccagaaacagactctattaggcctgctgcttacctgttggattttttaagcactaaattggtaactttttgaaacaaagcaatgcataatgtctcatttgggggcaaactctatttttgtgaacattattaaatcttgtttgtaaatacattgactttctcttaatattttctccaaggtcaagaagaaacaactctgtattcctagtgtgataatatcctttagattatgcttttattat

SEQ ID NO: 289314 - DNA, 604 bp, Homo sapiens
atctaccagctgcaaacatttaacatttctgaggagtcagtatgctttacccaatgaagaaagccctttcattgtcctggctactgggctaagtgaaagtcagtgatcagggcttctcttgtggttgtgggtctgtgtgactcactagtcatgaataccacaaaagcaaatgctgctcctcattctttcttgtgtctttactacctaacagagacatgattgttcaatatttatctattatagggattgatgcttagggatttagaagtagatgggaacttagtatctttgcaagggttcctaaactccagtcatctgtgtaataaatgcatacagcatatctttgtaatatattatacatgtttgcacatgtgagtcctatttttactctcatttattatttattgactctttattattcattaactmttattaccatccctggttttacaggtaaagaaattgaagcttaaagtaattaggggacttgcccaagtctcctaggactggaattagttaagaattagtgtcagaactgaatttgaacataagcagtccgattgtagattcaggggtgtgtagcccgcccttcctgccctcgtat

SEQ ID NO: 289315 - DNA, 512 bp, Homo sapiens
gtgtagcccgcccttcctgccctcgtatctaaggctttttctgctttttgggcgaaggagccttgctgtaaggatactgcggatggggagataacaaggtgcctgcagcccttcgtgaggggaatgccagaagccttgtgggggatgttyctgcagtgcctcctgaacagaaggagggagctcaggagagaaaaatcagaagagtcttcctggactgaagctgggaagatggtggtgcccaggagaggaagggaagccagacacatttctctctgaactgagctaccactggccatacagttcaagtctctgtttccaaaggaaaagatataatgccctcttaaaactgatctgccttccgctccaaaatgaaggtcagcaagagagaagtagcattcgagatgctaatgaaagaaaaccccaatgactgcagaagcaatttaaagatttgcccggatttgtttaggcccccctggctgtgacttctacttgcaatttctcctcagcagcct

SEQ ID NO: 289316 - DNA, 512 bp, Homo sapiens
gtgtagcccgcccttcctgccctcgtatctaaggctttttctgctttttgggcgaaggagccttgctgtaaggatactgcggatggggagataacaaggtgcctgcagcccttcgtgaggggaatgccagaagccttgtgggggatgttcctgcagtgcctcctgaacagaaggagggagctcaggagagaaaaatcagaagagtcttcctggactgaagctgggaagatggtggtgcccaggagaggaagggaagccagacacatttctctctgaactgagctaccactggccatacagttcaagtctctgtttccaaaggaaaagatataatgccctcttaaaactgatctgccttccgctccaaaatgaaggtcagcaagagagaagtagcatycgagatgctaatgaaagaaaaccccaatgactgcagaagcaatttaaagatttgcccggatttgtttaggcccccctggctgtgacttctacttgcaatttctcctcagcagcct

SEQ ID NO: 289317 - DNA, 422 bp, Homo sapiens
tgatccttgttcactcctcagaccttgtctactgactcagccattccaactgaaatgcttttcactggttgctaaatagtcacagcgtgtgttcctagagtaacctcccaccacttaactgtttatttccctaaaacttttcagcatttcccaagactcattaactagtgatgcctggccctacmaggcatgtcctgttcttgttggttggagtttgtggcagacagagatagtcagcccagatcctccttcaataaagaatttatcatttcattgccaggaatccagtcatcagacactatccaatattgggtttggctgtagagacctgggccatgctcctcttggaataatcataccaaataaatgagcaggatggagcttaagggtctggccatttcagctcagtggcaaatacccct

SEQ ID NO: 289318 - DNA, 1192 bp, Homo sapiens
gcaatgatcttcctatctgtcattttctctctctgacttaaatctattctctcagaggttagccttactaaaaatttggttcaaagccttgccaagtaatgtgaaatatgacagatgtatttcctatggatcttttactcctggaattttccatgtgtcaataatttcctaccctccagtagattttgatctagccagattccttgcctggtccatgaagggaaaacagaaaactgaaagaccttgaactccttcttgtactccagttctcatgaactcaaaacacaaactcatttaaagttagtgtggcatcatcagctgaaagctgagagtaatttaaaggcttttcttctctatcagctccctgagcccctccaaacagaagcattttaaactgatgcctcttgagagttctgtgtatggagtgctgagaatgaatgagattgtctcccaccccagagggtagcagaaaaattctgattgtggycaactatcttcagcttctggttttccctaagatccttattgtagggccacttgttctttttatctagtaggtatttgatgtcatgatgagattaataattcawtgtgattttaacttgaattttactgattatgagcatttgaatttttcatattgagaattttttawatacttattggccatttgtcttttgagaaatattgatttaggtattttgctcattttattttaatttatttatttattaacttatttatttatttattttgaaatggggtctcaccctgtcacccaggctggagtgcaatggcaccatctcggctcactgcagtctccacctcccagagtcaagtgattctcccacctcagcctcctgagtagttgggaccataggcatacactgccatgcccagctaaatttttgtatttttagtataaacagggttcactatgctgcccaggctggtctcaaactcctgagctcaagctattgcctgctttggcttcccaaagtaccaggattatgtgcatgagccgttttctcgtttttaaatcagattgttgattttcctactattgagttgtttaagttgcttatatatattcaatattaaccccttataagatatatgattttcaaatagtttctcccattttgtgggttgcttcctcattctatccattgtttcctggcttcaaaatata

SEQ ID NO: 289319 - DNA, 518 bp, Homo sapiens
aggaggagcagagcctccagacaatgcctgattatgaaatcagagaaacctcgatctgcagagaaacctccaatcagcccccatcccaacccctattcttctgaaacctgtgctccaccctgcaccagggtctttgcaggaaaggttagatctgagcatttcatgccccttgtcggatcttccacaggaacatcgctctaaaataaagccctcatccctgggcatagatcacaagattargcacaccatgggccagagctgagaccagctaattctaattgtcactgattaatggcactggttttggttgcataccatctccaggtttttattttaaaaaaagctgtgtataaaatcccaatcacggaaaaatgacattaccatgtaggattttacatccattgtttggatatgattgcaaggaagatgggggaggttcaaatctaattgctatggaaacataagtacttttcatcttgtgtttttaataaagtctcagtaactctccttacattttc

SEQ ID NO: 289320 - DNA, 518 bp, Homo sapiens
aggaggagcagagcctccagacaatgcctgattatgaaatcagagaaacctcgatctgcagagaaacctccaatcagcccccatcccaacccctattcttctgaaacctgtgctccaccctgcaccagggtctttgcaggaaaggttagatctgagcatttcatgccccttgtcggatcttccacaggaacatcgctctaaaataaagccctcatccctgggcatagatcacaagattaggcacaccatgggccagagctgagaccagctaattctaattgtcactgattaatggcactggttttggttgcrtaccatctccaggtttttattttaaaaaaagctgtgtataaaatcccaatcacggaaaaatgacattaccatgtaggattttacatccattgtttggatatgattgcaaggaagatgggggaggttcaaatctaattgctatggaaacataagtacttttcatcttgtgtttttaataaagtctcagtaactctccttacattttc

SEQ ID NO: 289321 - DNA, 452 bp, Homo sapiens
agtctcacgaacccaggggaggacaggcactcctgttttsagatccaaatgttgcattttccaagatctctctggcctgccatgccccctattctgtgcctatatagcccccaagaccctagcaggcatacacacaagtgtgtggatgtcaagagaaacacacaggcagaagaacacaccaacagacactggcaggccattgatggtgggatgacgtggaatttggctgaggacagttggaggatagcccagccacagagcagcctgacccaagggaagaccactttcccactccatccctctcatgctccccatccatctgctgagagctacttctaccactcaataaaaccttgcacccattctccatgccaacacgtgatctgatttttccagtacactactgcaagaaccccgggatacagaaagccctatgtccttgtgataaggca

SEQ ID NO: 289322 - DNA, 598 bp, Homo sapiens
actgacagaagggttgctgagttagagaataatgacaacagcttggaaaagaagctctattccttccacagtctccattgtaacaggactgtaaattaattatcaatggtttccaagggttactagagcctacctaacaggcatgttgtaagaatataatgacatgtcaaatataacacacacagaacagtacctagcataaagaaatcacaaatacttgttaagagaacataagtgagagagaaaatatagacacattccagcaacagggaatgtagtgtctgtctggctttagctacrtttgtcttccctgtcctttatagaaactaacttcaccaattgatgtaaaaactgtggactgaatatttatattattttctgtttattaaacctctttctgtagcattacactgtctgatctttcatttcatttattcttcttttcttgaataaatattcattcggcaccaaccaaacaccaaatattatataagatcatggtagggtgtggacggatctaagtttcagagaatgaatttctaaaaagctagagagatcatgagtgagtgaatactcaagggtggtgtatgataggaag

SEQ ID NO: 289323 - DNA, 583 bp, Homo sapiens
agtgctatcttattgttgctttgatttgcacttccctaatgactaatgatttygagcatcttttcttgtgctttttggccttttctgtgtcttttttggagaaatatctaagtcctttgcctatttttaatcaggttgtttgtctttttgctgttgagttgtaaaatttctttatgtattctggatcctagacccttattgattatatgatttgcaaataattctcattctagtaaaactttcttcttttgtgttcccaaagagataaatgtccgggccaggtgtggtggctcacgcctgtaatcccagcactgtgggaggctgaggctggcggatcacctgaggtcgggagttcgagcctgaccaacacggagaaaccccatctttactaaaaatacaaaattagccaggtgtggtgttgcatgcctggaatcctagctactcgggaagctgaggcaggagaatcacttgaacctgggaggcagaggttgtggtgagccgagatcacaccacttctctccagcctgggcaacaggagtgaaactccagctcaaaagaaaaaaaaaagataaatgtccttaat

SEQ ID NO: 289324 - DNA, 531 bp, Homo sapiens
ttatactaggataacattttatttggaggaagtgagaaatgcccatttctagagggccaaatcaagtatgtggtacttgttgatcattgttttaatatgtacaaaatgctgttgactttccttttatttggtatgtcatgtttattgtttatgttaaaaatgcaaaaggrggggcagggccaagatggcccactaggaacaacaacaatcagaggctcccattgaaaagaagcatatttagtatgtgaatccttcactggcaaccaatatattcaggttctctcgtcagaattgactaggcagctgatgtgatccgcggaaaggaaggaagagcagtgtggtgcagcggcccacctgagagccacatggggcaagggagcacccgcttcccggccaagggaggcagtgagtaaacatgctacctagctggggaaactgtgttttatccacagaactgtgcaacccatggatcaaagattccacttgcaaacccacaccactggggcccagagtcccaacccccaaccctgg

SEQ ID NO: 289325 - DNA, 571 bp, Homo sapiens
acaaaccttctgtttgtttgtttttatagtggttattccagtggatgtgaggtgatgggttattgttgatttgatttgcatttctctaatgattagtgatatagagcatttgttcataagcttgttggtcactgatgcatcttctttgcagaaatggctattcaacctctttgcatattttttaaggctttgttattgttgttgacttgtaggacctttttttaaattctgggtattcaccccttatatgatatgtggcttgcaaatattttctccctttatgtagactgcctttgcattctgttttttcctttaatgtacagaaggcttacagttagaggtagtcctatttgtctattgcttttcttgtttgtgctttggaggttatagtcaagaaagcattgcccattccaatgtcatgaacatttttscattttcttataggagctttatagtttcaggtagtacatttaggtctttaattcattttgagttaattgtatatatggtgtaagagaagggcccattatctttcttttgcaaatggatatccagttgtctcaatgttttt

SEQ ID NO: 289326 - DNA, 571 bp, Homo sapiens
acaaaccttctgtttgtttgtttttatagtggttattccagtggatgtgaggtgatgggttattgttgatttgatttgcatttctctaatgattagtgatatagagcatttgttcataagcttgttggtcactgatgcatcttctttgcagaaatggctattcaacctctttgcatattttttaaggctttgttattgttgttgacttgtaggacctttttttaaattctgggtattcaccccttatatgatatgtggcttgcaaatattttctccctttatgtagactgcctttgcattctgttttttcctttaatgtacagaaggcttacagttagaggtagtcctatttgtctattgcttttcttgtttgtgctttggaggttatagtcaagaaagcattgcccattccaatgtcatgaacatttttccattttcttataggagytttatagtttcaggtagtacatttaggtctttaattcattttgagttaattgtatatatggtgtaagagaagggcccattatctttcttttgcaaatggatatccagttgtctcaatgttttt

SEQ ID NO: 289327 - DNA, 564 bp, Homo sapiens
ttggaaaaacgctggatactattaatacaatctaccacttcttgagtttttcatagatatgttgcagattctccagaatcttctttaattgttactcaatcattccacaaatatttaatgggcccagccatgttccaggcacattgggaccaataaagaaatagaaaccacrgtctctggtttaggataattaaaatgagtttggatggaatctcggtgcataaatttgctgagacaactagccaaggaatgtctgtgcctgctgaaaaagtaataacataatgaaaggagagagggattgccaactccactgagcttgctaatacctggggcagaaattgtgacaaggaaaggtgtggagatacatgactgtagaatactttctagtgagaaaaaaatttttaaataaacttttgaggataaattcagtgtaacaataattatggcatctccatctttgaaaaccttatttgaagtcattttcccccaaagcataagtcatcaactacagtctttttcatgttttattaggttggtacaaaagtaattgcaccaagctaaaag

SEQ ID NO: 289328 - DNA, 616 bp, Homo sapiens
cctctggtgctgaatgtgtggaaagaagctggaagtcttgtggtcaacacagcagaatgtggacttttgacttgggtgtttaaatgcaagctatccctgagggtttatcccattatggttcttcaaatgctgtttactcatcaycaagttgtggattaaaactaacagtatgaaacataacttctttgtgtagtctaggcagtagaattttcaagtaaattagatattatatgcatatattagtaaagttcttactctacagaagtaataattcacgttgcaagaattgacactgaacttcacttataatggttgattgggttctggaagatctttatggtattctggtgtaaataatgggtgatatagaaccattcaagtcagatgaatcatttggagctggctaaaaaaaaaaatctcaaaattttgatattaccagaagagtaacagagctgtacatattagatacatgtaggcacttttctgaccacattagtgcagtgaactatcagggaagttagatcagaagactggagcttaagtgccagcccttttcacttaacaactgtgatctcgaggatgctacttaacccctgtggatctcaatcccttatat

SEQ ID NO: 289329 - DNA, 528 bp, Homo sapiens
gaggtctgaggtaggttttaactagatacctctgacagtaagttgagaagagatgcaggaggtaaacataaaaaaaaagagaccagtttggaagctttaaaaatgatccagggcacatgttatggtgtttgaaccagggtggtggcatgggggtagggtgcgagaagtgtccagatccctggtgtgtattgaagatgagctcacagcatttgctgataaactccagatraagtgtaagagaaagaaaagccaagaatgacttcaagattaattgttcagggaaaactgcagagggagctgcgttgggtgggaatcttagcagctccacattgaatttattctaactgagatcctgagcggacatatgtggcaggcagttgaccatgagtctggagttgggggaaagttcttgaatggtgatgtagaattgagggtcattagcacagagctactgaaaggagaagtgaatttagccaaaacagttttattgaccaagaatataaataaaagtggtttttcaactcacca

SEQ ID NO: 289330 - DNA, 599 bp, Homo sapiens
tctgccttcctcaagtggctataggaggccttaagaaaatatactcccctgtmacccggctccatcaagggtcaattgatcctcaaagataagtttattacccaatcagctgcagatatcaggagaaagctccaaaagcaagccctgggccctgatcaaaatctggaggtgttattaaatctggcaacctcggtgttctataatagggaccaagaagaacaggcccaaagggaaaagcgagatcagagaaaggctgcagcctttgtcatgacaattagagaaacaaacttcggtggttcagagaggacagaaaatggagcaggtcaatcacccagtagggcttgttatcagtgtggtttacaaggacactttaaaaaagattgtccaatgagaaacaagccaccccctcatccatgtcctctatgccaaggcaatcactggaaggcacactgccccagaggacaaaggttctctgaggcagaagcccccaaccagatgatccaacaacaggactgagggtgcctggggcaagaaccagctcatgtcatcacctcactgagccccgggtatgtgtaactattgaggaccaggaaattgac

SEQ ID NO: 289331 - DNA, 599 bp, Homo sapiens
tctgccttcctcaagtggctataggaggccttaagaaaatatactcccctgtcacccggctccatcaagggtcaattgatcctcaaagataagtttattacccaatcagctgcagatatcaggagaaagctccaaaagcaagccctgggccctgatcaaaatctggaggtgttattaaatctggcaacctcggtgttctataatagggaccaagaagarcaggcccaaagggaaaagcgagatcagagaaaggctgcagcctttgtcatgacaattagagaaacaaacttcggtggttcagagaggacagaaaatggagcaggtcaatcacccagtagggcttgttatcagtgtggtttacaaggacactttaaaaaagattgtccaatgagaaacaagccaccccctcatccatgtcctctatgccaaggcaatcactggaaggcacactgccccagaggacaaaggttctctgaggcagaagcccccaaccagatgatccaacaacaggactgagggtgcctggggcaagaaccagctcatgtcatcacctcactgagccccgggtatgtgtaactattgaggaccaggaaattgac

SEQ ID NO: 289332 - DNA, 528 bp, Homo sapiens
gaggtctgaggtaggttttaactagatacctctgacagtaagttgagaagagatgcaggaggtaaacataaaaaaaaagagaccagtttggaagctttaaaaatgatccagggcacatgttatggtgtttgaaccagggtggtggcatgggggtagggtgcgagaagtgtccagatccctggtgtgtattgaagatgagctcacagcatttgctgataaactccagataaagtgtaagagaaagaaaagccaagaatgacttcaagattaattgttcagggaaaactgcagagggagctgcgttgggtgggaatcttagcagctccacattgaatttattctaactgagatcctgagcggacatatgtggcaggcagttgaccaygagtctggagttgggggaaagttcttgaatggtgatgtagaattgagggtcattagcacagagctactgaaaggagaagtgaatttagccaaaacagttttattgaccaagaatataaataaaagtggtttttcaactcacca

SEQ ID NO: 289333 - DNA, 570 bp, Homo sapiens
tttcttagacagttagcaagaaataacaaaatctatccttactcttcaatcccaaatagactctggcagcagtgactctccaaaaatgccgaggcctagacctcctcactactgagaaaagaggactctgcaccttcttaggggaagaatgttgcttttacactaaccagtcagggatagtatragactccacccagcatttacaggaaaaggcttctgaaatcagacaatgcctttcaaactcttataccaacctctggagttgggcggcatggcttcacccctttctaggtcccatgacagccatcttgctattactcacctttggaccttgtatttttaaactccttgtcaaatttgtttcctccaggatcaaggccatcaagctacagatggccttacaaatggaactccaaatgagctcaactaacaacttctgctgaggacccctggatcgacccactggctctttgactggcctagaaagttcccctctggaggacactacactgcagagccccttcttcacccctatccagtaggaagtagctagagtggtcatcgcccaat

SEQ ID NO: 289334 - DNA, 491 bp, Homo sapiens
taaaatgtaccaatcagcactctgtggctagctagaggtttgtaaaatgcatgaatcagtgctctgtaaaaacacactaattggygctctgtggctagctagaggtttgtaaaatgcatgaatcagtgctctgtaaaaacacactaattggcgctctgtggctagctagaggtttgtaaaatagaccaatcagcactctgtaaaatggaccaatcagcactctgtaaagtggaccaatcagcaggatgtgggtgtggacaaataagggaataaaagctggcccagccagcagtggcaacccgctcaggtccccttccatgctttggaagtttgttgtttcgctcttcacaataaatcttgctgctgctcactctttgggtctgcaccacctttaagagctgtaacactcactgcaaaggtctgcagcttcattcctgaagtcaatgagaccacaaatccaccagaaggaacaaactctgggcacagttgtt

SEQ ID NO: 289335 - DNA, 491 bp, Homo sapiens
taaaatgtaccaatcagcactctgtggctagctagaggtttgtaaaatgcatgaatcagtgctctgtaaaaacacactaattggcgctctgtggctagctagaggtttgtaaaatgcatgaatcagtgctctgtaaaaacacactaattggcgctctgtggctagctagaggtttgtaaaatagaccaatcagcactctgtaaaatggaccaatcagcactctgtaaagtggaccaatcagcaggatgtgggtgtggacaaataagggaataaaagctggcccagccagcagtggcaacccgctcaggtccccttccatgctttggaagtttgttstttcgctcttcacaataaatcttgctgctgctcactctttgggtctgcaccacctttaagagctgtaacactcactgcaaaggtctgcagcttcattcctgaagtcaatgagaccacaaatccaccagaaggaacaaactctgggcacagttgtt

SEQ ID NO: 289336 - DNA, 569 bp, Homo sapiens
ccttatcattaaaaaatccttgcccagaccaatgtcatgaagtgtttcccccatgttttcttctagtagtttcatggtttcaggttttacaattaagcacttaatccattttgagttgatttttgtaagtggtgagagataggggtctattcgttcttctgtacgtggatatccagttttcctagaaccatttgttgaagagactgtccttcccccattgtgtgttcttggcacttctgccaaaaatgacctggctgtaaattcatggatttacttctggattctctattctgttccattcgtgcatgtgtctgtttctatgccagtatcatgttgtttgggttactgttgctttgtaatgtattttgaagtcaggtaatgtaatgcttccagggttgttcyttttgcttaagattgctttggctattcatggtcttttgtggtcccatataaattttaggattattttttctattgctgtgaagaatgtcattggcggtttgataagaattgcattgaagctgtaaattgcttatagtatgggtattttaacaatattaattcttcta

SEQ ID NO: 289337 - DNA, 629 bp, Homo sapiens
cacaggacgtttggcgtagggctgagagccaatgacataccctggagcagtactgaagtttgggacctctcctgctaccattcccagygtctcagtgctgcagcccctggacttaatatatttgcggtaaatatcttcccaattgtctctatgtctctactacagttcatttagatagaatttggagttgatggcattgactactttgggtcccttttatttaacaaaatattttcagggaagtttacaaagttatctttttgcatagagtatgttcctttataatatgagatgtaatttgttacagctctggaaagaaaactaagagttaaaatcttgctcttaagcctaaatctaagaaaggatgacctacttaataaacagtgctgggaaaacaggctagccaaatgtagaacaatgaaattgggctcctatctctcaccttttgcaaaaatcaactcaagatggatcaaagacttaaatctaagacctgaaactacacagattctagaaagaacctgggaaaaactcttctgcacattggtctaggcaataacttatgactaagatgccaaaagcaaatgcaataaaaccaaaactaaattaaattggacctaattaagcaaaaa

SEQ ID NO: 289338 - DNA, 629 bp, Homo sapiens
cacaggacgtttggcgtagggctgagagccaatgacataccctggagcagtactgaagtttgggacctctcctgctaccattcccagcgtctcagtgctgcagcccctggacttaatatatttgcggtaaatatcttcccaattgtctctatgtctctactacagttcatttagatagaatttggagttgatggcattgactactttgggtcccttttatttaacaaaatattttcagggaagtttacaaagttatctttttgcatagagtatgttcctttataatatgagatgtaatttgttacagctctggaaagaaaactaagagttaaaatcttgctcttaarcctaaatctaagaaaggatgacctacttaataaacagtgctgggaaaacaggctagccaaatgtagaacaatgaaattgggctcctatctctcaccttttgcaaaaatcaactcaagatggatcaaagacttaaatctaagacctgaaactacacagattctagaaagaacctgggaaaaactcttctgcacattggtctaggcaataacttatgactaagatgccaaaagcaaatgcaataaaaccaaaactaaattaaattggacctaattaagcaaaaa

SEQ ID NO: 289339 - DNA, 564 bp, Homo sapiens
gtgaggctccttttgctccctcctctctgcctgttgcttcctcatctccttgcctgactctgactctcctgcccttgatgacattgggctcacttgggtcctccagggcattctccttgtgtcagaacccttatgcgaatcatctatgtgcagctaacagatccacaggttctggagactggggacgttattctctctaacacacaaaccattctgattcttatgtattaataaatagatcaatggaataaatacagagactagaaatgtactaaaaccatgcrggaatttagggtataatgctaaaggaaaaatccaccaaaatcaattccaaatcaatcaatgatttaaattaaagatatgtgaagccgggcgtggtggctcaagcctgtaatcccagcactttgggaggccgaggcggccggatcatgaggtcaggagattgagaccatcctggctaacagatgaaactctgtctctactaaaaatacaaaaaaaaattagcctaggtggtggcgggtgcctgtagtcccagctactggggaggctgaggctggagaatga

SEQ ID NO: 289340 - DNA, 564 bp, Homo sapiens
gtgaggctccttttgctccctcctctctgcctgttgcttcctcatctccttgcctgactctgactctcctgcccttgatgacattgggctcacttgggtcctccagggcattctccttgtgtcagaacccttatgcgaatcatctatgtgcagctaacagatccacaggttctggagactggggacgttattctctctaacacacaaaccattctgattcttatgtattaataaatagatcaatggaataaatacagagactagaaatgtactaaaaccatgcgggaatttagggtataatgctaaaggaaaaatccaccaaaatcaattccaaatcaatcaatgatttaaattaaagatatgtgaagccgggcgtggtggctcaagcctgtaatcccagcactttgggaggccgaggcrgccggatcatgaggtcaggagattgagaccatcctggctaacagatgaaactctgtctctactaaaaatacaaaaaaaaattagcctaggtggtggcgggtgcctgtagtcccagctactggggaggctgaggctggagaatga

SEQ ID NO: 289341 - DNA, 564 bp, Homo sapiens
gtgaggctccttttgctccctcctctctgcctgttgcttcctcatctccttgcctgactctgactctcctgcccttgatgacattgggctcacttgggtcctccagggcattctccttgtgtcagaacccttatgcgaatcatctatgtgcagctaacagatccacaggttctggagactggggacgttattctctctaacacacaaaccattctgattcttatgtattaataaatagatcaatggaataaatacagagactagaaatgtactaaaaccatgcgggaatttagggtataatgctaaaggaaaaatccaccaaaatcaattccaaatcaatcaatgatttaaattaaagatatgtgaagccgggcgtggtggctcaagcctgtaatcccagcactttgggaggccgaggcggscggatcatgaggtcaggagattgagaccatcctggctaacagatgaaactctgtctctactaaaaatacaaaaaaaaattagcctaggtggtggcgggtgcctgtagtcccagctactggggaggctgaggctggagaatga

SEQ ID NO: 289342 - DNA, 297 bp, Homo sapiens
ctccactaacttttgtctgctttcctgctgcaacatctgtctccatccactttaagaggatggaaaactccagacagcactattatacattctgggcactaatgaaccttgatggaataaaattgcattcattgaattcttatttttcatcagtagaatcccagaatcccactttttccttgctgtctccctcccacctacmatgatatgaaaagatgcctgttataaggtgattgcccaggaactgggagcagggttgaaacagctcccagttcctgggaccaaaaatggtccttt

SEQ ID NO: 289343 - DNA, 626 bp, Homo sapiens
taggatgggactgggagggatgtaaaggggtccatggaagagtctgtgggcccaggtattctctagacacttggaagtacacagatgaggaggcataaagaacagagtctcagtggctgctccagaaaccccagccacccattccctcacctcctgctgagagacaaccagacctctggaaactgtggttgtaaccccagaaatgctgaatgtaacctatagkgtttgagcgatggcctttcagccatttgccatggtagatggtcgagtctaccttatccatctcaccttcttggaccatgagtactggaaacagaacaagtctgtaactgatgaggatctttgttgatctgagtctttggacaaagtgggcagcgtgcaaaagcaggcagtctccaggtggaggaacttcattggagttctggacttagggatccaacacggccactagattcactcttggaaagcagccatggccttgactcagagctcatgggaagatggatgcctaactcagagatcgggtgtctctggcctgccatgccatttttgagatggctctttttggactctacttctgataggtggaaagggttcaaagaaccctatctgtcaattgggcatgg

SEQ ID NO: 289344 - DNA, 626 bp, Homo sapiens
taggatgggactgggagggatgtaaaggggtccatggaagagtctgtgggcccaggtattctctagacacttggaagtacacagatgaggaggcataaagaacagagtctcagtggctgctccagaaaccccagccacccattccctcacctcctgctgagagacaaccagacctctggaaactgtggttgtaaccccagaaatgctgaatgtaacctatagggtttgagcgatggcctttcagccatttgccatggtagatggtcgagtctaccttatccatctcaccttcttggaccatgagtactggaaacagaacaagtctgtaactgatgaggatctttgttgatctgagtctttgracaaagtgggcagcgtgcaaaagcaggcagtctccaggtggaggaacttcattggagttctggacttagggatccaacacggccactagattcactcttggaaagcagccatggccttgactcagagctcatgggaagatggatgcctaactcagagatcgggtgtctctggcctgccatgccatttttgagatggctctttttggactctacttctgataggtggaaagggttcaaagaaccctatctgtcaattgggcatgg

SEQ ID NO: 289345 - DNA, 626 bp, Homo sapiens
taggatgggactgggagggatgtaaaggggtccatggaagagtctgtgggcccaggtattctctagacacttggaagtacacagatgaggaggcataaagaacagagtctcagtggctgctccagaaaccccagccacccattccctcacctcctgctgagagacaaccagacctctggaaactgtggttgtaaccccagaaatgctgaatgtaacctatagggtttgagcgatggcctttcagccatttgccatggtagatggtcgagtctaccttatccatctcaccttcttggaccatgagtactggaaacagaacaagtctgtaactgatgaggatctttgttgatctgagtctttggacaaagtgggcagcgtgcaaaagcaggcagtctccaggtggaggaacttcattggagttctggacttagggatccaacacggccactagattcactcttggaaagcagccatggccttgactcagagctcatgggaaratggatgcctaactcagagatcgggtgtctctggcctgccatgccatttttgagatggctctttttggactctacttctgataggtggaaagggttcaaagaaccctatctgtcaattgggcatgg

SEQ ID NO: 289346 - DNA, 599 bp, Homo sapiens
tgccatcaaattattctcatccttcttgcttagctattggtttgtagactgcaattagaacacttcacactcaattagaaagctgagaaaaataggttttaaaaaagaagttggggttgctatgacttccttgaaaataaccctagactgtcyattacaacacgggagaaatggcttacagaaccaagcatcatgaggtctgaggacagatgtttgttaggttgtcttcaccatggcagcttactttcttctctgaagtccctggtctcctattagtggtgtctgtggtggtgggtgaggactcagatgggggacaagagagcccttccttcttccttgtctgaaaaaagttaaggatgctcaaatttggaacaaaaacttgttgagaccataaggctattctgcttttttgctaacgtttcattgaacaaatataaatggtttctatcctacactacactctgtccacctacaatggtatgtctgtctttctttgatcagttgaataatacttcatcagaagtctcgtaatgaaggactttccccataattagagctcaaactctagcatcttctcctatatcttctagcagggctct

SEQ ID NO: 289347 - DNA, 455 bp, Homo sapiens
tatagaaacataactaatttttgagtgttgattttgtattctgcaactttgctgaatttgtttgttttaacatttgtaatcttttggcttttctgcatataagattatgtcatctggaaacaaagataattttacttcttcctttcccatttggatgactttcattttatttcattttttgcctatttgctctggctagaactcatagtactatgttgaatagaagtggtaagtgtgggaatttttgtcttgtttctgattttagaggaaaaatgttcagtttttcaccactctattaatgttatatatgtatgatattaactgtgggcttttcatacatgacctttattacgttaaggtaatttccttgtattcctagtaagttgagtgtttttatcrtggaaggtttttgaattttgccaaatgtttttttttagctccaattgacatgatca

SEQ ID NO: 289348 - DNA, 636 bp, Homo sapiens
gtcctcactgctaattacctgacaaagaacttggtgccgaatggcatagctgaatgccagttaccagtgggagagtgtcaatgaggcagactggatcaatatagcacaaataactcaacccagaatttaaaaccaagacttggcagcatttctcatcatccttggaaacttaaaaacactagacatctacttttcagaaaaattagacatatagacaaaatttcgttttacagttttagagatacataggtcccaggctcattactcttaatttagaaaaattaacctgtggcataatttatactgcgtgactggtacttccatgatgataaaataagaaaaatgagttgtttggtaaaygaacctgattttttgaaattgagtttcaaaacggtacatacttcaagcagttctacaaaaaatatcaatcatttagtcaacctatccaactgttctttgcatatccacggttctaggcgaaggtacaacagaattgattaacacatgatccctagttgttccagaaaaggaggagggccacctggacctgaaggatgagggaatctccagggtagagatgtgtgtgaagtacagagaaaacattccagataccagacagatccagcagtgaaccat

SEQ ID NO: 289349 - DNA, 501 bp, Homo sapiens
taccattataactaaagtctgtctagttattgtacatatttatccatcagtttcaacagattggggctggcttggtgttctaaatgtatttaaaatctgtttctacagggtttattttttgttttgttttgtttttaatctgtgctgtgaaatttgaaaaccactaaaaatgaagggaacttttttttttttttttttgagamaaagtctgattctgttgcccaggctggagtgcagtggtgcaatcttggcttactgcaacctctgcctcctgggttcaaatggttctcatgcctcactctgctgagtagctaggattacaggcatgtgccaccatgcccagctaatttttgtataaaaataaagggaaatattcaattccttttctgatgtaatgtaagttgtatagattactaatgcatgtccctggttttgtgataaaacttcttaggttttattgatgacgttttagattcatagttgtgttaaatcagttaaata

SEQ ID NO: 289350 - DNA, 512 bp, Homo sapiens
atccaaggcttgtcatgtctcagccactccactgctaccatcccagtcaaaaccaccaccacctcttgtgtaatggtatctatgccctatctctttcttccatctgagtttcacactgtcaacttttcaatctggaaaattaagtctggaactctcagcaaacactcttgttctactttcttcatttatatagcataaataaatgttaggacttgtggcatctgaaattttcaygtgcttaaaattctaaatttcataattttctactttaatggcttcctaaagcaatctctcatggcacacgttcttaaaattcactttaaactagaacaatctttcagttgctcaaattaatacttttagttcaacgacattgcctttcagtgacaaagtaaatttaaaataatttaagtgaaagcaacagaggttgagtgaggtttttcatgaattcattcacagtttgtgacagtgcatgattgttctcatgaattctgttcattcaagttttggga

SEQ ID NO: 289351 - DNA, 512 bp, Homo sapiens
atccaaggcttgtcatgtctcagccactccactgctaccatcccagtcaaaaccaccaccacctcttgtgtaatggtatctatgccctatctctttcttccatctgagtttcacactgtcaacttttcaatctggaaaattaagtctggaactctcagcaaacactcttgttctactttcttcatttatatagcataaataaatgttaggacttgtggcatctgaaattttcatgtgcttaaaattctaaatttcataattttctactttaatggcttcctaaagcaatstctcatggcacacgttcttaaaattcactttaaactagaacaatctttcagttgctcaaattaatacttttagttcaacgacattgcctttcagtgacaaagtaaatttaaaataatttaagtgaaagcaacagaggttgagtgaggtttttcatgaattcattcacagtttgtgacagtgcatgattgttctcatgaattctgttcattcaagttttggga

SEQ ID NO: 289352 - DNA, 566 bp, Homo sapiens
ctattttgtctaatataagaatgagcacctttgctctcttttggttaccacttatgtgaaacatcttcttccatcctttcactttcagcctttatgtgttgtccacctccaaggtaagcatatagttgcatctttgtttttatgttgtagacagcatatagttgcatctttgtttttaaaaatccattcagccattctgtcttttgactgggaagttcaatccagttagatttaaaatatctactgttaggaagagatttactattgccrttttgttaattcttttaactttgtctcataagtattccatccctcttttcctctcttgcagatttattctgtgtttcattaaatttttttttggattggcatgctttgatttatttctatttttcttttgtgtaccttctataggtatatttttgtggttgctatggggcttacataaaacatagtgattgattttaagctggtaacaacttaactgtaatcatttatgaaaaccctatttgtgtacatttccccagccctcctttatctttttgatgtcccaaattacatcttta

SEQ ID NO: 289353 - DNA, 1189 bp, Homo sapiens
tgtatacctagaaaacccccaagacaccttgaaaaagttcattgaactggtaaatgaattcagcaaagtttcaggatatgaaattaatgcatacaaatcagtagttctgctatacaacaacagtgttcaaactgagagtcaaataaaaaacaacccctttcacaatagctgcaaaaaaataaaataaaatacttaggaatatacttaaccaagtaggtgaaaracctctacaaggaaaattacaaaacactactgaaagaaatcatagacaacacaaacaaatggaaacatatcccatgttcatggatgggtagaatcaacattgtgaaaatgactgtattgccaaaagcagtctacaaattcaatgcaattcctgtgaaaacatcatcatcattcttcacagaactaggaaaaaccatcctaaaattcatatggaactaaaaaagagcccacatagccaaagaaagactatgcaaaaagaacaaatatggaggcattacattacctgaattcaaatgatactataaggccacagtcaccaaaacagcattatactggtataaaaataggctagtagaccaataaaacagaatawccagggccctgtgaaggacccttagagacctccaatctattctcttctataaacaaacctaccatcatttcctttaagaaaataaagcaattatcaatgttgattcaaataataagatacaaggcagaatcttctaatttgattttgcattttctaaacaaatgagaggctagaacctgtgagaaaagctwtatacaaattgggttttcttttaaataggattgccttatagtaatccaatttgatgtcagatcctcaatgagtcaggagcctttttcatctccactggaaccctgtgacattgagattggagggctgcccattgacatcctcatgggccccacttccacctggatcctttctgggacaccgtgtcattgccagaagaaagtggtcggcttttccaagagtctttgtgtgtgtgattttcagatatgtggaatataaatacattcacgttcacctctttgaaaagctcaaccctgaaaaataaaaattaattgtgcaagtaaaattataaaataaaacaaaactacttttcattcaaactacttttgatactcaaaaacttggctttcttcttttatttttctg

SEQ ID NO: 289354 - DNA, 594 bp, Homo sapiens
ccagggccctgtgaaggacccttagagacctccaatctattctcttctataaacaaacctaccatcatttcctttaagaaaataaagcaattatcaatgttgattcaaataataagatacaaggcagaatcttctaatttgattttgcattttctaaacaaatgagaggctagaacctgtgagaaaagctttatacaaattgggttttcttttaaataggattgccttatagtaatccaatttgatgtcagatcctcaatgagtcaggagcctttttcatctccactggaaccctgtgacattgagattggagggctgcccattgacatcctcatgggccccacttccacctggatcctttctgggacaccgtgtcattgccagaagaaagtggtcggcttttccaagagtctttgtgtgtgtgattttcagatatgtggaatataaatacattcacgttcacctctttgaaaagctcaaccctgaaaaataaaaattaattgtgyaagtaaaattataaaataaaacaaaactacttttcattcaaactacttttgatactcaaaaacttggctttcttcttttatttttctg

SEQ ID NO: 289355 - DNA, 568 bp, Homo sapiens
tgtagcaattgtgaatgggagttctctcatgatttggctctcactggtgtataggaatgcttgtgatttttgcacattgattttgtatcctgagactttgctgacgttgcttatcagttaaggaatttttgggctatgacgatgaagttatctaagtatacaatcatgttatctccaaacagagacaatttgacttcctctctttctgtttgaatacgctttatttctttgtcttgcctgattgccctggccagaacttccaatactatgttgaataggagtggtgagagaacacatggacagagggaggggaacatcacacactggggyctgtcacggagtggcgggctaggggagggatagcattaggagaaatacctaatgtagatgatgggttgatgggtgcagcaaaccaccatggcacatgtatacctatgtaacaaacctgcatgttctgcacatgcatcccagaacttaaagtataataaaaaaattaaaaatatataagaactattttcaacactgtgaaaatcagcatctaatctgtttaaaggactgagctgcattt

SEQ ID NO: 289356 - DNA, 546 bp, Homo sapiens
ctatattgtagaccatatcgacaatagttcataaaaatgtactcttgaaaatagtgaaataagtagattttaagtgttctcacccaaaaaataactatgtgagataatatatgttaattagctcaatagccattctacaatgtatacatatttcaaaataacagattgtatatggtaaatatatacaattttgtcaattaaaaaatcaaactaaaaaaataaacaagtaaataggtataaagagaccccaaaaggcagagagaagaaggcagatcagctagggaccttgggactttaaaaacaatgctgtagtgagttccctgagcttcttttcttttggcctcatatatcctagactggggaagccagtagccctgaaatggcaatagggatagattttttttttaaagtttcctcaaaatcctggtccctctagtcaaaggaacaggaaagtgaycacctagcaagacagaaaacttttaggcaatatctattctactccagccaaacacaaccaaaaaagtacggcccctccatactcatacc

SEQ ID NO: 289357 - DNA, 460 bp, Homo sapiens
tggggaacctacacttctatcctcctaaggctgcaatgaggcattctggcctcccacagagtggtgtcagaaaaggctgaatggggagccaggactttcaccccttttgagcagtaacargccctctttctgccatggtgccagtggggagcaccatgtgatccagcagtaatgaggtgttctgcccctcctcactggggtggtgttagcagaggttttccccaccacttaatggtactgaggccacccctaaccccatggtgtcatggaggccaggtggagagcaggaacaaggcatttcttcccttccctgaaagagtcatatcggcaaaggcctagtggggagactaagctccaatccagcctgggagtagcaatgaggcattccccatcacagatgctagaggctaagtggaaaacatagactttcagcccctacctattagtaatggggagcagc

SEQ ID NO: 289358 - DNA, 460 bp, Homo sapiens
tggggaacctacacttctatcctcctaaggctgcaatgaggcattctggcctcccacagagtggtgtcagaaaaggctgaatggggagccaggactttcaccccttttgagcagtaacaagccctctttctgccatggtgccagtggggagcaccatgtgatccagcagtaatgaggtgttctgcccctcctcactggggtggtgttagcagaggttttccccaccacttaatggtactgaggccacccctaaccccatggtgtcatggaggccaggtggagagcaggaacaaggcatttcttcccttccctgaaagagtcatatcggcaaaggcctagtggggagactaagctccaatccarcctgggagtagcaatgaggcattccccatcacagatgctagaggctaagtggaaaacatagactttcagcccctacctattagtaatggggagcagc

SEQ ID NO: 289359 - DNA, 579 bp, Homo sapiens
tcatcatacaaacaggaagatcttaagctgaatgaaaaaagataatcaacaaatagcaaaaccaaaacaatgctgccattaggtgatcaaagatttaaaagcagccatcataaaaatgtttcaatgagaaattatgaaaatgcttcaaacaaatgaaaaaatagaaagtctcarcaaaaaagaagataaaaagaaccaaatttaaattttagaaagaagaatacaataactgaaatgcaaaatccactagatggattcaacagcagaatagacagaaggaaaaaattcagtgaaattaaagatagaacagtaacaattaaaatatgtgaaaaacagagaaacaacagagaacatggagttaaaaagaattagaataaataatagatgcaagtttccaaattcgacaaaagacataaacctggccaggtgtggtggcccatgcctgtaattccagcactttgggaggctgaggcaggtataccacctgaggtcaggagtttgagactagcctgacctacatgggaaaacctatctctactaaaaatacaaaaaattagccaggccctgtggcacacaaat

SEQ ID NO: 289360 - DNA, 458 bp, Homo sapiens
ctgtgctcaccatcgacatctggaatcctagtggcaagaggccccatgactgccatggacacttgacttggcaaggagagctgcttagagtggtggaaggggcagggtgtggaggcccagagggtttggtataggagtgtctgcagtggagcacaaacagggacaccaatcccccaacactcaccatgctctcctaagagactttagctttagggtgactgttggaccttgacaygagcaggaatggatcctgctaccaccatcccaacaaaccactttggttggcaccacccatcagagtatcatagctagaggactgggaacactttggcccttccagctcaacaagtttctaatgccaaggggctagagagcaaagccagaggcctggtaccagcctgccagagctacagcacctagcccaggagtgctgagccaagtgttggccacctaaaatc

SEQ ID NO: 289361 - DNA, 542 bp, Homo sapiens
tatctctatgcaaacaaactagaaaaactagaagaaatcaataagtttctggaaacatacaacctcccaagattaaatgagaaagaaattgaattcctgaacaaaacaataatgagtaccaaaattgaatcagtaatgaaaatcctaccaacaagaaaaagcctaggactagacagattcacagctgaattttactgtatgtataaagaagagctggtaccattcttatggaaactattccaaaaacttgaggaggagggaatccttcctaactcattctatgaggctagcatcatgctgataccaaaactcagcagagacacaacaacaacaacaaaattcaggccaccaggcacagtagttcatacctataatcctagcacgttgggaggccaaggtgagagatcacctgaggtcaggagtttgaaaccagcctggccaacatagtgaaacctcatctctactaaaaatatgaaaattagccaggcrtggtggtgtgggcctgtaatcccagctactcaggagcctgaggcgggagaatc

SEQ ID NO: 289362 - DNA, 484 bp, Homo sapiens
tgtagagaaatgagaacacttatacactgctggtgggaatgtaaattagttcagccattgtgggaagcaatttgaatatttctcaaagatcttaaaacagaactaccatttgacccagctgttccattactggtatatacccaaaggaatagaaattctcccataaagaaacataaatgtgtatgttcatagcactactcacagtggcaaagacatggaatccacctttctgcccatcaatggtaggatggataaagaaaatgtggtacatatacaccacgaaatactaygcagccataaaaaaatgagatcatgtcctttgcaggaacattgatgcagctggaggccattatccgaagcaaactaacacaggaacagtaaacctaagtgggagctaagcattaagtacacatgaacacaaagaaagaaaaaacagatcccagaccctacttgagcatggaggttgggaggggggtaaggatgg

SEQ ID NO: 289363 - DNA, 317 bp, Homo sapiens
gtctacctgagggtggagggtgggagaaggaagaggagcagaaaaaatagtattgggtcctaggcttcatacctgtgtggtaaaataatctgtgyaacaaacccctgtgacacgagttaacctgtataacaaatctgcacatgcaccctcgagcctaaaatataagttaaaataagaacagaaaaaataaacccagtggtaagtcattttgatagcatgtctccttaatatcatgggatgaaaaaggcactctgcttctggggtcttcctccctaaaacacattaccctagtctaatcatgagaaaactatcatata

SEQ ID NO: 289364 - DNA, 596 bp, Homo sapiens
gcttgtgtgcactgttacctccatcacatagacatatgaatgtgccatgtcataggtgagtcactcactcccaaagacattcaaagctgaagctggaaccatttttttttatcagaatcttcgagaactctgaatccattaatgtggacaaaaaaaggtccagactgcactgtgccaatgggcactattacctcctgttcagtcaagtgaaataaactgggtctccaaataggcttacattttctgagctaacagtcctcccctgtttatgttttctacttaaggaggatattttttaaaagcctatttcacataatcaattttagtgggccctttaaaatggaaggtgagctggaggtagttcagtttgtttaacaagaacttcagcttattgaagtgagcattagcgtatcatgtccccatatggcagtcattagagacaggggaaacttgagaagcttattactctgagatagctagtaaaaagaattgaagacakttttataggacctaaagatagtgccaataaagtaaggacaaaatccatttgtaagtgataagcaagaggaggaaatctttgagaaactaaaaggtct

SEQ ID NO: 289365 - DNA, 598 bp, Homo sapiens
acctttctcagtcactcagttaaccagtgtttattgagcacctactatgttcccaaatgtggtgactcctgaaaatgcagtgataaccaaggcacaatccctgcctggaggacctcacacatagatgatagactaggaaagaggccactgagtacaaagggatggaataagtggaaagggaggcagggggtattgtgccagtgcaccaggaacgcttcctacctgacctgctagggcaaggctggggtgtgggttgttccaggcagatagagctagaggtacaaaaatctgcaaggagagagaaaatggggtgtccttcagcaacttcctagcagctatttatggcttccattagttcaaggaagggaatgtcaagaggtaaaagctggagaagtaagcagggatccagatcagaaagaaccttgtatgattcttgaaaatggaaaacccttaaaaggttctaagcagggggatgatgtgatcagatatccattttagaaagatggtgtatttgtctgttctcacactgcaaataaaaacatacccragactggataatttataaaagaaagcggtttaattggctcacagtttagca

SEQ ID NO: 289366 - DNA, 573 bp, Homo sapiens
aactgcctaacaagaatagccaacatttattggttccttactgtgtgcctgctcatttgcaagcataggcccatttaatcatcaaaacaacactaggagataggtactattattactcccattttatagttaagggcactgagggtagttgactccgcaagacccctccctctctcttgtctgggagtctccctagggccacacattaattgatcaaaatgtggaaacttccctggctgaggctcactcctacctgattagctgctggaaacagccacttaagaataccctcttgtttagtataaacaccggcaaagaagcctctttcacagatctcttgattagggctgcttggaatcttctgaatggtccttgtgggatgcagaascataatctactccagggagaaagcaccccaaagcataggcccatgggcatttgcctcagtggaaccagcagtttaattgccctcttggttttaggaattaggatgttagctgttaaggcctacctttaatctgctaggcactctggtttatctcctggatatgactgccctgcacatagcccttg

SEQ ID NO: 289367 - DNA, 573 bp, Homo sapiens
aactgcctaacaagaatagccaacatttattggttccttactgtgtgcctgctcatttgcaagcataggcccatttaatcatcaaaacaacactaggagataggtactattattactcccattttatagttaagggcactgagggtagttgactccgcaagacccctccctctctcttgtctgggagtctccctagggccacacattaattgatcaaaatgtggaaacttccctggctgaggctcactcctacctgattagctgctggaaacagccacttaagaataccctcttgtttagtataaacaccggcaaagaagcctctttcacagatctcttgattagggctgcttggaatcttctgaatggtccttgtgggatgcagaagyataatctactccagggagaaagcaccccaaagcataggcccatgggcatttgcctcagtggaaccagcagtttaattgccctcttggttttaggaattaggatgttagctgttaaggcctacctttaatctgctaggcactctggtttatctcctggatatgactgccctgcacatagcccttg

SEQ ID NO: 289368 - DNA, 543 bp, Homo sapiens
tgttaatatcgaatttataaatgtgtccataaccatagaggtgattagtcactgttatgtgctgctcagaggtaacagattacctggcccaagtgtccttgactagctcctgtgcttggagacggctcccctgcagagcactgtgaccttcccgtctctattagcctgatgtgaaagagcagatgtctgggctaaaaaataacactacagagccccggtgtacttccagccactagcccatgacactggctgctttattaagtactcagcagagttgcatgaaccctccaatatgcctcccatgtggcaagacagagcgactgcttgacagtaaggctgcatgtctggggatagtgcccctgggtgstcaggccccttcactcctctctgcctcacagttttagagaagctacctagatggcctcatttcatgttggcaattcatagcaacagcgttctctccagccatctcttagtacccatttcacttctgtatgaggaaaatcagggaaagtgtaggttattatttgaaggtcaggcatt

SEQ ID NO: 289369 - DNA, 514 bp, Homo sapiens
gttgccattcctagagtgttaccaactcaataaaattggaacagaacccacactgtccatttccagtatgttctccacacatctatcatggtggatggaccccacagtccagctgtggggacaagacaagaatacaagtgatatgartacaatcagcccaagagaggtacaaaccatgaatgacgggaggtcaaagagggtagagatctcacctggtggaagagccgtggtggtgttcaagggagccatgaagaatgatagatagaatttcatccatttgggctagagaagtggggaaaagaattctacactttttaggtaaagtggcataagcagaaatatgaagatggagaagggccagaagtcatttgatctgattgatatataaggtccaggagggaaggatcaggggataaggttgagcagggctttgtcataaaagaccttaagtacggggtgagcaatttacacttaatttgtaagtcagtggggagccattgggggtttggtaaag

SEQ ID NO: 289370 - DNA, 514 bp, Homo sapiens
gttgccattcctagagtgttaccaactcaataaaattggaacagaacccacactgtccatttccagtatgttctccacacatctatcatggtggatggaccccacagtccagctgtggggacaagacaagaatacaagtgatatgaatacaatcagcccaagagaggtacaaaccatgaatgacgggaggtcaaagagggtagagatctcacctggtggaagagccgtggtggtgttcaagggagccatgaagaatgatagatagaatttcatccatttgggctagagaagtggggaaaagaattctacactttttaggtaaagtggcataagcagaaatatgaagatggagaagggccagaagtcatttgatctgattgatatataaggtccaggagggaaggatcaggggataaggttgagcagggctttgtcataaaagaccttaagtacggggtgagcaatttacacttaatttgtmagtcagtggggagccattgggggtttggtaaag

SEQ ID NO: 289371 - DNA, 579 bp, Homo sapiens
agacaccagctgctcaccgtgtccccctggaagtgaccaatctctttcatttacaccaaaagatgtttcacaggtgccatacattaaagctttttctttgtcatgtggggctccaagaagtggatggcctctattttctgacagatattctataggtatttatcatgcaaaagttctcatgacattgtgtaaggcatgaagaataaaaccctcgcttcatcctsgttttgttctattcctttgattacctaaaattttctcttgggaatggagcaatgtaagacttgctaacccatagtctccgagaatcagctctccaaatccttacatttccagatgaaaaatgctcctgagaatccctgttgcacgcataaaggaagagaatcagaaagtgtcaaacttcccaacaaagtcagttagttccctacaaagtcagtcagttccctacggaaaggccaagactgatcctcatggcaaaagcagcagctgtatattatgactagtgtttgaaggaaagagagaaagctatgattccaaaccctgaactcctccaacaacagctgctgcaggatactaagg

SEQ ID NO: 289372 - DNA, 579 bp, Homo sapiens
agacaccagctgctcaccgtgtccccctggaagtgaccaatctctttcatttacaccaaaagatgtttcacaggtgccatacattaaagctttttctttgtcatgtggggctccaagaagtggatggcctctattttctgacagatattctataggtatttatcatgcaaaagttctcatgacattgtgtaaggcatgaagaataaaaccctcgcttcatcctcgttttgttctattcctttgattacctaaaattttctcttgggaatggagcaatgtaagacttgctaacccatagtctccragaatcagctctccaaatccttacatttccagatgaaaaatgctcctgagaatccctgttgcacgcataaaggaagagaatcagaaagtgtcaaacttcccaacaaagtcagttagttccctacaaagtcagtcagttccctacggaaaggccaagactgatcctcatggcaaaagcagcagctgtatattatgactagtgtttgaaggaaagagagaaagctatgattccaaaccctgaactcctccaacaacagctgctgcaggatactaagg

SEQ ID NO: 289373 - DNA, 486 bp, Homo sapiens
aattctgaccccgcccttctattttcttatctctgtgactctagtttggttccttgtctaaagaaagctggtcaatggccaggctgttttgctcctgacagaaacaagctcacagaactctctctcattcagggckttaattggccttttcttttgtgatacgtgtgaagacattcttctgccttctttgtaaatactttcttttctctagagtagagagatggcctccagctttataatggattttacatgcagagaaggaaaagaaaatgagtttgcaagactcttttctgttagcttgcaacacaaagaaacattatcctcagcccgagcgccttagcaagctaaaattggctgcttcatcaaatgaaggagtgatgaggtcaaagacatagacagagatgctaaagtcattaggtccctggctgattttctcattttaaaagtttcctttcctttgtacttgatctttttctgtcacctttt

SEQ ID NO: 289374 - DNA, 623 bp, Homo sapiens
ctgtcaacagcatggtctgtgtctcctcatccctaagtgcatgaattagattttatagcatgtaagatgccttcaagctctaaaattcaacagactattttctggccccagctagcaasaggttcattctcaatcatgaaagaactgaaaatggctaataaatttggtgaaacatttggacaacacagtcatggaaccacttgaatctataataattctttttggctctaaaaacctttggaatttttcccttttattataactacatggatcattacttggcaaagaaatttccccctaatattgatctatgaacataaagaattatatctcagaataaaagaatataaaaataaagcctactaacttactgacaataaaagtaggggctgaattttcatgaaaacgaacaaacaaaagcttctatggaaactggatgagctgagaaaatgagcaagcttaattgatttaccctgagttagtgggtttcaagcaaatgttccccagttctgagcttccaatgttttgacattgtttaatatcaagaattgatcactgaattcttagttgattgtcagcccactcagagctgtaactttgattgtcatctttaccagagtgtc

SEQ ID NO: 289375 - DNA, 574 bp, Homo sapiens
ccttgcatttccagtctctagaggctgcctgcattccttggtgcgtgccccttcctccrtcttcaaagccaattgtgctgcatctttgaccattctcctgtagtgcatctccgcctcacactcttcttctctttctccctttgacttttaaggactcttgtgattatattgggcccactcagatattccaggataatttcatctcaaggcctttaaattaatcacacctacaaaatgccttttgcaatgtaaactattcacaaggattaggacacgggcatctttgggggccattatttccccctagcacactggtgagttattcctagggcaagtctcaaaatacaggtgaggtggtctcagttccaccccagccacttcctccgaggagtcatggaatataatgtgaaaaatgtaaggattggaatattgattaatcaaaaaagcagtggcagaagcctcaaaccaatgagctccattcttcagcatatcagccaccacagtcaataaaagccagctgtaaaaactttccaggccctaagaaaaccatgtgaaataacagactggagtgatg

SEQ ID NO: 289376 - DNA, 574 bp, Homo sapiens
ccttgcatttccagtctctagaggctgcctgcattccttggtgcgtgccccttcctccgtcttcaaagccaattgtgctgcatctttgaccattctcctgtagtgcatctccgcctcacactcttcttctctttctccctttgacttttaaggactcttgtgattatattgggcccactcagatattccaggataatttcatctcaaggcctttaaattaatcacacctacaaaatgccttttgcaatgtaaactattcacaaggattaggacaygggcatctttgggggccattatttccccctagcacactggtgagttattcctagggcaagtctcaaaatacaggtgaggtggtctcagttccaccccagccacttcctccgaggagtcatggaatataatgtgaaaaatgtaaggattggaatattgattaatcaaaaaagcagtggcagaagcctcaaaccaatgagctccattcttcagcatatcagccaccacagtcaataaaagccagctgtaaaaactttccaggccctaagaaaaccatgtgaaataacagactggagtgatg

SEQ ID NO: 289377 - DNA, 377 bp, Homo sapiens
gctatgtccccacccaaatctcatcatgaattcccatgtgttgtgggcgggacctggtgggaggtaactgaattgtgggggcaggtcttcctcatgctgttctcgtgatagtgaataggtctcatgagatctgatgcttttataagggagagtttccctgcacaagctctctctctttgcctgctgccatccatgtaagatgtgacttgctcctccttgccttccaccatgattgtgaggcctccccagccacatggaactgtgagtmcattaaacctctttttccttgtaaattacccagtctcaggtatatctttatcagcagcatgaaaatgaactaatatgtgctccctcttttatcagaaaggaacattttc

SEQ ID NO: 289378 - DNA, 1679 bp, Homo sapiens
ggaaaagacccctcaccagattcccaccattctggcaccctggtcttagacttccagccttcagaactaagagaaataaaattgctggtgtttataagccacccagtctatgatactgtgttacagcagtctgaactgactaagataaacacatttcctggtcctcttaaacaaatgctcctacacccagtgtaactttttttagagactcrgggtcacaattatgaccatcaacttgggctttgttgtaacagttaatactcctatagactacttgtaggtatagggctacacgcctcttctttaagtggctcccaggccactctacttttggagagcaagaggacaattcatagtttttctgtctcttcccaaaatgacaggctctcagccgttctatcttgatgatgagagcaagtcttcctttagcccttgttattcagtagcgtccgcatcacccgggagcccattagagacggagaatcgaggccccctcccaggccttctcaatcagattctgcattttaattactttcctaggtgttaaatatgcacaataatgttggagaagcagcccagwaagcaatgtgcttctaagcaatacatagacttttttttggtttttatatttatgtatttatttagtgaacgtcaaaaaacataaccatcatatcctacaatttcatagatattcaaaatctatttagattacaaagtaagtgtatgtaaagcattaagtaaatagtgagacaagggatctggagatatggttagaaaacagtcatgacttcctgtgactggcatttggtgtgactttggcattacggttgagaactcaggcttcagagtccaacaagtgatagaggtctcacccagccctaccacttttctggctgtataagctttaacatgttcttaatctatccaagcctccatttctcattttgttcatctgtagaaagcagctctatcacgagaggattatgaaaattaaacacacacacacacacacatacgcacgcacacatttagggtagtgccttgctaagcaaatgctcagtaaacaggactagcacaawcatgataattattgagagaacaaggaaactagaaaagttgaacattagaatggtagcttttattctgctaawatataattacaaactgagataatttctgtgaagacagggaatatggttctatgaatgcatttttaaaaatcctgctatagaccagggaaggctttgctgaagaattagttaagatctgaaagaggaagactatgaactaacttggcaaagaggtgtggagacatgtgttcagtgtgtacagaggtcctgtggcaggagagagtatgacatgttggaggaattctaagaaggccactatttwtgaagcccagagagtgaagtggagcatggagtaagcaaggctgggaagggtagcagaagcctcacctttcagaagtccagtctctgaatatgagatagaggacttatctgggagaagccagctggactctagggatacttcaactttgaccttggtcctaacaaccctgtacagtggcttcattttatttgtcaaccaagttgaagccctgttagagtcgattccctaattaagggaccaggtagcctcaactcttggcttccaggttctagcactcattactacca

SEQ ID NO: 289379 - DNA, 458 bp, Homo sapiens
ccagtctctgaatatgagatagaggacttatctgggagaagccagctggactctagggatacttcaactttgaccttggtcctaacaaccctgtacagtggcttcattttatttgtcaaccaagttgaagccctgttagagtcgattccctaattaagggaccaggtagcctcaactcttggcttccaggttctagcactcattactaccatggacagcagcttccttttaattcagtgggattctgccaggcaggcttccaggggarctgtggggtctagtacaagtttctcccctgttgctgcttcagtggctttcaccctgcccaatacatatttaatatgacaccatgtgtctctttgtcagtctcctcatattgagcctaggaattggcaaacactccatgaatatttacacattgacttttttttaagctcttaagagaggaatatcccttg

SEQ ID NO: 289380 - DNA, 635 bp, Homo sapiens
ttttatgcatattacttaaaatgtagctaccttattaaacccatgattttatgaacattgggttactgtttagataaagctaagtaaagaaaaaagtgaatcaatttaaagttgatctgaaagaaaaatgttaagtaaaaagtactatctgatgatgcacagatagggcaaaaatcacaaaggtggctcacgagtrggaaaatctaggaaaagtgggagtcctgttggtcagctttactgtgtaacagcatccacatcacaaggcttgttctttgcaggatgttgctgggtcctcagacagtacctcggcccctctgtgtcctgatcccccaagctctgggtggaggtgtgaagagatctgtacaaacccactccttcactcatgccagacatcccagtgaaggggtttattttcattgagtcaccttcataaataaaagactaaatgtttcattccaatatacaaggatatggtctttaaaaaatagaggtataattcttgatcagaaagggaaatactgagaaaaaaaaacccagatgataaaactaaggatattttccacgggaccctaaaactttccaactggatggcttgtttctgatacttaaaaactccctcacaagctgaaaagcag

SEQ ID NO: 289381 - DNA, 606 bp, Homo sapiens
gagggcacagagaggaatccagttcctcccatgtgctctgggttggcccaacctaccagcaaaggcaaaacagcccatgcctggcagagaccagcgaccctgggggaggtgctgaccacaacagattttctttgaagccttatttttctttctaaaaattcatgtgaattttacattttaccccatataaaatctattttcactttaatttaataattatgtttctacccccactcccaaattttaaacaaaactggtgtttcyaaaagatgtaacatttatcctatggcttcctgtactttttagtatacccccatatcctcccctcttcctaacgcccaaggatatatacaggtaccccggttggagaagcacagtttctagtatgtgggaggtaatttgagagcatttcgctggacagcagagttaataaaaattgtgttttatggaagattaacacagtggtcatgtgaataaaggtaggaaagttagaaggttttgctttagtctcaatgcaaggataatttggaacctagatcaagaatggtggctatagaaatccaaagaaagagaagggggaaaatgaacattttcttttaaaataac

SEQ ID NO: 289382 - DNA, 565 bp, Homo sapiens
tagaaggttttgctttagtctcaatgcaaggataatttggaacctagatcaagaatggtggctatagaaatccaaagaaagagaagggggaaaatgaacattttcttttaaaataactatgggtgttataagtgacattagtgatattaaaggttggcattcgtcatacatggacgtgatatgaattgttcaatgtcattcccctgtagatagtaaatgccttgaggataagaactgaatctgacttggtcacattatatgaacccctgacacataagcagaggtcaggaaatatttaataaatgtgtgcctaagggttgacataaataacaagtgggaatggggatggatggaaagtctctaactctctcccagagagtgaagggttgggactcagtaccggacatgctgtgggtgaggtgacatgagctgtctaaggaggcagggcctccctagtgagtgaaggcagaaccgggctttctgggccaccaacccagggtggaggccagggatggcacrggaagccctggcatccccatagcccagtgtggctgacactagcctc

SEQ ID NO: 289383 - DNA, 635 bp, Homo sapiens
tgcagtgagctgagattgccccactgcaccccagcctcggtgacagagcaagactctatctcaaaaaaataaataaacaaaaccctcaggctgaagacccaggaaaaaccagtgtttccattcaattccagaagcaaggggggaaaaatacaatgttccagctcgaaggcagtcyggcagaggagttctctttcccttgcaggagggtcagcgtttttattctcttcaggccttcaactgatgagatgaggcccattgacaataggcagtacaatctcttttactcagtctattaatgtaaatgttaaactattccaaaaacacctttacagaaacacccagaatttctagccaaatatctgggcagcccatggctcagtcaagctaatacataacattaaccacactgtctaaggagagaagatgcattagttagagaacagaaacaaatatagcatcgcaactgcaatacatgtataaaagagaggcatgtgctggtacaagtagaggtgttgaggactctacaagacagtgactgctgagctgagacctaaggatggagaagcagacggggagagcccagggaagaatcatgcagtcatacagaagcaggaagccggtcaagccacacaccc

SEQ ID NO: 289384 - DNA, 600 bp, Homo sapiens
ttaagaatgaagcctcaggaagaagagtagatgctgggagaagagtcagaaagctatctaagtgctccaggtaagagatgagcatggcttagactaagatggtgacagtggaaatggtgagattgaattgatttgggccgtactttgagtgtaaagttaatagaactgtttttttaaaaaaaagatgtagagggtgaagtaaaggaaarcaccaaggacagctcccagctttttggcctgagcacacacctagatgaaggtgccatagagcgagttcacaacaacagtttgcaggggaaatttacaaattctgtggactctcagatttatgtttttaaaaaggcataaaatgataaaagttgataccttttgctgtttagccctttgctatttatagagccccttctcattgatttatcttcattgatcctcctgaaaacccagtaagtttgcagtatctcttcctttttgcagctgaggaaatcagggtttagaaaacattaagtctgaaacactgacaatgattggttttttttcttacatcatataatgaatacaaccatcctcacgacttgcatggccctgtaagatggagaaggg

SEQ ID NO: 289385 - DNA, 1257 bp, Homo sapiens
tgttgcctattatagtctgatggtgacagtgctattaatgctgttattgtttgtggtaaaaatatgttttaccatgagcatggtttcaactggaattcacttccaggtttgttctacaaaaccttttatatttcctcttatacctctgcaagattgccctttgttcctgatttcaaggccatagtcactgtggaaattccaaatcatgcctcctttctatttttgtccatcctcccattggttttcacttgctctgtggaaaaaccgtagtttctgtgtattggtagctggaagcctgaggcttcagactaaatattatcatttatcagtgctatagcacttgtattaaagaggtccttgcaaaaatttttatcaatgtatgtgcattagaaatgctgttttctcttgtggtcaaaagaagttattgaaattcttattctcatactcagccctatgtggagtgacttacctttgacctttcaccgtaagttagaagcagaataaatgagtgrtgatttcagctgcctcctcctttcttgtgataatgaatgagtcagcatcaaggacttttccaggaggcctgagtcataaatatccctacattccatcaaaaatctccwtctatagtcagataaatttggaaagagagtgaagtcttctttactccacactagaataagttacctgagttcaggattgtctgaactgaatctgtcaatattcagatttaatattgactgtcaatactgaatctccaacaccaaaaagaacagtgcctggcaagtccttaataaaaccttaataaatatctgtaagtccttagtaaatatctgttaatgtatgaactgtgggtgaacttctttctgatgggacaactcaatatttacccagataaatccccaagatgagggacagtgtatgagctatttcccaacagtgttcgacatcttccccccaagaaacagcatcttaaggaactaatggtccatatgatatattttagattaaccaagttttgaagtattgttgtatagcacccctatcctttgtcccatatcctctaccctcagtctwaatgaaactggagaagattcagggtgagtgaatagtgaattcatgcagtcaacttctgggtaagaggctgtcctccaaggatgtgctcagcttactggttaggccagcccttagttgtgatttgactgttttttcattccacacttgcatttgcagttttgactgttttttcattccatactt

SEQ ID NO: 289386 - DNA, 1155 bp, Homo sapiens
cagggtgagtgaatagtgaattcatgcagtcaacttctgggtaagaggctgtcctccaaggatgtgctcagcttactggttaggccagcccttagttgtgatttgactgttttttcattccacacttgsatttgcagttttgactgttttttcattccatacttgcacttgcagtgctgacaaatgacctaacgttgtgtggataaaggtgttgctaccttgcatgcagccctgtagagaggtaccagtttgcagaggataccactcaacagtaaagaccagcagctgctaactcagatgcctacagaggcaaagtagcataaaagatgaaagcagagaggtagaggaaaacctcaggagggtaaatgggagctggcacttgacactaaggctgggggtacactaggaaatgttaggaggtgcagtaaattcaagacctatgcccttctaaagggagcagctgcttccccactcaagtcaggaatggccatatgggaatgccagcttgatgttgccaatcttcatttttctaaagaaactgaaaaatctcaattgtttaaaatgaaactttatactttttagawgtgtgtgtgtaagaacaacattagaggatataatccaaatgatcaggctacaaatattaataaatattctaggaaaccgtacttttttttttttaagatggggtctcactctgtcacccaggctgtagtacagtggtgcgatcacagctcactgcagcctcaacctcctgggctcaatctgtcttcccacctcagcctcctgagtagctgagactataggcgtgtgccaccatgccaggctaatctttgtwttttttgtagagataggattagaaaaccatactttccttgaacaatgcttgcatgtctactatgtgtcaaacattgggctaggggccaggaataccgttggttaaaaaaaaaatcagctgtgcttcctgtgaattatgaattcttgtgaattatgtagtcttacaagggagacagacattaacaataaacactcaaaaacatacataatatacataatgatgaattatggtagatgcattaaagaaaaaggatagagtactataaagaacaatgtgaagactttaaaataggttgtcagaaaagtccactctcaggaagt

SEQ ID NO: 289387 - DNA, 929 bp, Homo sapiens
aatggaaggagagaaacattggctttctgtttccatgccatatggattttgcttcatattctggtatatgttggtctacctattggaaacgctgtatcatgctttgttgagcaaatttagttaaaattctgcttagatgacacattctgagaaccttttcttatcactcattgattaactatttcttcytctgtatgacttctgcccttcatagatatctcattgtaaaaatgtttacagtatgcaaatatgcactttctcctatgtgagtgtcatctcttggagggcaggggccagtggtttaaatatcttagtaactccagccccttgtctagaacctggctgcctgacacatcccaggcaaccaatgaatctttaattcattgagcttwttctccagctacattcagcaactcagctgtagatgccaaatagatgaataaggttcagagagtagtagcctgggttctctgttttgaaggtaatccttcctgaacccactagcacggagtggcaataataacgggcatacccaatatgctggcttgtcattattagccaggtgctttatctgtcaaaacctcatttcatctctaaagccatcttatgatgtaggtactttcattctctttactttaatggagcatgaagcacagagatawgacatcatttgtccaagatcacacagaaaaagtgacagaaggggagggaactgagccccggtatcaggctctggagtgcacactctgagctgcactagcaacctgcctccagcttgctctggtgggtcctcagtccttgacgggagctgtgataatgaactcaagtgaggctgagagagaaggagatagaactgtgtgaaagcagagggaggctaccaagggcattggtgtttaagttaagagtgatgattcgatctcttttttcct

SEQ ID NO: 289388 - DNA, 537 bp, Homo sapiens
ttctccagctacattcagcaactcagctgtagatgccaaatagatgaataaggttcagagagtagtagcctgggttctctgttttgaaggtaatccttcctgaacccactagcacggagtggcaataataacgggcatacccaatatgctggcttgtcattattagccaggtgctttatctgtcaaaacctcatttcatctctaaagccatcttatgatgtaggtactttcattctctttactttaatggagcatgaagcacagagatatgacatcatttgtccaagatcacacagaaaaagtgacagaaggggagggaactgagccccggtatcaggctctggagtgcacactctgagctgcactagcaacctgcctccagcttgctctggtgggtcctcagtccttgacrggagctgtgataatgaactcaagtgaggctgagagagaaggagatagaactgtgtgaaagcagagggaggctaccaagggcattggtgtttaagttaagagtgatgattcgatctcttttttcct

SEQ ID NO: 289389 - DNA, 569 bp, Homo sapiens
aaagacacataaagggtaagcagactttgttcgcatgtaccagattaaagttacattatctatcccatcacagaaaactgcttgcagaaactgagatggataaagacagctagagaaaatggacaccatagtttggttcagcatgcaaacaaataaagatggcagactaacctccctccctctataagtagtatatgcagctgttctatttgagtattcatttaacactttcttgttaatttccaagttctataaagactctgactcacaactctctccgacgatttattttttccttcacgagaactctctagtttaaaatgacattctattctagatatatttataggcatgtacatttttttgtcttgaaatatagaaaatgggataaacccagatcctgagatrtgacaccaaatatagggaggcatttttattttttaaggttgcagggaagctaagtttacagactgtttggaattttattctctcaacatatatggcacttgcaaatgcttctgttcatacatttttctttctttcctagaagggaccaatgccaataaagc

SEQ ID NO: 289390 - DNA, 659 bp, Homo sapiens
attttcttccagcaagggatagaaatattcactaagaagtcttacatgttgaggtcagtatgtcttaggtaaataaactctgaccatacgaccaagttagaagtctcttccctcttatctgtccttttataaatgtattcttccatccaaaagtagcaactggagtctcccagttatctctctgttctgagcattcctgatttccatcttggagctagctacatattattgaatggttagtactaaaagycagatactgtgctaatatttttttctgataacaagtcctatgagatactttaaataatattatccctacttggttgatgataaaactgatatggtgagagcttaagtaaaaggctcagagtcatacaaagacagagctaggatatgaacctggagttgtcactctaaagacctagactctctcccatgacgatttcaactatgggatttctgcccctattacacaataagtagaaataagtctgcccaacatttctcctggcagtaagaacattttgctcacaattttgaacaaacaattattctgttttaaagtatccatgtgactcattccctcagctcctacatccctttgtgtactgtcttgatgcactttttgggtctgttcatatatttcccttctggtccta

SEQ ID NO: 289391 - DNA, 659 bp, Homo sapiens
attttcttccagcaagggatagaaatattcactaagaagtcttacatgttgaggtcagtatgtcttaggtaaataaactctgaccatacgaccaagttagaagtctcttccctcttatctgtccttttataaatgtattcttccatccaaaagtagcaactggagtctcccagttatctctctgttctgagcattcctgatttccatcttggagctagctacatattattgaatggttagtactaaaagccagatactgtgctaatatttttttctgataacaagtcctatgagatactttaaataatattatccctacttggttgatgataaaactgatatggtgagagcttaagtaaaaggctcagagtcatacaaagacagagctaggatatgaacctggagttgtcactctaaagmcctagactctctcccatgacgatttcaactatgggatttctgcccctattacacaataagtagaaataagtctgcccaacatttctcctggcagtaagaacattttgctcacaattttgaacaaacaattattctgttttaaagtatccatgtgactcattccctcagctcctacatccctttgtgtactgtcttgatgcactttttgggtctgttcatatatttcccttctggtccta

SEQ ID NO: 289392 - DNA, 659 bp, Homo sapiens
attttcttccagcaagggatagaaatattcactaagaagtcttacatgttgaggtcagtatgtcttaggtaaataaactctgaccatacgaccaagttagaagtctcttccctcttatctgtccttttataaatgtattcttccatccaaaagtagcaactggagtctcccagttatctctctgttctgagcattcctgatttccatcttggagctagctacatattattgaatggttagtactaaaagccagatactgtgctaatatttttttctgataacaagtcctatgagatactttaaataatattatccctacttggttgatgataaaactgatatggtgagagcttaagtaaaaggctcagagtcatacaaagacagagctaggatatgaacctggagttgtcactctaaagacctagactctctcccatgacgatttcaactatgggatttctgcccctattacacaataagtagaaataagtctgcccaacatttctcctggcagtaagaacattttgctcacaattttgaacraacaattattctgttttaaagtatccatgtgactcattccctcagctcctacatccctttgtgtactgtcttgatgcactttttgggtctgttcatatatttcccttctggtccta

SEQ ID NO: 289393 - DNA, 600 bp, Homo sapiens
caagacctatggtgcccagcatgatctggccataagctgcctcaccacctgcatcttactggtaccacacatcccctgcactcagcttcagccacctgggccctccttccacactgtgtttttctgtgctrcctcctacctgatgggctttgtgcatgtcaccgcctctgcctagaacattctttctgctcctcttcttactttcctcctgctgtggtttaaatattaattgctcaggaaattatcctctgctctccctgaaaagatcaaattctccccatcatctgctctcctgtacaccattcacctttcctctagaggccccattacactgtcggctttacattaggagcattttatgcatgctttttccaacccaaagagatggctagctccatgaaggcaggaaccatatctttcatgttcacttctataactccaggactaatcatagtacctggcttacagtagggacttaataagtgcttgtggaattagtttttaaaatgcatagcaagaaaccgaggtggtgcttatgttcttaattggtttgaccgtcaagtagtgcaacggcatatctaattgggactggtgtggcgg

SEQ ID NO: 289394 - DNA, 600 bp, Homo sapiens
aaggggaaagaagttgagttataaaaggcactaacagctcacaatcacagaatcatcatggatgctcattctaaatcaaatcactctcttagtgtaaaggcaaccacattttgataataatgttgtcctcagactgatctatacagaaccttgaggcaggaggagacaagaggaaaaaggaagggattttaaaaatcamatctgagaatctctgcttttgagtagagagatcattatgccaaagggtctcaaacccatctgatcttcaggatggccaagaatatggccgagaaatacgggtgggtgtcttggccacactcctggagattctgagtcacttggttggagatgacttagatgttcccagagtctgatgatcatccagctttggtaagccatgacctagtttcatgtacccttcctaccccgccttttcccaaaattaaacagaaagcccacctgtgcccaaggcaccagtaacttttacaatctccctgaaaagttgttttccagcccctgcttactcatatgtgttttggcttacactgaatattcagatgcatatattaggcattctattttagtacaagaggcaggaca

SEQ ID NO: 289395 - DNA, 600 bp, Homo sapiens
aaggggaaagaagttgagttataaaaggcactaacagctcacaatcacagaatcatcatggatgctcattctaaatcaaatcactctcttagtgtaaaggcaaccacattttgataataatgttgtcctcagactgatctatacagaaccttgaggcaggaggagacaagaggaaaaaggaagggattttaaaaatcacatctgagaatctctrcttttgagtagagagatcattatgccaaagggtctcaaacccatctgatcttcaggatggccaagaatatggccgagaaatacgggtgggtgtcttggccacactcctggagattctgagtcacttggttggagatgacttagatgttcccagagtctgatgatcatccagctttggtaagccatgacctagtttcatgtacccttcctaccccgccttttcccaaaattaaacagaaagcccacctgtgcccaaggcaccagtaacttttacaatctccctgaaaagttgttttccagcccctgcttactcatatgtgttttggcttacactgaatattcagatgcatatattaggcattctattttagtacaagaggcaggaca

SEQ ID NO: 289396 - DNA, 600 bp, Homo sapiens
aaggggaaagaagttgagttataaaaggcactaacagctcacaatcacagaatcatcatggatgctcattctaaatcaaatcactctcttagtgtaaaggcaaccacattttgataataatgttgtcctcagactgatctatacagaaccttgaggcaggaggagacaagaggaaaaaggaagggattttaaaaatcacatctgagaatctctgcttttgagtagagagatcattatgccaaagggtctcaaacccatctgatcttcaggatggccaagaatatggccgagaaatacgggtgggtgtcttggccacactcctggagattctgagtcacttggttggagatgacttagatgttcccagagtctgatgatcatccagctttggtaagccatgacctagtttcatgtacccttcctaccccgccttttcccaaaattaaacagaaagcccacctgtgcccaaggcaccagtaacttttacaatctccytgaaaagttgttttccagcccctgcttactcatatgtgttttggcttacactgaatattcagatgcatatattaggcattctattttagtacaagaggcaggaca

SEQ ID NO: 289397 - DNA, 582 bp, Homo sapiens
tttctaggtggatataaaatatccaaacccaaatctcaacttactgaccagtgagagtgctgaaccctgggtgtgtaatgtatttgtgcagactctctgggtgtgtgcctcctgagaattcactcctggagctcactcactgaagtcaaaagcaggtctgccctagatgatgtcacatgggtttgtttctcggatttagtgctcattttaatcccaagactggccacaaagcttaacgcttaactgcaggttctttatcctcactgacatttattttttattgaacaaaactaccctgctttagaaaatgtgtcccccatcattctacgaatgaatcaggcttcccaaatatttcactaaattaaaataggtgaaacctataaatagctaatggaaaatgtagagcagaatattactggcaacatgctgccttgggtaatttatgctaaatagctcctccggttcctctttatcatcactgcgaacttaattggktttttttttttttttttttttttaagaaaaagctggaaaaggaggtttgaaaatgagtgttcaaaagactttaaatgctgacatact

SEQ ID NO: 289398 - DNA, 543 bp, Homo sapiens
ttttcaaaacagtttgacatacaccatggagatagcctgggagtcagggcagacttctcccaagagaatgccgggtccttcaggagtgaagggcaggggaggaaaagattgggtcagtggagaatctctgagaagggggaacaggaggaaagaaagaggagggcagagcagctcaagcaggaaaggggtagtagctggtggtggaaggtgaagtcagtgaggttgttgcgcccaggtctgcacaggctagggaggagtttgccattgctcagcatctgcccaaatctgtgcatctgcctgtctgcccttgggcacctggaggtttaggggcttctgtcttatggccatggtgtgcacacctcttcctgagctcaactccatctttacacacagaccctgctgcttcccataggaatgttgaagcctccagaacccaggggcctaacttcctcattggcacttccctgsggtgggggatgctcgaagtcatcatttgccaacatttcctggtgctggggcagctgctcccccttggaggagacc

SEQ ID NO: 289399 - DNA, 531 bp, Homo sapiens
ttgcatcctgatcttctatccagatccctcaaactttctccttatcagcaataaagctgttttgctatcttatcattcatgttcactggagtagcactttcaatttccttcaagaacttttactttgcatctaccacttgactaccacttggcccaagaggcctagcttttggcctgtcttggcttttgatatgactttctcactaagtttaatcatttctagcttttggtaaaaggtgagagatgtgyaactctttctttcactttaacactgagagtccatggtagggttatgaattggcctcatgtcaatattgttgtgtctcagggaatagggaggcctgaggagagggagagagatgggtgaatgactggttggtgacacagtcaggacacacacatttattaagtttgccatcttacatatgctcagtttgtggtgccccaaaacaattacaatagtaacgtcaaagattgcggatcacagatcaccataacaagaatgttaaatattgagagaattaccagaat

SEQ ID NO: 289400 - DNA, 519 bp, Homo sapiens
attgcactggcctgaacagcacttccagcctttgtttgttggttggataatgacttcatttcatgtgctctagtaaaccgattgactgtcctctcccacctctctctctgatcataattctttctgtgcccatttcattcagagacgtgtgccctccaaaccacactccccacatttatcaaagctaaatagcttcctgatgccttcccccatatttctaaaagcaagctcctcttaccttacacagagagactaagttgaacaggaaacttaattaatacacaatttatcttttccttcaggttatttatttctcagtcaaaactmttggttgcctgcaagaaacggatgctggccctgttaagcataagggaatttattggaaggacacgagagttctcagcattgataggtagcttgaaaaccaagcttaggaaagagatgagaaccaagggctttttctggtgccaggcaccagtgtgccactgcggccactgtgataaggcaccttcaattgat

SEQ ID NO: 289401 - DNA, 569 bp, Homo sapiens
gggcccacttggataatccaggttactctccctatcctaaggtcagctgatyggcaactctaattccatttgagaccttaattcccctttgctcagttatgttatatattcgcatgctctggggatcaggatgcagacctaatcccattagggggccaagagtctgctaatcacaggtgcaattttgtttccttttcgttatcgaacttaacagcctgaaatgatatttcctgactattgtttacttgtcacctgtctcactcttctggaaagcgaatcccaagagggcagggatcttgcaggtgctgctcattcacccctgtaatcccagcactttgggaggctgaggcgggcggatcatgaggtcaggagattgagaccatcctggctaatacagtgaaaccccatctctactaaaaatacaaaaaattagccgggcttggtggtgggcacctgtagtcccagctactcgggaggctgaggcaggagaatggcatgaaccctgcaggtggaacttgcagtgagctgagattgcgccactgcactccagcctgggcgacagagcgaga

SEQ ID NO: 289402 - DNA, 549 bp, Homo sapiens
catcacagaaatgcagtgacaaaggagaagggcctgtaattttacgctgtagaacaatggtcctcaaactctttaatataaatgagcccccagagaggtatgtttaaaatccagattccatggtggcttcattcctgtgatcctagcactttgggaggctgaagcaggaggaacacttgaggccaagagttcaagaccagcctgggcaacacagtgagatctcatttytaaaaaaaataaaaaattagctgggtgtggtggcatgtgtctgtagtctcagctacttgggagactgaggtgggaggctcgcttgatcccaggaggtcaaggctgcagtgagccattatggcaccactgcattcagcctaggtaacagagtaatgctctgtctcaaaaaaaaaaaaaaaaaaaaaatccagattcctaggttcctccctaggaaaaaaaaaaagcaagagcatttttagcactcatttcaaatgacatctagtaatagtatttgagatacactgatctagagttgacctctgctaacagattagtgtattt

SEQ ID NO: 289403 - DNA, 549 bp, Homo sapiens
catcacagaaatgcagtgacaaaggagaagggcctgtaattttacgctgtagaacaatggtcctcaaactctttaatataaatgagcccccagagaggtatgtttaaaatccagattccatggtggcttcattcctgtgatcctagcactttgggaggctgaagcaggaggaacacttgaggccaagagttcaagaccagcctgggcaacacagtgagatctcatttctaaaaaaaataaaaaattagcygggtgtggtggcatgtgtctgtagtctcagctacttgggagactgaggtgggaggctcgcttgatcccaggaggtcaaggctgcagtgagccattatggcaccactgcattcagcctaggtaacagagtaatgctctgtctcaaaaaaaaaaaaaaaaaaaaaatccagattcctaggttcctccctaggaaaaaaaaaaagcaagagcatttttagcactcatttcaaatgacatctagtaatagtatttgagatacactgatctagagttgacctctgctaacagattagtgtattt

SEQ ID NO: 289404 - DNA, 1128 bp, Homo sapiens
catcacagaaatgcagtgacaaaggagaagggcctgtaattttacgctgtagaacaatggtcctcaaactctttaatataaatgagcccccagagaggtatgtttaaaatccagattccatggtggcttcattcctgtgatcctagcactttgggaggctgaagcaggaggaacacttgaggccaagagttcaagaccagcctgggcaacacagtgagatctcatttctaaaaaaaataaaaaattagctgggtgtggtggcatgtgtctgtagtctcagctacttgggagactgaggtgggaggctcgcttgatcccaggaggtcaaggctgcagtgagccattatggcaccactgcattcagcctaggtaacagagtaatgctctgtctcaaaaaaaaaaaaaaaaaaaaaatccagattcctaggttcctccctaggaaaaaaaaaaagcaagagcatttttagcactcatttcaaatgacatctagtaatartatttgagatacactgatctagagttgacctctgctaacagattagtgtatttwctccctttcttctccagctatctctctaactcttcgccagattgcacatgacaaaagctctgagaactgaaatggtaaccacagaacctaccttggataggagagagggatggtatcaaatgtaaaggagacaaatcagagtagtcaaaggcaacatctagcaaggaagggaaggcagggaacactcatctccactatagattgatgaaaaaccatccatgtgtggatwgattgacagacagataaatagaagatcagagttttcaggaacccagagtccatctcattccctccattctctcccaattccccagcagctcaggaattctctctgtatcttccagagtttgtccagcttccacaggaatacctctgggaatcaggaacacctagagagtagtaggcacattccctcttgaaccctaaattatgaactcacgaggctcaacctagagcaggaggcctcggccaaagctaaacccacaaactgctccaaggacctaccacagctgcctttcccctacagaaactgcctgtagaaatggccagggaagatcaagaagcaagtgaggaaagaa

SEQ ID NO: 289405 - DNA, 578 bp, Homo sapiens
ctccctttcttctccagctatctctctaactcttcgccagattgcacatgacaaaagctctgagaactgaaatggtaaccacagaacctaccttggataggagagagggatggtatcaaatgtaaaggagacaaatcagagtagtcaaaggcaacatctagcaaggaagggaaggcagggaacactcatctccactatagattgatgaaaaaccatccatgtgtggattgattgacagacagataaatagaagrtcagagttttcaggaacccagagtccatctcattccctccattctctcccaattccccagcagctcaggaattctctctgtatcttccagagtttgtccagcttccacaggaatacctctgggaatcaggaacacctagagagtagtaggcacattccctcttgaaccctaaattatgaactcacgaggctcaacctagagcaggaggcctcggccaaagctaaacccacaaactgctccaaggacctaccacagctgcctttcccctacagaaactgcctgtagaaatggccagggaagatcaagaagcaagtgaggaaagaa

SEQ ID NO: 289406 - DNA, 555 bp, Homo sapiens
gtcagattggaaaagcagcaatgcaaaattgaaactctgttcactttatgaaaggagcaaaagcattcaaggacatakaaaataggatcaaagagaaggtgtgagatagattttatccgaggtctttgatttatgtgttttgaaaacatctctaagactattcttgaagagaaggacaagacaaaaacatgttaaaatcttcaagtgggtttcatagttcaaaatcaaaggcactccacacaattacaaagaggaaaatcggaaaatcacagagatatatcaagctagagtggcttaattaaaatgataaaaatatgaaaactttctttttttatattcttagttttaagaaatgtattggtctcatggctgccaaacatgtggtcacatgatcactcatgttttgtcaataatactacgcaatttgagaagctgttaatatccacagctatccactctcctttgaatcctcaattcttcttcccaatattttttatcacaattaagtatctaactctttattcacccattttttacatctatcttaatttacca

SEQ ID NO: 289407 - DNA, 555 bp, Homo sapiens
gtcagattggaaaagcagcaatgcaaaattgaaactctgttcactttatgaaaggagcaaaagcattcaaggacatataaaataggatcaaagagaaggtgtgagatagattttatccgaggtctttgatttatgtgttttgaaaacatctctaagactattcttgaagagaaggacaagacaaaaacatgttaaaatcttcaagtgggtttcatagttcaaaatcaaaggcmctccacacaattacaaagaggaaaatcggaaaatcacagagatatatcaagctagagtggcttaattaaaatgataaaaatatgaaaactttctttttttatattcttagttttaagaaatgtattggtctcatggctgccaaacatgtggtcacatgatcactcatgttttgtcaataatactacgcaatttgagaagctgttaatatccacagctatccactctcctttgaatcctcaattcttcttcccaatattttttatcacaattaagtatctaactctttattcacccattttttacatctatcttaatttacca

SEQ ID NO: 289408 - DNA, 588 bp, Homo sapiens
agggccgggtggggtcttatgaagccctgggctgaggacagggttccagctgcccatctgacgtttcctgagctcacttcttaaataaagcattgcacttgaatycctgtctcaggatctgagtctgggagatcccaactgagatggccagaaggagtttcgaaagcagcaggacaccctcaaccccccaccgcacctcttcctgggtgcctcctgtggaaagaagcaccaggtacctcgagccaccaggtcccttgccacatgaagaggctcagccctctgcaccgcacccccgactgtgacttcagtgtcagcagaggcacctacctccagagtacatgtcaaatgccttctgtcccagcacagctcccgtggttcctaggggttaagaggagaacgattatcccctgtaacacgtgtcattctgcctgtcgttctgctgaaaatgcctaatctgtagtctaagatctaaaaacagaataagaatctaatgaaatcaggtcctataaagagcacgcaggactaaagtaggtttccaggaatggctgggctcatctgagaggttcaagaacgtaatggctgaggaca

SEQ ID NO: 289409 - DNA, 488 bp, Homo sapiens
aggcaacacacacaggtgcagtcacccatcgtgcttcttcatacattgcatgtgtagaaaatggcaaataaactcctctctggactggatttttagtatggtaatgaggagagttcaccaaagttcatctccaactcaggcatctctggatccatctggtttttatttttttggggctgagcttctttctggagctttttggaacaagaagaactcaaggtgcaacagttacaagtgagttcttttccatcgcgtgcaccctaaagcctgsgaccctgagttaaaagagtagcacatccccttggccaaaacaaatggattgctttgtgattcaagctaagctgggaaagagaagtcttctttcatcttgggccactgtctgggaatgatggaagcttagcactgcctgttagaggaggcctagttcataagactaggggctcaggattggatctgaccatttcaataccattttagccccaggattc

SEQ ID NO: 289410 - DNA, 502 bp, Homo sapiens
tttcttaaacgatcaagaaaattaaacattcagctaaactgagcacaaaaaagggagagaagactcaaattactaaaatcaggaatgaatgaggggacattacttctgaccttccagtagttaaaaaaaaaaattataagggaatactatagaataattccaattgtatggtactccatttaatagatgaaacagacaaattcctaaaaagacacaaaactgccagaactgactgaagaagaggaaaatctgaacaaacataaacaaagcagtggaattaggasaaaatgaaaagccccaaatcagatggttttattagtaaattctaccaaacatttaaaggtacagttcttcaattctttcaagaaatagaagaggacagaacatttctgaaataattctgtaaggctagtattatttggataccaaaagcagaccccaatactataggaaaagaaaactgcagaacgatgtttttttaatgtatagagatgtgaaaatc

SEQ ID NO: 289411 - DNA, 473 bp, Homo sapiens
ttgcagtgagccgagattgtgccattgcactccagcctgggcaacaagaaggaaattcagactaaaagaaaaaaaaagatctattgttctattgtgcaaamtctgactagtcagtaacaatatgctgtatacttggaaaattgtacaacggtattgttgaaattcataaataataactataatcttaaatgaaaaaatagtaatactaaactgatctacaaattcaacacaatccttatgaaaattgcagctggcttgggagaaatttatgatttttcttttctgtgtaaatttaatgagagtttatttttaagtatggtaacagatagggattcagtttcattcttatacatatgttaatccagttttcccagcaccatttattgaaaagtatgtgtcctttctgcagcatatattcttgtcaactttgtcaaagatcacttggctgtagatacgtggctttatttccgggt

SEQ ID NO: 289412 - DNA, 473 bp, Homo sapiens
ttgcagtgagccgagattgtgccattgcactccagcctgggcaacaagaaggaaattcagactaaaagaaaaaaaaagatctattgttctattgtgcaaaatctgactagtcagtaacaatatgctgtatacttggaaaattgtacaacggtattgttgaaattcataaataataactataatcttaaatgaaaaaatagtaatactaaaytgatctacaaattcaacacaatccttatgaaaattgcagctggcttgggagaaatttatgatttttcttttctgtgtaaatttaatgagagtttatttttaagtatggtaacagatagggattcagtttcattcttatacatatgttaatccagttttcccagcaccatttattgaaaagtatgtgtcctttctgcagcatatattcttgtcaactttgtcaaagatcacttggctgtagatacgtggctttatttccgggt

SEQ ID NO: 289413 - DNA, 555 bp, Homo sapiens
aacaaatggtgctggaacaattgggcatccatatgccataagtgtgtgtgtgtatacacagacctcacaacttacagaaaaattaactccaaatgaatacagaactaaatgtaaaatgcaaaacttaaacttctagaagaaaatctaatgctggtttagtgatgacttgctagatacaaaaccgaaagcatgatccatgaaagagaaaatacataagttgtatgttactgaaatgaaaaattctactctgaaatacactgttaccagacttaaaagaaaagccacaaactgagaggaaatatttgcaaatcaagtatctgacaaaggactcgtatcaagaatatacaaagaaatcttaaaactcagcaagaagaaaacagcytaactgaaaaatgagcaaaatatctatcaaacacatcaccagtggggatgtacacatggaaaacaagcacatgaaataattatcaacatcataggttattagaaaaatgcaaattaaaaccacaatgcaatatcgctacacacctactaggatagctaaaacaacaacaaact

SEQ ID NO: 289414 - DNA, 572 bp, Homo sapiens
taattagattaaatattgatcagtgcactttccattggtayttcattaacacacaataactgtcttgttatgtctacatgtaactacattaattaaaaagtcctgctggaaatgagaagttatgggaagatatacaaagctagcccttttaaacataaaaaggactagaaaactcacacttatgaattgaagcagaaaataaaaattaaactttccctattttaagggtttaaagtaattagatagaagaacaacgattcatttttttccccataggatgtcagttgtgatatcagccacactaagttcatctatcactctgtgttaaggaagaggttatgaaatattatacttattcctgaggattatggcctttgtttatttcaaaaataacctagcttttaaactgcatcatagatttcttagcatgtgattaaggctgtttattttcatactgatgagctaagagctgtttcaatgaagaggtgctgtaatttttcccatgatctggaaaataattcatggcatttttatgttgtcattaactgtcacatctcttgagttaaatatga

SEQ ID NO: 289415 - DNA, 587 bp, Homo sapiens
atggggtatggtgggatgttttgatatatgtatacattgtggaatgattaaattaagataattaacatattcatcacctcacatrcttatcattttttttaacttaaaaaaaaaatcttatgtagatggctatggcctgtaggggaatgggtgaaaatgggaaaacagaaagggtattcgacacacaaacccacaaaggacctcacatttagacttcaactttatctttgaaggaggttattcacaagattgctgagatgctttacagacctaggggaaagttaaagttaatcacacagcccgaaaattctactacgtgtttcactatggaaaaatactgtccacaacccctattttagcaattctgtgattatcttatgcatagcacattgataccacattttttaaaagagttaatttgttcagtgtaactgttttaaaaataacacaatttttatagcactgttttaatatttcttctcctttttttatgtataccaagagcctcaagataatggagaagcccaggccccttccatcctctctgaagctttgcacatttgtaccgtacatccttcattttaatc

SEQ ID NO: 289416 - DNA, 330 bp, Homo sapiens
ttgtgttttacatggtggggccatttatgatgtgcagtcttttcacatgcccttactgatgatgatgtacmtgccttgggaaaccggtgaggacttgtgatttaatatcacagggaaatcccatttgtaagaatgttgacaagcaaaggtccccactttattttagttgatgctcacctatacttgccggacccaggaagacacgtaccaccatctccagttaatagaggaggagagtgagtatctgaggaagtgaaatgatggccttgaagtcattggcaatgaattgaagctggaaaataatctcagggcatccatcttacgtctagc

SEQ ID NO: 289417 - DNA, 1855 bp, Homo sapiens
gcagagaattgatggtaattgctagagtagattgcctttttccctcttggtatgtgttacaattttctctttatggttgatatcctgatgtgtatctataatatgtcactatagcattgatggtgttagtgttgtgtgtattttagtcctactctgtcatttcttgccatttaaggatgtgtggctttctttagtacttagaattatcagtctttctttttttggaatattactttttcttcatcctctctattttckctttcaaaacttttgttacctacatagtgggacttctgttctatcctcataatagtttgtgcatatttaaaattgggtttttttcttatgaaatatttgttatcttgatatattccgggtacaagtcatttattagatatgttacttgcaaatatattctcccaatctgtggcttgtttcttcattgtcttaacagcattatttatttttagtttttttttaactttaagaaaattattaagagagcaggagttcttaattgtgatggagtctaatttagcaatttctaaatggtttctccccttagtgttgtatcaaagaaagcctttctcctacaattttattgagaaattttgtawgcagagaattgatggtaattgctagagtagattgcctttttccctcttggtatgtgttacaattttctctttatggttgatatcctgatgtgtatctataatatgtcactatagcattgatggtgttagtgttgtgtgtattttagtcctactctgtcatttcttgccatttaaggatgtgtggctttctttagtacttagaattatcagtctttctttttttggaatattactttttcttcatcctctctattttcgctttcaaaacttttgttacctacatagtgggacttctgttctatcctcataatagtttgtgcatatttaaaattgggtttttttcttatgaaatatttgttatcttgatatattccgggtacaagtcatttattagatatgttacttgcaaatatattctcccaatctgtggcttgtttcttcattgtcttaacagcattatttatttttagttwttttttaactttaagaaaattattaagagagcaggagttcttaattgtgatggagtctaatttagcaatttctaaatggtttctccccttagtgttgtatcaaagaaagcctttctcctacaattttattgagaaattttgtawtgtgtaaccaatgccgccagaagttgagctgctgcccgacgtgcaggggcgccctgacgcccagcatcaggaacctggctatggagaaggtggcctcggcagtcctgtttccctgtaaggtaagcccagggacagcccacgtacctccgccggtgacctcagggactccggtatccgccagcccactcgcaggcccggagaggcgggcggcatctctcatttaaaaaaaaaaaagaaaaaatgtttacacttcgtccaccctccctcaagcccactttgggwgtaggtctgggttgacatttaccgagtaataattgttaatagacaattaacagattaattggcatttgctgatcgttagaacatcgtagctcacccggcccaatgcccgcgtcctctgcagacgtgtattcgggtactctcggtagggctgggccgcaccagtaaaacttggaccgagaaactgactgtgtggggattgaggagggaggaaacgggcgagctaaacgccccctttaccagcgctgggctcggctgaattgataattggagtcctgcaccccgcgcctaccgtctgcgcacccctgacacgtgggagctctcgggattgtagctaaaaaa

SEQ ID NO: 289418 - DNA, 621 bp, Homo sapiens
tgtgtaaccaatgccgccagaagttgagctgctgcccgacgtgcaggggcgccctgacgcccagcatcaggaacctggctatggagaaggtggcctcggcagtcctgtttccctgtaaggtaagcccagggacagcccacgtacctccgccggtgacctcagggactccggtatccgccagcccactcgcaggcccggagaggcgggcggcatctctcatttaaaaaaaaaaaagaaaaaatgtttacacttcgtccaccctccctcaagcccactttgggtgtaggtctgggttgacatttaccgagtaataattgttaatagacaattaacagattaattggcatttgctgatcgttagaacatcgtagctcacccggcccaatgcccgcgtcctctgcagacgtgtattcgggtactctcggtagggctgggccgcaccagtaaaacttggaccgagaaactgactgtgtggggattgaggagggaggaaacgggcgagctaaacgccccctttaccagmgctgggctcggctgaattgataattggagtcctgcaccccgcgcctaccgtctgcgcacccctgacacgtgggagctctcgggattgtagctaaaaaa

SEQ ID NO: 289419 - DNA, 1139 bp, Homo sapiens
cgttgattacatgttgagtgcaggaaaagaacaagatgagcctggaacatcagaggctatttgtgatcatgtcaaaagcactcaggaaccaagctgaatatgcatttgtcaggccaagatggaatgatatgagtatcaacaaggataataatggcaatgaattgaaatacataaaaaagttaaaatccatgaattcataatgatattcttttttttaagagacataatgatttttagtttttgagacrgggtcttgctctgtcatccaggctggagtgcagtggtgtgatctcggctcactgcaacctctgtctcccaggttcaaatgattctcctgcctcagcctcccaagtagctgggactacaggcatgcaccaccacacctggctaacttttgtatttttagtggagacgaggtttcaccattttggccaggctggtctcgaactcctgacctcagatgatctgcctgccttggcctcccaaagtgctgggattacaggcatgagccaccatgcctggccwttatgactttaagacttcactgaaaaagaattttgaaactatgacaggttcacctaaacaacttttatcccattccatcagggggttatatcaagggacctttggccttttctttactgacctgtttgatcattaccctaagtaattgttagctaggttgttcattgtaatttctgccttctgactttaaaaaatttctccaaactggggtaaaaagagtgaattgatttgggatcttgtaatgttggcagaccggcaggtgttcctctgttttgtctaatctttggtagawttaccttttgttttaaccccatcactatttgctttacttaccccgtttttaataactattaaaatttttttaaattaattattttaaaaatagagacaaggtcttgctatgttgcccaggctggtcttgaactcctgggttcaaacaatccatctgccctggcctcccaaagtgctgggattccagacatcagccactgtgctggggcaactattaaaaagttttaacccaaatttgcatttccaaaggaatggcttagtaaataaggtagaaaatttccatctcaaaagcacagagctgagactttaggtctaaataccat

SEQ ID NO: 289420 - DNA, 614 bp, Homo sapiens
ttatgactttaagacttcactgaaaaagaattttgaaactatgacaggttcacctaaacaacttttatcccattccatcagggggttatatcaagggacctttggccttttctttactgacctgtttgatcattaccctaagtaattgttagctaggttgttcattgtaatttctgccttctgactttaaaaaatttctccaaactggggtaaaaagagtgaattgatttgggatcttgtaatgttggcagaccggcaggtgttcctctgttttgtctaatctttggtagatttaccttttgttttaaccccatcactatttgctttacttaccccgtttttaataactattaaaatttttttaaattaattattttaaaaatagagacaaggtcttgctatgttkcccaggctggtcttgaactcctgggttcaaacaatccatctgccctggcctcccaaagtgctgggattccagacatcagccactgtgctggggcaactattaaaaagttttaacccaaatttgcatttccaaaggaatggcttagtaaataaggtagaaaatttccatctcaaaagcacagagctgagactttaggtctaaataccat

SEQ ID NO: 289421 - DNA, 605 bp, Homo sapiens
ctctctgaaacgaatttgcataagaactgttgtttatgggagtgcatcttgatggggcagctggkttgttaggaaatactcaggaacccagcccagctctagaactcacccctgagcacaaaggcaatgttgggcacgctgttaaaggagcactagaatccagtagcctggacccctttctttgcggtcaagaaaggtgggaaaaggggtgcaggactgctacatcagtgagtgtaaataatccgataagcagaggtccatgggtggttacgcaccctggaaaggaataagcattaggaccatagaggacactctatgactaatgctcatcggaaaatgactaggggtgctggcatccctatgttctttttccccacaaggcaaaaacgcccctaagatgtattctggagaattgggtccaatttgaccctcagacgctaagaaagaaatgacttatattcttctgcagtaccgcctggccatgatatcctcttcaagagtgagaaacctggcctcctgagggaagtatgaattataacaccatcttacagctagacctcctttgtagaaaagaaggcaaatggagtgaagtgccatatgtacaa

SEQ ID NO: 289422 - DNA, 521 bp, Homo sapiens
atagtgcctggcacatagggcatgttaaaaaacattgaatggccaggcatggtagctcatgcctgaatcccagcacttcgggaggccagcggggcagatcmcttgaggtcatgagttaaagaccagcctggccaacatggtgaaacccaatttctaccaaaaaatacaaacaaattagccagagtggttgtgtgcacctgtagtcccagctacttgggaggctgaggcacaagaatcgcttgaacccgggaggtggaggttacagtgagccaaggtcacaccagtgcactccagcctgggcgacagagtgagactccatctcaaaaataaaaataaaaataaaataaaaaacattgaatgaatgaatgaatgaatgattatgtctctaaggccctgacaagggaattacaaccattaacagaaaatgcaggcccaggtgtggctgaagagtgcccacagcctggacagctcaggtccagtctcagccagttgctattcagggttatttccacagtgtgaag

SEQ ID NO: 289423 - DNA, 647 bp, Homo sapiens
taggagctgcacaaataaaatagtcactagatgcttttccacatgtaataatggaagattacttaaygccaggcttgtggtgcaaagtcagacacagtaatgctccataaatacagctaaggctatggatacaaactcccagtttgtccagtgttaatacctcgtccgggggtcaatgtttaaagacattttaaggttggtctttttccctcaggagtttatgaccgaaatgatctgttcggttgtctgcttctcctgttggatttgaaccatgtttgtggaactttttggaataaaagaaaccagtctgtgtgactacagaggagccaccaggcagacctgtgccgcattcaccagttttcccagtgtctagccccatgcctggcacagagtaggccctcaaaaatgcgttttgtgctcatttgaacagaaatttactatcagtttggttacttatgtcactggatgatcatctgatgtttggttgtgagatagcatcagccaattcttccctgggttttcccaattatttcctcaggtattagctacctcatgctccaaaatcaaaggccccggagaatggtttttggaaatttggctccataacttttgtttttctcttacctgaaagttattggttcttctct

SEQ ID NO: 289424 - DNA, 622 bp, Homo sapiens
tagtcctagtctttatttgcataggagtataacttcgtaacttcactttagtctctaattggttccctcctacaacctatcagatgtttgcatggggtgtgactttgtaaytttagcctctgattgattgtcttctgcaaccgatcagactcattgcaggccactacttcatttacatagggcatagcccaagtaaccaatgggaagcctctagagggtatttaaacaccagaaaattttgtaacctgcgcttgagccacttgctcaagcatactcccactctctggagagtacttttatttcaataaatctctgctttcattgcttcattcttccctgacttgtgtttgtgcattttgtccaattctttgttcaaaatgccaagaacctggatgacttgtagtcaagaccctccaccagtaacactgggtctagtttgaagctgagtgagagttttagggttttgatccttactcagtgtcagtttgagatgatggcctcttgacctgtgcatataaatatagttatggggatgagactaatggtaaaggcgtatgtgatagatgactttatgtaattggggtataaaaggctggcagaccaagggatgttcaggtcgaat

SEQ ID NO: 289425 - DNA, 611 bp, Homo sapiens
tgaggcaagccctccagtgcccattcctcgggtaatacatctgtctagcatctgtagacttatgagtttgtaactcttactctgcctctcaggcactgtaaaaacccttcttcagcagtccccaggttgcagtgttcaaaccttttcatgcaggaattccaaaggtacagcctatcccactccaagactccagttcctccaaaatattgtccaggaatgctctagttgtaaaggtgtcctcaggacctccttgcaggccagatcttctcaggtgaccaaatttttctacacttgagtgagagtttttcaaaaaatttgtcaaaacaaaaatggcattcctagctgaacatctatatacctargagaggtgatgtgagtctttacaaaacaagaaagatctatctctttaaagttacttatcttctacttggaataatggaacccatagacccaacactttcatcactatagaagatcacttaaatgagtcttcaccaaacaaagttataaatctattctctcctgtgtgaccctattaattacttgctacacatatgggaagacaattagaacacaatgaggaaagtattttgaagatatgagcctgatat

SEQ ID NO: 289426 - DNA, 612 bp, Homo sapiens
aaatctaacaactttacttgtacaccagggttgctgatgtgaatacaaatttatggtaaccccctttccacagggccttcaacactgccgttaatccttccacttgtcttctctcatagtccttagtgactatttcatacctttacttctttctatgtggattttatttgttctgcgtgtccctcattctcaataggaaatgatctttccttccaattaagacaaatagactcagatattcttctgtcaattatttttgcttccctatatatattttaaaaatacaattttagagtaaataatgtgttcatatggaacaacattstaaaactatcaaaaagagtaaaaagcgaaaagcttctctgtatcagaggcttctatgttagtattcacttcttctctttggacttctttgaccacatctaaataggtctagctgcccttcacctaattatctttcatcactgcacaatgtatttgtaatcatatacttatttgtttacctgtttactgtctcccatattcgattttaagatccatgagttcaggaccatgctaattttattcatgaatatacacctagtgacttgcatactgtagataatggtattg

SEQ ID NO: 289427 - DNA, 528 bp, Homo sapiens
tatgtcttgcatgttggataccagctcagctacagcaggatagggcaccagccagagtcgtgaggcccccctttccaggccccagcttctggatgacatttctagatacatgctgcaccagaagggaamctgctgctttgaagggaaagatctagtccttcaaaggattcatcaactgctaagtgaagagccgttgggccctgaataaccagcagcaatacccaggtactacgtcaggggggtgagactctgagactcgctggcctcaggtgagactcagcacattcccagatgtagtggttacatgatgaaattcctcccctggttacagcttgagaaaaatggaggcaaaagtaaaggagactttgtcttgcaccttatgtactggcttggccacagaaggttagggcaccaggtgggctcttgggttccatgactccaagacttggctcttggatgacatttctggacctgccctgggtcagaagggagcccactgtcttgaagggtgagtcccaggccaggcag

SEQ ID NO: 289428 - DNA, 1293 bp, Homo sapiens
aacaaatatcatattattatgaaattatgctaaatttggtatgtgatacagcagttccccttcacttgttcttcaaaatcactttgggatttatagattatttattaagaatacacaagcctattactatcttattaaaagtttctaaaaatacagaatatatgctgaattatgcaaataatttcagtctctatgtatttaaatatttgatttttctcttatgatctcttaatatgatgyctcaatacagaaccatattagagttcctagagtaagccacacttagtggtggtatattactctttatttgtgatgtttcattctagttgctagtcttttattttgatctttgtttcaagttctattgtctatatatctttttaatttgtcagattttggtagtaatgtaatgctagattagaaaatataattgtgtgatggttaatactgagtgtcaacttgattggattgaaagatacaaagtattaatcctgggtgtgtctgtgaggttgctgccaaagtagattaacatttgagtcagtggactggggaaggcaaacccacccttaatctggtgggtgcaatctactcagctgccggcgaatataaagcaggcagaaaaaagtgaaaggagagactggcctagwaacaaatatcatattattatgaaattatgctaaatttggtatgtgatacagcagttccccttcacttgttcttcaaaatcactttgggatttatagattatttattaagaatacacaagcctattactatcttattaaaagtttctaaaaatacagaatatatgctgaattatgcaaataatttcagtctctatgtatttaaatatttgatttttctcttatgatctcttaatatgatgcctcaatacagaaccatattwgagttcctagagtaagccacacttagtggtggtatattactctttatttgtgatgtttcattctagttgctagtcttttattttgatctttgtttcaagttctattgtctatatatctttttaatttgtcagattttggtagtaatgtaatgctagattagaaaatataattgtgtgatggttaatactgagtgtcaacttgattggattgaaagatacaaagtattaatcctgggtgtgtctgtgaggttgctgccaaagtagattaacatttgagtcagtggactggggaaggcaaacccacccttaatctggtgggtgcaatctactcagctgccggcgaatataaagcaggcagaaaaaagtgaaaggagagactggcctag

SEQ ID NO: 289429 - DNA, 578 bp, Homo sapiens
ttgacagctcttcatcttaaattgtgattcaagattatagatatccctatttttgtcaaaaacatggtttacatttttcttgttattcttgtttacatgatttcagaggagagaaagaggaagtatctttggtctcctttctcacagttaggattcccttatatctttgaaaattactgatgctttgagcttcactctaaacaaatgaaatcagaatttttaagactcagcccaagagatgtttaatttgataaactctataggtgatttttccrtgggaacgacgcccattgccttagccaaacaaatataggcttttaataatatttaaaatattctagttacgtttctttctttgtgtgtaccaaatgtgtattttgaggaatcttcttacattgtttgaagtttcttgtcacttctaaataagagtactaaattgacttccataaaagctagtcattttaatctaagaaagtatacatagctttaattattgaatatatgtctactgagagtttatggggagagaaagcctgttttggttctgtggaactctttggtattgaaatattctggtc

SEQ ID NO: 289430 - DNA, 578 bp, Homo sapiens
ttgacagctcttcatcttaaattgtgattcaagattatagatatccctatttttgtcaaaaacatggtttacatttttcttgttattcttgtttacatgatttcagaggagagaaagaggaagtatctttggtctcctttctcacagttaggattcccttatatctttgaaaattactgatgctttgagcttcactctaaacaaatgaaatcagaatttttaagactcagcccaagagatgtttaatttgataaactctataggtgatttttccgtgggaacgaygcccattgccttagccaaacaaatataggcttttaataatatttaaaatattctagttacgtttctttctttgtgtgtaccaaatgtgtattttgaggaatcttcttacattgtttgaagtttcttgtcacttctaaataagagtactaaattgacttccataaaagctagtcattttaatctaagaaagtatacatagctttaattattgaatatatgtctactgagagtttatggggagagaaagcctgttttggttctgtggaactctttggtattgaaatattctggtc

SEQ ID NO: 289431 - DNA, 1163 bp, Homo sapiens
ttttgcagctaattaaaatatacaccaaccctatgagtaaggagagagagtaataaaaaatgcctgcttcatttattaatattatgtaggcaaaattagcattttgatattaagaaaaatgtcaaagaatgctactggattagggagttttatattagtgaaataatttgaaagaaaggatttttatagaattaattcctgtcagcttatccaaacatttggacaaaaaattctgtaggcaaatcattaacacttcagtgcttttctttgaggtttcctcaatagagacactaataggatttctgagcaaatatggatttcaatgttcttttgcatgacattaaagaccatcacagttagtggtttctcatkcccctctatgcactagaggagaaaacaactcaactacaattctgcaatgaaggtttcctggcagactgtcagcatggtctacataattatttgacatcttcaaatatttcatttttgaaatttgagaattttggataatgagacagtaaaatgtatttgatgtaatttcataaatcattatgataaattaaaatattawcagaaaaattactgcctaaattaagcactataggcttaaaattgctctgacccttccatacggtgaggcaaatggtttaatgagcaatttctctagcttttctcatttgcaatttaacatttcctattttatagtacaaatattttttcagtcattgattcaacaaatattttcagatttccttctgcaccaagaatgtaatgattaccaaaaccaaatgcctgttccccaagagttcataatttagtgaaatattataaagtaatacatgcatgttatgtgcttattttgttcctgtattagaatctaattagactgtttaaatcacccaaaagagccccagtcagagataaccacagttaaattactgggatatwtaaatatgtatttgtgtgtatttattaggtttgaattcactgtttttgttgattagaaatggtcaatagtggcaatttgatacagttcaacctaattaatatattccattgtatggaatatattaattttctgcagttgaatactgaaattattatcaatactttctataacaagtagtgctaataaactatggtatattgcatacttggtcaca

SEQ ID NO: 289432 - DNA, 539 bp, Homo sapiens
ttaatgtttgtcaaatttgatattaaatttaggctttgctgaatttaactatatgactaggatacaccattygtactacaagagcatcagttttatcgcgtaaaaatcaacttaaatatctatctttctttaggtttttgtgggaattaaataaattatttagggcacaattgttaacaatacagtttttggagtcagccaatgagagtttaaatcctgcctcaatttcttcatctctaaaattgagatattgtcaacctcatagagttattaggaaattcaactattaccatgtctttacattacttaacacagtttctgatacagtaaggactttagaaacattaatttatttcctctcaaggcttagtgttggaagaaaaggcttgaaggcatttccaggaaagagaacaacacatgcatttttagggagggaggacattacatgataagctttgagaaactcaagtttctctatgatgagaactttggatgcaatggacaatttatcaggtgatacggcaaaattatatagaatc

SEQ ID NO: 289433 - DNA, 569 bp, Homo sapiens
aatgtattggacacattaaagatgatctcaggaagcaattacaatagtaatatttctaaggaatgtgtgtttgcaacacgaacatcttttgattcctaagcataaattattttgagtcaaaatgagcttcaacatactctcctctagaggtaatcagaggagaagaaaaagtatcaaagaaaatacctaaatattgaagacracacaagaattgaaattggtaatgaaaagaaaactaaagacatctctgctatctgcgttctttcattgcttcactcattcattccttcaacaaatattactattataaatgtgatggtgaataaaataggcaagctctcatggaacacattctttattcttcaagcagacaatgttactttgtgcatttactgtgatctaattagcagctttgtgtgtacatgcaaacacaactctggaacagtattaagataatttctctctggatcaggcatctcacacattttcaagtaaaacagagcattttcaggttattgcttattatctcaaagagaaaaacctgtacatatgttcccacaatacaaatg

SEQ ID NO: 289434 - DNA, 434 bp, Homo sapiens
tttggtatttctttcagcagagttccttctctttttcctccctgtatcatccagccttttgatgttttcaggactgatccarctggtgtactcatcttccagcgtctataaaaatatgtgaaagcatgccactttaactataaattcagctcagattcaacgtgcttgtaagtttgaggtcggcttcatgagtatgggatcagagtcatcaggactggtgtcgaggtatgaagaaagctgttggaaaatgaatggccagctggcacttctgtccctaaaattaggaagaagggaattatagaaacaatagtctgaaggcttccaatctggcagtctggtatagaacctgtctgcagatcttcaaaagaaacagtaggacaattttgtcatgtgccctggatggctctgactccctagtcacttacagagttcca

SEQ ID NO: 289435 - DNA, 587 bp, Homo sapiens
ctaaaacaaacaaaccaaaacaattaatactcttacaaaaaaaaaataccacatacacacaacagaatccaggactcatcatcatagtgtcccagatatactttaaaatttcctgcttcactcctctccacttcatcccctctcctccaaaaaataggaaaatgtgattcatattcaagagaaaattcagatattataatcacaggcaaggttttaaaaactgctattataaccctgtgtaaggccaaaaaggaaaatatgtccatagtgaagattttccccagtaaattttctgcacacaaatcttagcttctgcttcctgggyaacccaacataatacagtaaattatatatgctcattatagaaagtgtgaaaaactacaagtcttaatagttggaatgaaatccccccaaagactgacaagttattgtttgatgttagtttactaggcttttgtaattttgcaaatttcctctgaattttcatgggtgttccaattgaaggctgactagttgcagtaaataccagaagacaggcttttaaaattcatccttctcctgttccctttttagcaagtatcgtctat

SEQ ID NO: 289436 - DNA, 587 bp, Homo sapiens
atttctttcgttaagctttctctatcccttcttcctactcccatgcccagatataaccacttcctcttcagtacttctacactttacacataaatttatcatgatactataaaattttgttgtaggcatttattgatatatttctgttcattgcaaataacagctccttaaggcaaaggctatattttgtttattgggtatcctagtcagaactgaaaaaaaaagttacttctgtctactttcaattatatgtcatttgagatgcctacagaaaaagtgtcatatgaattaggtatttgtaaacaaatgaaaatcaactagataaaggataagaaatagcatacatgtatttttgtagtgacaacttactttgcttttagtttccttattctcatgtgaaatagcagagatttttaaggaccatatcaccagtttctcactatagaaagagcagctgtgtcactttttatcttcattatgtgttaacttgatgctctcgtaactttaaatatgaaaatayggcaagtcacaggttaaagcaccaaaaattctaaatccacctagacaagtagaaaatatgtagaatt

SEQ ID NO: 289437 - DNA, 554 bp, Homo sapiens
acacaataattataacataatatgacagaaaccaacataattattgtaccattgaatataaataggctttactcatctactaaaagaaagctccttttgaattggctcataaagcaactcaactctgctgtgcacaagagacacacataaaacataataattcaaatgtgctagaaataaaggcattagcaaagctatattaggcaaatgggaacaacaaggaagcaggaattgtgtttctgacattaaagtaaaattcagggcrgaaagtattaaatgagaaaaatgggcactttaaaatattaaaagccacaacttacaatgaagatatgaaagttatgaatatctaagcactaagtaatactacaatcacttaaaacaaatgagaggagatataaaatagaaacactatatttatttgattttaatgtattactctcagtgtaagacaggtagaagaaaaaaaggattagagaaaatgtaaataacataatcaacaatataggtcttatggagctatatcaaacatgacactacatagtgatatggagtat

SEQ ID NO: 289438 - DNA, 560 bp, Homo sapiens
cataagttgaaacaatgacaacacactctagttacaatgtaaaagaatgagaaattaaaataaaaatggctttttcacacagaaataaaaactgtccactaagtaactcttggatagaaggggaaacacaaacagaaataacaaaattttctggaaaaaaagaatgataaaaaactacctattacaatctgtgggatatatttaaagaaaaattagagaactcagaaacttaagcatttgtttcaggggtcagaaaactactggtcacagtagtggtgaactctaactcactgtctgttttgtatggcctacaaaaagtgtcatacttattcatttaagcatattctgtgaccgtttttgcacaactgcaaagtggagtagttgtgagagactgtatggcccrcaaaacataaaatatatgttatttataggccctttacaaaaatagtttgccaattcttgctccatatgtatcaatagaagatagatgaattgtaaataaataaatttcccattcaaaaagttttaaaaagtaagccaaaataagcagagtgaagaaa

SEQ ID NO: 289439 - DNA, 571 bp, Homo sapiens
aaataatattaataatagtagttaacgtttgttgagtgttatatgccaaatactgttctgaacacttcacatgagttaackcatttactgaagcaaattaaataagctttcttggctcttctcccattgcatattttatgatctgaatttcactctcagatgttgctactttgactacaaaatgtcctccactggaaagcacttcaattttcccaacttcacatccagaccctcaaccagcctccccgagtcctggcaaaccagaaagatagctataccaactgtctttctttattgtgtcaatattgaaggaatcatataaaaatttagttgaagattaaaaaaaatgccaaccaaaacagattctatttgtaagtatgttgtttatacatttcagattttgacaatatgaaacggtcttcaaaaagaatcacactttgtagggtaagttccgaacttaatgatttatgccagtcatatatggtctctgccttctaattagtcattctctggcacttccctatgtctttgcaggtgttgtttctctctgaatgagatgacctcttgacaa

SEQ ID NO: 289440 - DNA, 571 bp, Homo sapiens
aaataatattaataatagtagttaacgtttgttgagtgttatatgccaaatactgttctgaacacttcacatgagttaactcatttactgaagcaaattaaataagctttcttggctcttctcccattgcatattttatgatctgaatttcactctcagatgttgctactttgactacaaaatgtcctccactggaaagcacttcaattttcccaacttcacatccagaccctcaaccagcctccccgagtcctggcaaaccagaaagatagctataccaactgtctttctttattgtgtcaatattgaaggaatcatataaaaatttagttgaagattaaaaaaaatgccaaccaraacagattctatttgtaagtatgttgtttatacatttcagattttgacaatatgaaacggtcttcaaaaagaatcacactttgtagggtaagttccgaacttaatgatttatgccagtcatatatggtctctgccttctaattagtcattctctggcacttccctatgtctttgcaggtgttgtttctctctgaatgagatgacctcttgacaa

SEQ ID NO: 289441 - DNA, 472 bp, Homo sapiens
cttgctgcttcaccttgcacttttatattatggagatggcttctttctttaagcaccatgaaacaacctctcctagcttccaacttttcttctgctgcttccccacctctctcaaccttcatagaaaggaagagagatagggccttgcactggattaagccttggcttaagggaatgttgtgactggtttgatcctctatccagagcagcctaactttcttcgtatcagcaataaaggctgttttgctttcttatcatttgtatgttcactaaagtagcacttttaatttccttcaagaactttttcttagcaatcacaacttggctaaytgtttagcacaagaggccttgctttcagcacatcttagctttctacttgccttcctcactaagcttaatccttctagcttttgatttaaagtaaaaggtgtgtttcccttcctgtcacttgaacatgtagaggccattgtag

SEQ ID NO: 289442 - DNA, 490 bp, Homo sapiens
aaaaggtagctatgtgagatgatggctatgttaacaaactttattgtggaaatcatttagcaatttgtatatagatatcaaaacatcactttgtgactcatatacacctttaatacataaaatttttatttgtcaagtatacctcaacaaagctgaagaatataaaagagggcttattataggaatgcatgaatgaataaatgccccaaacaaaattcgctacaatacttgatttaaaatacaggcttcayttatggactttcagcctcattatcattaaaaaggtacttatctaaaaacttttgcatatattttttaaaataaccataccatgattacagcatacaagtatatattgttcacactaataatgcacactgatccatcctctaccagccccaaagatagccactatcctgacgactaacaatagagattagtgtcacctgatttttattaaaaacaatctgtagagttgtaaaattctcca

SEQ ID NO: 289443 - DNA, 1059 bp, Homo sapiens
aaaaggtagctatgtgagatgatggctatgttaacaaactttattgtggaaatcatttagcaatttgtatatagatatcaaaacatcactttgtgactcatatacacctttaatacataaaatttttatttgtcaagtatacctcaacaaagctgaagaatataaaagagggcttattataggaatgcatgaatgaataaatgccccaaacaaaattcgctacaatacttgatttaaaatacaggcttcatttatggactttcagcctcattatcattaaaaaggtacttatctaaaaacttttgcatatattttttaaaataacsataccatgattacagcatacaagtatatattgttcacactaataatgcacactgatccatcctctaccagccccaaagatagccactatcctgacgactaacaatagagattagtgtcacctgatttttattaaaaacaatctgtagagttgtaaaattctccawagcaacccagccttctctctaagcatcaggccacgctagagaaatttgaagcctgtgtcccattgaagatagccagggtaagaaaaaactaaaaattcagatctccttccacacactaacaacccaatagaaggggactgctcattttcaggtataaataccattgacctcagcctctactgttccatacacaatgtttagcattcaaatttatgagatacacacacatacacacacacagcaaactattttcaaaagcaaagtaaccaactaaaccaaactcacagatagctcagatattgaaactatcagatagagaatttaaaatatcagcgattaaaatgctaacagatataaagggcacagtgggaaaccttccttaacaaagtgagwatttaagcaggaagatggaaactttaagtaacagtcaaatggaagtactagacttttttttaagaagataatattagaaattaagaatttctttgatagaccaaccagtacacttgatacagctcaggaaacattcaatgaacttaaggatagcctaatagaaatcacccaaatt

SEQ ID NO: 289444 - DNA, 568 bp, Homo sapiens
agcaacccagccttctctctaagcatcaggccacgctagagaaatttgaagcctgtgtcccattgaagatagccagggtaagaaaaaactaaaaattcagatctccttccacacactaacaacccaatagaaggggactgctcattttcaggtataaataccattgacctcagcctctactgttccatacacaatgtttagcattcaaatttatgagatacacacacatacacacacacagcaaactattttcaaaagcaaagtaaccaactaaaccaaactcacagatagctcagatattgaaactatcagatagagaatttaaaatatcagcgattaaaatgctaacagatataaagggcacagtgggaaaccttccttaacaaagtgagaatttaagcaggaagatggaaactttaagtaasagtcaaatggaagtactagacttttttttaagaagataatattagaaattaagaatttctttgatagaccaaccagtacacttgatacagctcaggaaacattcaatgaacttaaggatagcctaatagaaatcacccaaatt

SEQ ID NO: 289445 - DNA, 1013 bp, Homo sapiens
gtgactgcaatccctcagtctaatacggggtcaggcaaccatctgctcttgtaccagtggaatattaaactggtttcccaaccttcttttcaaacatacagtctcttgaagggttttcaaaacaacaactgcgaaatggcaatagtacctgaaataaaattttatggaattattaaataaaatgactagcatttgtaaaatgrcaggtggcttgtgaactgtttatgtacacatatcttgtcaacatttgttttgaattttattaacatttataaatgttactcctttcctacttcaatattattactgttatattcaaaggaatagatggaaatttcaaagcccacaacctaatcactgcttttacctgatctgtcttttgttctatgtaacttccagaaaaaagtctagaagtgcaagtcacttggaattattttattcatttaatgagagtcacattaccgcattcagtagtctctagagcaattagtagcagtaaagtttggwgtgactgcaatccctcagtctaatacggggtcaggcaaccatctgctcttgtaccagtggaatattaaactggtttcccaaccttcttttcaaacatacagtctcttgaagggttttcaaaacaacaactgcgaaatggcaatagtacctgaaataaaattttatggaattattaaataaaatgactagcatttgtaaaatggcaggtggcttgtgaactgtttatgtacacwtatcttgtcaacatttgttttgaattttattaacatttataaatgttactcctttcctacttcaatattattactgttatattcaaaggaatagatggaaatttcaaagcccacaacctaatcactgcttttacctgatctgtcttttgttctatgtaacttccagaaaaaagtctagaagtgcaagtcacttggaattattttattcatttaatgagagtcacattaccgcattcagtagtctctagagcaattagtagcagtaaagtttgg

SEQ ID NO: 289446 - DNA, 628 bp, Homo sapiens
catgctcaaggcattttgcttactgactttcaggagtgccaagaatgataatatctgctttttatgagagtgttttgaaaagataggcaaagctttagcagaaaagtgtctgggaaatcttcaccatagagtctttcaccatgccactgctttttttgttcatccttctcatcaaacaagcataatttggggagggttttgatgggaaatcatcagacatacatcttacggtcctgatttggctccttctgatttatttttgtttcctaatcttaaaagtctgtaaagggcactcatttttcttcagttaataatgtaaaaaagactgcactggcacgattaaattcccaggactcttagttctttagagatggactaaatggctggtatcattgcttacaaaagtgtcttgtcattgatgaacttrtgttgagaaataaagtttatattttttctacctttaagtccatttttcatgaccatactgaagttacctcatacttaatatttacacctgggtgtcatacaaacatctcaaattcaggcaatacacaactcatttttctttttctaaacttggatttccttctgtcttcctgttatagatgtcatcttttatagaatatgt

SEQ ID NO: 289447 - DNA, 553 bp, Homo sapiens
cattaacccacttatgtattttatattacactcgggtatatatacaggcatctcaaactcaagcaatcacaattgaactcttgacatttcccrtaaaatgggatcatcttccagttctccctattctcgttaatgggaccagtctccacccatctgccacttagatgtcatagtttatattttcttcttcctctatggacactagcaccttgttttgtactgcataactatataccgaatccattgtattctttctctcctcatcgccattaacctagtccaagccatcattttcccttgcttgaatgattgcaataaactcctaaaagatttctctgtaccaaaactctatcagagcacctagaagaatattctcaatgtcagtgtcatcattatttactagcttaaaaatgtttgatgttttcttattatacatatgatgctatgctatgtcttcaacaggccatggcaggtcctgtatcatcactagcctcatctttggctattttcccccactcactacattccagtcaccctgggcactctcccactc

SEQ ID NO: 289448 - DNA, 553 bp, Homo sapiens
cattaacccacttatgtattttatattacactcgggtatatatacaggcatctcaaactcaagcaatcacaattgaactcttgacatttcccataaaatgggatcatcttccagttctccctattctcgttaatgggaccagtctccacccatctgccacttagatgtcatagtttatattttcttcttcctctatggacactagcaccttgttttgtactgcataactatataccgaatccattgtattctttctctcctcatcgccattaacctagtccaagccatcattttcccttgcttgaatgattgcaataaactcctaaaagatttctctgtaccaaaactctatcagagcacctagaagaatattctcaatgtcagtgtcrtcattatttactagcttaaaaatgtttgatgttttcttattatacatatgatgctatgctatgtcttcaacaggccatggcaggtcctgtatcatcactagcctcatctttggctattttcccccactcactacattccagtcaccctgggcactctcccactc

SEQ ID NO: 289449 - DNA, 641 bp, Homo sapiens
gctcaaaacttggcagtaggtgatcctacagtcttgaagcagaattttctcttatctgagaatcctcagggttttctcttaagaccttcacatgattggatgagatcttcccacattgtggagggaaatctactttacgtaaaatcaactgattgcagatattacccacatccacaaaataccataataacaatacctaaattagtgtttggttaagtaagtactatagcctagccaaattgacacataaaattaataatcacaactcctttatatctatcaaacaaaaataaaattctctcatagtgtgcaatggcctccatgattccactcaaatcttmtcttctaattcttccttcctcaattggcagactcacttttcaagtttattctgtttgagaagcctttcccaatcactccttcccaatgggagctactagaagtaagctttcccgtctcttttttcagaattatagtaacttttctccatctctctgtgctgtaaacctctgtacattttaaaagtgtaatgcattaacaaggtgtcagttccattttaataaagacataatttactttgaaaaccccataatgtttaataaataggatatttaatatttttggcaatatatcatttaggt

SEQ ID NO: 289450 - DNA, 641 bp, Homo sapiens
gctcaaaacttggcagtaggtgatcctacagtcttgaagcagaattttctcttatctgagaatcctcagggttttctcttaagaccttcacatgattggatgagatcttcccacattgtggagggaaatctactttacgtaaaatcaactgattgcagatattacccacatccacaaaataccataataacaatacctaaattagtgtttggttaagtaagtactatagcctagccaaattgacacataaaattaataatcacaactcctttatatctatcaaacaaaaataaaattctctcatagtgtgcaatggcctccatgattccactcaaatcttatcttctaattcttccttcctcaattggcagactcacttttcaagtttattctgtttgagaagcctttcccaatcactccttcccaatgggagctactagaagtaagctttcccgtctcttttttcagaattatagtaacttttctscatctctctgtgctgtaaacctctgtacattttaaaagtgtaatgcattaacaaggtgtcagttccattttaataaagacataatttactttgaaaaccccataatgtttaataaataggatatttaatatttttggcaatatatcatttaggt

SEQ ID NO: 289451 - DNA, 576 bp, Homo sapiens
ctaaaaaatattcatgcaaagtgctgctcaatgatcctatttatctcagttggtttcctcattgtacaatgatagggttattaaactaaatttcttattttgccagcatcctgaagattttcaggttgtacgcacatctgggtaaaaccttgaattgtggaacacttactaggtatgtataagagaaatgacctaaatttatgcaaatgagttcccccttaccaccacttccctagtatttacatttctaatgtattaggttggtgcaaaagtaattgcggtctaatagtactacattataatagaaaaagatttgaacgaatggatggaataatgttatarggctgtgataaaaataagtactagattcagagcaagcagaaaggagaaactagaataacctccctgaaggggtggggaaggagaaggtcagaaaatgtttcattcatctaagtgctgggacaagagtagatattttccaggtggcagacaggggagtgattccaggaagaggaagccacataaaagaagtactaaaggatgacacagcttggcttatgctctttgaagaatgct

SEQ ID NO: 289452 - DNA, 492 bp, Homo sapiens
ataaaagaagtactaaaggatgacacagcttggcttatgctctttgaagaatgctagagtaaggcataatttagagtgacagaaagagataagggcattattgtttttcttataagtttaaaatgttgatgtcagagtccaaagtgtttcatgatctggttccacattacatatacaacctgatttttttttttttttccccacaagtaggtgctgacggggacaaaatgtgtaatttctttccctaactctcataggttcttagytgggacacttctgtaacaaaagacagactaacaggggaaaaaagcatacaaatttctcttaatgtgcatatggacaccggaactatgcataaagtgtgggactcaaaagaagagccagatagttgaagtttgtataccatcctgaggttacagaaaaaataaaggattggagcatggcaagacaggttacagaaggcaaaggaggaaaggtgtggccagcaagatg

SEQ ID NO: 289453 - DNA, 601 bp, Homo sapiens
tgagctatttgataaatagaacaacattgtgttcttttgaatggcccataaaactctaaacagtgctgagcacatagcaagtactctgaaacatgagtagattgatcagactacatcttcaggagtttcagcccttattttatttacatcaatataaacatctctcccaatcattgaaatatcatgcagtcagccatcatttccagtgctcagtgggaagatgtgggtaggatactttctgacatgtagtatatttttggagaccatttttgcgtatcttaacaaagtgacatctaygttatcttgtagtttctactatttattagctctgtgcacaagctacataattcacagttttttgtgagggttaaaaatgattatagatgtaaacgaacattgtagattttagagtaataaaatataggtgtatgactacaatatttaaaggaatagtctacatgtatttcttaggtccacccaaatttattcctaagctagtctgataactgaatcaacatcccttcatcaaaagaaaaattcagtgcccacatgtattttaactggtctagtagagaaaatgatccaactttggttacaaaga

SEQ ID NO: 289454 - DNA, 484 bp, Homo sapiens
catgagtagattgatcagactacatcttcaggagtttcagcccttattttatttacatcaatataaacatctctcccaatcattgaaatatcatgcagtcagccatcatttccagtgctcagtgggaagatgtgggtaggatactttctgacatgtagtatatttttggagaccatttttgcgtatcttaacaaagtgacatctacgttakcttgtagtttctactatttattagctctgtgcacaagctacataattcacagttttttgtgagggttaaaaatgattatagatgtaaacgaacattgtagattttagagtaataaaatataggtgtatgactacaatatttaaaggaatagtctacatgtatttcttaggtccacccaaatttattcctaagctagtctgataactgaatcaacatcccttcatcaaaagaaaaattcagtgcccacatgtattttaactggtctagtagaga

SEQ ID NO: 289455 - DNA, 601 bp, Homo sapiens
tgagctatttgataaatagaacaacattgtgttcttttgaatggcccataaaactctaaacagtgctgagcacatagcaagtactctgaaacatgagtagattgatcagactacatcttcaggagtttcagcccttattttatttacatcaatataaacatctctcccaatcattgaaatatcatgcagtcagccatcatttccagtgctcagtgggaagatgtgggtaggatactttctgacatgtagtatatttttggagaccatttttgcgtatcttaacaaagtgacatctacgttatcttgtagtttctactatttattagctctgtgcacaagctacataattcacagttttttgtgagggttaaaaatgattatagatgtaaacgaacattgtagattttagagtaataaaatataggtgtatgactacaatatttaaaggaatagtctacatgtatttcttaggtccacccaaatttattcctaagctagtctgataactgaatcaacatcccttyatcaaaagaaaaattcagtgcccacatgtattttaactggtctagtagagaaaatgatccaactttggttacaaaga

SEQ ID NO: 289456 - DNA, 621 bp, Homo sapiens
attggttgaataaatgaataattaaatatgtgacacagatttatactcatttattagatattagaagtgctaaactgaatttaaaggacaagggaataaatacaataatgaggccggttaaataatgtataactgaaagatggaagtgagcagagtgacatggaargtattgacagagagatggaatcttctagatagatcccacattctagtatcttctggattccattgttgcaatttagaagttatcagtccaattgcctttccttcactgatgctttcccttgtttctctgcttccagttcttctttattgttgacgtcctgcattttatttttatgtgtttaggcataattttcttttaatttatcctgcttcagtttcccttggatttccagttctgaagattggacagtctctaatgcccatacttctactaataatattcaaagcaaccactttgtaaacatcttctaccttataagtcccttcagccatctcagcagaagccaaaaatgaagggatcaccttggaaagatccatggacatgcctcttatctaatgaagtaaagccctgtgacatacacaagacactcacagagttgttgagaatttcatatc

SEQ ID NO: 289457 - DNA, 612 bp, Homo sapiens
atcagtccaattgcctttccttcactgatgctttcccttgtttctctgcttccagttcttctttattgttgacgtcctgcattttatttttatgtgtttaggcataattttcttttaatttatcctgcttcagtttcccttggatttccagttctgaagattggacagtctctaatgcccatacttctactaataatattcaaagcaaccactttgtaaacatcttctaccttataagtcccttcagccatctcagcagaagccaaaaatgaagggatcaccttggaaagatccatggacatgcctcttatctaatgaagtaaagccctgtgacatacacaagacactcacagagttgttgagaatttcatatcaccagaaacactgccagattagactgaaagggctagagagagatgtgatgtgagaaggacttaatcagctgttgctggctttgaagatgaagaggtggtacacaaaggcattctktggcctttagaagctgagtgcaaccttcaacctagagcagcacaagaaaataaggagctcagtcctataaccacagaaactgacttctgccaataacccaaatgagtcggagaatgattttcc

SEQ ID NO: 289458 - DNA, 524 bp, Homo sapiens
tgggaggcagaaatttaacaatgactaaccctcccattagcccatacaagataataaaataacaaaatttgtaccacatttaagtttgttcctaatacatgcagaagaaatatttgtctcccatggaacccttaggaaaagagaggaaagttcacccaggaatctctgacacatactcaatagaggactgggaccaggatcaatggcccagcctgaaccaagatttaaattttctattggaatggtcaagacagatgtccaaagagacagagacccaagtgtgagagtgcagtgctattgtgtcttctggtggcttatataaaatctctcttcttctgacttcactctttatctcatctgaggccttttgtcccacaggtayggttgtgcattcacctgttcctagcactttacctatctgtgcaaatatggctttgaaggtctaatatagtcatagcttatgtcccaagatgcactattctctttgctggtcacttacatttcgagggtcttatatttgtttc

SEQ ID NO: 289459 - DNA, 380 bp, Homo sapiens
ttgtttcacatctgatttatttcatctatttggttcccattattagctgcttatagatgagatacctcttgctaacagaggtaaccttagtagtgagtatgtgattgctgtctagtgtaaaagaaagcctgatgcattaatgagtcatatcacccttagaaattaaaaaaaaaaaagatttccatcatttttgcrcaaaattctttaaaaatgaaaattctaccctttggtatgagcatcattccaggagccacatcataccttcctactcaacaaaccctgaacctctgaaaaaaaaaaagaggcttgaatagaatgccttaacctctccttaaaggcctcctcttttgattcatggatttttgagatgaaccttgaaa

SEQ ID NO: 289460 - DNA, 607 bp, Homo sapiens
aaattattgatcattgtcagaattttcttctcgaatattttgaattcctaggggtcttaaacttcaaaacctaatcattcagataattccttattccttttcccaattgggatatgtatgtgacaagttcacctgtcatcctcccaggatgcccatcttrggtagacaaactgagatacatagcttcccatgatcatcctgtacaattgtagcaacttcttaaaatttgtgaattacaaaattcacagagaatttcttccatatacctgtactgatcagccgtatctccaaagcaggtcacttttaggcatggtaggactatggtctagaataggatataaaaagagaacacacttcggtctgaaggcttttcaagagaaagacacgtggtccagaagatcttaggaatcctcactataatccaagctcaaactctttcaatttgctccagaatgacacctgtttggggagatttagtcttccaatgtaaaagagtcctcataacaatggcagaaacagaaaccagaatcagattgctttgaactgcactcatctgtgaaaagctttcataatctagctaaaatatatcctgctgaactatgattat

SEQ ID NO: 289461 - DNA, 607 bp, Homo sapiens
aaattattgatcattgtcagaattttcttctcgaatattttgaattcctaggggtcttaaacttcaaaacctaatcattcagataattccttattccttttcccaattgggatatgtatgtgacaagttcacctgtcatcctcccaggatgcccatcttgggtagacaaactgagatacatagcttcccatgatcatcctgtacaattrtagcaacttcttaaaatttgtgaattacaaaattcacagagaatttcttccatatacctgtactgatcagccgtatctccaaagcaggtcacttttaggcatggtaggactatggtctagaataggatataaaaagagaacacacttcggtctgaaggcttttcaagagaaagacacgtggtccagaagatcttaggaatcctcactataatccaagctcaaactctttcaatttgctccagaatgacacctgtttggggagatttagtcttccaatgtaaaagagtcctcataacaatggcagaaacagaaaccagaatcagattgctttgaactgcactcatctgtgaaaagctttcataatctagctaaaatatatcctgctgaactatgattat

SEQ ID NO: 289462 - DNA, 623 bp, Homo sapiens
cattcataaaagatactttgaaaggcaaaatgagactcaatatgctccagattaatataatattttttgtctatttgtagaattgagcaaaatggaaagtcaagtgaattggtattttaaaatggataaaaaatcaggggttcataaatattttgcataaaggccagataaatactttgttctttccagaccatatggtctctgtgacaactacccaattctgcccttgtatcaggaaagcagcctagactgtatataaatgaatgcatgtggctatgttccaataaaactttatttacaaaaacagtacaggggttggatatagtccatggcctgtgctttgctgacctctgaaataggagaacaataaaatatgatgataacatggaaatggtgaagccmagatacttttttatagtttggtaataagccttcacatagttttgtccaacattcaggtacaattagattccaggctacatcctgagttattaaaaaaataggatgactgttcctctggttcttttgaaatgacctcaaataaatattcctgaagacatgtttaatgatttgtagtgaaatgttaaaaccaacagtgttttcattgcccctttacattagcg

SEQ ID NO: 289463 - DNA, 553 bp, Homo sapiens
gagcactatcataaagctaacactgttttgttttgttttcggaagtctctgtagcttcctgctgctcacacagcacagatttaacatatgaaagtcaatgaaatgttaactatktatattaaaatcatttcctaggtttacacatctattcttatatttttaaaaataaatataggttttgagaatttgaaaggatggaaaaatgtctgaatcctcactgttgtacaggatgaatgtaaaattaaaactaaaacgacttaactatcgttttctaaaacgaaaagtgccaagccagtcagagcagaaaaggagtaggctacaggcttacatagagtgttttatcagcactttgtctcataaaacaaatatggaattcagttgtctttaactcaggtattaatttttatggagtttaaacttatttgaaggtgttatttgacagaaacattaatattagagtcaacatatggtggatatattgcatgaatttttaaaagaactaatatatcaaccaaagcaaagtttatacacatttgcctatctaagattagtt

SEQ ID NO: 289464 - DNA, 590 bp, Homo sapiens
aaaccttaaatttccattgtaaaagccagtatgaactgaaaatatattttatattcaaaatcaaaacaaaacatatttcctatactgtcaactaaaaaaagcaaaaaaccaaaacaaacccagcttggtagcaataaaatcccctggcacccagattaagggcttgcaatactaaggcaatcagaacttggaggagtggttgattccagatctaaggtattaaagtatgtccctgaccaacaggcaaagtggacccccgtggctaactgagatgtctatatttaagacagaacctggtggccatagctgggtaagggagtggtcacctactcttgtgttctcagaaagacgttataaaagtatcacaggacttcctttctataataaagtcaaatcagttcctgttgtaggtgccaagataagttgttgcctgattcactccccagtcccacagtggytttttgaaaaaaaaaaaaaaaaaaatatctgggccaagtgaggtggctcacgcctgtaatcccagcactttgggaggccgaggtgggcagatttcttgagcccaggagttcaagaccagcctgggcaacaca

SEQ ID NO: 289465 - DNA, 299 bp, Homo sapiens
cttgtctttatttgtatctcaacttcctattaagaaacacttttttttggcatcaaatcacagtcaagtccatcgacattaatatggctaatttttcttaccactccgtgtgttattatttattctgttaatttacaacaatatcttcctgactagattccttacttcctctcccctctgcaagctattctccatccagcagccaaactgatattttaaaagtgcaaatmgtattaggtaacagctccacttaaaatccactagtgggtccacatacttagaacacaaggcaaaagcat

SEQ ID NO: 289466 - DNA, 563 bp, Homo sapiens
cctgaacctggtgattgacagtttcctgataagacctcaggaactgggtgagtgggctcaagcatgcacacttcagaggcaaaatggcagagtttaactggtatatgaccttccgygggcattccaccggaaaagggaagaatgcttcatgtgaacgtgcctacacctccagtaagcacactgcgcatactcatctcccaagtgttagcagaccaccgtgcatgtaggcggtccaccccaagggaaaaatcaagggaaacgggatgcaagaccttggaagtatgccaatatataaaaccccaactcaaaagatcaaaccccacacttttccttcaagttacctattgggcctcttccaaagtactttccttccttttgttcctgctctaaagcttttaaataaacttttactcctgctcttaaacttaccttggtctctttttctgccttatgcccctcagtcaaattctttcttctaaggaggcaagaattgagattgctgcagacccttatagatttgctgccaataatgtattcatatatgataatggcttatatggttg

SEQ ID NO: 289467 - DNA, 535 bp, Homo sapiens
agatatagaaattagggaagattgcttgagtccagaagtttgaggctgcagtgagctatgatcacaccatggcactctagcctgggcaacagactgaaactctgtctcacagaaaaaaaaaaaattaaattaaaaatatacacttaaagaagaaagatgaaagagttgaaaagcagcaaagacaaactttactcacttgaaaatgtcatttccaaaatatgaagtaattaaatgcaagtgaatttggatagaattctctgcaaaaaaagacaaaccattttcctccttcccttttcgtgtaaattcagttcagctgttgagcacaagaactactatggtgaaataycactctaccaaatgcttttagttttagcccatttaagctattgtaaactcaacttggcagtcaccttgctgaacagtgaaagagcaggataaatgaaactttcctgaagttctttttatcattgaacagtaggagagcattattggcttcattcagttgtggctaggttacacgggttatattttaagt

SEQ ID NO: 289468 - DNA, 594 bp, Homo sapiens
taaatgctgagattttgagatttatccttattgactatccaagttttttactcatttgaaatgcagtttttcattaytacaaacaagattaaaattaatatgctcatagatttcttctcatttttcttaggtatttgtgagagagtctcctacatgggttcttaagctccactgcacactagaatcccctgaggagctttataacatactgatgccagaaaaatgtctctggtatttctgatttaactggtttgtagtgcagcctgggtactggtatgactgtcatgtgcacccaaggttaagaaccactgttcttctccagcatatatttttagaagtgaagttgctaggttgaatctatgaatcttctgtgaacctatgaatcttctatggtactaaatattgccagattgagctccagagtgcttttactagttcaaaatcccatcgactacaggtacaactctccactgctatgctttttaatttttgcaaatttggtagacacaaaacattaaatctctgtagttttattttgcatttctttgactgttagtgccatggagcctcatttcatgtatttattgactattg

SEQ ID NO: 289469 - DNA, 471 bp, Homo sapiens
atattttaatatatagcactgcaataaaactctattaaaatagaaaaacatgagttgaacatctttccatattgtataagtaatttcttggccccaatttatttcaaatgcacatattccaaataaacatasatatactaaatctatatatattctgaatatatccttcccaaatatgtatataaatatttcaaatatatattttctaaatatatatattccatacatatgtaatatatatcaaattattacactaaacaggttggatttagtctaagagccagtttataattataccttagaaatatacccagtagtgctttatagtgcttttaaaacatgatttaaggagcaaaatcagctaacagaagagcataattaaggagattatagacatatcttttaaagaaattaaattcctggtacaaataagagaaggtaaaaagctcacaattccttttttctttcata

SEQ ID NO: 289470 - DNA, 471 bp, Homo sapiens
atattttaatatatagcactgcaataaaactctattaaaatagaaaaacatgagttgaacatctttccatattgtataagtaatttcttggccccaatttatttcaaatgcacatattccaaataaacatacatatactaaatctatatatattctgaatatatccttcccaaatatgtatataaatatttcaaatatatattttctaaatatatatattccatacatatgtaatatatatcaaattattacactaaacaggttggatttagtctaagagccagtttataattataccttagaaatatacccrgtagtgctttatagtgcttttaaaacatgatttaaggagcaaaatcagctaacagaagagcataattaaggagattatagacatatcttttaaagaaattaaattcctggtacaaataagagaaggtaaaaagctcacaattccttttttctttcata

SEQ ID NO: 289471 - DNA, 501 bp, Homo sapiens
cacaggcaactggaacatcacctatgataggacgatcttggatatgatccctgacctagacttatcatttcttttgtttttttttttgagatggaatttcgttcttgttgctcaggctggagtgctattttggctcaccgcaacytccatctcccaggttcaagtgattctcctgcctgagcctgccaagtagctgggattacaggcaggtgcaaccatgcctggctaattttgtatttttagtagattccgggtttctccatgttggtcaggctggtcttgaactcccgacctcaggcgatccgtgtgccttggcctcccaaagttctgggattacaggtgtgagccactgtgcctggcctagactcatcatttttaccctacagtttatcctggtaaatgaagtgctcatgggaactatgatgatgtattttctcaaataatttttagacttgtttttgtttagttttggaaataaatgtagattttatgaataccaat

SEQ ID NO: 289472 - DNA, 501 bp, Homo sapiens
cacaggcaactggaacatcacctatgataggacgatcttggatatgatccctgacctagacttatcatttcttttgtttttttttttgagatggaatttcgttcttgttgctcaggctggagtgctattttggctcaccgcaacctccatctcccaggttcaagtgattctcctgcctgagcctgccaartagctgggattacaggcaggtgcaaccatgcctggctaattttgtatttttagtagattccgggtttctccatgttggtcaggctggtcttgaactcccgacctcaggcgatccgtgtgccttggcctcccaaagttctgggattacaggtgtgagccactgtgcctggcctagactcatcatttttaccctacagtttatcctggtaaatgaagtgctcatgggaactatgatgatgtattttctcaaataatttttagacttgtttttgtttagttttggaaataaatgtagattttatgaataccaat

SEQ ID NO: 289473 - DNA, 610 bp, Homo sapiens
taaatgagataactggggaaaaatgagaatagactattaagaaaactatattttttgttagagaagatttggttttaaattccatttatacagctaagatttcatatcacgcaggcaatttttctacatgtcagcattctgacaaatgtctgcctcagtttattatttaaaacaattaaaataagtgagtgacccaaggggtagagaatgctgcaatctctccaaactccacagctaacttgtattttgtcataagatagctaaaggtcatcaaaatagaagaaatatagtataggaaaaaaaagaagataaatgaagtcatagttttaatggctctcacatgaacttctgtgctggggtctctactgccggtagcatagagttttatttgcttggtatgtctccataaagatcttactaaaaggaaaaatgatatcagtgacacaataaatgggacaattgcaaacaggttaaagagagtyaagggttcaaagtatggtattttactcacatggaacatttcagtaatgtttcttttatgtttggcaattgcatgaaacctataatcacaactcagtactattgctgctataaggctgaccaacaagga

SEQ ID NO: 289474 - DNA, 535 bp, Homo sapiens
cagaagtgaaatatgccaggtraagatttgttatctttagtttttttttaatgtgacaaatacccttgaagacaattcatttcctgaatcactgtctcttgtataataagcattgtaatctaaaattaagaaaatttaaattttacattattctagttccaatcaactccttttataagatttgtaatctcacagtgcatattatagtcatatttctagatagggcaaacacataaaaaagtaactacttgggagactgaggcagggggatcatttgaaccgggaggcagaggttgcagtgagccaagatcgtgccactgcactccaacctgggcgatacagtgagactctgtctcaaaataataataataattttttttttttacataccagtatttccaaggaataggactaattctactattaaattagatttatttgttttggggtaagggaaagtacaacttagcccaaaatacatttgaatgtaggtaatacgaatcacaataccctagggcttcttgtatttaaatag

SEQ ID NO: 289475 - DNA, 506 bp, Homo sapiens
gaataggactaattctactattaaattagatttatttgttttggggtaagggaaagtacaacttagcccaaaatacatttgaatgtaggtaatacgaatcacaataccctagggcttcttgtatttaaatagttctacaatgtatacaacacatgcaggattttttctatttcttacatgtgtgtaatgtgtaacaggaaagcataaacttaataacttaaagaaacctagttatctataaactactgctggaaacaaaatagaaaagaaaatgatgcagagggaaaaaaatatgtcagagatttctgagttagaaggctagagagaacattccarggaatctttgggaaatgacttctaaaattgccatcaccagctagagtactcatgaacacgctgactactgggaccctcaaccttctttctcaaggtggttctgctatacataactgtgcctcctctctctgtcaaactttcattcttgagattatattccttttcccaca

SEQ ID NO: 289476 - DNA, 535 bp, Homo sapiens
gcaggttagttacatatgtatgcatgtgacatgctggtgcgctgcacccactaactcgtcatctagcattaggtakatctcccaatgctatccctcccgcctccccccaccccacaacagtccccagagtgtgatgttccccttcctgtgtccatgtgatctcattgttcaattcccacctatgagtgaggatatgcggtgtttggtcttttgttcttgtggtcgtttactgagaatgatgatacttttatcctcataagagattagttgcccaaacaagttatgaaaggtctcagatgatttcagtatacctctgatgctttaattttatttttagacaagattcttttggaagcagtggacagaaatccaacttacattaacttgaataataaaagagaatttttggttcacacaactttgaagtgaacgtttatcacagttttaggcacagcctgatccagaggaccaagcgaggttatcaagacttggtctgtccctcacctctgtttgtctgtgtggatctcatattttg

SEQ ID NO: 289477 - DNA, 535 bp, Homo sapiens
gcaggttagttacatatgtatgcatgtgacatgctggtgcgctgcacccactaactcgtcatctagcattaggtatatctcccaatgctatccctcccgcctccccccaccccacaacagtccccagagtgtgatgttccccttcctgtgtccatgtgatctcattgttcaattcccacctatgagtgaggatatgcggtgtttggtcttttgttcttgtggtcgtttactgagaatgatgatacttttatcctcataagagattagttgcccaaacaagttatgaaaggtctcagatgatttcartatacctctgatgctttaattttatttttagacaagattcttttggaagcagtggacagaaatccaacttacattaacttgaataataaaagagaatttttggttcacacaactttgaagtgaacgtttatcacagttttaggcacagcctgatccagaggaccaagcgaggttatcaagacttggtctgtccctcacctctgtttgtctgtgtggatctcatattttg

SEQ ID NO: 289478 - DNA, 535 bp, Homo sapiens
gcaggttagttacatatgtatgcatgtgacatgctggtgcgctgcacccactaactcgtcatctagcattaggtatatctcccaatgctatccctcccgcctccccccaccccacaacagtccccagagtgtgatgttccccttcctgtgtccatgtgatctcattgttcaattcccacctatgagtgaggatatgcggtgtttggtcttttgttcttgtggtcgtttactgagaatgatgatacttttatcctcataagagattagttgcccaaacaagttatgaaaggtctcagatgatttcagtatacctctgatgctttaattttatttttagacaagattcttttggaagcagtggacagaaatccaacttacattaacttgaataataaaagagaatttttggttcacacaactttgaagtgaacgtttatcacagttttaggcacagcctgatccagaggaccaagcgaggttatcaagacttggyctgtccctcacctctgtttgtctgtgtggatctcatattttg

SEQ ID NO: 289479 - DNA, 334 bp, Homo sapiens
aagcaatttgttcaaggtcacaagaggcagaatcaggtatttaacccagaatcaatgctcatcaccacaacactatcctaggattagattatgaggaaaactgtgctggagtgaaggcctgagactatcttcttcaagtagaagggagccactgaaggactttgaacaatgagaatgacataatcaatgtcattctttaggagggtcaaggtaataatacaatgatcaaggatcaagcrtccaaaatacatgcaagaaagacccccaccaagacttcttacaaaagtttaaaaatataaaataaaagtgcagctttcaagcaccaaggtaattt

SEQ ID NO: 289480 - DNA, 338 bp, Homo sapiens
taagtgtcatgtgtcctctggaattttctgaagctttccagcttttttattacccccctaaccagctcatctgatytccagggatctctactaagatgttggcagcccgggccagctggtctgcccatggatgtgacttccaggggctgggttatgcttcatggcacctgcttctagcttcactgttgggccagatttcatccccaccccagctctgcagcgcagctgcttcttgattcctccatggaccctgcgtgaaattaccccatgtttccctttgtgcaccactgaggaaggaagcatgaaggacacacaggtcaggacattcaattgcccac

SEQ ID NO: 289481 - DNA, 548 bp, Homo sapiens
cacacaaacacaatggaatactattcactatataaagkaattaaatcctgttattcgtggccacgtggatcagtctgagggatgttttgttaagttcagacacagaaagataaatactgcacattcttactcatgtgtgggagctaaaggaaaattgagggatgggcaatatggctgatgcctgtaatttcctagcactttgtaagaccaaggcaggagaatcatttgaggccaaaagttccagagcaccctgggcaacatagggaaatatctctacaaagtaaaaaatcagacaggtgcaatggggcatgtccataatcccagctgctcaggaggctgaggtgtgaggatcacgtgagcccaagagtttgaggctgcagtgaactatgataaaaccactgtctccagtctgggtgactacagttgcccagagcccagactacactagcaagaccctgtctcttaacaacaaaaaaaaactcatagaactaggggaggggaggctggttaatggatacagaattacagttagataagaggaatgagtt

SEQ ID NO: 289482 - DNA, 548 bp, Homo sapiens
cacacaaacacaatggaatactattcactatataaaggaattaaatcctgttattcgtggccacgtggatcagtctgagggatgttttgttaagttcagacacagaaagataaatactgcacattcttactcatgtgtgggagctaaaggaaaattgagggatgggcaatatggctgatgcctgtaatttcctagcactttgtaagaccaaggcaggagaatcatttgaggccaaaagttccagagcaccctgggcaacatagggaaatatctctacaaagtaaaaaatcagacaggtgcaatggggcatgtccataatcccagctgctcaggaggctgaggtgtgaggatcacgtgagcccaagagtttgaggctgcagtgaactatgataaaaccactgtctccagtctgggtgactacagttgcccagagcccagactacactagcaagaccctgtctcttaacaacaaaaaaaarctcatagaactaggggaggggaggctggttaatggatacagaattacagttagataagaggaatgagtt

SEQ ID NO: 289483 - DNA, 650 bp, Homo sapiens
acaggcttttagaaagagcttcagaaggcggccagtttttcttcagcctcagccaggccttggagcttgactaggccatccacttaagcagagatgccttcaagaacatcagtgagctctttgccaatcagtccaggaaggacctggacccaggcatggacctgttagtgctgtctcagggacaccagaccaacatcctggacatcatcctcgtacacaaggaagctcttaccaaagtcacggacaacaggcaacatgtggcagaagggaagacagaggtacagaggctgatggtgtcattatcacaggaacaggatttctttggccactttggctgaaattcaccacttccatccaattcactcaagtgagagacttgaaatcacagatggagcatttcttgcaacaagagatactattttttcaaaaagtcacctaaaatttgatagtgttgaataactagttattcgattgtgaactttttccagttcacaggtactttctacagcagaatgataacagtatcaaagagctagtgccagctatcggtrgtagtacaaggatgattttgtgctcaagtgaaacccagctgaatatagaattgtgtaggatagtgttaatatggtgatagaatagaaacagcagcaaat

SEQ ID NO: 289484 - DNA, 475 bp, Homo sapiens
cagtgggggctgctgagcactactgggaaatgtcaggggaaatgcatgttatcaaggagcctgtggacagttggggtggcccagtggtgttcaatggcccagtcaaaagtggacaaagcaggtgtctggatggacctgggagatcttgctcagagattctgatgggacaaaggtaaaggaagggccagagtggtcagagagagggtcacagtctatggtctgcacaggatggaggaggccagggaacaggcagggtgggcagctgggtttcagggagaggcaggtgcatgctgggaggtcagaccctgtgagggctgtgggggcatcaggtggggtgggctccaggtgcacsctcagtgcactgggcaggtcttggcccaggctctctggaccccggctgggtgatgtggtcacttactgggggactgttgtcaggcgctggccacccaccctgggtagcactgtcccacctcac

SEQ ID NO: 289485 - DNA, 564 bp, Homo sapiens
caataaaagaaaaataccctgtccaaaggtcagcaacctcaaagatggaaggtggataagcccataaagatgagaaagaatctgtgtgagaacactgaaaactcaaaaagtmgcatgccttccttcctccaaatgactgcatcaactctccagcaagtgttctgaactgggctgaggctgagatgtctggaatgatacaagcagtgttcaggatatgcgtaggaacaaagttcactgagtgaaagaagtatgttgtcatgcaatacaagcgagctaaaaatcattttaaaacattgcaggagctaacagacaaaatagcaagtataaagaagacgtaaccgacctaatagagctgaaaagcacactataagaattttcataatggagtcacatggtgattatgtgtgattgcattatgaaaattattgtagtgtgtgtgggcacccgagattgccctgtaagcaggtgtggccaggctggggtcctgggagaggcaagcagactaaggagggctgaggtcagaccagctccatctcatgtgcaagaccacccagcagaatagac

SEQ ID NO: 289486 - DNA, 564 bp, Homo sapiens
caataaaagaaaaataccctgtccaaaggtcagcaacctcaaagatggaaggtggataagcccataaagatgagaaagaatctgtgtgagaacactgaaaactcaaaaagtagcatgccttcyttcctccaaatgactgcatcaactctccagcaagtgttctgaactgggctgaggctgagatgtctggaatgatacaagcagtgttcaggatatgcgtaggaacaaagttcactgagtgaaagaagtatgttgtcatgcaatacaagcgagctaaaaatcattttaaaacattgcaggagctaacagacaaaatagcaagtataaagaagacgtaaccgacctaatagagctgaaaagcacactataagaattttcataatggagtcacatggtgattatgtgtgattgcattatgaaaattattgtagtgtgtgtgggcacccgagattgccctgtaagcaggtgtggccaggctggggtcctgggagaggcaagcagactaaggagggctgaggtcagaccagctccatctcatgtgcaagaccacccagcagaatagac

SEQ ID NO: 289487 - DNA, 564 bp, Homo sapiens
caataaaagaaaaataccctgtccaaaggtcagcaacctcaaagatggaaggtggataagcccataaagatgagaaagaatctgtgtgagaacactgaaaactcaaaaagtagcatgccttccttcctccaaatgactgcatcaactctccagcaagtgttctgaactgggctgaggctgagatgtctggaatgatacaagcagtgttcaggatatgcgtaggaacaaagttcactgagtgaaagaagtatgttgtcatgcaatacaagygagctaaaaatcattttaaaacattgcaggagctaacagacaaaatagcaagtataaagaagacgtaaccgacctaatagagctgaaaagcacactataagaattttcataatggagtcacatggtgattatgtgtgattgcattatgaaaattattgtagtgtgtgtgggcacccgagattgccctgtaagcaggtgtggccaggctggggtcctgggagaggcaagcagactaaggagggctgaggtcagaccagctccatctcatgtgcaagaccacccagcagaatagac

SEQ ID NO: 289488 - DNA, 604 bp, Homo sapiens
attcaaatttaggaaatccagaggaccgcagtaagatatgccatgaraagatcatccccaaaacatataatcatcagattctccaaggtcaaaatgagagaaacaatgttaaaggcagctagagagttaaaatggttaaaatgagagctagagagttaaatggttaaaaaaaaaagacaagaaatttcaacccagaacttcatgtccagcaaaattaagcatcataagtgaaggagaaacaagatcctttccagacaagcaaatgctgagagaattcattatcaccagatctaccttacaagagctcctgaatgaagcactaaatatggaaagaaaagaccatcaccagccactacaaaaatgcaccgaagtacacagaacagtgatgctaaaaaccaaccacatacacaagtctgcaaaataaccagctgacagcatgacgacaagatccaatccacacataccattactaaccttaaatggaaatgggctaaatgctccgattgaaagacacaggggggcaagctggataaagaaccaagaccaatttgagtatgccatctccaagaaacccatctcacatgcagtgccatacataggctca

SEQ ID NO: 289489 - DNA, 617 bp, Homo sapiens
agcagggacaacaggcacatatcaccatacctgtctaattttttgtagagtcaaggttacctatggttcccaggctggtcttaaactcttgtccttgagcaattctcccattttggccttccaaagtgctgggattacagatgtgagctattatgccaagcctactttctgagtcttaaaagatgaaaataaatttttcagaatagcaggggaaaacatttgtgatgtaaaaaatggggtgcacactaattgagatataaacaatgataattttgcaaattattagtaactgccaactcaattagtatcttgttaaaaagatactgttatgaggtatagtaaagtgttacattgtgtattttgactgtatttcaaaattctgttttgtttccaacagttttgttcacttacgttgggtggaacaatttgtgagtgaccctgagattttgtatggyttgaatctggtgatatctagtgtctccccaagtgatttgttgaagttttggataattagaagtatttcttacagaagtaaatatttcagtaaacattaagcttcatttaaactctcaaaatataaagaaatgttattctttatttatttttataaagattat

SEQ ID NO: 289490 - DNA, 600 bp, Homo sapiens
tgtacaccccctttgtgatattgttcctaatatccataggcggagagggtgatactactcccaatagtgcagaaaaggtacagcccctctgtgatatcattcccaatatccagaggggacaggatgatattactcccaataccacagagggcatacaccccctccccatgatattgttcgtaatacccagggggtagaggatgatattactcccaatatcgcagtgggtgtacacccaccctgtgatattgttcttaatatccatgtggaaagggtataaagttactcccaatatcacagggggtgtacaacccccttgtgatattgttcctaatattcggggaagagacaatgatatagctgtccatattgcaggtggtgtacaaycccctgggaatttgttcctaatattcagtggggaagatgatattaattaaaatgtcacagggggtatataacccctttgtgatattattcctaatatccagggaaataaagaatattattcccaatatcacaggggatgtatacccctctctgatactgtttctaatatccctggggggagtctataatattactggcaatatcataaggagt

SEQ ID NO: 289491 - DNA, 600 bp, Homo sapiens
tgtacaccccctttgtgatattgttcctaatatccataggcggagagggtgatactactcccaatagtgcagaaaaggtacagcccctctgtgatatcattcccaatatccagaggggacaggatgatattactcccaataccacagagggcatacaccccctccccatgatattgttcgtaatacccagggggtagaggatgatattactcccaatatcgcagtgggtgtacacccaccctgtgatattgttcttaatatccatgtggaaagggtataaagttactcccaatatcacagggggtgtacaacccccttgtgatattgttcctaatattcggggaagagacaatgatatagctgtccatattgcaggtggtgtacaaccccctgsgaatttgttcctaatattcagtggggaagatgatattaattaaaatgtcacagggggtatataacccctttgtgatattattcctaatatccagggaaataaagaatattattcccaatatcacaggggatgtatacccctctctgatactgtttctaatatccctggggggagtctataatattactggcaatatcataaggagt

SEQ ID NO: 289492 - DNA, 184 bp, Homo sapiens
tagcaggggttgtacaccgcctttgtgatattgttctamatatccatggggaaagaaaatgatagtactccccaatatcgcaggtggtgtacaaccccttgtgatactgtttctaatatccatattgggggaggatattactcccaatattgcacgtgttgcacagaccccctttgatattgtt

SEQ ID NO: 289493 - DNA, 184 bp, Homo sapiens
tagcaggggttgtacaccgcctttgtgatattgttctaaatatccatggggaaagaaaatgatagtactccccaatatcrcaggtggtgtacaaccccttgtgatactgtttctaatatccatattgggggaggatattactcccaatattgcacgtgttgcacagaccccctttgatattgtt

SEQ ID NO: 289494 - DNA, 184 bp, Homo sapiens
tagcaggggttgtacaccgcctttgtgatattgttctaaatatccatggggaaagaaaatgatagtactccccaatatcgcaggtggtgtacaaccccttgtgatactgtttctaatatccatrttgggggaggatattactcccaatattgcacgtgttgcacagaccccctttgatattgtt

SEQ ID NO: 289495 - DNA, 459 bp, Homo sapiens
agcaacagctcacagaatcccatgccagttggcataggctacataaagacactaaaggaagctataaacatccatgtatttattcttaaaaacatgataatcacagtattacctgttccacaaaggaaaacacttagaatgttcaagactttttcttgctcctggatcactagagacccaagtcactggacatgaaatctgtaaagtcagattaaacatccttctttctaaataggctstgatggaagaagtagttagtagcaaaacaatagtggatacattgcagggaaccattatggttcatttccctccaaaacagattatgaggaaagatattccagtggatcaagacagcattgctgtttccagtgttgtttgtcctattagcttctttactttctcattgtaggtacctctggtgaattcccagggacaacatttacatctggaggttcccac

SEQ ID NO: 289496 - DNA, 459 bp, Homo sapiens
agcaacagctcacagaatcccatgccagttggcataggctacataaagacactaaaggaagctataaacatccatgtatttattcttaaaaacatgataatcacagtattacctgttccacaaaggaaaacacttagaatgttcaagactttttcttgctcctggatcactagagacccaagtcactggacatgaaatctgtaaagtcagattaaacatccttctttctaaataggctctgatggaagaagtagttagtagcaaaacaatagtggatacattgcagggaaccattatggttcatttccctccaaaacagattatgaggaaagatattccagtggatcaagacagcattgctgtttccagtgttgtttgtcctattagctkctttactttctcattgtaggtacctctggtgaattcccagggacaacatttacatctggaggttcccac

SEQ ID NO: 289497 - DNA, 1173 bp, Homo sapiens
cctggatcactagagagccaagtcactggatgtgaaacctaaaaagtgagattaaacttccctctttttaaatagaccgtgatagaaaaaatagccagcagcaaaacaatagtgtatacattgtagggaaaaccattcacgattcatttccttcagaaacagagattatgaggaaaggtcttccagtgtatcaaggcagtattgctgtttccagtgttgtttgtcctattagctgctttactttctcattgtaggtacttctggtgaattccctgggacaagaattacatctggaggttcctacacaggtagttgaatgggaaggaaatcctcattttgaatgcatgatgactttgtagagctgcaatcataaaatagcaacttaatgctttttgccagtgtctcccagacctcttgatcctattctttcttttctcagcggccgcaactttaacaggaggcaagggcagtactggaactgaatccagagcaggtgaggatgagcagcccataattcaygtgttactgtgaagcttgactctcattaggatgacttgtttggaagtggwattgtgtctttcttcttttcctcattctcagaggccagaagttcctaggaggaagcagaatctctgtaggtggaatagctccagctcagcctgctaagccattattgcgctttttgatcatctttcattaagcagtgttgcctgaaatgcagccacactgctttattccataaactaaacctttaaaaaaatgcaaagcagttactagataacaaatgacaagcttgaggagcctaagacttccttctaccttaaggagctcattcagtgcactaagaagtcaagtcactggccactggwtatatgtgtactgagaaaactttcatttccaagcaccgaatctcaaagacactaaagcgcctagaatgttgttaggaaatttgctataagaaagagatgctacattggaaacacagattaattcttgccattcgaaagctcaaagaaagagcatcctaatatattgtaagaaatacaaatttttgaaaaagcaattccctagtcatggcatgttgaccaccatttctttatttcaggaacttctggtggaatttctgggaaaaccctcaaacctggaagttatgtctcaggtaagtcaccacat

SEQ ID NO: 289498 - DNA, 496 bp, Homo sapiens
gttgctttggtaatcaaacggttaatgagaaaatacatagggctcatcatcagggaagagctagggaaaatgctagttagatataagttagatttagattctttctagaggcaggtccataggaaagaaagattaatcaccatggtgatcccagtcctcttggtgtttcagctacgactgkggtggctcctggcacaacccttgcccctggcagttccagtacaggtgagtctgcaggttggtagggaagtcttcagagctcctcccataatttgatatcttctctggtgcttgtctttttaagagtaatatcttattcatttcatagtgattgaatatttttcaaatatgtcttttctgtttttctgtctctcagaggccacaacttccataggaggaagtgcatcaacaagaggaggaatagccacaggtgagcattgctgggtcattgcactcatttgccaataatatccaataaagactgtggtgcgaaatg

SEQ ID NO: 289499 - DNA, 374 bp, Homo sapiens
cacacagggaatgcaacaccatggctgctcgggcgacaggctcctagggttacataaccctgtaattcccatactgtagatgtcatccttgctttcttttctctcagaggccacaagttccaccagaggggtcaggaccaccagatcagaagctccaggaggtaagcttcatcagtcscaggcttcagagttctcatcgtcgttttgtgctcaggataacacataaatgagaaacggggccaaggaaagggggttacttcttgtctggaaggacaacatgtattctggccaatctgagtagttctgctaaggagtttcagacacagggttatctaagttaggtgttgccccatggcccgtgtgacagtgttagt

SEQ ID NO: 289500 - DNA, 610 bp, Homo sapiens
acctcataattgttcttcctaattctatgatgcaccccctgccatatattttctacagagtgtaaagagggattttaaatgtatatcaattctatgctatttctcccctctttaaaattatagccccttgcatttagaaaaaccttcagtcttcctcccctgattcataacatttcgcttgctcctacatatctgaccttaccttataatattccccgcctcagctcccattatccagatatactcaacttctagctctgcttttctagcaagcatagctccatcagacttacgacctttgtactggctgttacctctgcctggaatgccattctcctagagcttcactagcaggttgcttcttgttatcagacttcagaataaagaccatcttctcacagaagsctttgctaaccagacagtctaaaatagaacatcccattttgtagtatcaattcactttatattaatgctctgaagcttttcttgtttgtgaatttggttattggttggctagttattttatttatgtctacctctctcttcccactagaatgccccacggagcagagaactgtttatctgcatcccctttgaacagctacttaat

SEQ ID NO: 289501 - DNA, 643 bp, Homo sapiens
cctactgtggattcagttccaatactgcccctgcttcctgttagagctgtggcctctgtgggaaaaagaaaatcaaggggtgtaaggaattgaagatacaaggaaaaagctattttatgactgcagctctaaaaagttaccgtacattcaacatgaggatttccttcttattgaactacctgtgtgggaatctccagatgtaatggttgttcctgggaattcaccagaagtacctaaaatgagaagagtaaaggtgctaatagagcaaagaatggtaaaagaagtgatatgatcctgaaccactagaggcctttcctaagaacgtatgtttcrgaaggaaatgaaccatgaatgactacccctttgtttctttgcccctcaactgaacattgttgcttctggggttcccctttccatagatcccagtgaatgcgaaaggagaccttatctccccctcacctgttgaacttccaaaagctgggccccctgatgtgacaatgatgtgttaagaagaaaaaagcagactaccttctatttttataaatatttctcaccaattacttgaggtattttgatattcacatgtttaaaaaataactctctaactctaatattcccatgtgatgactttactcaatctatt

SEQ ID NO: 289502 - DNA, 588 bp, Homo sapiens
  misc_feature (1)...(588): n = A,T,C or G
tctaatggtaaaatgaagtgatacctgtaagttgctgacaacttctttgacacacaatagacattagataaatkatttttatgaaaataaacaaacagaaagaagttacgctagagctggcacagtgaagatcactgtggtcccaggtactcaggaagattacttgacccaggagtttgtgatcagcctgtgttacanagtgagactctntntttaaaaagaagttacaatgtagcataaaagacaggatgaataatatgggtggtatggagatgaagaggataaagctgtactagagaaataagcctcatgagtcttaagggttacccagggacccaaaccagctattaatataattctgcctttactatgtgtttgtgacaggggcaacaggatcatcgaccggacagacagacacaagtggaccatcagctaaagtaacagggaattatggacaatcatctgaaataccagggacaattaaatcatcatctgatgtttcagggacaatggggcaatcagatacaacatctggaccatcagttgcagtgacaaagacttctgaacaatcgtcaggagtcacggtgg

SEQ ID NO: 289503 - DNA, 521 bp, Homo sapiens
tcagtaaagctgatgggagagaaactagaggcagtggatctgctgggggtgaaaccatagtctttggacctgatgcaggtagctcaggtattccaactaagactcaatcctcaaaattttagattgattcagttaattaattggttaagatgcttttattttaatgtcacttaacaacaagattaattaattaatgttaactttaatcacattttgattttccattagttggaactggttcttctggtttgaaacttggagcagggaaaggtgatgctgcatttggttttgaagtttctgattcgaattcatttggtgacactggcattagtagcaaaacagttgaaggaaatcaaacgagtagttctggaggatctgtttccattgatctaggtattaatatctgacttttgtgcataaaaacgtctgagtcataaaatattttcaatgcacagtgacaattrttttatattctgcaggtgataccagtttcagaagtgagaatcaatttgttggtggtg

SEQ ID NO: 289504 - DNA, 413 bp, Homo sapiens
actgggaaccctggcctctttctaccttaaactttctaagatcctttgacttccttccccatggagctctcttagcatttccctccctgtcttatcctctttatctgacaactgcctcttcattctttgggacaccaggtggaaggtcactgtcctggcaccctcaccttattcttagcacttaacattaattgtaatactattgagrtacttctctcttactggctaaatcccccactagacaggatgccctgagagtagtggccctgtcagactcattcacttctgtgcccacacacttatcacagtgtctgacacacagatggcaataaaaataattaaaatttaattaaatagtaaaacatgagacactgctgttataatagaaaatgtccaaatacttcgggtatagt

SEQ ID NO: 289505 - DNA, 601 bp, Homo sapiens
tttaagtcccctaaatcttttctatttatgttcttcctctcttcgcagccacaacttcttctggagcaagtggaataactagggctggccccamctcaggtaagcactgacgaatcactacctgcctcccagtagacaacgttgcctgaatcacatctactgcttgtactgtctgtgaagagcatttttctgaagaaagattatcacataggcaagattttatctaataactgaaggccagacactcaaactttttaactttcctttcctctgcttcaaggaaacttcatcatggagccaaggcactgagaatcagttaggagattgaagataaatgtttttcttcctctcattgatatttaagtgaagtgattgagttattgacattttattcattaaatattccatgagatacaaatgatgtgtagaaaatatatatagattaactcttgtttctagaaacctctgaacagagcttgttgacacattgaggaaacacatagttttcttatccccatcctaggccattctctttctcattatgggtgaagaattgagatattgattcttatttctaattccacaatgtaattactacaca

SEQ ID NO: 289506 - DNA, 953 bp, Homo sapiens
agaaatctgggaagtatactgaagcctccctgctgccccctgcgtagaatctcccgctattactggcccacaaaacaayaataataataataataataataataaagaaattccagtatcgatacacagctattcctttatatacattttcaaaaactttgcatcaatagcaagcaaattctaaaggtctagccatgaagcaaaagaatacaaaaacataacattaacgtaaaataactaaggaaacaaccgcagctacaaagatacatcaaaattacagattaaaaattaagactggaaatagataaacagcaggawctttatacccacgtagaccagttgttagatgggggatgcctgaagaaggcagagtgagcttgggcatggtcacattttcagcagaggtatttctaggagagggctgtaaggtaagttgacaaccttcccagtggctggggaaaatgagttccttcaggtgtgggtggcactgaacagtatttatgaaagaaaactcaataaataaattaataaatgcatgtgtaaataattgccttggtgaaggcatttattgattctagtgaaattgagatgaggtttcaaaggacttaaggtatatgtggaatagaagacataaaacgtggagatactaattacagattgactcttcagtaaaagctgaaacccaaaataactacagtcgtgtgctgcataacgtgttggtcaatgatggactgcatatacaatggtggtaccataagattataatgaagwtgaaaaattcctgccccctagtgacatagcattgtagcacaacgtgtaactcacttgcctgtggtgatgctggcataaacaaacctactgtactgccagtcgtattaaagtttagcacctacaattatgtgcattacctaagacttgataataaacgtgatattactggtttatatatttac

SEQ ID NO: 289507 - DNA, 602 bp, Homo sapiens
ccacattcagtgttgaaggcaaataaggattgtgatggggtaatagtgccttatcagattaacatgtatactcttcctgagcaagaaactatgagtataaatattctggaagagatttccaagttgtttcaggtcacagtgattgaataaaagcgagtttcttaaactgtttgttttctctgaaagtctcaggcacacctgtggtatcacctggagcaactcctggagctccaggtagcagcacccctggggaagcagacattggaaacaccagttttggaaaatcaggcaagtctggacatgactccttaacagttctcaaccctgccttcctcagaagtgtgtgatgtggactattggtcaggctataactgacattaaaagtgtcagarcaaagggaaagcataggggagatgcccttaatccactatactttagaaatctcagttctgtgctatcagcacagaatagggaccagtacatttgcagcagtgagcctgaaccattgttgttgataaccagggaccccaacagtatctgctgcctcaactaccagtagccctgtgagtaaacacaccgatgcagcctcagccacagcagtg

SEQ ID NO: 289508 - DNA, 545 bp, Homo sapiens
gtatttttccctttccactatgattgtaagtttcctgaggccyccccagctaagtcaattatatctcttttctttataaattacccagttttggacagttctttatagcagcacgctaatacgcaactaatacacaaacaatccagttacacccttttagttattttaaaatatacagttattatttactataatcaccctgttgtgctatcaaataataggtcttattcattcttctaattttttgtactcattaaccatccccacttacccttctagcacctactaccctttgtagcctccagcaaccattcttctgctctctatgagttcaattgttttgaatttagagcccagaaataagtgagaacatgtgatgtttgtctttctgtgcctggcttctttcccttaatataatgacctccagttaatccatattgttccaaataaccgggtatcattatttttgtggtagaatagtactccattgtgaatatgtaccacattttcgttatccattcatctgttgattgacacctgggtca

SEQ ID NO: 289509 - DNA, 545 bp, Homo sapiens
gtatttttccctttccactatgattgtaagtttcctgaggcctccccagctaagtcaattatatctcttttctttataaattacccagttttggacagttctttatagcagcacgctaatacgcaactaatacacaaacaatccagttacacccttttagttattttaaaatatacagttattatttactataatcaccctgttgtgctatcaaataataggtcttattcattcttctaattttttgtactcattaaccatccccacttacccttctagcacctactaccctttgtagcctccagcaaccattcttctgctctctatgagttcaattgttttgaatttagagcccasaaataagtgagaacatgtgatgtttgtctttctgtgcctggcttctttcccttaatataatgacctccagttaatccatattgttccaaataaccgggtatcattatttttgtggtagaatagtactccattgtgaatatgtaccacattttcgttatccattcatctgttgattgacacctgggtca

SEQ ID NO: 289510 - DNA, 575 bp, Homo sapiens
atctgcagcctctgctggtgatacccaggcaaacaggatctggagtggtcctttagcaaattccagcagacctgcagcagaggggcctgactattagaaggaaaactaacaaacagaaaggaatagtgtcaacatcaccaacatcaaagaccaaagttagaaaaatccatgaagatggtgagaaaccagcacaaaaaagctgaraattccaaaatacagaacgtctcttcttgtgcaaaggatcacaactcctcactagcaaaggaacaaaactggatggagaatgagcttgacgaattaacagaagtcggcttcagaaggtgcataacaacaaacttctccaagctaaaggagcaagttctaacccaatgcaaggaagctaagaacgtggaaaaaattttagatgaattgctaactagaataaccagcttagagaagaacatcagtgacctgatggagctaaaaacacagcatgagaacttcgtgaagcatacacaagtatcaatagctgaatcgatcgagcagaagaaaggatatcagggattgaagatcaactcaatgaaataaagacagaa

SEQ ID NO: 289511 - DNA, 575 bp, Homo sapiens
atctgcagcctctgctggtgatacccaggcaaacaggatctggagtggtcctttagcaaattccagcagacctgcagcagaggggcctgactattagaaggaaaactaacaaacagaaaggaatagtgtcaacatcaccaacatcaaagaccaaagttagaaaaatccatgaagatggtgagaaaccagcacaaaaaagctgagaattccaaaatacagaacgtctcttcttgtgcaaaggatcacaactcctcactagcaaaggaacaaaactggatggagaatgagcttgacgaattaacagaagtcggcttcagaaggtgcataacaacaaacttctccaagctaaaggarcaagttctaacccaatgcaaggaagctaagaacgtggaaaaaattttagatgaattgctaactagaataaccagcttagagaagaacatcagtgacctgatggagctaaaaacacagcatgagaacttcgtgaagcatacacaagtatcaatagctgaatcgatcgagcagaagaaaggatatcagggattgaagatcaactcaatgaaataaagacagaa

SEQ ID NO: 289512 - DNA, 455 bp, Homo sapiens
tatgtatagttactttattttcctgtgcaatttataaacatgatttgtagtaaatgccaaggagacatagagatgaagaaacttgcccaaagttaaaacagctaaatggtgagagccgggaatgagtctaagcacagcctgcacgctcagccattcactcgatcacctcccagtagtcatggtttcatcaggagaaagaataaaatattaggaaatggaaaaaaagggaaatggaattacagaaaatgtaaagtagatgaggaagatgaggactgtcattgcyacaaagatttaaccctctaatgttaaatttgatgatgaaagaaaagccgatcgagtaacaaataccatattctctaccataaaatgcagctataatcaaggaagctacttaaaggtcaaaacttatgccttataacagctatttttcttaatacaatgtgagagataaaaat

SEQ ID NO: 289513 - DNA, 455 bp, Homo sapiens
tatgtatagttactttattttcctgtgcaatttataaacatgatttgtagtaaatgccaaggagacatagagatgaagaaacttgcccaaagttaaaacagctaaatggtgagagccgggaatgagtctaagcacagcctgcacgctcagccattcactcgatcacctcccagtagtcatggtttcatcaggagaaagaataaaatattaggaaatggaaaaaaagggaaatggaattacagaaaatgtaaagtagatgaggaagatgaggactgtcattgctacaaagatttaaccctctaatgttaaatttgatgatgaaagaaaagccgatsgagtaacaaataccatattctctaccataaaatgcagctataatcaaggaagctacttaaaggtcaaaacttatgccttataacagctatttttcttaatacaatgtgagagataaaaat

SEQ ID NO: 289514 - DNA, 455 bp, Homo sapiens
tatgtatagttactttattttcctgtgcaatttataaacatgatttgtagtaaatgccaaggagacatagagatgaagaaacttgcccaaagttaaaacagctaaatggtgagagccgggaatgagtctaagcacagcctgcacgctcagccattcactcgatcacctcccagtagtcatggtttcatcaggagaaagaataaaatattaggaaatggaaaaaaagggaaatggaattacagaaaatgtaaagtagatgaggaagatgaggactgtcattgctacaaagatttaaccctctaatgttaaatttgatgatgaaagaaaagccgatcgagtaacaaataccatattctctaycataaaatgcagctataatcaaggaagctacttaaaggtcaaaacttatgccttataacagctatttttcttaatacaatgtgagagataaaaat

SEQ ID NO: 289515 - DNA, 508 bp, Homo sapiens
tttctaatcttccttgctagcatactataattacctccctgacaacaatctcaaaaataaaaacaaccagaaagatttgctggcctctaatgcattattttgattatacctcttttttattcaaaaaccttgaatggctgactatgcatagtactatgtatgttaagattaacctcaaaaaagttaattatatccaatgatgaataaaggtttgataagtaacttaatcaacaaagaatcataacctgtagttatagaattgggccctggaagaacagcaaatgactcaaggtttaaataagcatctattttaaagaaaaaaatagatttcaggtaacagtcatttacctgtaatcacattaagtacaaagaattgtaaaaatttcccttctgctagtaattagtatatttcatttgattaattcaggaaaacctgccagacaatcctcattgtccaaaaaaaaaaaaaaaaaaaargaggcagaatgaagtgttaagatgtgtgtct

SEQ ID NO: 289516 - DNA, 567 bp, Homo sapiens
agacagacaagtaggaagctgcagagatatttctgggaacccacaattttacaccctcagtgtaaaggggaattagatataatcctagacccccaactatccacatttaaggttttagaaaaattccccaagtaagactttaaagctgagcttgaggtgatctgtcctggaaatttgtagccataggtatgagttccctcagtttgccaccagtattgttagaaaagaacttagagttaataattttattgaaagtggtcatgaattgaamgtaccttaggcgcctaccaggaataattgtaaatcattactggagaaaaaactttcatgtaagttatcaatatttaacagaaaaaaaattcaagtaattgcagcacttaattgaaaatcaaaacacacaaggaaacgacaccatgagagacaaagatgtcaggcccgcaaaagactcgaagtgttggaatcatcagacttaaaatacaatgtaattgtgttttatacttttaaagatatagtagaatagaaatggaacgaagagcaagaatttttctaacttccaagtatatttaa

SEQ ID NO: 289517 - DNA, 624 bp, Homo sapiens
tctcctcaagttctgtgatcttatctaactctctcagagtaataaaaatgtgaatgatactttccgagaaacttggaggcatccatatctatgatgcttgaatcaccaaggctttcagaaaacagcacacaaattctcgaccttggccacatagcttacaaacttcacacacctggcctcatcccttataatttaakgcacaattaagtcgaacctagtgaaaatctaaattatgcatttgaatactgatatagctgtttgaaagtacactcaaatcagttatatttctacctgacagtctaacttgataccaatatttccacacccatcctatttctttttccctgtttgtcaatataagaattttaaaactatcagaaaaagactgtatatttctgaactctgcatttctatctcaagggcttgaaatgtctttctgaagatcttacatcattatcttattagatgtcatttaagtaaatgggtggaccactaacatgttttgcaacatttccacgtgcaaaatatttaagatgtccaaagaagacattatcaagcactaaacttcaaatgcaaatttctccttgtagtttcttccacataaagcaatctttttcaataata

SEQ ID NO: 289518 - DNA, 624 bp, Homo sapiens
tctcctcaagttctgtgatcttatctaactctctcagagtaataaaaatgtgaatgatactttccgagaaacttggaggcatccatatctatgatgcttgaatcaccaaggctttcagaaaacagcacacaaattctcgaccttggccacatagcttacaaacttcacacacctggcctcatcccttataatttaatgcacarttaagtcgaacctagtgaaaatctaaattatgcatttgaatactgatatagctgtttgaaagtacactcaaatcagttatatttctacctgacagtctaacttgataccaatatttccacacccatcctatttctttttccctgtttgtcaatataagaattttaaaactatcagaaaaagactgtatatttctgaactctgcatttctatctcaagggcttgaaatgtctttctgaagatcttacatcattatcttattagatgtcatttaagtaaatgggtggaccactaacatgttttgcaacatttccacgtgcaaaatatttaagatgtccaaagaagacattatcaagcactaaacttcaaatgcaaatttctccttgtagtttcttccacataaagcaatctttttcaataata

SEQ ID NO: 289519 - DNA, 586 bp, Homo sapiens
cactaaaaacaaaaatggtaactacaaccagcagcaaaaatatcaaacactgtgtggggagaggatctgatttaaagaattgccccattgtattatttaaaatgttctcttttcaacataacattataagacatacaaagaaacaaaaaaaatatggcctatacacagaaaagaagacaatcaaaagaagctgtccctgaggaagcccaatccttagaatttactgatgaagtttaagtcagctattttaaatatgttcaaaagactaaatgaaactatatctaaaaatcaaaaattaaggataatgaggccagatgtggtagcctaacatctgtaatttcagcaatttgggaggctaagctgggaggaaacctgagtccaggactcycagtcaagtctgggcaacatagcaagactcatagtaataaacctcgctaaaatttaaaaaaaaaatgttaacacaaaaatttttttaaatttatctaggtgtattactccattttttgttgctataaagaaatgcctgaggctgggtaattataaagaaaagaggggtttattttagctcatggttctgcagactata

SEQ ID NO: 289520 - DNA, 1183 bp, Homo sapiens
gtgtaaagaacaatattcctactttgggaactgtattataaagataataaagaacataccattatgaatgatacttaaaggtgttctaactgaaggctaaaaatagatacctagaggtttctcaacaaaatacgaagaaaaattgggtacttgggattggcagaaacactgagaaaaccagcttcggcaaaaatataaactatactgaaaagacaataatgagctcatgaaaacagaaaaaaaggatgcagctgggactcaaaacaaactgatgctagactcaaacacctggattcaccccccttgctctgtctctctctgtgcatattctccattaacctctccacagcagaatgatgtgctccacttcccaaaggtcgtgatggaaaattgccactacaaactgcccccaagtgtatatrtgatatagtttggctgtgtccccacataaatctcatcttgaattgtagctcccataattcccacatgttgtgggatggacctggtgggaggtaattgaatgatggcagcagtttcccccatcttcccccattcactaccactcttggtagtgaataagtcatacaggacctgatggttttacaaggggttccccwtgggaggtaattgaatgatggcagcagtttcccccatcttcccccattcactaccactcttggtagtgaataagtcatacaggacctgatggttttacaaggggttccccctttcgcttggctctggttcttgttctttcttgtctgccactgtgtaagatgtgccttttgccttccaccatgattgtgaggcctcccagccatgtggaactawgtccattaaacctcattttctttgtaaattacccagtctcgggtatgtctttatcagcaatgtgaaaatggactaatacaatatgttctctgtttacaagagtagtcacactagggtgaaatctttgatcccagagctatagccacctggaccccaacgtagcagcttccttgaatcaatggggattgaggaagagctgtttccaagatggcaacacaaaaggtgagccatatgaaataggcatctacttactcttcaaagtttgaaaagagaaaatgttgtaaagcaactctggtaagaacatcaaattaaaacttggaaaaaaaattacttatctaaactacagtacaca

SEQ ID NO: 289521 - DNA, 548 bp, Homo sapiens
aatcaactaacatgcaagattgggaaatttttaaacttgcacttttttgtgtgtaaaatatgtataaatatgtatacataatgtatgtacagtgtctatttctaatctttgggcatcattagttaatttcagagtgaggaattttggagacasagtattgttatttcttgtctgtttattaggttatttttcttgagaaatactatacaggataaatctttcttcctagaaataaggaaaaaaacaacggactggattttcctagtttctacagatgcaagagccaaatgacttttgaggtaagatacaaacacttgtttttatttttttaaattgtattttaaattcagcggggtacatgtatttatttgttacatgggtattacgtacatcatgctggggattgggcttctagtatacccatcacccaaatattgattacaccccactattactggattgctatcaatctgttttcttaggtctaatagtatttgttttatggatctaggtgctctggtgtttggtgcatatatatttaggatagc

SEQ ID NO: 289522 - DNA, 461 bp, Homo sapiens
gcacattgctggtggctctaccattctggggtctggagggtggtggccccattcccacagttccattaggcagtgctctggtagggactctgggtgtgagctcccatcttggctcccctcagcactgccctagtagaagctccctttagggattctgcctgggcacctaggccctttgatacatcttctgaaatctatgtggaagctgccatgcctccttcactctcgtgttctgtgtgcctgcaggcttaccaccactkggaagccaccaagctatggcttgcattcctcaaagcggcagcccaagctatacccggagccatctgagccatgactggagcaagagcagttgggatggggaagcagtctcctaaggtgggtacagcagagtctaaaaccaggacttctaaaagcatttgttcctcctagaactctgagcctgtgatgggaggggtttcctc

SEQ ID NO: 289523 - DNA, 461 bp, Homo sapiens
gcacattgctggtggctctaccattctggggtctggagggtggtggccccattcccacagttccattaggcagtgctctggtagggactctgggtgtgagctcccatcttggctcccctcagcactgccctagtagaagctccctttagggattctgcctgggcacctaggccctttgatacatcttctgaaatctatgtggaagctgccatgcctccttcactctcgtgttctgtgtgcctgcaggcttaccaccacttggaagccaccaagctatggcttgcattcctcaaagcggcagcccaagctatacccggagccatctgagccatgactggagcaagagcarttgggatggggaagcagtctcctaaggtgggtacagcagagtctaaaaccaggacttctaaaagcatttgttcctcctagaactctgagcctgtgatgggaggggtttcctc

SEQ ID NO: 289524 - DNA, 461 bp, Homo sapiens
gcacattgctggtggctctaccattctggggtctggagggtggtggccccattcccacagttccattaggcagtgctctggtagggactctgggtgtgagctcccatcttggctcccctcagcactgccctagtagaagctccctttagggattctgcctgggcacctaggccctttgatacatcttctgaaatctatgtggaagctgccatgcctccttcactctcgtgttctgtgtgcctgcaggcttaccaccacttggaagccaccaagctatggcttgcattcctcaaagcggcagcccaagctatacccggagccatctgagccatgactggagcaagagcagttgggatggggaagcagtctcctaaggtgggtacagcagagtctaaaaccaggacttctaaaagcatttgttcctcctagaactytgagcctgtgatgggaggggtttcctc

SEQ ID NO: 289525 - DNA, 605 bp, Homo sapiens
gtgatatgctattcttatgtccaagggaaataaacaaaaacatatatatatatataaaattttctaaaatacatacatttgtaaaggtgaagaagtggttatattggcagtctctgtagaaagcaactgggtggttggcttttgtattttgagaaattttataataacacatgcattactgaatcaaaaactaaataatacataattttataaaagaacaagaggttttattttccatgtatacagtgttttggaaagtggctcctgacttgtggtcagtaccaaaatagattacttgaagaggggtrtaattaccaacttatatatttattgtatgcaggggaacaacttctgcctcagatgtgctgtcatccttggtgttgtcctatttcagccctgaagtggatccccagttgcataccaagcttctttttgtcaaaagagaagcaaatgtacacccttccaaaacttttggggggaaaatagggcagaaaaggagatcagaatttgctttttaatcaataacttgaggctctttattaacctagtttcacaaaagaatatttgtaagtattactaatatgagcacttccactgaaaataat

SEQ ID NO: 289526 - DNA, 436 bp, Homo sapiens
ttcaaaatagaacctttctaagtggtgcaggttgggaatagtgcctgcctcctgtttgaaagcttgtcgcttgatcttctcaactacacacattgaacagagtgtaataaatccatgtttatttgaaacatttttaataagactgttgcatcaccacacagcttcccctcatcatcactaccaccgccaccccacccaccccacacacrtaggcaaactttttttgttaattgtactttgctcttcaattcctagttcattactttgacttccgttttgttcttggcttgtttgtggtttgtttactgctttttgttttgggggaactatctgggctggttaaaaaaaatgtgttttagtgtcagacatgacaaaaacctgctgcaacatttatcagctgtgttattttcttattgctcctataagaaattaccac

SEQ ID NO: 289527 - DNA, 613 bp, Homo sapiens
aggatggtcatggacatatgtaatccgctgatatgtgtgctgagacctgaataaagctagaaagtaagttgcacagatctcaggaaattgttccaggaagatggctccagcaaaggcctgggcttgctctgttcaaggatgagcaaggaggccggttgctggagctgaagcagcatgcaaagagtaagaaaatgagatccgatgataacatgaagtcagattaggacctttcaagtgagttaaggatcttggattatattttgagggaaatagaaagcagttaaaccatttcaagctgaaaagtaatttgaccttttttttttttaatgaacttctttgatctttgggtagagaaaagaccatgggcatcaggagttgaagcaggaaacatgtggagtgctttagtctcagtccaggactggatgagcattgtggtgataaagaccataatatactctgaaagtaaagtcaacatgattgcttcctagatataacacatacaagraagagagaagtcaaagttggcttgatatttggccttagcaactgaattagtaaaattactatttgctgagatgcaaaagactagaaaggggcaggtttggggttggga

SEQ ID NO: 289528 - DNA, 587 bp, Homo sapiens
tcacaatttaaaggtgcgtatgactacttccagctaaagtaatcatgggccactctataaaagaagtaagattggaatgggaacttcaagaataattaatctttttaacatataattgaggaaccacattttagacaatcaaaatatgaaggtgtagtaagtattctaacatggctagtatacagggaataaatcaggaagtataatagtaggagataagactggccttgaatacctaggtaaacatatgaatgatatttaatgggtaatattaataagtattaatattatttagaagactcttttgtaagtaatagaaaatccaactaaatcttaaacaytgaggaatgtattagtacctggaggtccagctatcagatggactatggggatgacaactctgcgtgaggctccatcctggctccttgctatctcctagctctatcctcatactggatgttaaagagctgctgctgttgaagatttcacatccgcagagtccagcatgcagggcaaaggaaatggtctccctgtatgccactcttttttttttttttctcgagacggagtcttactctgtcacccaa

SEQ ID NO: 289529 - DNA, 515 bp, Homo sapiens
gcaaaagacttagacgattttcaraagaagagatacacacagccaacaagcatatgaaaaaaatgctcatcatcactaataattagagaaatgcaaatcaaaaccacattgagataccatcttacaccagtcagaatggctattactgaacagtaaaaaaaaataacatgctggcaggagaaaagggaacatatgttggtggtgggaatgtaaattacctcaaccactgtggaaagcagtttgaagatctctaaaagaacttaaaacagaactaccattcaatccagtaatcccattattgggtatatatctgagaaataaaaaacattctaccataaagacacatgcacacgtatgtttatcacagcactacttgcaatagcaaagacatggaatcaacctaaatttccagcaacagtagactggataaagaactatggtacacatacaccatggaatactatgcagccacataacaagaataagattgtgccctttgcagcagcatggatgga

SEQ ID NO: 289530 - DNA, 515 bp, Homo sapiens
gcaaaagacttagacgattttcagaagaagagatacacacagccaacaagcatatgaaaaaaatgctcatcatcactaataattagagaaatgcaaatcaaaaccacattgagataccatcttacaccagtcagaatggctattactgaacagtaaaaaaaaataacatgctggcrggagaaaagggaacatatgttggtggtgggaatgtaaattacctcaaccactgtggaaagcagtttgaagatctctaaaagaacttaaaacagaactaccattcaatccagtaatcccattattgggtatatatctgagaaataaaaaacattctaccataaagacacatgcacacgtatgtttatcacagcactacttgcaatagcaaagacatggaatcaacctaaatttccagcaacagtagactggataaagaactatggtacacatacaccatggaatactatgcagccacataacaagaataagattgtgccctttgcagcagcatggatgga

SEQ ID NO: 289531 - DNA, 613 bp, Homo sapiens
aagtaaaatggatgtgaagggccttagggrttgtttcatgtaaaattgcaatgcccctttttatatcacatctccgctcccaagagatttctgaaaggatttagtcaaacatgaaactttttgttctatttgtaagtaatgtatttttatttcagaatcaaatctaatatgctgctttctatttttggaccttaaaaatagcacaaaaagctcttagatcttcattggggttccacatacatgtgtctgcaattggattagataaattggagcttcatgaaaatgagatagagttaaagtatttcatgggtctgggttcttcataagaaataatataattttatcatggtgccctggtgctaggcaattctgaagccaactgtaggcttttatcaaaaattaaactttgacgtagagccaagattctggttttcagctaagatgctttatatctatggcagctttgcacttcatggactaattgccataatacatggttattgatgcagagtcctccatggttccttttgctctaacagacttgcatattaaaaatggaagctttaacatatttaatagcacaagtgactaagttgtcagaaattttcacact

SEQ ID NO: 289532 - DNA, 613 bp, Homo sapiens
aagtaaaatggatgtgaagggccttagggattgtttcatgtaaaattgcaatgcccctttttatatcacatctccgctcccaagagatttctgaaaggatttagtcaaacatgaaactttttgttctatttgtaagtaatgtatttttatttcagaatcaaatctaatatgctgctttctatttttggaccttaaaaatagcacaaaaagctcttagatcttcattggggttccacatacatgtgtctgcaattggattagataaattggagcttcatgaaaatgagatagagttaaagtatttcatgggtctgggttcttcataagaaataatataattttatcatggtgccctggtgctaggcaattctgaagccaactgtaggcttttatcaaaaattaaactttgacgtagagccaagattctggttttcagctaagatgctttatatctatggcagctttgcacttcatggactaattgccataayacatggttattgatgcagagtcctccatggttccttttgctctaacagacttgcatattaaaaatggaagctttaacatatttaatagcacaagtgactaagttgtcagaaattttcacact

SEQ ID NO: 289533 - DNA, 402 bp, Homo sapiens
tcggtagcggcaactgctttgctaacagaagaaagtagaaaaataacctttagaggtaacctcattgtgagcacacctcaccagttcagagctatcctaagtgaaaaaagcaaaaaggtagcttataaattcaatcttaaagtatggggctattctgttagaaaaaggtgatttaacattaaccactgaaaattcccttaacccagcaggcttcctaatgagggatttaaatcttaattaccatacaaaggtccaaccagamctgggagagactcccttcaggacaggaggatagatggttcctcctgggtgattgaggggaaaaaaacaaacacacacacacacaatgggtattcagtaattgatagggaaactcttgtagaagcagagttaggaaagttg

SEQ ID NO: 289534 - DNA, 595 bp, Homo sapiens
ggtgtacactttttgcgagatttggagttatatcatgctgtgtttccctgaatatttgtagaaatgtcacagcgtgggtgtacacccactactatattgggagtatctttgtactctaccccctgaaaattaggagccatatcacagaaggggtgtaaagccactgcgatatttgaagtaatattatgccctcccccaccacttattaggaacaatatcacaggagggtgtataccttggcggtattgggagtaatgtcatcatctcttcttttagatgttaggaacaatatcaaagggggttgtacaccccgtgtattattggaagtaatatcattctctcttcttctagattctatgaatcatatcacaggggggtgtaccccccttgttatattttgagtaatgttatcttctttcaacctggatattaagaacaatatcacatggggggtgtacatcctttcaatgttggtggtaatactatcttttcccttcccggatacaagaaacaatgttacaggyggtatgtacaccccttgcaatattgggagtaatatcacccctccccatgtggttattagggacaaaatcac

SEQ ID NO: 289535 - DNA, 640 bp, Homo sapiens
ggattgatccagttagctctccttggtgcttttgtatctactattccctgcctctctctgtcatgtcttatctccttcattctccagcactttagtaaaatccttttcatcaagcagcttagcttcatccctgtgtttcccaatctcagcatgattgacatagtgggacagataattcctttctgtagggagctgtcctgtgcttgtaggatgttcagccacatccctggactccacccactagataccagttgtgacaaccaaaaatatttccaggtcttgctaagcatcccgaggagcrcaaaattgccctcagttgagaatccctgctctggtgtatctttccctacatatcaaaaaaatatatttcagaggcttccttgaaaaccatagcctttactggttatctcttatctgcaattaactatatttacttccttaaatcctctttttcataattttcttcatagtttaattctttgttgatatttaacttttcacgtaaataatgatttcttcaacttttctaaaagcttctttgaaatagaaaacaagtccttactcaatcttaataagcccttaataagcctgtttcctacagacattcaactatttgataatttgattatgttggggcatg

SEQ ID NO: 289536 - DNA, 515 bp, Homo sapiens
acaatctaatagaataaaacatatatacacattaggtaaaactttaggtaaacgtaaagtttttatgcagtgtgttaatttgtgactagactagttacttaattgccaaaacaattggagtagtgtggacaggagctgtgacagtagggcctcctacagatgtggtactgacctagaccttgaaacaggcaggtgtgtatgstgcaggggaagaagatcatacaggactacaaaagagcctgatgcccagcggctggagaggagattggcctgcttagaatgagaatctatttaagtagtatagaaaatcttaacagctttggtcttaactagagaggagaactatgcagggttttcttgaggttgcatatcatcttagactgtctactcattcattcattcgcttaagcaagcagtagtccttttacagacaaagttttgatattaagcattttgtgcaagctcttagaaaacataattatcttctttaaattttatctgtactcagatttact

SEQ ID NO: 289537 - DNA, 596 bp, Homo sapiens
gaaagtatatttgaaaagagaatagtcataacaaaaaatcagaaaagaattaagcaaaatttcagtcatcttacatgttcacgggttggaaattgttatttattttacaattagtaaaaatatgttttaaaatatattctaaatgtatggaagactctaatttcattagtgaacactataaaaaactgaatttaatttgagaaaaaaactatcaaaaatagtaaaagatttaaaaattataatttctaaacaatttccagcttctctctaaaaaaaaaaaaaagttttttaaaaacaccaaaggccttaagaaaggacaaaaaaccaatgggattatataaaataaaacaatcaaaatatcataactattagaagattaaattgcttaytcctgtgctagaagatctgagacagtggatgaaatagacaatacatgtttttgtttacaaaataaaaagaaagaaggctaatttccaatattaatatgataattttcttgacaaagatctaaggtacaaaataacctcaatcacattatgactgctgcttcttttttattattattgctttctttgggttttgcttttttaaaattc

SEQ ID NO: 289538 - DNA, 604 bp, Homo sapiens
taatatgattaataaatgccaccggaagtggtatttattaatgcctgggaagtaaccttaaactgagcttttgtggcccagtggatataataatgaatttattatattgataatattaatattgaatttattattataatcaataatttaaaaagtgaatataataatgaatttattactatattcactaggctacaatatatggctaaagtttagaggtaggaaaggttgatctactctgtcctcaactttaaccagtgaaaatcatggaatggtcttttatgaattctgctatcgtgttatttgacctggctgtcagaactttagaatcttttaggacttcctatcattttatgttctcaaagaaatacttcttttaagtgatgtagtattaacattttgagaaaaagaaaacaatgtaacattttcatatttcatgaaatttatgcctttttaatagaaagccacttaaaatgaatgatttttgctcatatattaaagaaatagtattattatgaagatatagatcttagaagcattccaaataagttttttttyccctacattttaaactttataaaatggcatcttccatcactttata

SEQ ID NO: 289539 - DNA, 543 bp, Homo sapiens
tttgggtaacagatgtatcacttcctactctcttaaaccaaactctgatgctgcatcttagataaaagccctcaaatctggcctcctgaagtcatgctgtcatttaacttggctgcaggcccctgatactctcctgcagggagagagtctgctctttgccccagcctttaccccattcctactttctttcactcagtccccctccactcccagcayacctctggcggtattttattattagtagtaagctttatttttatcaaaaagggggttgggggtatttttgagcttatgttgcagaatactttatataaccctaaaatatacattctgttcattagatttctagctgccccaactacataagctgagatgcttggtagaagcaatggaacaaatttctctagttttccaaatataacatttgactaatttagaacaaacattaattattttcaaaatatttaacttattttagctttttagaaaaaaaaaactgtctgagtaaaacagggtacttcctatttcatgtaaggagaaagc

SEQ ID NO: 289540 - DNA, 478 bp, Homo sapiens
tttttgagggatgttgttgctgtgtatgtcccacttattttgcttccttaatgaacaatgcaastttgagacagaagtatttgagaacatttttatcagttgcgacattttgatagtgaacattttatatcttctgtcaacttaaaatgtttgcatcttctgtcagcttaaaatgtttaattttttatagccaaataatttggctataattgataagttaatttatcaaattaaattgctttttttccctttagactttcttcagtcacatctgaataaatcacttagaagtaagctagatgtaatataatgaaatgcttaaaagggctgtgtatcttcatattacacttacagtgattttctgttgtacccattatattctacctgcagctagttgaggtaaagagtggacatttaactgtcaagggaacctgagaggagactgtagaaatctggaaagtctcttgggtctttgagg

SEQ ID NO: 289541 - DNA, 579 bp, Homo sapiens
taattagcatatgtaaggatgatgtatttgctgcctggcttataggaatgagccaagttgttttttgagggatgttgttgctgtgtatgtcccacttattttgcttccttaatgaacaatgcaactttgagacagaagtatttgagaacatttttatcagttgcgacattttgatagtgaacattttatatcttctgtcaacttaaaatgtttgcatcttctgtcagcttaaaatgtttaatttkttatagccaaataatttggctataattgataagttaatttatcaaattaaattgctttttttccctttagactttcttcagtcacatctgaataaatcacttagaagtaagctagatgtaatataatgaaatgcttaaaagggctgtgtatcttcatattacacttacagtgattttctgttgtacccattatattctacctgcagctagttgaggtaaagagtggacatttaactgtcaagggaacctgagaggagactgtagaaatctggaaagtctcttgggtctttgagggattttgggatgcagagagtggggttgggatctctggcta

SEQ ID NO: 289542 - DNA, 1051 bp, Homo sapiens
tttttgagggatgttgttgctgtgtatgtcccacttattttgcttccttaatgaacaatgcaactttgagacagaagtatttgagaacatttttatcagttgcgacattttgatagtgaacattttatatcttctgtcaacttaaaatgtttgcatcttctgtcagcttaaaatgtttaattttttatagccaaataatttggctataattgataakttaatttatcaaattaaattgctttttttccctttagactttcttcagtcacatctgaataaatcacttagaagtaagctagatgtaatataatgaaatgcttaaaagggctgtgtatcttcatattacacttacagtgattttctgttgtacccattatattctacctgcagctagttgaggtaaagagtggacatttaactgtcaagggaacctgagaggagactgtagaaatctggaaagtctcttgggtctttgaggwtttttccactttgatgattcttattcttactctctacagtacaggactgcatctgcacagtgtggattgagttatttgcaaagatgttttcactttgagtaaaattatatgttttctccctaacatgagttatgagggccctaaggcatacatcctcactgcagtctattccaaatggactccactcatgaatgtttgccctcatattaatttgactttgcatatgatggacattgttctgactgcctgtccatgtgtttgattttagctctgtttttctcccatataaaacctagtgaatattgcacctcaagactatcattgttttcatatatattaccttatttcaatagtttttgggaaacaggtggtttctggttacatggaaaagttatttagtggtaatttctgagattttggtttacccattactcgagtcatgtacactgtacccaatgtgtagtcttttwttcctcacccccacaaccttccctccaagtccccaaagtccattatatcattcttatgctttacagcctcatagcttagctcccacttataagcgagaatgc

SEQ ID NO: 289543 - DNA, 1056 bp, Homo sapiens
  misc_feature (1)...(1056): n = A,T,C or G
ccagaatccataagagacctaaacaaatcaacaagcaaaaaataaataacaccattaaaaatgggcaaaggacatgaacagacacttcttgaaataacacatgtagtggccaacaaacattaacaaatgcctaccattgctaatcatcagaaaaatgccaaacaaaacatcagtgagataccatttcacaccagtccgaatgacttttgttaaaaaaaataataaataaattaaaaaagattttggggaggctgtggagaaaagggaacacacgctgtttgtggcaatgcaaattaattcagctactatggagagcagcttggaaattaagaactaagaatgactgttggatgcagcaaccccattactatactaggggtatacmaaaaggacaataaatcattgtaataaaaagatgcatacacatgtatgttcattgcagcactattcacaatagcaaagawgacacctgagtgggacttctggtcccgtggtgaagtgcaggggggtttgtagactggtttgagaaggcagtgcctgatttacgtagggcccaaagattggttggaccaggtgtgacatttacatagcacaggaggaagctggctgccccaccctactcttttattatgcaaatggggtatctatttggcctgcgccatgttgcttgctccttactgtacacgtggttggcaaagaaaagggaagacagagctgccattttaaacatgcctagtccccaggtagtccctttcctattcacacagctgttagcattcwcctgtgcaagcttctagcttgcctttctatgtctgcagctcaattttacaggctgctctttattggaaaagaaatgattntggggatgctttttattaaaagagaaaccttaccgaggactttcttaccctcgctatctgcctaaataacttctttttaactcctatatcaacactttacatgaattatctccttcaacctcaccaaagcccatcttacagatgaggaaactganacttgaagatgttaaggagcttgctcagagtcttgatgtat

SEQ ID NO: 289544 - DNA, 611 bp, Homo sapiens
cataaatatgggctatagggtgatatttttatacatgtatatagtgtgtaatgatcaagctaactagcacatttactacttcaaccatttttcatttctttcaattgtgaacattcaaaatcttttggcatttttaaaaatatacaataagtcatagttaaccatattcaccctacaatgacacagaacaccagaactcattcctcttatctaactgtaattctgtatccattaaccagcctcccctcccctagttctatgagyttttttttgttgttaagagacagggtcttgctagtgtagtctgggctctgggcaactgtagtcacccagactggagacagtggttttatcatagttcactgcagcctcaaactcttgggctcacgtgatcctcacacctcagcctcctgagcagctgggattatggacatgccccattgcacctgtctgattttttactttgtagagatatttccctatgttgcccagggtgctctggaacttttggcctcaaatgattctcctgccttggtcttacaaagtgctaggaaattacaggcatcagccatattgcccatccctcaattttcctttagctcccacacatg

SEQ ID NO: 289545 - DNA, 611 bp, Homo sapiens
cataaatatgggctatagggtgatatttttatacatgtatatagtgtgtaatgatcaagctaactagcacatttactacttcaaccatttttcatttctttcaattgtgaacattcaaaatcttttggcatttttaaaaatatacaataagtcatagttaaccatattcaccctacaatgacacagaacaccagaactcattcctcttatctaactgtaattctgtatccattaaccagcctcccctcccctagttctatgagtttttttttgttgttaagagacagggtcttgctagtgtagtctgggctctgggcaactgtagtcacccagactggagacagtggttttatcatagttcactgcagcctcaaactcttgggctcacgtgatcctcacacctcagcctcctgagcagctgggattatggacatgcmccattgcacctgtctgattttttactttgtagagatatttccctatgttgcccagggtgctctggaacttttggcctcaaatgattctcctgccttggtcttacaaagtgctaggaaattacaggcatcagccatattgcccatccctcaattttcctttagctcccacacatg

SEQ ID NO: 289546 - DNA, 589 bp, Homo sapiens
aaataaatgttggaaggaaataaagttacaaccaactcttgtactattgtgaggaaacaatcatatgtgttgacaaaaaatcaactactaayagatttataatagtatatatgtagcagaaaaatatcagatataacttatatacccaaaagtatgacttaaaaacagcatgacaatctttatgatgggatattgtgcaactactagaagcacattttcggagattacttattaacatatgataatgactacattgagtggttttttagaagcatgaattgaaaccatgtataagcatgactttattgaacttatatatcacattacacacacatttacataattataaacataagtatgcctcatgttccataatatttatcttatcttatattccatatgtaaaggtccaataggaaagtaatctcctgtattctgagttattatttcataaataatttatgcttgttctgtgaaaataaaaacactgctatggatcttccaagtatcctgaaaggatacagtttataattaaacaataaccaattttagaaataattattttaaataaggctatgataaatctggt

SEQ ID NO: 289547 - DNA, 556 bp, Homo sapiens
attactgcattcttggtattgcatacctaatccctgaaaatattgatgcgatcggacttaactgtcttttcttatttctcatcaccaatgacattaggtttgattcaatcaggccggattgtccactcccaacccctgcggagatcgcttccattctgtgtcacttcttaatttcctaaatcacattgtctctcgtttccttacgtgagtgaggcacaggccactagaagcttaggaaacatgtatttttttcataaaaagaccattcattttttccctttgracaatgcttttttcttcctctagcctttctcatttgcatacacatgcaaccaccaaggtatgcacagagagtctctgtcctctgatctccccccaaaaaaccgtatgagaagaaaacacagggccaagtgccatgaacaaattttgaattttagcaagaacgacaagaaatgaagcagttggttcccaatagcccttccctaccttgataatgtgaacgtgaataaaagaaataaacatgctattagaaaatggatatgccctccctgttacc

SEQ ID NO: 289548 - DNA, 640 bp, Homo sapiens
tcaaatgaactaagaagagttagataaagactataatctttataaaaataaataaagaataacatttctttatattttgagagtttaaatgaagcttaatgtttactgaaatatttacttctgtaagaaatacttctaattatccaaaacttcaacaaatcacttggggagacactagatatcaccagattcaaaccatacaaaatctcagggtcactcacaaattgttccacccaacgtaagtgaacaaaactgttggaaacaaaacagaattttgaaatacagtcaaaatacacaatgtaacactttactatacctcataacagtatctttttaacaagatactaattgagttggcagttactaataatttgcaaaattatcattgtttatatctcaattagtgtgcaccccattttttacatcacaaatgttttcccctgctattctgaaaaatttattttcatcttttaagactcagaaagtaggcttggcataatagctcacatctgtaatcccagcactttggaagsccaaaatgggagaattgctcaaggacaagagtttaagaccagcctgggaaccataggtaaccttgactctacaaaaaattagacaggtatggtgatatgtgcctgtt

SEQ ID NO: 289549 - DNA, 429 bp, Homo sapiens
ttctatgcttctttcccttctttgctctctttctactctaataactgcgattcacacaggtaatgaagagtgtaattccytgatagaaacacagctccaagattaatcctttctttaactatgaagttcacgtgtccaaaatctgtggtagttgctgtctgatttttgatcactgatggtgatacagatatttatcatcaactcacaacttcccaaatctttgaaaagtcttactattgatgattcaactagtagaaacatgatgtaaaatatctgaaaataaagtttttatttattagaatgtaaataataatacaaattgtaataaggtgtaaaagttctttcttcactgaagcagtaccatgttgtcctgtaccccacaaatgcactactcccccatggtctaatgtattttaaaagtcctgtaat

SEQ ID NO: 289550 - DNA, 1051 bp, Homo sapiens
ttctatgcttctttcccttctttgctctctttctactctaataactgcgattcacacaggtaatgaagagtgtaattccctgatagaaacacagctccaagattaatcctttctttaactatgaagttcrcgtgtccaaaatctgtggtagttgctgtctgatttttgatcactgatggtgatacagatatttatcatcaactcacaacttcccaaatctttgaaaagtcttactattgatgattcaactagtagaaacatgatgtaaaatatctgaaaataaagtttttatttattagaatgtaaataataatacaaattgtaataaggtgtaaaagttctttcttcactgaagcagtaccatgttgtcctgtaccccacaaatgcactactcccccatggtctaatgtattttaaaagtcctgtaatwaacatgattagtatatatatgtggaacataatagaaagggttgaggaaaaggacaccacgccgtaccacacagcacaacctggagcatcttgctctgtgaggtgggtccagatagactctctagcaatggaaggggacaagtgcaaagggttgtactttataaaactggaatcacaaagtctttcatacttatctttgattggaaataagaccaggcagtgaatgctattaggtaaatacataagttcctcactgatcctcttcctttgagggatgaggttgacaacagcgtgtattatgatgacatgattcacctacaactagattctgttgtgagggatgacaagggagttttgctttatgtgaggtgaaaaatwtttttctcctactagggagaatggcaagcattagaacgttctgatagtaaaagggcattgatagttttctttctatatattttttcacatcagataatactgcccggcagcctgccacacctccccagtgtttcttcagcttctctctgaatgtggataagctcttaaaggagtgatctttccagtggttctttctgtgggaggtaaaatggcaggtgaatttgggccttgttatacgtaggcc

SEQ ID NO: 289551 - DNA, 621 bp, Homo sapiens
aacatgattagtatatatatgtggaacataatagaaagggttgaggaaaaggacaccacgccgtaccacacagcacaacctggagcatcttgctctgtgaggtgggtccagatagactctctagcaatggaaggggacaagtgcaaagggttgtactttataaaactggaatcacaaagtctttcatacttatctttgattggaaataagaccaggcagtgaatgctattaggtaaatacataagttcctcactgatcctcttcctttgagggatgaggttgacaacagcgtgtattatgatgacatgattcacctacaactagattctgttgtgagggatgacaagggagttttgctttatgtgaggtgaaaaatatttttctcctactagggagaatggcaagcattagaacgttctgatagtaaaagrgcattgatagttttctttctatatattttttcacatcagataatactgcccggcagcctgccacacctccccagtgtttcttcagcttctctctgaatgtggataagctcttaaaggagtgatctttccagtggttctttctgtgggaggtaaaatggcaggtgaatttgggccttgttatacgtaggcc

SEQ ID NO: 289552 - DNA, 585 bp, Homo sapiens
ggtaaatacataagttcctcactgatcctcttcctttgagggatgaggttgacaacagcgtgtattatgatgacatgattcacctacaactagattctgttgtgagggatgacaagggagttttgctttatgtgaggtgaaaaatatttttctcctactagggagaatggcaagcattagaacgttctgatagtaaaagggcattgatagttttctttctatatattttttcacatcagataatactgcccggcagcctgccacacctccccagtgtttcttcagcttctctctgaatgtggataagctcttaaaggagtgatctttccagtggttctttctgtgggaggtaaaatggcaggtgaatttgggccttgttatacgtaggccagagcaaatagctacaactaaggaaaccacccagcaccttccccagaagagtattagccagagtaacacactgatmtctcttgaggtcttctccgctggtggctagaaagtctttgcaaggattcctgtttctggtctgagtcctatgttttgctggtttctggtgatagcgtgtcttattctaaactaaacagt

SEQ ID NO: 289553 - DNA, 587 bp, Homo sapiens
taacatctgtgttcctataacctactattaaataaacaactatggattagagctgattaattgcctcatgatcccatagttaaaaaagtagctggcctacagtttgaccattagcctgcctgccttccaaatcctttctcttgctcctcagcatagatagatatctgtgcagcccttggatcaagktataggtctgaatcagattaatcagattcattaatctgattaatgtctaagttaatgagagtttaaataccttgaactctcatttaagtttattgctagaatgtggttagtcctaataaatttgacaatttcagtggtagccagtatcttatttttaccatcaaaggctctagggcagatctgacttagctttggccataggactgtaagttttaccacagcaagtttaggcaagtcttagagacaaattatttgacttcccagtttggttttccatttaggctagtatttctgcttacttccataatacattttttagtcttgttgctttttccatgacttttctataaccttgtcttcattttttaaaactttcttctctgcttttcttggtgtttctt

SEQ ID NO: 289554 - DNA, 619 bp, Homo sapiens
atcatgggaaagagacagtggatctttctaacttgttttaggtcatcagttttcttccagtttagataacaaaatttatgtcatccactgattgaattttaagttcagcttcagaacagataatttgtgagggcaaagtattgtcaggctctgccaatgtattgactgtcactatttgttataaagctcaaggttagttttcattgaatattttatagatttagacaggtggagrcagaagtaggtaaatagaatctatttttagaacagaggacatattttaattatatcaagaatcataatttaatatatagatcactgacctttccccagattatgttttcctttttttgagggggaagctggatataaaccggcagttaaaaaaattgtaaagaaatcaacttgctcattttcattgtgtatttttgctctcaagcattttgcatgaactgtgtgtggatttattgcctgcattggatgatgaagacttgagtgttgctactaaggtaaagtggtctcttgtaaaattaattttctcactctgaatgtagttttgcaagtgtttacttttcaaatttagcagtggttcacctataattgttttatggtggtaatg

SEQ ID NO: 289555 - DNA, 612 bp, Homo sapiens
acatttatagatgtaatatattgaaaataaaaggcttcaatcaatgacctttaggttctaagargctaaaaaaatgagcaaagtatatccaaattaagaagaaggaagatgataaagataaaaatgtaaaccaacaacacagcaaataacaaaagctggagctaattaatatacccacaaattggttctttgaaaaaaaaaattttaaataaacaatggctagcaagatttatctcaaaaaaaattagagaagctacattatgtagacaatgggaattaaatagaggatgtaactacagaacctacagacatcaatataattatgaaaaccttaggccaatacatttgacaaataaaataacatgggaaattatttgtaaaactaattcttaaaactgatgcaaaatgaaatagaaaaagtaatagcttctctatgtattgaagaattttttttaatttaaaaagatttctataattacaggctacatggtttcttaggtgaattctatcaaacatttaagaaagtacagagagtcctcaacttatggtggtttgacttgtgctcttctgacttgataatggtgctttcatctgtgtacattaatgatgagc

SEQ ID NO: 289556 - DNA, 506 bp, Homo sapiens
gtatgctggttagtatcataacagtgagatagtccccctttgagattagaaaataacaaagtaacattaatgagagccaacataaaatagacaagattcactatctacaaaagtaatctgcaccaagtagcaatgtatgagcgtgtggttgagaacattgtctataatatgtgtactagaaggaagagacctcaagaagaagttcagagctggaaatatagattagggaatctaggtcaaagttttgagattttaggagtcctgagagaatgtaaaaagtgaaatagccactgggcatggtggtcagacctgtaaccccagcactttgggaggctaaggcaggcagatcatgaggtcaggagttcaagaccagtctggccaacacagtgaaaccamgtctctactaaaaatacaaaaaattagctgggcgggtagcacatgcttgtaatcctagctacttgggatgctgaggcaggagaatagcttgaacccacgaggtggaggtt

SEQ ID NO: 289557 - DNA, 1120 bp, Homo sapiens
gtatgctggttagtatcataacagtgagatagtccccctttgagattagaaaataacaaagtaacattaatgagagccaacataaaatagacaagattcactatctacaaaagtaatctgcaccaagtagcaatgtatgagcgtgtggttgagaacattgtctataatatgtgtactagaaggaagagacctcaagaagaagttcagagctggaaatatagattagggaatctaggtcaaagttttgagattttaggagtcctgagagaatgtaaaaagtgaaatagccactgggcatggtggtcagacctgtaaccccagcactttgggaggctaaggcaggcagatcatgaggtcaggagttcaagaccagtctggccaacacagtgaaaccacgtctmtactaaaaatacaaaaaattagctgggcgggtagcacatgcttgtaatcctagctacttgggatgctgaggcaggagaatagcttgaacccacgaggtggaggttwtttcgccatcttcatggaactgtcagccagcacactgaaacgattctcagaaaacaaaggcatcatcaaaaaacaaaggttttggtagagattgaaggccaacagacctaagactcattcagaaatacttagctgagcaataacccttcataagcagtcacttgacaggtggccttttaaatctcctgtcatwtactgtgtcagtggcttacacttgttctcaggaaaagttccatatttttcaccatgaaataaaaactcccatgtcaaagtaattctcatcaagttactcagccttgtctctcaccagttactgcactctgccctttgctttagcaccaaactggatggagtggactctgcagggctcttcctcacctcaggctctttgccttcgcctcttccctctatctgggaaacttttccttgtccttcaggtatcaatctatgttatctcctccaccagaaagcccatgatattgacataaaagtgggtagatgtcacttctgtgtgttccagtagtgctctgctctatacctatcatagtatctatgactctatatggacattgccttcctgtctgtttttttagtttatagcatatgattgttg

SEQ ID NO: 289558 - DNA, 528 bp, Homo sapiens
gtcttgcggtctacagagggggtggggaatggcaggggctggcataggaatgagaggggaggaggcaaggtgaggggggcaaggtgaggaggggggcacttaaaggggagttcaagaccagcctgggcaacatggtgagatcaccgcccctcaccgccgccatctctggtctcactctggtctcacacacatgcacaaattaaatttaatktaaaaattaaaaaattgttttaaaataagtgaaatatttacatggattatgtgtacattcattttgtagaactatacatcccatgtaactgggaactctttactcttctaacacaacatttatttagccacaaataaaagaagaccagtgatgtagcctgtacacaaaaaagtaagaaaacactggttaggctggggcaggggtggggggaagagatctacaaaattaaaattttattgggaagaatcactaattagaatcagaacaattactgctaagtagttaagaacagagcacaaggaacccagcgaagaagc

SEQ ID NO: 289559 - DNA, 528 bp, Homo sapiens
gtcttgcggtctacagagggggtggggaatggcaggggctggcataggaatgagaggggaggaggcaaggtgaggggggcaaggtgaggaggggggcacttaaaggggagttcaagaccagcctgggcaacatggtgagatcaccgcccctcaccgccgccatctctggtctcactctggtctcacacacatgcacaaattaaatttaatgtaaaaattaaaaaattgttttaaaataagtgaaatatttacatggattatgtgtacattcattttgtagaactatasatcccatgtaactgggaactctttactcttctaacacaacatttatttagccacaaataaaagaagaccagtgatgtagcctgtacacaaaaaagtaagaaaacactggttaggctggggcaggggtggggggaagagatctacaaaattaaaattttattgggaagaatcactaattagaatcagaacaattactgctaagtagttaagaacagagcacaaggaacccagcgaagaagc

SEQ ID NO: 289560 - DNA, 427 bp, Homo sapiens
ctcatgttcaagattgcccagcagagatcaggtcccagagttcctctcttaaaaaaggggacttgcttaaaaaagaagcctgsccatgtttgtgtaaagcagctatgctgtgctgggggttcacttttgagagagttctcctctgagacctgatctctgctgggcagtcttgcccatgagatggggctggtctgatctcagcactccttagtctgcttgcctctcccaggaccccagcctggccacacctgcttacagggcactttcggatgcccacagcatagcttccgtgctagtggaccatacctgatcagtggagagctgcagcaaggtggccccaacagccacacaccagtctgcagattacctctccatactgcagccctttatatggaaacttcctacatcactttgctgtgtgtgttta

SEQ ID NO: 289561 - DNA, 427 bp, Homo sapiens
ctcatgttcaagattgcccagcagagatcaggtcccagagttcctctcttaaaaaaggggacttgcttaaaaaagaagcctgcccatgtttgtgtaaagcagctatgctgtgctgggggttcacttttgagagagttctcctctgagacctgatctctgctgggcagtcttgcmcatgagatggggctggtctgatctcagcactccttagtctgcttgcctctcccaggaccccagcctggccacacctgcttacagggcactttcggatgcccacagcatagcttccgtgctagtggaccatacctgatcagtggagagctgcagcaaggtggccccaacagccacacaccagtctgcagattacctctccatactgcagccctttatatggaaacttcctacatcactttgctgtgtgtgttta

SEQ ID NO: 289562 - DNA, 855 bp, Homo sapiens
ctcatgttcaagattgcccagcagagatcaggtcccagagttcctctcttaaaaaaggggacttgcttaaaaaagaagcctgcccatgtttgtgtaaagcagctatgctgtgctgggggttcacttttgagagagttctcctctgagacctgatctctgctgggcagtcttgcccatgagatggggctggtctgatctcagcactccttagtctgcttgcctctcccaggaccccagcctggccacacctgcttacagggcactktcggatgcccacagcatagcttccgtgctagtggaccatacctgatcagtggagagctgcagcaaggtggccccaacagccacacaccagtctgcagattacctctccatactgcagccctttatatggaaacttcctacatcactttgctgtgtgtgtttawctcatgttcaagattgcccagcagagatcaggtcccagagttcctctcttaaaaaaggggacttgcttaaaaaagaagcctgcccatgtttgtgtaaagcagctatgctgtgctgggggttcacttttgagagagttctcctctgagacctgatctctgctgggcagtcttgcccatgagatggggctggtctgatctcagcactccttagtctgcttgcctctcccaggaccccagcctggccacacctgcttacagggcactttcggatgcccacagcatagcttccgtgctagtggwccatacctgatcagtggagagctgcagcaaggtggccccaacagccacacaccagtctgcagattacctctccatactgcagccctttatatggaaacttcctacatcactttgctgtgtgtgttta

SEQ ID NO: 289563 - DNA, 538 bp, Homo sapiens
gcattatgaaaattattgtagtgtgtgtgggcacccgagattgccctgtaagcaggtgtggccaggctggggtcctgggagaggcaagcagactaaggagggctgaggtcagaccagctccatctcatgtgcaagaccacccagcagaatagaccaaacagaggaaagaatcccagagcttgaaaactggctttctgaaataaaacaggcagacaagaatgggggraaaaagaaggaaaaggaatgaacaaagcatccaagaaatatgggattatataaacgaccaaacctatgactgattaatgtatctgaaagagatgaggagaatggaaccagcttggaaaacgtacttcagaatatctttcatgagaatgtccccaacctagccagacaggccaacattcaaatttaggaaatccagaggaccgcagtaagatatgccatgaaaagatcatccccaaaacatataatcatcagattctccaaggtcaaaatgagagaaacaatgttaaaggcagctagagagttaaaatggtta

SEQ ID NO: 289564 - DNA, 538 bp, Homo sapiens
gcattatgaaaattattgtagtgtgtgtgggcacccgagattgccctgtaagcaggtgtggccaggctggggtcctgggagaggcaagcagactaaggagggctgaggtcagaccagctccatctcatgtgcaagaccacccagcagaatagaccaaacagaggaaagaatcccagagcttgaaaactggctttctgaaataaaacaggcagacaagaatgggggaaaaaagaaggaaaaggaaygaacaaagcatccaagaaatatgggattatataaacgaccaaacctatgactgattaatgtatctgaaagagatgaggagaatggaaccagcttggaaaacgtacttcagaatatctttcatgagaatgtccccaacctagccagacaggccaacattcaaatttaggaaatccagaggaccgcagtaagatatgccatgaaaagatcatccccaaaacatataatcatcagattctccaaggtcaaaatgagagaaacaatgttaaaggcagctagagagttaaaatggtta

SEQ ID NO: 289565 - DNA, 538 bp, Homo sapiens
gcattatgaaaattattgtagtgtgtgtgggcacccgagattgccctgtaagcaggtgtggccaggctggggtcctgggagaggcaagcagactaaggagggctgaggtcagaccagctccatctcatgtgcaagaccacccagcagaatagaccaaacagaggaaagaatcccagagcttgaaaactggctttctgaaataaaacaggcagacaagaatgggggaaaaaagaaggaaaaggaatgaacaaagcatccaagaaatatgggattatataaacgaccaaacctatgactgattaatgtatctgaaagagatgaggagaatggaaccagcttggaaaacgtacttcagaatatctttcatgagaatgtccccaacctagccagacaggccaacattcaaatttaggaaatccagaggaccgcagtaagatatgccatgaraagatcatccccaaaacatataatcatcagattctccaaggtcaaaatgagagaaacaatgttaaaggcagctagagagttaaaatggtta

SEQ ID NO: 289566 - DNA, 497 bp, Homo sapiens
ctcgctttttaaaaaaatcctttcctcaccaataatttttttcctttgtaatctacttccctctgactttttatttgaaacatttcttcttttagggttacattatcacattttccttaattccataatcctttcaactccctcatcctttatgcactgtgtttttgtatccttttatttttaagtccttttcatgttgtctcccttttgttttatttccacaggagcttttattgtcatcttagtctttatttttcagcctgacctacgagcaaggaaatgaaaagggaaagtaccgcagccacgcttccatggaagtggcagacaggtgccaaagagtacrttacatttggagagaggaaaaaaaaaaaaaaagggttggatcagggcctgatttgttttttttctttttggtctccaaggggtaatacctttgaagatgaaaaataatgacatttacacaggaacatatataaaaatgtgtcttggtgaacata

SEQ ID NO: 289567 - DNA, 588 bp, Homo sapiens
tgaatacttttagttttctaaactcttccaagattttgaagtactaatcataaggatgtctgagatggcaattgattttggcagtgctaaatagtcaaaactagtttaaacttctcttttttaacctctgcctcttaagccgattctccattgcgtatgcaaaatgaaattaaaatacatacttcttttgctgaaatgcccttagaagatttctctggaaaatttctttttcataaatgatcatatctttaaagtcttctgttacagtggacattctattttctctcattccttattgagtaggatagtcaggggacaattgagtctttgtaatcttgaaccaaaaatttactttttagtagaggataacatttttcattttttgtcacattgtctaatgtttcaactcaataagtttgacttatctgaacaattttttttaaaatgataatcactttttctcttcaacgaagaaacaggacaaattttgcyctggaaaataagtgttgtattgcagtgattccttcataatttttgtgaaaaatgttggcgtgctcactatggtgtgttctgtgtaccatatatttt

SEQ ID NO: 289568 - DNA, 575 bp, Homo sapiens
ccgtttggttctctcttcaccctctgactttccaccatgctttgatgcaactcaaagtcttcaccagaagctgagcagatgctggtgctatgtctcttgactttcccagcccgtaaaaccatgaactaaataaacttmttttctttataaattgcccagtctcgggtattctgttaaaacaacacaaaatggattgaaacaggcatctactatatattgggactggaacaaaaaacttctggctttttattacaataaatatgttccttgagctgtttgttcccactcatctcagccttccctctagcccattaccatcaaaaggaaagcagtaagaataaaaccctctaatacatgaaccacattcttttgtggagtgctggcattctggtaggagtgttccataataataattagaccacaagataatgaaaactggtatatcttgcacactggcaaatgtgaatggactctgcccttagcagtgggagacaggcattaaccctttagtgcctggatcttggaacaggtctcaggagtccaggggagggatcaccatggccagtgcaaccaga

SEQ ID NO: 289569 - DNA, 602 bp, Homo sapiens
  misc_feature (1)...(602): n = A,T,C or G
ctatctgattatgaaaaataatatgatgctcatgtaatacagggctgccactgttcaagctacttcacatcttaaatacatcacatttacgccctcatttaagatcaacacatcactgtaggattaacaacaaaagattanaaaccaaaaataacacatttcatttaagtatctacatcaacgcctgtatctagatctcatttcaagtattagtaatggtgcccacagtaaaatcttaacagcatctcaggtaaatgggatgttagtttgacyattctcactgtccttgaatcattatttttaccaaattggctacttatttgtcagatacgcccagaacctatctttggatgccttgaggaaaaaacactcagttttttaaaaagaagaaatggaacaagtagacaacacatttttaggaatttccaaatcattctgaaattacagtgccaaagaaatacacaattacaaggaacacatcatttacttgggactattaatactgtatatatgactgaaaaggatcaactggaaagatgacatttattccaagataaataatttaaaaaacaataaaaatatgtatctatcaagcaaaataa

SEQ ID NO: 289570 - DNA, 621 bp, Homo sapiens
tcctagatattggagatatttattttaattttcgtgaattaattaattatttttcttgagacagggcttcactttgtcacccaggctggagtgcaatggcacaatcacagctcactgcagccttgaacccctgggctcaagcaatcctccaactgcagcctccccaagtagctaggactacaggtgacatcacagttggctactttaaattattttatttctttttttttttttatagagacaaggtctcactatgttgctcaggctggaaaatattagagattttttaaaaatgcacttaccccatctggactgttgaccccagaaatgagggtatgcagtagtcagcagctgccaatgtgtatggtgggcgagcagcagaatcgtcccagtaaatgtccttcttcatcttgggtaagctcatgtgcatttcgtccacagctaaaagagagacctaaaatcattgttatattgttagaataactcagatgtaaattaaataaaaaggagaagtttttttgggcagatgagagttagaytgggctaggacacagtctaaatgagtgaatatacaaatgtctgtagttcatacttgccatgaccacagctgccacagagagt

SEQ ID NO: 289571 - DNA, 1186 bp, Homo sapiens
attagcgagcaagacatgattctcaaaccatgaatgatgcaccttcgtaggtatgctctccaaatggatctgtccattcaactggtgacaatgcaggccctatcaggggaagccatgtcctatttaggagccaaatcaaatgactgaatagtgaaggagaaccagctatttgcaaggcactctgaagggtacacaggctatgctttcagggaattacagggcccagatgataagacaaaatgtacacagggagaaggttaaacagtaaagaaagacttaaatcacacttaaagaaaataatrtaagaggctttcacaatttatttttatttttatttttttagacagtgtctcgccctgttgcccaggctggagtgcagtggcataatctcggctcactgcaaactctgcctcccaggttcaagcaattctcctgcctcagtctcctgagtagctgggactacaggcgagcactatcacatccagctaatttttttggattttttttcagtagagatggggtttcaccatgttggccaggctagtcttgaacccctgagctcaggtgttctgcccttctcgacctcccaaagtgttgggattacaggtgtgagccactgtgcttgwctgcctcagacttccaggagaataacatcaaggaattggtgaaatcctggatgatgtcaccagttggacttgtattcatagtcattcatgaaacattaagcaactattgagwgtcaggcattccgctaaagctgagtgtccgggaagttctgtccctcccatcctccctaatggatctgccactctctctgcaggtcctgagaaataagaacatgccttctgaagttcattcatgtttgcccctgagtttgttttcttcatccacaatcccgttccccatcccaactatttcagtttgtttaacatgaagccctttgcttgtatacattcttataaaatgcatagttttgtgtgcaaatgcttttgtagtataggtctcatctgtttatttttcacttagtactatgtttttcagatccccccaaattccctcttgtaaatcttatctactgccccaattgcttctagccgctgcatactccaggatgtctcatatctcacttacatactgtcccaattgcctccacctccctccagagaccctagggatctccctccag

SEQ ID NO: 289572 - DNA, 1254 bp, Homo sapiens
cccaattgcttctagccgctgcatactccaggatgtctcatatctcacttacatactgtcccaattgcctccacctccctccagagaccctagggatctccctccagagaacctagggatccayagaagagtttctttggggtgtagacccacgaacagattgacctccagaagtgtccttgcatctctacatccctttccccaaccccaagcttggcatcgcctcactatctgttttttccagtctgaaaaatgtaaagggatgcctaattgttgtttaattgacattagtctcattactaatgccattaagcatctcttcatgtgcctgtgcatccttttaggactcttcttctgaaaattgccttttcaacttctttgcttttttatctaatggagtttctgtacttttcttgttgattttcaggagttccttctttttctagactaataatagacccttgttggtttcagacattgtggtggtcttttctgatcctttgtgtgtctattaaaagtatccatggtatttgttgaatagaaatccttaatttaatataatcaaattcatcaatttttttgttttatgcttttgaagtttwttatcacatttaattctcttaacaagctgtgaagtatctctatgcccattttataggtaaggaaactagggtttggggaaaaaacttagcgttcctgggagccttaacaaaaactcagtgagctttagcccttccaaaaccttactcatcagtctgcccttagccatcctctagcggatgtgtggtaatattataataaaccaatactgaacactctgccaaataactagagcaaaatttgtgctgtaattcaattggccatccctttcaccctggcatttcatcaaccagaaaaaataaawaccaaatatcatcaaagaaaagaggccccccataggttcttcaattctcatatttatataaatgccattgaagtcccaagaaaagtatcaaataaatttaaggcccaaaaccaaatagctgatggatttgaatctacattcttctaatagttaactgtaaataaaaatgtaaattgaataaattacatgtattacaatcagcaatgatttatcaattatactaaaaatactattttaaaaaatagctaaacaattaggacctgccagtcaaatggcctggaaaactaaaatagcattaaacatactactagcaaaagaaagtggagtttgtgtcataatcaaaacccaat

SEQ ID NO: 289573 - DNA, 517 bp, Homo sapiens
atgctgtacttacatgcctaacaacattactcccagtggaaccataactaaagcattacagaatcttactgtcctatcaaataagctagccaaaaattctgaactaaacaatcccttcacaaatttaataaaaaattggttcagtaaataaaaaaaccttatgtcctcaatcctcatctctctagccattaaaatagagttacttattctcataaaatactgcatcataccctrtgccaaaaaattaatacaaaaacttattaaaacaactctcactaaaacctcttacaatcctcctccccctatttcaaataaacttttccttctaaaagaccaagtaaaacaacagagccaaattatgctaaaagaaatttttttaaagttataacaattacttagcacatttaattctcttaacgagctgtgaagtagctctatgtccattttataggtaaggaaactggggtttggggaaataaactactgtatccatgtcacagagctgacaattagcaga

SEQ ID NO: 289574 - DNA, 517 bp, Homo sapiens
atgctgtacttacatgcctaacaacattactcccagtggaaccataactaaagcattacagaatcttactgtcctatcaaataagctagccaaaaattctgaactaaacaatcccttcacaaatttaataaaaaattggttcagtaaataaaaaaaccttatgtcctcaatcctcatctctctagccattaaaatagagttacttattctcataaaatactgcatcataccctgtgccmaaaaattaatacaaaaacttattaaaacaactctcactaaaacctcttacaatcctcctccccctatttcaaataaacttttccttctaaaagaccaagtaaaacaacagagccaaattatgctaaaagaaatttttttaaagttataacaattacttagcacatttaattctcttaacgagctgtgaagtagctctatgtccattttataggtaaggaaactggggtttggggaaataaactactgtatccatgtcacagagctgacaattagcaga

SEQ ID NO: 289575 - DNA, 595 bp, Homo sapiens
aacatgggcagttgtggccaatcttccaattcctgaaaggaaacttctttaatgtgaagttttcatccacatatctgattctttctcctaaaccacaaactctgaggcaagggaaaaggctagatactagatattctgcatttatgaccaccagattaatatttgaagactacatctgagctatgtgacacctaataatatgcattaatattgtaaacacttgaggaacaaccatgtgatctcatttgcatacactcctccaggtttgtaactcagcaaaaacacaaatgattttattatgctcactcaagacagcaacatacaaaagtaagtagggtacatttaaraacaaaaggtaggccgggtgtggtggctcacacctgtaatcccagcactttgggaggctgtcgtgggaggactgcttaattaagcccaggagttcaagaccagcctgggcaacacagtgagactctgtctccacaaaaaatagaaaattagctgggcacagtggcacacacctgtagtcccagctacttgggaggttgaggtgggaggatcacttaaacccaggtggtcgaggctgcagtgagctatg

SEQ ID NO: 289576 - DNA, 542 bp, Homo sapiens
gtcaatagtcagtgcagaggaaaaggtagctggaacaaatacaaaatgaacatgcttgatatcaaagcttgatatcaagaattttcaaaaccacaaactcatatattatttatataaactgtgytctgactaaaatgctcatctcttgggatgattattctaatatggtgaagaataaaacacttggagtgttttgcttaaacagcaaatactggtaggtgacttatcttaggttcatctatgtatgtgtgagtgaatgtgtttgtgtactcttaaagggaacacttggatctgaatcagtcatttctagcaatttccagtctttctacttagtcaataactaaacatgcaaaccaaaatgcctcaatgtactcataagatagctgcgacaactgggcttttcccatcattggctggtgagtgtgatgtgaggtggtagtccatggctcagatattattaatagttttactgtggattcacaagacaagtaaaagaggaaaatgctcattaacaataaaagtgcaatctggcaggccttaat

SEQ ID NO: 289577 - DNA, 1160 bp, Homo sapiens
  misc_feature (1)...(1160): n = A,T,C or G
ggattcacaagacaagtaaaagaggaaaatgctcattaacaataaaagtgcaatctggcaggccttaattccaacacacccataaagtgatccaaggctgatgtgacaagaaagagcctattgttgataaatctgaagtgtaattcaaagattataaagattatactgacattctttcagtctgatggtgggaaggtcttcttttaaaacagtatctgaaaaggaaaagccaagggctctgattttaacttatctatatatgaaattgttggcttaatttagggcactgacaatatgatcagttcttctcatacatgccaaatacccccgggagatcttctctctcagtataatggttatatccttttctgccattgaaccatattttaaatttctagttttaattactattaaagctaaaattagaactttacaattaattaaattctaaaaacaaaagcttatgaggcattgtcagaataatattctgattgtgtaaagaaaagaaacaaaggagaagaacaattattagacactatrgtattataaaatgcaacattcttttctgagactawtctttgatgttataagtttttttatttgttattttctgttagaagttctctatatttctaaagtcagcatatattattaatatagtcaaaaaatgagtgaattttctcattacatggaagatttttgcatgtcaagtacagaanatctgtctatatcataaatccctctatcttttatawttaccatganaaatattaatgaacacatgaacccagttgtctataaatctacctgtttgtgacagcaggatggaaagagtgagtttcgattgtcacaggagaaagacatactagagaagaagataattctggaatgatgaaaagggctgtaagattttggtctcattctggcaaggcagacatattgactcattcaactgagtgctcataatggcctctctaaggcaagatgataaccaggagtcaggtatttctgaaaatgtgacatacaatatcttacatcactttcattttacatttggcttaggcaaggttcatgagtggctactgatatatagttatacttttgttttctcttgtttttattttagatgggtagggagatagaagagagaaaaagtttat

SEQ ID NO: 289578 - DNA, 562 bp, Homo sapiens
attctccaaacgtatttggccaaaaaacactattttttttgtagaatgttatttaacatcttatgaaactaatgttctgtggaacactaaaataaatttataaattaaatgactgaagagtaggtggtcagacatacaaagaagagctagtaccaatcctactgaaactattccaaaaaattgaggargagagattcctccctaactcattctatgaaaccagtatcatcctgacaccaaaatctggcaaagacacaccaacaacaacaacaatgacaaaaaagaaaactacaggccaatatctctcatgaacatagatgcaaaaatcctcaacaaactagccaggtgaaaacaggaacacatcaaaaagttaattcaccacgattaagtgggctttattcctgagctgcaaagttggttcaacatattcaagtcaataaatgtgactcaccacataaacagaattaaaaacaaaaaccatatgattatcccaatagatgcagaaaaagttttcaataaaatctaacatctattcatgataaaaaccctcaacaaaatagac

SEQ ID NO: 289579 - DNA, 611 bp, Homo sapiens
gcgggtgtcggcctttagtgcacccactgaccccacccctaacccagtaggcccacctatagcatgggtctcgtgagcccactttacagatgtggaagctgaggtccgacagctgaggggcccgccccacagccaggcagcggaggagaccccagtgggcccacaccctggctgccgagcaggtcctggccctcacagccttacctcccaagaccactctttgaattgactcccagaagccgcagggagaaaacaaagcatttatttttgctacgcattcgctgttctccagagtgccgaagggtgtytgtcaggaggtgtgggtgacacacgccatcacttggagacagaactggctatttttgccctagactctggcatccctgcagggtgcccactgcagtgtgcaggtgctcaggcagctcacgctgacctgcgtggggacagggcctgggacccaggggctgagtgtgagtgctgtggaggcctgccctggaacagacaatccacacgtgtgacagttatttcagcacgtccctcggcctcggaggtgggctctgagggtgctggggtgcttgtcactgcggggtctcccatcttctcatgggcgg

SEQ ID NO: 289580 - DNA, 576 bp, Homo sapiens
agcaatcccctggagttttttggttgttgttttttttgtttatttattttgagatggagtttcgctcttgttgcccaggctggagtgcagtggcgccatctcggctcatggcaaccgccacctcccrggttcaagcaattctcctgcctcagtctcccgagtagctgcgattacaggcatgcaccaccaggctcggctaattttgtatttttttaagtagagacggggtttctccatgttgatcaggctggtctcgaactcctgacctcagttgatctgcccacctcagcctcccaaagtgctgggattacaggtgtgagccactgcgcctggccttttttttgtttgtttttgtttttgttttgttttgtttttgagagttgtttattaattcctgggcttatccttaagctgcaggagcatggcattaacccatcataggctttgacaactatagtacaaaataaaacacggcccaggtctcagactggccgctaggtagcacacgaatttaaataccaactcagtgactttgaaaacagagcttacgtggaaccacaacccacagaagcctaa

SEQ ID NO: 289581 - DNA, 576 bp, Homo sapiens
agcaatcccctggagttttttggttgttgttttttttgtttatttattttgagatggagtttcgctcttgttgcccaggctggagtgcagtggcgccatctcggctcatggcaaccgccacctcccaggttcaagcaattctcctgcctcagtctcccgagtagctgcgattacaggcatgcaccaccaggctcggctaattttgtatttttttaagtagagacggggtttctccatgttgatcaggctggtctcgaactcctgacctcagktgatctgcccacctcagcctcccaaagtgctgggattacaggtgtgagccactgcgcctggccttttttttgtttgtttttgtttttgttttgttttgtttttgagagttgtttattaattcctgggcttatccttaagctgcaggagcatggcattaacccatcataggctttgacaactatagtacaaaataaaacacggcccaggtctcagactggccgctaggtagcacacgaatttaaataccaactcagtgactttgaaaacagagcttacgtggaaccacaacccacagaagcctaa

SEQ ID NO: 289582 - DNA, 556 bp, Homo sapiens
ctatatgaaaaaatgctcaacatcactaactattagagaaatgcaaagcaaaaccacaatgagataccatctcacacaagtcaggaatggctgttaccaaaaataacagatcctggcgagcttgcagataaaagggaatgcttatacaccrtgggtggaaatgtaaagtagttcggccactgcggaaatcattttggatatttctcaactaagaggtgaagtgccatttgacccagcaatcctttactggttacatacccagaggaaaataaatcattctaccaaaagatacatgcatgcgtatgttcaacacaggactgttcacaatagcaaaggcacggaatcaacataggtgcccattgatggcagattggataaataaaatgtggtacaccatggaatactacacagccataaaaaagaactaaatcatgccctttgcagcaacatggatgcagctggaggccattatcctaagtgaatgaatgcaggaatagaaaaccaaataccacacgttctcatttatttttattttattttatttattttatttatt

SEQ ID NO: 289583 - DNA, 556 bp, Homo sapiens
ctatatgaaaaaatgctcaacatcactaactattagagaaatgcaaagcaaaaccacaatgagataccatctcacacaagtcaggaatggctgttaccaaaaataacagatcctggcgagcttgcagataaaagggaatgcttatacaccgtgggtggaaatgtaaagtagttcggccactgcggaaatcattttggatatttctcaactaagaggtgaagtgccatttgacccagcaatcctttactggttacatacccagaggaaaataaatcattctaccaaaagatacatgcatgcgtatgttcaacacaggactgttcacaatagcaaaggcacrgaatcaacataggtgcccattgatggcagattggataaataaaatgtggtacaccatggaatactacacagccataaaaaagaactaaatcatgccctttgcagcaacatggatgcagctggaggccattatcctaagtgaatgaatgcaggaatagaaaaccaaataccacacgttctcatttatttttattttattttatttattttatttatt

SEQ ID NO: 289584 - DNA, 1093 bp, Homo sapiens
cccatttgttcttctgacctccaaaaccataaggtaataagtctctgctgtttcaagccactaagtgtgggcatttgttatagcagcaataggaaaccaatacaggatgtatgtgtgtaaggctggagagggtggaggtggataaaggagactttccagggagggagagcctccgctgtcctctcagagatgtggcttctggaccagagccatctgtaccagcctccctctgcagggaccgcttcagcatcccccagcaccacctgataccccaataccctggagcactcactccctctactcatcccaaaggtcctctgccaggtggacaggccccaggcaattggctctcaatgtgccaaagaggtaactgaggcctgggagaagcatagccaggaggagcactccacctgccgcaggagatggccagacgccacacctgagaactcacrctttctgggagggcagcccgctccttccacagattccccacagccaaacaggcccaggcaggctcctgtccacacctgtgctgagaacgcggccwcccatttgttcttctgacctccaaaaccataaggtaataagtctctgctgtttcaagccactaagtgtgggcatttgttatagcagcaataggaaaccaatacaggatgtatgtgtgtaaggctggagagggtggaggtggataaaggagactttccagggagggagagcctccgctgtcctctcagagatgtggcttctggaccagagccatctgtaccagcctccctctgcagggaccgcttcagcatcccccagcaccacctgataccccaataccctggagcactcactccctctactcatcccaaaggtcctctgccaggtggacaggccccaggcaattggctctcaatgtgccaaagaggtaactgaggcctgggagaagcatagccaggaggagcactccacctgccgcaggagatggccagacgccacacctgagaactcacgctttctgggagggcagcccgctccttccacagattccccacagccaaacaggcccaggcaggctcctgtccwcacctgtgctgagaacgcggcc

SEQ ID NO: 289585 - DNA, 542 bp, Homo sapiens
tactcgatgttgtctgtaaaaacaatccaaagttccactttgaaggatctgatggctgaagttcggctacagtcagatgttttgcaccagctgaagttaaggctagcaaccctttctggagagagcaatgaagaagggggtgcytgagagcagcttcagcaaaacgcttagaaacaccatgaacaaaacaagaacacagtttaggctgcctccatctgaggctgtgctttttcctaacaaaggttgctagaattcacatcaggtacaaagaaaaaacattaaattaaattctctgggctccagctgaacaatcaattctacttcagtggtaaagagatatcccaagatgtccatatcctggcaggtgtgggggaacaggcaggatgaggaagcccgatacagctgctacttttccacctgggccatcattggagtaaggcaagaatgagctgacagatctccctcctgggccttgaagcacatgggccacttctcagatggaggaagacaggggacatatgaagtaagtttactaacggaac

SEQ ID NO: 289586 - DNA, 559 bp, Homo sapiens
tataaaaactggcagcaggccaggtgcagtggctcatgcccataatctcagcacttggggaggccaaggtggatgsattggttgagctcgggagttcaagaccagcctgggcaacatggcaaaaccccttttcaataaaaaatacaaaaattagctgggcatggtggcatgtgcctgtaatcccagctactttcagggctgaggtgggaggattgctggagcccatgagattgaggctgcagtgagccacgattgcaccactgcactccagcctgggcaacagagcgagaccctctctcaaacaaacaaacaaaaaccctgaggacatacagaggcatgggtcattgcagcctgggtttcacgatgaccatgcctgcggaaccagatgccccttctgtagttcttcaagccccaccccatcagactggaccaagtccccccgtgccaggggctcaggagctgctcccatcttctgcagatggcatggaactccagaaacccctgagacctggggagacagcccctaccccttcccaatgagccctcggggtaccaggca

SEQ ID NO: 289587 - DNA, 572 bp, Homo sapiens
aagtggcatggggacacttggggactgatcacgttctggtccttgctctgggttgttagttgcatggattgttcatttgtgtatatgataccccattaaaaagtttaagaccacgtacaygcacacacacatgcacacacatgcacatgtacacacgaatgcacacacacctctagtccaattgtatgaccttgggcaagtgctctcctatgtggttccatccatctttagacccagacctgcagctggggttggacccccacccccatacccaggcaaaactgcatagcaccgagcacagcagggctcctacaccccttgcactctggggcactgagtctgatcctgcccagatggggcaagagccatggggtaggtgagttaccttgactctctaacccccttagggagataggcataaaaaccagagcccggccaaaaacccctcctctcccccatccctaattcccacctcttagacccctgacctttctggaggttcaacttcctcaaggcctctgtagcagcccacccagataggcacacctcctttccaggggtggcagccaggt

SEQ ID NO: 289588 - DNA, 569 bp, Homo sapiens
ttttatccactggaaaagccaagatctgaacgtgaattaaaaccaagggagactaatgttaggtaaaatgagcaatcactgcattggcctggaggtagctatgtgtggctcacaatattcaggcagtcttatgagaattgataatatttgggtagcacataacacgtgaaagataacatctcagtgttattcagcttaatttagagtccaggatacaataatgaatgcgatttgatggatctgtggaaacaactacgattaaagaactctgttaagggactaaagcaaatgctggtggcaagatgaatgatatttgcataagcaaaagtggaatcaagtatgtttggggcagctgttgatcatgaaaacctgaagaaatagtgggcttcacctagccttctaatccaatgactctttagcaattacttgtttcagctctgtggttttaaaaagatcattcagatgcttccatgaatcatatgtatttaaaatattggggcaggttgccataaatatagatttggctggcctaaaagkattctttctgtatctctctctgtctcccccat

SEQ ID NO: 289589 - DNA, 540 bp, Homo sapiens
tatcataagaactgtgtgtgtgtttgtgtgtatgtgagacagatgcgtgcgcgcgcgtgcacacacacacacacacagagatagagagagagagagagagagagagaaagaaaaacatatgtagcaggtattttctcaggccacatcagcctgtggtttttttcagaatgcaaaataataatgtrtttggcactccttgagggttatctcaggaaataacagcttccagatagaaaaatatgtttcttggttttagatgctagatattcctgtgccacaatcctccttcaaaggaagaattctcatatagccttcttcatttttgatgcttttttctaactaatttccagtgtctttttttttttttttttttaatgtggtccaggcccttccccgagagtcttcttttctatctcttcgtagcataaaatcttccctggtccaggatccaggataaagctccttctaccacagtgttagcagaccaaagacccggttccatgttctttgtctctgtctgagcagaaggaccggggacag

SEQ ID NO: 289590 - DNA, 508 bp, Homo sapiens
cattttactaacacatttgtgggaaaatattttattttgtcagcartaaactctgattacctttatgtgaatggtttcttcagccaccttatgcacaatgtcctagataagagaaatatcttttaactatttctgtaaagttacaaagctttagtttccgaaatccactttcagtaccttcctcactttaataacttttttcatggagttcaccagtccacaggaggccagttatagtgccatgcaaagaatatgagttttgggggcaatagatgtgactttgaaaatttttctttttttcaaagctctctgatcttgggcaattgacctaacatttctgtgttttctgaccgatgaaaggtggataagacacctccctcagaagattgtagatattacataagaaaacagttaaatcaataacataatgcctgcaggcttataatttcacataaagattagttttttctcagctttagtttctgatatgaacaatatagatactgcc

SEQ ID NO: 289591 - DNA, 655 bp, Homo sapiens
gattatttcccattacattttcaaatattttcttccatagagtacttttaggaataagacaaagtctgagatggaatagtttggatacagttttactcctgtagagacttttttactattgtgctttgagaaaattcaatacaaatgtaagcaatggaagtttgaaggtgcttataaaaataggaaatgtctcatcttgaccatatgcacctttgtaccttcacaaagcatctgcggaggttaaaacaaatcaasagtctttttttttttttttaaatgctgaaatatgagaaagacgatatacgtgtctcctattgtcttcaatagggcacatcacctaaaggaaaatagaagtgataaaaattagagttttattacaggcaaaatgttttgttttctatatttcctttatgaaaaaacagatttattaaagttttaataatgtgacagtcagataattaacatttattgatgtttctcaatgcaccagtgtatatgaggtggtttggagttcttcttatcaccactaaatcacttttatttaatctccactgaatgtgactaaaaatattaagccttagaaattacagatttctacagattctagcagtaatgttcagcatgtactatgaaatgatttaagaacacttgaaaa

SEQ ID NO: 289592 - DNA, 655 bp, Homo sapiens
gattatttcccattacattttcaaatattttcttccatagagtacttttaggaataagacaaagtctgagatggaatagtttggatacagttttactcctgtagagacttttttactattgtgctttgagaaaattcaatacaaatgtaagcaatggaagtttgaaggtgcttataaaaataggaaatgtctcatcttgaccatatgcacctttgtaccttcacaaagcatctgcggaggttaaaacaaatcaacagtctttttttttttttttaaatgctgaaatatgagaaagacgatatacgtgtctcctattgtcttcaatagggcacatcacctaaaggaaaatagaagtgataaaaattagagttttattacaggcaaaatgttttgttttctatatttcctttatgaaaaaacagayttattaaagttttaataatgtgacagtcagataattaacatttattgatgtttctcaatgcaccagtgtatatgaggtggtttggagttcttcttatcaccactaaatcacttttatttaatctccactgaatgtgactaaaaatattaagccttagaaattacagatttctacagattctagcagtaatgttcagcatgtactatgaaatgatttaagaacacttgaaaa

SEQ ID NO: 289593 - DNA, 1308 bp, Homo sapiens
ataacatacaaagggctaggaaccactcactgttccatataaccccaatcaccacagaattcattctagggcactgggtacatcgagaaacaccattcacactggcttggtgtgaactgcaccgcataggggtatgcagcacacaaacagcataatcccacactgtgacctgcagccccatcataaaccataccttcttttccatggcctttcttatgttgcttttctaccatggagaaccctcttctctcatctcaacatgcayaaaaccagtcatcatctagctcatatcacccttgaagcttttctaggctcttccagctacaggtatctacatatttctcctctgaacacctatttcatwcctaaaattaatcttgactttgccatacattwtctttctcgtgtgtgtgtgtgttctaactttgggaaggggaagggtaaaacactttaaacttaaatgactgtgctgcataagttaattattgtacattcaatgagaaatagttcctatttaatgctatgctaggcaagtcaacaaactggaagcaagtttgtactcaccaacctcgaattcagcacacatagactcaaaacatttgtattgtatactatggcacagtcaagatacaaagacacctagtttgcttaacagcatgccatgtgtgagggctatttcatctcactggagacaatccctactcttgccattctacaaaatgattcattttcatctgtatagtcwcctagcgtttgttagcacaacwgggtggatggtaaaaaataatttaactggacacttaaaaggacacttaagaataactaaaagagtataattggattgtttgtaatacaaaggataaatgcttgaggtgatggatactctatttatctgaatgtgattatcatgcattgcatgctgataccaaatatctcatataccccataaatatatataccctactatgtacacacacacacacacacacacacacacacacggctgtttcagcaaaaaacagtgttatccagccttttatttgaatggggaattctgttttttacttttcagttactaattctcagttactaattctttcactttgaaaaaattactgttcctaatcacacagaaatgacagggtttatctacagcttttcctacatgcactggtgctttcaagattacattgatattaataattgtaaccagcttttttataaagtggtatggctctggaggctgttggtgtgttctgcagctgacatgcaagtaaaaaccacttttcttttattattttgtggatg

SEQ ID NO: 289594 - DNA, 563 bp, Homo sapiens
cctagcgtttgttagcacaacagggtggatggtaaaaaataatttaaytggacacttaaaaggacacttaagaataactaaaagagtataattggattgtttgtaatacaaaggataaatgcttgaggtgatggatactctatttatctgaatgtgattatcatgcattgcatgctgataccaaatatctcatataccccataaatatatataccctactatgtacacacacacacacacacacacacacacacacggctgtttcagcaaaaaacagtgttatccagccttttatttgaatggggaattctgttttttacttttcagttactaattctcagttactaattctttcactttgaaaaaattactgttcctaatcacacagaaatgacagggtttatctacagcttttcctacatgcactggtgctttcaagattacattgatattaataattgtaaccagcttttttataaagtggtatggctctggaggctgttggtgtgttctgcagctgacatgcaagtaaaaaccacttttcttttattattttgtggatg

SEQ ID NO: 289595 - DNA, 447 bp, Homo sapiens
ctcagttttctcatctctaaaatgatcatgacacataaattacacagctctcgtaagcaatgtattaatatatattaagcacctaccattgtctaagaaacaatgtaagtgaacaacaaataatagctctcattgtttttctacaagttgctttccttttcttaatcttaaatattaggattatccaatctattttgtgtgtgtgtatgcatgtgtgtgtgtgtgtgtgtgtgtgtgtgtccagccacccttacatagcaaaaaccattggctttctttatattttgattcatttttagaaatatctatatcatgaacaatgattaagctttgctcttaaaggtttttgattataggaaatttgtatgttgtaygtctctattaaccataacagttgatacatcaaaccacctggtgttcatttggataacacagaattttctatgt

SEQ ID NO: 289596 - DNA, 621 bp, Homo sapiens
tataacgcttgggtacatttcatggcattttaaaatgcattgttttctggacttgcatttattggtgatttcaggaatacagaattataaaacagtgtcacaatttcaagtatgcaaacatgatttcatcacagaatcttatttttaaaacagtatttttttatcttctaaataagattaaagaacagaaattagtctcatacatatagtaggtttttctagatcactattgctatagacaatgtttgtatccctccaaaaattcatgtgttaaattctaatggtcaatgtgatagtattaggaggtgaggcctttgaggctgattaagtcatgagagtggagtcctcatagatgggatcaatgcccttataaaagaggtcccagagagctccctccccacttccaccatgtgaggactccaggaagcagtcccccaccatatactgaatctgccagcaccttgatcttggacttctcagccttcagaactgtgagaaataaatttctgtcctttataaacaacacggtcatttgtattttgttacraaatcccaaacagactaagataactatagcagtcaatatttagcccatatacttcagaatactaaaaaaataaa

SEQ ID NO: 289597 - DNA, 559 bp, Homo sapiens
ctgtgatgtgaactgataaacaacataaatctcaggagaaatcatacatgtatagaagaaatgcatggcttcttcaccctgattgacttttccctgctccccatgtgtctcaggagaagaatgctcttttttatgccagacgcatcatgatgaatgctgatgagacaatatttgactcatcactgcttagatggttattttgcatgcaatctttcaacttcttcatcaattcattggcttgcacacacagcagtatttggggtgcgattcctagttagcaggtgaacatttttgtttttaaattacagggattttattagaagaaaaggtatatttactttcatcagtttagattaagttgatccaagaatcaattaaaagatgcaataatcttcaaagttattttctttaatacagtgacccacaattgttgtgaatcgtttcatgtctatggagatacagatgagctaaatagatataaatctagaatcatacaacatgtggcagtttttgtcttctttrtgattcttctgtcaaccctaataatttcagaggaaaa

SEQ ID NO: 289598 - DNA, 567 bp, Homo sapiens
ctcttgcagatactaataataacattaaagtaacaaatactacagtaatttgtattttatttagtagtattcttatttcagtcatccaggagattttaaactaaaagtaaatggtaaggttttctatgctaagtaaggaaagaggaggctgttatgaatttgcactaaaaaaaatgaacacagaagagttaaaaagtccagcaatggcatcctaattaaataattattcttccagatcttctatttcagtttcctttctgaatgcaaaccttacttaagaaaataatcttagctcattttggtaagtcagaattctgaaaaatatctaaggaaaagttaacttttgaggtccctaggctaaaattgacaagaccaaaattaagaaaatatggctttaataatgtttttgagttcactactttatttttattttggggacagartttggtttatttggaaaaatagagtagaagccaaacttaagactctggtagaatttatttgctcttccctttggtagtttttccttttttctcttctggcattttgaggaaatgatgtatatag

SEQ ID NO: 289599 - DNA, 567 bp, Homo sapiens
ctcttgcagatactaataataacattaaagtaacaaatactacagtaatttgtattttatttagtagtattcttatttcagtcatccaggagattttaaactaaaagtaaatggtaaggttttctatgctaagtaaggaaagaggaggctgttatgaatttgcactaaaaaaaatgaacacagaagagttaaaaagtccagcaatggcatcctaattaaataattattcttccagatcttctatttcagtttcctttctgaatgcaaaccttacttaagaaaataatcttagctcattttggtaagtcagaattctgaaaaatatctaaggaaaagttaacttttgaggtccctaggctaaaattgacaagaccaaaattaagaaaatatggctttaataatgtttttgagttcactactttatttttattttggggacagaatttggtttatttggaaaaataragtagaagccaaacttaagactctggtagaatttatttgctcttccctttggtagtttttccttttttctcttctggcattttgaggaaatgatgtatatag

SEQ ID NO: 289600 - DNA, 563 bp, Homo sapiens
tgtctttttggttcagtttttgcctgacacagtgcttgggacataattcttaataaattctttttgaataatcaatgaagaaacagaagcagaattgtggaattagacacagctgcaacagctgactacagagattagaaatagcaagggggtgttaaacaggagacattctgatggggaatcaaagagagagagagatatgcaaaatgtccataaaacagttttgcaacttggggtgtggrgctgtgtgatttcaggcatgtgccccatgaggacatgcacaggtatgtgtacctgctgctcaacagcccctaagagaaattgtgtgacattacagaggcctggcaatcagtacagtttggcagcttggggaagggtttgcaaactgcacgagagtgacaagctaagccatttgtgcctatgtttcaacactggcttacccaccagatttggcttcatttgtgacactgagttatcattattaaaattttggaaattgcattgtatgctttagaagttttttcattaacatagttttaaggcaaaatgtggtcatttatctt

SEQ ID NO: 289601 - DNA, 563 bp, Homo sapiens
tgtctttttggttcagtttttgcctgacacagtgcttgggacataattcttaataaattctttttgaataatcaatgaagaaacagaagcagaattgtggaattagacacagctgcaacagctgactacagagattagaaatagcaagggggtgttaaacaggagacattctgatggggaatcaaagagagagagagatatgcaaaatgtccataaaacagttttgcaacttggggtgtggagctgtgtgatttcaggcatgtgccccatgaggacatgcacaggtatgtgtacctgctgctcaacagcccctaagagaarttgtgtgacattacagaggcctggcaatcagtacagtttggcagcttggggaagggtttgcaaactgcacgagagtgacaagctaagccatttgtgcctatgtttcaacactggcttacccaccagatttggcttcatttgtgacactgagttatcattattaaaattttggaaattgcattgtatgctttagaagttttttcattaacatagttttaaggcaaaatgtggtcatttatctt

SEQ ID NO: 289602 - DNA, 563 bp, Homo sapiens
tgtctttttggttcagtttttgcctgacacagtgcttgggacataattcttaataaattctttttgaataatcaatgaagaaacagaagcagaattgtggaattagacacagctgcaacagctgactacagagattagaaatagcaagggggtgttaaacaggagacattctgatggggaatcaaagagagagagagatatgcaaaatgtccataaaacagttttgcaacttggggtgtggagctgtgtgatttcaggcatgtgccccatgaggacatgcacaggtatgtgtacctgctgctcaacagcccctaagagaaattgtgtgacattmcagaggcctggcaatcagtacagtttggcagcttggggaagggtttgcaaactgcacgagagtgacaagctaagccatttgtgcctatgtttcaacactggcttacccaccagatttggcttcatttgtgacactgagttatcattattaaaattttggaaattgcattgtatgctttagaagttttttcattaacatagttttaaggcaaaatgtggtcatttatctt

SEQ ID NO: 289603 - DNA, 620 bp, Homo sapiens
ggccttttgctttttaaccatttataggttagtatgggaattggacatatcaactcacggartctgccttactaaatgaaatttgtttgagctgtgccactcagatatagatactaatttcttgctatgcaatttcttaatgttattcattgctatgccatctggccttacagaatttcagtgcactggacctgaccatgttcttttagacctttcctaaccacccactttattctctatcacagtgtcatgtttatttttctcatgattagaataacactcacgtatttatttgtttaattgttaatcgactgtctatcccttaagacattaactccagcagggtggcaattatatcccttctttcacttgcagcctgagtgcctagcacagtgcctgatgctcaaagaccttgcatttcttactcttatcatagcattcttatgatgctcttatagttgtatgtgtcatgtggtaggacagttttctaagaccgtataataataagtaagtgtcctacgaaggacacttttactatgtcactcagattccctagcaaggacttatctaagtggcctggtgcctggggttagataaacaggaataatgatacaattaca

SEQ ID NO: 289604 - DNA, 1238 bp, Homo sapiens
ggccttttgctttttaaccatttataggttagtatgggaattggacatatcaactcacggagtctgccttactaaatgaaatttgtttgagctgtgccactcagatatagatactaatttcttgctatgcaatttcttaatgttattcattgctatgccatctggccttacagaatttcagtgcactggacctgaccatgttcttttagacctttcctaaccacccactttattctctatcacagtgtcatgtttattttyctcatgattagaataacactcacgtatttatttgtttaattgttaatcgactgtctatcccttaagacattaactccagcagggtggcaattatatcccttctttcacttgcagcctgagtgcctagcacagtgcctgatgctcaaagaccttgcatttcttactcttatcatagcattcttatgatgctcttatagttgtatgtgtcatgtggtaggacagttttctaagaccgtataataataagtaagtgtcctacgaaggacacttttactatgtcactcagattccctagcaaggacttatctaagtggcctggtgcctggggttagataaacaggaataatgatacaattacawatgtgtttagaagtatctgaaatagagtaagcattcaatgttagccaaaataaataaacaaatctgtaaattaaggaattttggaatgatattaaggtttatattttttctgttattatccatttaaaattttaaaaggtaaactgatttctttctaaaattatttcttttttwaaaaatttttatttgtatttcaaaggttttggggtacaggtggtttttggttacatgcgtaagttcttcagtggtgatttctgagaatttattgcacacgtcatctgagcagtgtacagtctacccaatgtgtagtcttttgtccttcaccgcctcttcccaacctccccacctgagtctccaaagtccattatatcattcttaggccttttcatcctcatagcttagctcccacttataagtgagaacacacaatatttggttttccattccggagtgaggctaaaattatttcttaataaaaagctaagagctaccttagtcaattatacagatatttttgaagttgagaagcataaccctgagaagaatggggaacattagcttctagtgtcttaggtacctaagttacaaaatatccaccgaaaagaagttttaaaaca

SEQ ID NO: 289605 - DNA, 547 bp, Homo sapiens
tgccttcagagcagatttgcaatcttttacaaggaaatttgactttttattttgtagttaaatctcattttggattcatgatggtattactcaattttatcattatctgatttgttggtcttaacactgaataattttgttttgtcttgttttttaaaagaatacaccctcaaagtatgaacacatggccctctgagggcaataaagagtgcaatgtaggctttggtgctgtttttgaagatggagttccaaaaatgttctgagcatatgacaccaacactggaatgtggggcagctttgcaaggttatcactgtgaggggaacaatacctgtttggatgtataaattctagtggttattatttttatagctaaaatttacagacttccccagggggtcttgctgattctttgtttttaagatatgtaaccggtttgaaatgaaaattcatttgaatgtgtaaattctatttgttaaaaagccacttctagcaatgccaatatayaatagattttgtctgtgctgcaccttgctattaagcatttat

SEQ ID NO: 289606 - DNA, 575 bp, Homo sapiens
taaaaacttgtaaattgctttccatcacaatgcattcctgaaaatggttctatatgtcagattaatattttcctaaaagaataatattgttgcaagtttgtgctcctaaccaatgactcaaaagcaaacaaatcagagattcagcaataaagcattgtaaaagaaaatttataacagccaagttctctgtaatagtctaaaataataaagttgaataccaaatcctataaaaatccataaatagactgatgtattgattataaagaagatrcgaatggactaaaaagcaaatttcctatatcaaataaagccttcgctgatatgtaaatttgattggaaactgatggctgaccatggtaagtgccgagtattcacttaattgtaatggtttaaaaattatatgggatttgggagaagataatttgcagggcccatatctctgaaactgtctagagaagtttaaacattatgcccttctttccttgatagaatatttcctttgcagatggatatgttaaaaaaatcatatcattgaccttggagccagcttctaatctactatagtaggtgtttgt

SEQ ID NO: 289607 - DNA, 1776 bp, Homo sapiens
ttaaaaacacttaatagcaaatcttcaaaaagtgtttcaaaatatctttcctagagcagatatgagacagttatgaaacagtattgtgattgagcttgcactttaccttgagtttgacaaatcactgaatgactatcgtgggtctgggatcacctaggggatgtggcggttaattasgaccttcagatgattgcattggaggtatgggtaatgataaaaatggcaaattgttgtatgagattggaatcactggctcagagtatcaactgacctatcagttgtgatgttctagctgctaccacctcagcttcatgggtagtttggtgaccttcctcttcttcacccctctagtgataacaagattgtaaagtgcatggtataaaaatataagagctgtacctagagatatgttacatagtgagttccatgtatttaagtatagacattatcttaaagagggaagcaaatattcatttttaatacttaattttaacagtatttaatacagtagatacatatctactacatacaaagcatgtgccaagctctgcaatgatgttatttaacatcatcaattccatcaaatggaattcactgccttgaattaaaataagaaatacagatwagatatgttacatagtgagttccatgtatttaagtatagacattatcttaaagagggaagcaaatattcatttttaatacttaatwttaacagtatttaatacagtagatacatatctactacatacaaagcatgtgccaagctctgcaatgatgttatttaacatcatcaattccatcaaatggaattcactgccttgaattaaaataagaaatacagatataaatgctatagttgcttagagaaagaaaaaattcactgtggactggaatggctgcagacaactacttagatgaaaagctggaacttggactgggacttcaaaccaacttttttgtcttggcacctgagataagaaaaggaggtacctgtttctagcaaaatgcttgctacatatgaagcactcaacaaatacctgttgattaattttgatatataatgtgtctggatattcaaatcttttgttcaaattctctgaaagtggcaaaacaatggaaaataggcataagtatctgtatatatgaggtaaaaactcagctttgccagcatcattctatcttaattattgaaaacatwagatatgttacatagtgagttccatgtatttaagtatagacattatcttaaagagggaagcaaatattcatttttaatacttaattttaacagtatttaatacagtagatacatatctactacatacaaagcatgtgccaagctctgcaatgatgttatttaacatcatcaattccatcaaatggaattcactgccttgaattaaaataagaaatacagatataaatgctatagttgcttagagaaagaaaaaattcactgtggwctggaatggctgcagacaactacttagatgaaaagctggaacttggactgggacttcaaaccaacttttttgtcttggcacctgagataagaaaaggaggtacctgtttctagcaaaatgcttgctacatatgaagcactcaacaaatacctgttgattaattttgatatataatgtgtctggatattcaaatcttttgttcaaattctctgaaagtggcaaaacaatggaaaataggcataagtatctgtatatatgaggtaaaaactcagctttgccagcatcattctatcttaattattgaaaacat

SEQ ID NO: 289608 - DNA, 510 bp, Homo sapiens
caaatactgcatgttctcacttataagtggcagctaaataataataacttatgaacatgaaggaaacaacagacactggggtctacttgagggggagagtacggggaggaagaagagtaggaaagataactattgggtactgggcttaatacctgggtgatgaaatattatgtataacaaacacccataactcgtgtttatctatgtaacaaatcttcatgtgtacccctaaatctaaaataaaagtttaaaagtracctttaattaaaaaaaagaaagaggtggccttagagccaggagcccaggacaaaagctgccccaagaggtgttccgctgttcttcagaacaagacaggacaaaaagactcaggctgacaagatgatcacctttggatgatttcgtttcattttacgcttgggcagctttcataagagcacagccacagataggattttcctctggtcctgaacactggttcttctccaacttccactaccttacaatttgaca

SEQ ID NO: 289609 - DNA, 510 bp, Homo sapiens
caaatactgcatgttctcacttataagtggcagctaaataataataacttatgaacatgaaggaaacaacagacactggggtctacttgagggggagagtacggggaggaagaagagtaggaaagataactattgggtactgggcttaatacctgggtgatgaaatattatgtataacaaacacccataactcgtgtttatctatgtaacaaatcttcatgtgtacccctaaatctaaaataaaagtttaaaagtgacctttaattaaaaaaaagaaagaggtggccttagagccaggagcccaggacaaaagctgccccaagaggtgttccgctgttcttcagaacaagacaggacaaaaagactcaggctgacaagatgatcacctttggatgatttcgtttcatttyacgcttgggcagctttcataagagcacagccacagataggattttcctctggtcctgaacactggttcttctccaacttccactaccttacaatttgaca

SEQ ID NO: 289610 - DNA, 510 bp, Homo sapiens
caaatactgcatgttctcacttataagtggcagctaaataataataacttatgaacatgaaggaaacaacagacactggggtctacttgagggggagagtacggggaggaagaagagtaggaaagataactattgggtactgggcttaatacctgggtgatgaaatattatgtataacaaacacccataactcgtgtttatctatgtaacaaatcttcatgtgtacccctaaatctaaaataaaagtttaaaagtgacctttaattaaaaaaaagaaagaggtggccttagagccaggagcccaggacaaaagctgccccaagaggtgttccgctgttcttcagaacaagacaggacaaaaagactcaggctgacaagatgatcacctttggatgatttcgtttcattttacgcttgggcagctttcataagagcacagccacagataggattttmctctggtcctgaacactggttcttctccaacttccactaccttacaatttgaca

SEQ ID NO: 289611 - DNA, 438 bp, Homo sapiens
gggctttgtctgactccttactattaataaacattatgtaaatgtgtaacacatttacttttcttttttctttgacccctaaatttttatggcattatatytatcaactcttagaaggaagtagcttttcaggtaatcgaaaggctgtttgttttgtctttttctttgtaggaaattcttcttttaatgatagccaggttaagttacaattttgtttctaaaagacagatcttaagagcagagttattactagcacaaaaaaatcaaataagaaaaaaagctcattcatatgtgtagtttttgtatctcggcctttttaaatttattttctgcatataaatatattttggtatcactgaagtatctcattttagtgtgttaatattttttctgttattggaatatatttattgaattatttgaatatatagcatgcat

SEQ ID NO: 289612 - DNA, 572 bp, Homo sapiens
aggttaccagtttgcactgctttttaatgcctgtctctctggaaagtggacccagaagcccctaatgatgaaaaccttctgtatttatttactagggctgccctaataaagtaccacaaactgggtgggttaaaacaatagaaatgtattgtctcacagtccagaggctagaagtctgagatyaaggtgttggcagggttgggttcttctgaggactatgagagataatctgttccaagccttcccccaagcttctggtggtttgttggcaagcattgtcattttgtggcttgtggacacatcatccccatctctgtcttcaggttcgcatggcattcttcctgtgtgtatatctttctccaaatttcacccgtttataaggaccccagtcatattggattcggggctcacgttactccagtatgactttatcttaataaattacttctgcaactacattatttctaaataaagtaaaattctgagattctaagagttaggacttcaacgtataacttttgggagtggcacaactcaactcatgataccacattatctactaggaattacag

SEQ ID NO: 289613 - DNA, 418 bp, Homo sapiens
gttccttttcctcccttgcttaaacaaattgctaatatttaacaatttctaaattttgttttcaaaagtggaaattgcactttttaatatttgtgctggtttgaattcacatcaagttttgcaaagcacagactaaaacacacatacgctattgccagttgggagcaaccaggaccaaaaaagcggggaactactgtttatttttcttccttgaaaatcacgtgatattgatgtgattccaagcaaatagtaygaacaatattctgaatctagctactgagttctgtattctattctggatttgttaagtttctgagtaaaggagtatttattttatcatctagaaaaatgctttaaattaggtttcatgctcaaaaagacagaaataattggctcagttctttacaaagagttaaat

SEQ ID NO: 289614 - DNA, 1194 bp, Homo sapiens
cctgcttaaaaatagcaaattgcttttctgcctttatactrgtcacagtttaactttcctagataactgaaagtcatttttttctgtgtgtcaattattgtatcatgctgaaatatagcactaacttgagggaccatgttggtgagatagggcttttgacctttagaaaatggtaccagaccactgtgcctttcatgttttcaggctatttatagcctttctcttattgttaaataatatcatttcttgttctcagattacctgtctaaagtctccccaccctcatccatcatgactattttattgcttaaaaaaattgagtggcctagaaaattagaacagaaaaatggtagaactgtaaaatactaataaatgggctctgagtggaagcctgtgtagctttctatgagtaaagttaaaaggttttataatatagttttgtgacatcgtttagtcttctaacaaagatgcatctttgttattctatcatcttggactgtgactgtcttcttagttctctcccatgctctgtagttgaaawtaaaaatagcaaattgcttttctgcctttatactagtcacagtttaactttcctagataactgaaagtcatttttttctgtgtgtcaattattgtatcatgctgaaatatagcactaacttgagggaccatgttggtgagatagggcttttgacctttagaaaatggtaccagaccactgtgcctttcatgttttcaggctatttatagcctttctcttattgttaaataatatcatttcttgttctcagattacctgtctaaagtctccccaccctcatccatcatgactattttattgcttaaaaaaattgagtggcctagaaaattagaacagaaaaatggtagaactgtaaaatactaataaatgggctctgagtggaagcctgtgtagctttctatgagtaaagttaaaaggttttataatatagttttgtgacatcgtttagtcttctaacaaagatgcatctttgttattctatcatcttggactgtgactgtcttcttagttctctcccatgctctgtagttgaaatgttagcacctcaatcatctctaaagtgggtttggtagtttctatggccacactttcacttacattgacttaagtgagctttttggttacawtttaaaagttattaagttatttcaatt

SEQ ID NO: 289615 - DNA, 544 bp, Homo sapiens
cctaaccaaaccaagatattcaaaagtgagaaagtctagattggatgaaaaaaatcaaataagtaaactataagcattttctgctcaaggaattttgataattgaatttatttaatatatatacatgagaaatttagatacttttttattagtgcaaatgaacaagatctatttctattaaaattatgttcttagttgttctctatcatgagccctttggaacagaaacagagatataaaaatatgtaaatttgttataaaatctttaaaaaatcagagcatagactcttttaaatatagaattaatgttaaaaatgaagacaatgctgaaagcatatttactgcatagaaattaagatsacaaattccataaacatgaaataaatgaatcattccaaaattaggaacaaaattctccacagcattgtaattagctgacctaatatttgcacagggaaaaaaatttggtctcattttagccataagtatttgctgccttagcaactaaatccattcatttagtgattcaaggtttagctcaact

SEQ ID NO: 289616 - DNA, 524 bp, Homo sapiens
gtctcgaactcctgacctcagttgatccacctgtcttggcctcccaaagtgctgggattacaggtgtgaaccactgcgcccgatcagaactgtatttcgctgtttgaaataattagtaaaagctaaggtgtaaattgtgttagatgatgttgacctattcttaattgatgttaaatcatacaacagtcatgctgagtgtctgtcagcaagtaacatcagaaaggagtttatttgaattaatctaagaaattaaatgtaatgataaattatgtcagagtaaagtctataggactgagagtttgagttacattgttagctcakaaatagcaaacaaatcgtcacctgataacttttctggtatgaaaattctctttttcaattggcaaaggggtgacattttataaaataaatgttatctttgatattcccaatacagattttaagaacaccttgcttcattaaattcacaagagaatctggtgttagaaaatctgtgataatgtgtagccagatgaagacacatc

SEQ ID NO: 289617 - DNA, 629 bp, Homo sapiens
ttcattctctctcttgggtgacccactaatggtacttacctcatggcattttgtaagaattaaatgatataaaacatgcaaagtgattagaatatgtgcttgacatatatcaaaggaccagtgattgttagctaactttattgtcctcattgatattctgggattgttatatacttttacttatragtattctagtaatcagtgatatatatatatatatatcacacatatatccatatatatatatcacacatatatatatatatggagagagagagagagagagagagagtcttgctgtatcacccaggctggtgtgcagtcatgctatcaaagcccactgaagcctccatctcttgggttcaaatgatcctcataccttctgactagctgggactacaggtgcacaccaccacccttggctaatttatttatttattacttatttatttatttttttactttttgtagagacagggtctcactatgatgccagggcttgtctcaaactgttgggattacaagcatgagccaccacaccagccaacaagctttgatattactagacactctttatgtgggagggaagaggaaacttcctaaacataaaagaaaaaaaatcactcagc

SEQ ID NO: 289618 - DNA, 588 bp, Homo sapiens
tggcagcacatctggaaactgggtggcaaggtcagattgaagtcatggaacattccagggaggtcaaacattctaaatagaagcagcttaactcagaatgttcttcagtaagtgatgattgttttggcttctgcagtagcctcattgatgatctgccattaagaagctttcaacaagcaaatttttcaaaaacttgaccttctgaaaggagggtaagaatttcattaactgtaagcattagaccatgagcacattatgctttaaattcagaatgtttctcagaaagtctcacatcatcattattctttggttttagcatgactttgtccaatatagtagccattagccacatgtgactattgagcacttgaaatgaatgtaactagtgagactgaggaactgaatttttaatttttaaaaaattttactttattcaattaaaaaattgaatataacmtatatcattcatatttttatattgatcatatgttaaaatagttgtattttgaatatattgagttaaataatgtgcattactattaataattttacctgttctttacacatttttgttaatgtgaccaccac

SEQ ID NO: 289619 - DNA, 650 bp, Homo sapiens
gcacttgaaatgaatgtaactagtgagactgaggaactgaatttttaatttttaaaaaattttactttattcaattaaaaaattgaatataacatatatcattcatatttttatattgatcatatgttaaaatagttgtattttgaatatattgagttaaataatrtgcattactattaataattttacctgttctttacacatttttgttaatgtgaccaccacaaaatttaaaattacatatgtggcttgtattatatttctattaggccagttctgccttttacttgttggagactcaaaggtgtctaatttacttagatacataatctgtcttccttttttcacctctagagtgatggtatataattgttttcattaattgatttaatagctggtttcagaagaaatgactctgattcttccatccaatcatctaattacttgagaatatcttgctttttctgagaacaaattcactattatcagatagtcgaggtcactattataatgctctgttatttctttttcccttagccccctttaattctcaaggctaacccatgcaacagtcataggcatgtcattaaaaaatatttttgttcatagttttgattcaataatacctccaggatgtcttaattatatct

SEQ ID NO: 289620 - DNA, 542 bp, Homo sapiens
catatttttatattgatcatatgttaaaatagttgtattttgaatatattgagttaaataatgtgcattactattaataattttacctgttctttacacatttttgttaatgtgaccaccacaaaatttaaaattacatatgtggcttgtattatatttctattaggccagttctgccttttacttgttggagactcaaaggtgtctaatttacttagatacataatctgtcttccttttttcacctctagagtgatgktatataattgttttcattaattgatttaatagctggtttcagaagaaatgactctgattcttccatccaatcatctaattacttgagaatatcttgctttttctgagaacaaattcactattatcagatagtcgaggtcactattataatgctctgttatttctttttcccttagccccctttaattctcaaggctaacccatgcaacagtcataggcatgtcattaaaaaatatttttgttcatagttttgattcaataatacctccaggatgtcttaatta

SEQ ID NO: 289621 - DNA, 616 bp, Homo sapiens
tgcattactattaataattttacctgttctttacacatttttgttaatgtgaccaccacaaaatttaaaattacatatgtggcttgtattatatttctattaggccagttctgccttttacttgttggagactcaaaggtgtctaatttacttagatacataatctgtcttccttttttcacctctagagtgatggtatataattgttttcattaattgatttaatagctggtttcagaagaaatgactctgattcttccatccaatcatctaattacttgagaatatcttgctttttctgagaacaaattcactattatcagatagtcgaggtcactattataatgctctgttatttctttttcccttagccccctttaattctcaaggctaacccatgcaacagtcataggcatgtcattaaaaaatatttttgttcatagttttgattcaataatacctccaggatgtcttaattatatctgctttagtccagctagtacattgcttcctccggatttctgatattcttgaccttaaacttcttgtctcatytcacatgctcttgttgatcttgatctaaattacttcccatgtcttttctcagaattctgct

SEQ ID NO: 289622 - DNA, 430 bp, Homo sapiens
tcccatgtcttttctcagaattctgctttctaagtaatatcctctcaattccacaccttgattgttggaacccagaatggtgcaaagctggatgcaaaggctattgtaggtgctggatacagctccataggaagacatggcttctgaccttatgtgacccacagtctagtgggggaaacacaaagtaaacatgtgtgtttcttttccaggatgctagaacctgcctttcctgtaagctcagagaggagaagtagctgggcatttatttctccctgggaacagcccttggctaataactgatacattaaggaatagaaatactccatcccctaatcaggacacctctaagctgagaacaacayggaatgcaaactgcctctggattattgagcctaagatacattctgctgggctatgcttgctatcacag

SEQ ID NO: 289623 - DNA, 540 bp, Homo sapiens
agtaattggtttttactggaaatgagtgtgtgtgtgcgtatgtgtgtgtgtatgtgtgtartagaatagtagcagcagaattgggccatctgcttgacaaattagaccttttaactgcatagagctttgttaggaaagatgattgaaagacaacctggctgaagaattatatggcaaagacccagagacatgagcatttagaggaaatctggcctttgtgtcagaatcatcagtgtgtttgatcaggtatagcagttgcacatgtggctagaaaagttggttggaatttagataagtacctgtcatctgctagattccagaggaaggcatgcactatggggtcaaacactgagctgcaaatattctttaaagtgtggaatcctcacaagtgagaatccactgtatttctaaatacaatagtgttttggaattttgttgctttgacctagtaatgttagctgagaagatttagttaaacatccaggaaaacacgctgcctccaaagtttagctttgaactgagaaaaggaattattcactg

SEQ ID NO: 289624 - DNA, 492 bp, Homo sapiens
actactgacattctggagagaaacattctttgtgtcgggggatgggggctgttctgtgcatttcaaaagcttctttggattctttccactagatgtcaatagcatccctcccaccactgtggcaatccacaacatctccaaacatcacaaatatcccacggggagaaaatttttccggatttagaaccactgtactaagggaaaattaaaactagaaatttgtaaytggtcagcattatatactgaatgtatgaagtataagtagtctacatagtgaaaaaataataggacaaatattcgtaaaactaacttaaagtgatgtgtataaacacaaagcatacattgaccttttggaaaacttttcatgggtgaaagggagtggtaaaaataaacctctaccgttatgacccttctgaagcaactgtgtttggaagaaaaaatgaaatgtgagaatggtagaaacttttttctacactggttcttactttgacc

SEQ ID NO: 289625 - DNA, 492 bp, Homo sapiens
actactgacattctggagagaaacattctttgtgtcgggggatgggggctgttctgtgcatttcaaaagcttctttggattctttccactagatgtcaatagcatccctcccaccactgtggcaatccacaacatctccaaacatcacaaatatcccacggggagaaaatttttccggatttagaaccactgtactaagggaaaattaaaactagaaatttgtaactggtcagcattatatactgaatgyatgaagtataagtagtctacatagtgaaaaaataataggacaaatattcgtaaaactaacttaaagtgatgtgtataaacacaaagcatacattgaccttttggaaaacttttcatgggtgaaagggagtggtaaaaataaacctctaccgttatgacccttctgaagcaactgtgtttggaagaaaaaatgaaatgtgagaatggtagaaacttttttctacactggttcttactttgacc

SEQ ID NO: 289626 - DNA, 634 bp, Homo sapiens
ttaattacaatactgcgacttcttatctgcagtttgcttatcttatacttgatcgcttttcagccttttggctaagagcaagtgtagtattttatacttgaatggatacaaagggtagtaatctcctcctcactgataactattatgcctttgtaattctaaatattgtttctgaaataagagcctcattttttctgcatgtaggaaagacatgttaacaatgaaaaatttactttaaaaggttggtaaccaaagtataaagtggcatattttataatttttccatttctcgaagaatcaaggtagtatctttgagtgttgttgattcacgcgttgtgaaatttttaattagttgtgttacaaaggaatattctggcacttccaaggcttgagcataaaacatcttagagattctacttggttttctgsaaaaacctattcttagaacccttagccactttgtaagaagagtgaataccctgttgaagaggccacacagaaaggccttgcgaatacctggagagggaggggaacccagctgagactgattatctagctgtcccatccaagacatgaggcatgtgattaaacctgtcttggaccttccagttaagtccagttggtgtgtggagca

SEQ ID NO: 289627 - DNA, 634 bp, Homo sapiens
ttaattacaatactgcgacttcttatctgcagtttgcttatcttatacttgatcgcttttcagccttttggctaagagcaagtgtagtattttatacttgaatggatacaaagggtagtaatctcctcctcactgataactattatgcctttgtaattctaaatattgtttctgaaataagagcctcattttttctgcatgtaggaaagacatgttaacaatgaaaaatttactttaaaaggttggtaaccaaagtataaagtggcatattttataatttttccatttctcgaagaatcaaggtagtatctttgagtgttgttgattcacgcgttgtgaaatttttaattagttgtgttacaaaggaatattctggcacttccaaggcttgagcataaaacatcttagagattctacttggttttctgcaaaaacctattcttagaacccttrgccactttgtaagaagagtgaataccctgttgaagaggccacacagaaaggccttgcgaatacctggagagggaggggaacccagctgagactgattatctagctgtcccatccaagacatgaggcatgtgattaaacctgtcttggaccttccagttaagtccagttggtgtgtggagca

SEQ ID NO: 289628 - DNA, 1197 bp, Homo sapiens
tattgtgagttgttaaagaaaaggctgagatatagtcaccaagtgtttaccaataacataaattattgcaaagcttgaaaaaaaatcaggccaaatatacacgacagtttgaatggaatgctgaggacttagtgaatgctgaaatatgactcatctaaaagtctgctactccggcctgatgctcctcaaattttaatgaccccttaaatgtcctcagatgcacatgcagtttacgtcactgaccactgttggtcaaaacaatcattggatgtgcttatttttcaaattttgagtatcaagttgtgccctaccgtgacacaaagcttagaggtctttcttgcaaactgtaaaatcatgtagaaaaatagtaactcaaaaataccacatttgacagtcggtcacgaaagrtgttagcacctcaataaaaattagaattgttcattgggtgtgccaaaggaaagtggaaaaaaattaaaaagcatgccctgttttttatttgttttttttttttttcctacaaatcacagttttcctcacagtgttagacttttaggtcactctgatgtagcagtawagaggcaagctgatgtcatcagaggtgactctgcctatttcaagtcctataatcaccccatgggattcaacagcagtaggaaaacatcacattctcttaatggacaccccatatttgtagaaacagttatgactattagcatttgttatacaaacccaatctatttgtgctcatctgtagaatcctacagacactagagactaaatgatattaattttaggaggtgtttctaaaggagaaacagacaacatttggttttattatcgtttgtatccctcagaagttgtgtgtagacaactttcatctaatacatcaatatcgacttgtccaagtttctcgatgaagtgaaaggatctgattattggctgtgtcttagcgtctgtaggaagcttctaggctatttgtgtacccaaatttaaaacttgcaccttgtttcattgaataagtgtttttcttatttgtgacttggaaaaawtagtgttaatgtgatgtaaaagacctattatcataggcacaagtaatgaacactattggtcatgacagattaaaatttccttggaaagaaaaatgatagtatcagaataagaatacatgaggaatatatacatatacacctgcttcac

SEQ ID NO: 289629 - DNA, 1248 bp, Homo sapiens
agaggcaagctgatgtcatcagaggtgactctgcctatttcaagtcctataatcaccccatgggattcaacagcagtaggaaaacatcacattctcttaatggacaccccatatttgtagaaacagttatgactattagcatttgttatacaaacccaatctatttgtgctcatctgtagaatcctacagacactagagactaaatgatattaattttaggaggtgtttctaaaggagaaacagacaacatttggttttattatcgtttgtatccctcagaagttgtgtgtagacaactttcatctaatacatcaatatcgacttgtccaagtttctcgatgaagtgaaaggatctgattattggctgtgtcttagcgtctgtaggaagcttctaggctatttgtgtacccaaatttaaaacttgcaccttgtttcattgaataagtgtttttcttatttgtgacttggaaaaattagtgttaatgtgatgtaaaaracctattatcataggcacaagtaatgaacactattggtcatgacagattaaaatttccttggaaagaaaaatgatagtatcagaataagaatacatgaggaatatatacatatacacctgcttcacwaactaggtttgctttctgcccttggcattgggtgatctccatcacatataggttatcagccttgtacaggcctcatttctcaaagtgataatttattaagaaaaaaaatttctacgtcgaaagcaaagtcagtctatgaaaattcaaaggataattattggttttgtaaaacaattatttgttttaaaagcaatttcttaagaaaatactgaaaacagcaagacatctattttcctggcccactgaaatgatgtaatatagtgatcagttacataattcttttatattaaaaacatcttataataaaaataaactctcatgagcttgtagaactcaaacagtggttccctaagatcttcacatgcaaatctttaacaataggcacatttggcaggattactatgaatttttataaagaaaaattggctttgcagtgtttcacaacaaaagaaatcccaawgaaatcaaacaacttagattttctaagttgtgaggttggtgatgggggggtgtacattttatcatctaaaaagatatctttaggtgtgtgcttataaaataatttccatgtctaactattcaaacttacaacctacttaaacaggctatggaaacaaaaacaac

SEQ ID NO: 289630 - DNA, 609 bp, Homo sapiens
tgagttttttgaatcgtgggattcaacccccaccaatctcatccattatattctccaacctcaatataaaccccagcacttacattcatgtaaagtttgactttgaattatacctactgtttcccttttaaaaaacttaatgytcccacggttgcttagaggatctatgtcattgattgacacaaccagaaaagattgaattgcttttctaatgccgcatgatttgcaagcagtggagctcaagccaaacctaggtctcatcaatctaactccatcaattacatttacacattctgaaaaaatatatatattagctctaacaaatgtcctctgctttgcttactcgtatctcgaaaaagtggcttgaaattcaggtgaagtataaaatctgctctcaaaattctacagcaaaataataaaattacttacactaacatctggggtttttaaaactatagttctgaatttgaccaacaacaaggatctttgtgctttaggttagaaatggaaaatattattgactgtcacccaggatctaccattgacaggtcattcattgaagagcctatttggcatattatccacccattcacctagattctcaaagtc

SEQ ID NO: 289631 - DNA, 1276 bp, Homo sapiens
tatacagtatcttttctatagacccaaataatagaaaagatcagagaacacattttaaggcattctccttgtaagcacgagaaacatcttaatacctagagagtttcaggactctctaaaaatgccaactctagatcataaaaaatgtattacaatagaggaaacaaactttacagattcatgtaaagcttctgttgactcgagtgagcggtaaactctcatggacatttcaaaaaaaactatagatgttcataaagctcttcatgttgtgggataacactgactatattgatgcatgatccagcctgagataattggttttataacatgkaagaatgagctaagattgtccattgcagcccaagaagaaatatgcaacctttttttgacgatcttccctgaataaataaattcagacaaaaataatagaaagttgtacaagaaaccagagaatgagtggactattgctgcagatattctcctaggatggagtcaaatggaataaaagttgtaaaaacataaacatggtttcataggcactttgtattagtccgttttcacactgctataaagatactactccagactgggtaatttataaataaaggagatttaattgactcagagttctgcatggctagggaggtctcaggaaacttccaatcatggtggagggtgaaggggaagcawttcaggactctctaaaaatgccaactctagatcataaaaaatgtattacaatagaggaaacaaactttacagattcatgtaaagcttctgttgactcgagtgagcggtaaactctcatggacatttcaaaaaaaactatagatgttcataaagctcttcatgttgtgggataacactgactatattgatgcatgatccagcctgagataattggttttataacatgtaagaatgagctaagattgtccattgcagcccaagaagaaatatgcaacctttttttgacgatcttccctgaataaawaaattcagacaaaaataatagaaagttgtacaagaaaccagagaatgagtggactattgctgcagatattctcctaggatggagtcaaatggaataaaagttgtaaaaacataaacatggtttcataggcactttgtattagtccgttttcacactgctataaagatactactccagactgggtaatttataaataaaggagatttaattgactcagagttctgcatggctagggaggtctcaggaaacttccaatcatggtggagggtgaaggggaagcaa

SEQ ID NO: 289632 - DNA, 586 bp, Homo sapiens
ttcaggactctctaaaaatgccaactctagatcataaaaaatgtattacaatagaggaaacaaactttacagattcatgtaaagcttctgttgactcgagtgagcggtaaactctcatggacatttcaaaaaaaactatagatgttcataaagctcttcatgttgtgggataacactgactatattgatgcatgatccagcctgagataattggttttataacatgtaagaatgagctaagattgtccattgcagcccaagaagaaatatgcaacctttttttgacgatcttccctgaataaataaattcagacaaaaataatagaaagttgtacaagaaaccagagaatgagtggactattgctgcagatattctcctaggatggagtcaaatggaataaaagytgtaaaaacataaacatggtttcataggcactttgtattagtccgttttcacactgctataaagatactactccagactgggtaatttataaataaaggagatttaattgactcagagttctgcatggctagggaggtctcaggaaacttccaatcatggtggagggtgaaggggaagcaa

SEQ ID NO: 289633 - DNA, 645 bp, Homo sapiens
cttgcctttattgtaaacaaaatgtattcaatcgtaaatcagttatcttcactctaattagttctctttcaccttctatttctgtagaggcatggccattcttcattaactccttttttttttttagtgttttttgtttcctatctcttcctctcactcatgatttataactgaatgctccaataaatctattattatagttacaaattatccagcacatgccaacctttcyctgatactaactaattaggtgaaatatcatcttgtctaggtattgtgagcaacaccgccaacatcatcttcctgagcttttgcctactgcttccatctggccccttttgctcctcatcttccttaaaaacatcatgtgaactctcaagctgtttcctcactctggattctccacatccatgaaagttcatcctatataactctatgacttaaacaccttgtcctcttcaagccagctttactgtaccatacgcatttctcttcccactcctttgctagagttcccagctcaatatgtcttcatggctttctcaacttatcctataatcttaactgtcttctaaaagcttgttccagtctcatgtttgtgaggatttgcacaatttctcctaatagtgcctccagtgaaacaca

SEQ ID NO: 289634 - DNA, 1123 bp, Homo sapiens
ggtgtaaatagaaattgacaccttgatgcttatctctcactttaaaatgcagacaacttgttctttttttcagacagtccctctgttcatagaggacaataatgtgtttaataggtcaaactgttaattgttccaataattttatgtcaaatgttttgagttttgttctgttatctctagaaataaaaattagcttacatatgtaaattagaacatgttgagattaatgtttatataagcccatatgtattctataaaaataaaacccaaaatatggggagtagggattaggatagcatgtgttattttgggtgcccattcaaatcaaggagcaaaaattggattatgaaactcactacaagaaccccatattacatgtcacttttactagtgccttgtacaaatttactcctrtggtcttgtttctacattcaaatgtttttccaattcacattttgcttataaatatacatatatgtcctatgtatatatttgcatattaccacaaatgcctgatgagtgctaatctttaaataaaagagaaaaagtaagtggattaaawggtgtaaatagaaattgacaccttgatgcttatctctcactttaaaatgcagacaacttgttctttttttcagacagtccctctgttcatagaggacaataatgtgtttaataggtcaaactgttaattgttccaataattttatgtcaaatgttttgagttttgttctgttatctctagaaataaaaattagcttacatatgtaaattagaacatgttgagattaatgtttatataagcccatatgtattctataaaaataaaacccaaaatatggggagtagggattaggatagcatgtgttattttgggtgcccattcaaatcaaggagcaaaaattggattatgaaactcactacaagaaccccatattacatgtcacttttactagtgccttgtacaaatttactcctgtggtcttgtttctacattcaaatgtttttccaattcacattttgcttataaatatacatatatgtcctatgtatatatttgcatattaccacaaatgcctgatgagtgctaatctttaaawaaaagagaaaaagtaagtggattaaa

SEQ ID NO: 289635 - DNA, 555 bp, Homo sapiens
caggtgcacaacagattggagtcattatgcaaaagaacagaaatctggatagaaacccagagaataaaaaagccatgttcccggccatccttttgcctttaactcactgttttttcaaccctacttgtatctgcaacatgaaatatgaaacaattataatggatttgtagtaacccattcaagatcagaaatgtatgcttttaaacaaacctccaataagaataccctgcaggtagaaacacactaaaggtcaaacttacgttaacatatttttaaaagctaaagtttatgtagagaagttgatagactgaaayacattacatatgtctttaaagatacagattttctgctgtttttgtccctttttgccccaatttaagggaatcacatctaccttcactcatcttcattcagcctctgggccacctctccttgagatggagattatgagtgtccaaaatctccatctcaaatctccatctcaaagccactctgaggctgtaactgttgtcaccatatattatcttctgagcccttttctaagcaagaggttga

SEQ ID NO: 289636 - DNA, 355 bp, Homo sapiens
gcttgcagctgctgttgagtgaaagcacgcagactggcgggagccgatcatttctcgaatgaagaagaaaaagcgcaattccctccttatgctctagggaattgagccgcgtcccagatcacccattccagaaatgtgaaaccgggccctcacaaagtcgtctctggkgaagaggtggcgtgcggggtgggggttggtggagggtgaaggcataagcaaacatattttaaaatccagatcgtaagaagtgtcacctggcccctcacccaggcatgctttctgggggaagcgcagggccaagctttccctagaaaagctggggcgaagagagagcaggcggcggctaaggagctcc

SEQ ID NO: 289637 - DNA, 551 bp, Homo sapiens
tgccgccctcagcctctgcgagggcgtgcgcggcgccttctacctgctgggggaggcgtatttcatccagccgctgcccgccgccagcgagcgcctcgccaccgccgccccaggggagaagccgccggcaccactacagttccacctcctgcggcggaatcggcagggcgacgtaggcggcacgtgcggggtsgtggacgacgagccccggccgactgggaaagcggagaccgaagacgaggacgaagggactgagggcgaggacgaagggcctcagtggtcgccgcaggacccggcactgcaaggcgtaggacagcccacaggtagaagaattgctctcgtttgtctgtccattcatcctcctctcctcactttatctatcccacgcgacttcagggtagactcctgctggcaggcaggagcataagtccgcggacagaacggaggcctggagtggaggaatgtggtttgaggtttggattggtgaactcagctagaaaacatacttgcatttgcccgaataatgaataaccaagaaaaaaactgacaaa

SEQ ID NO: 289638 - DNA, 561 bp, Homo sapiens
tccttccacctttagggagttggagcttgtgcgagttctttccactctgtgtatttctttttaatgattttgtgtgcgccttttgtgcgggttgcaacgttgcgctgagttttgtaaccgctgcctgtgcgtgcatcctgcgctcacgggagggcggatgtggagagggcagaggagcaatggtgacctrggaaggcaccctgagcggctacgctagtatctctgttctgcagacttctgtcccctttcccccttataaggctgacccgggcgggctgaaggcggtggggccccttcgcagaacctgcttgggaggtctttcccgggtttgccccgcctcccagtttgcactccctctcgcggccataattctgctctcaagcactgttgaaagtcactgccggtccttcctgctacgccttctctcttgtgtgcagtgcttattctccagttctttttgtttcatcactttggtgcctttttccttctttaactctctcgcgtgtcattttttaaagaattctccccttttcccctgctcctctgctcctgggagcaaag

SEQ ID NO: 289639 - DNA, 561 bp, Homo sapiens
tccttccacctttagggagttggagcttgtgcgagttctttccactctgtgtatttctttttaatgattttgtgtgcgccttttgtgcgggttgcaacgttgcgctgagttttgtaaccgctgcctgtgcgtgcatcctgcgctcacgggagggcggatgtggagagggcagaggagcaatggtgacctaggaaggyaccctgagcggctacgctagtatctctgttctgcagacttctgtcccctttcccccttataaggctgacccgggcgggctgaaggcggtggggccccttcgcagaacctgcttgggaggtctttcccgggtttgccccgcctcccagtttgcactccctctcgcggccataattctgctctcaagcactgttgaaagtcactgccggtccttcctgctacgccttctctcttgtgtgcagtgcttattctccagttctttttgtttcatcactttggtgcctttttccttctttaactctctcgcgtgtcattttttaaagaattctccccttttcccctgctcctctgctcctgggagcaaag

SEQ ID NO: 289640 - DNA, 561 bp, Homo sapiens
tccttccacctttagggagttggagcttgtgcgagttctttccactctgtgtatttctttttaatgattttgtgtgcgccttttgtgcgggttgcaacgttgcgctgagttttgtaaccgctgcctgtgcgtgcatcctgcgctcacgggagggcggatgtggagagggcagaggagcaatggtgacctaggaaggcaccctgagcggctacgctagkatctctgttctgcagacttctgtcccctttcccccttataaggctgacccgggcgggctgaaggcggtggggccccttcgcagaacctgcttgggaggtctttcccgggtttgccccgcctcccagtttgcactccctctcgcggccataattctgctctcaagcactgttgaaagtcactgccggtccttcctgctacgccttctctcttgtgtgcagtgcttattctccagttctttttgtttcatcactttggtgcctttttccttctttaactctctcgcgtgtcattttttaaagaattctccccttttcccctgctcctctgctcctgggagcaaag

SEQ ID NO: 289641 - DNA, 561 bp, Homo sapiens
tccttccacctttagggagttggagcttgtgcgagttctttccactctgtgtatttctttttaatgattttgtgtgcgccttttgtgcgggttgcaacgttgcgctgagttttgtaaccgctgcctgtgcgtgcatcctgcgctcacgggagggcggatgtggagagggcagaggagcaatggtgacctaggaaggcaccctgagcggctacgctagtatctctgttctgcagacttctgtcccctttcccccttataaggctgacccrggcgggctgaaggcggtggggccccttcgcagaacctgcttgggaggtctttcccgggtttgccccgcctcccagtttgcactccctctcgcggccataattctgctctcaagcactgttgaaagtcactgccggtccttcctgctacgccttctctcttgtgtgcagtgcttattctccagttctttttgtttcatcactttggtgcctttttccttctttaactctctcgcgtgtcattttttaaagaattctccccttttcccctgctcctctgctcctgggagcaaag

SEQ ID NO: 289642 - DNA, 577 bp, Homo sapiens
taatacttcgcttttttttttttcttactcacctttgcagtaggtaactcttcttagtgccctactaatggtgaaaaaaaaaattgtgagttctcgccttggaagggtttgttatactttggaatttagtgtagttagttccttatgactgcagctttatgaacagttcaagaaaagttatgattttgttgatcatccagattcttctaacagtgttctctgacagttttatacatcctaagcaaaagctaaactcctttgaattagttcttccacataaattttaaacttgctattctgagttccctctaaaaaatattctgttaatatttttattgtgatcatgttaagtgtataagttatggagaactaatatttttataatgttgagttttccatggactcagccttccacagtaaggtatgacatcatttgatcaaatcattctgcatyccacacgagttgtttattttaactttattatttttcagcaaatctttaatatattttttcatgctcctttttaagattttaataattttttatagttgtgaagggagcttttcttacattatg

SEQ ID NO: 289643 - DNA, 662 bp, Homo sapiens
gagccccccacctaaaaaaaaaatcttaccttgataattaactcatmaggtaaatagaggcagagctgtagtctctatctgacaccatttctacccacggcattaaattatttgaagtcaaaatgacacaggttaaaaatgaacaattatgaaaacttactcttttcatataccatttgaaactagaacacttctttttttctgctaattctttcaaaaaagctgctagattttgaaggtaactaatcaactgatgccaatacagacttctggaagatggatattgattgacattgattctggataggcagtcaaaaagtgctttccttcttgtgttatatgcatgtaaatgttggctaaattgttaagacatttcagaaagtcacttcaaactatcaaaaacacagtccccatccatgttccttgagtggagacaggaatgtgtttacagccactttacaatccaaatgtgaactgcagaaagttttcaagttagtgtaagtttacattttgagtttatattttaacttgtcaaacttttattattgacttgtaataataaagatttcacctgctgcacatatggtccttaaaaacaataattttattgatgttgggccagcttctaatacactaggaggaacaatctgattttatttaga

SEQ ID NO: 289644 - DNA, 556 bp, Homo sapiens
gtactggaattatttttattaaaatatctcacattatatatcctcttttttaacaactatctttacatttccagatcattttgaaaccatattctctgcagtttatattttgctataggtgtaactggtttcaataatactagaaatcttgtattttaatttctgttgatctctaggtagaacacagcacacatataagttgcacaaaatatctccccacccaaaacaaaaacaaaaacaaaaaaacagaagaacaatacagatctttggagtcatccatgatggttttttcttttcccttcacatctacaaatctgcacatctcattgtcttgagctgtagaagttgacctcttttatttcttctatagctatcaccctagctcagcccaccattgctgtttattgcaattatggcaatggtcttctattgggtcctcttctacaatggcttccarttaaaatgttaggtaagcatgtctctcctgtgctcagttcctttcgctccccatcttactctgagcaaaatgcaaacatactgcctactttagtggaac

SEQ ID NO: 289645 - DNA, 482 bp, Homo sapiens
aaggcaatatggctgctagaaggggctgtaaagaaaaattcaggtttctgaattatggagacaagaacacattgaacaaaggccatataaagaatttccaagactgtttgtgaccagatggagacaagtggggtgagtgggcattgcgtatggttctgaattcctctgtgacttgctgtgttcatgagttactatattttatgttctgctgttcctatgagaaagcataatttacttygttgagaaaacacgtagatgaaccaaaacatcttccatctttaatgacatcactcactttctgccaatgtcatatgagttcacccatgtcacagaaatatgtgcatggcagaacagactacatttccctactatgatatctttgcttaatttccttgatagtcccagcacacgcaatcttaatattaataagtatttttttcttttgggaaatcaatgaggttagaaaattatggctgctgtat

SEQ ID NO: 289646 - DNA, 402 bp, Homo sapiens
aacaaaattgttctctcattattttgagaaaatagtaacatcacaggctatttttctgtggctagataaacattcttttaatcactagcttaggatacaaatacaaagatgtatgaattaagtcaatgaacttaagcatcatttatttctcatgcatgaagacaaacacttgtttagttttactttctaccttaactggttataagacagcctccttctgaatagaaatgatctttttttcccaatagtaaccaggaatagcacattttaagaccctttragggacaaaaaaaaaaaaaaagcataattgttcaacaatggtggcaattattatctttctattataaacttataaataatgccatatattttgcaatgtttccaagtaaacctccttaattt

SEQ ID NO: 289647 - DNA, 572 bp, Homo sapiens
caacctctttttttctttttaaatacaaacaaacaaacacaaaaccagattaaaaatacaaatgaagcactgtgcttaatgtttgcatcactgtgtaaattttaaacattaaaataacattcatttaagcatttttaattatttaaaattatcaggctgggcacagtggctcacacttgtaatcccagcactttgggaggtcgaggcaggtggatcayctgaggtcaggagtttgagacaagcctggccaacctggtgaaaagccatctctaccaaaaacacaaaattagctgggcatggtagcacacacctataatcccagctactcaggaggctgaggcaggagaattgcttgaacccaggaggcagaggttgcagtgagcagagatcatgccattgcacttcagcctgggtgaccagagcaaagctccatctcaaaaacaaacagataaataaataaacaaataataaaatcatcacatagggaataaaaatgagatattttcatcatataacccagaattgaccaatgatcgtgcgataagtgcatgtcaaaaacaatatgcatattc

SEQ ID NO: 289648 - DNA, 476 bp, Homo sapiens
aagatggagtttgattaaatcctacgaaattagaagtgcttgagaaacactttggacttcccaaagattctttgcaacaaacattagtaaagcctacataaacaaggactatttgatcctcaagtaattaaactcctcaccagaagaaaataaatgcacttcagaggaagttaacagaatatggagtctttacagtgtctcctcaaaaacattccataaaaaatagttttaaaaattagatatacaaagaaactctggactgtgtgattagtagtcrgtaaaacatgcattcaatagatatcaaatcagcgataacctgtgtgtgaaatacagcgacaaaatatttaaagtagatattatttagttcaaagaagtaagataggttttataactattttcaaactagtgaaacaaaagtagacaaaaataaggggatgataagtgcacatagatggagtttcattagagaaatgaga

SEQ ID NO: 289649 - DNA, 557 bp, Homo sapiens
ttaaaatagatcatagatttataggtrgcagcagctctgaagaaatatatttctcagatgttggctgaattataggaaataatccttgagtgaagtgaaaaattctataagccacttacttattcacataacccaaataaaaatatttaactcattgtgtttgattccaaaactgttgagatcactagtttttatgccctagttgcctcatttcaaaatgaaatataatagcctacagactctttgttatttaatgtttttgttattccattattagaggtaactgaaagttgaatagaatttagaactgagtgttaatggtcagtaggtaatgtttagattttgctgacttaattatttcattcaaaacatgttcacacattgtgcaaatacattcttatgtgaaaagcgtttgtgcagtctactgaatacatgatagtagcagatatatataatacctacgatgttagtaataacagcatttgtgagctggtaagtagcactttcaggacatgaaacacaaagcaatgaagcaacgcttcattcatatccttcta

SEQ ID NO: 289650 - DNA, 557 bp, Homo sapiens
ttaaaatagatcatagatttataggtagcagcagctctgaagaaatatatttctcagatgttggctgaattataggaaataatccttgagtgaagtgaaaaattctataagccacttacttattcacataacccaaataaaaatatttaactcattgtgtttgattccaaaactgttgagatcactagtttttatgccctagttgcctcatttcaaaatgaaatataatagcctayagactctttgttatttaatgtttttgttattccattattagaggtaactgaaagttgaatagaatttagaactgagtgttaatggtcagtaggtaatgtttagattttgctgacttaattatttcattcaaaacatgttcacacattgtgcaaatacattcttatgtgaaaagcgtttgtgcagtctactgaatacatgatagtagcagatatatataatacctacgatgttagtaataacagcatttgtgagctggtaagtagcactttcaggacatgaaacacaaagcaatgaagcaacgcttcattcatatccttcta

SEQ ID NO: 289651 - DNA, 557 bp, Homo sapiens
ttaaaatagatcatagatttataggtagcagcagctctgaagaaatatatttctcagatgttggctgaattataggaaataatccttgagtgaagtgaaaaattctataagccacttacttattcacataacccaaataaaaatatttaactcattgtgtttgattccaaaactgttgagatcactagtttttatgccctagttgcctcatttcaaaatgaaatataatagcctacagactctttgttatttaatgtttttsttattccattattagaggtaactgaaagttgaatagaatttagaactgagtgttaatggtcagtaggtaatgtttagattttgctgacttaattatttcattcaaaacatgttcacacattgtgcaaatacattcttatgtgaaaagcgtttgtgcagtctactgaatacatgatagtagcagatatatataatacctacgatgttagtaataacagcatttgtgagctggtaagtagcactttcaggacatgaaacacaaagcaatgaagcaacgcttcattcatatccttcta

SEQ ID NO: 289652 - DNA, 459 bp, Homo sapiens
cccttttgtcaggattaccagcaacaccaccaactttggatgaggctctttgcagcagcatgtcttgaaagcattcaacaagtcgtggttccagtactacctttaaaattttagaggytgctaacccaataaaattacagatgtctgcaatctccatgcctgcaggttagagtctgtggcaacacaaaacttccagtggggtgcacaagcctcttgaatttaaacacataaattgcctgaggcagccagaagatataccccttttgaaaattaactccttgctcactgctggacactggtggagattgagcatctatggctggagtgtcatatgcaatacgtgtgacaaactctatttacactgggaatgtttctggagccttgggggaccagctcacaatggatcctaagatgattttgtcccttacagccctatctgtaagaaataaacaggcttca

SEQ ID NO: 289653 - DNA, 584 bp, Homo sapiens
tatgtcacactttgtactttgttcatatttaacttcaaggcataataattgaaacttattgctttgagaactacaatcatcaatatagttttcttacttttcactacaaaatttctttccaattctttctgtctttgaattatacattcggaaatataccacacattttaaagatgactgtattacatttagaataataatayatcaatttttgtgttacaattataaattttgtatttataagatattgctaaattctgaagttaaaatgatgcccgaatagccctattataaattaataaactactattaaatattcatccactaatgttttccttaccaatgttgtaaacattcatttttcatttgggcaccagctattatttactacataagctatagagtaatagttcttttatgtcttctctcaaacttgatttcgtataatagaaaaaaaatcagtgtagaatgaaaagacataggtccaagggctaaccatgttgagtgattttgttgaggactttcttctttgctgaatctcatttttcaagtgacagcgagcgctagtggagttgagtgaaata

SEQ ID NO: 289654 - DNA, 584 bp, Homo sapiens
tatgtcacactttgtactttgttcatatttaacttcaaggcataataattgaaacttattgctttgagaactacaatcatcaatatagttttcttacttttcactacaaaatttctttccaattctttctgtctttgaattatacattcggaaatataccacacattttaaagatgactgtattacatttagaataataatacatcaatttttgtgttacaattataaattttgtatttataagatattgctaaattctgaagttaaaatgatgcccgaatagccctattataaattaataaactactattaaatattcatccactaatgttttccttaccaatgttgtaaacattcatttttcatttgggcaccagctattatttactacataagctatagagtaatagttcttttatgtcttctctcaaacttgatttygtataatagaaaaaaaatcagtgtagaatgaaaagacataggtccaagggctaaccatgttgagtgattttgttgaggactttcttctttgctgaatctcatttttcaagtgacagcgagcgctagtggagttgagtgaaata

SEQ ID NO: 289655 - DNA, 575 bp, Homo sapiens
aatggctgaacaggcaggcctccataacaactgtttcagcactgactaagtggttaagttaaatattttaaaagctgacagagccagtgcaattatacaaggactggaatataacaaaagcccaccaagagttttgcctaggactttcctgggccttaaatcatgacaagataatgaagaagttcttaataggaccagcttaggattcaacaaattttattgggggtcygaagaaactccatagacctccacaaacaagtttattgggggtctgaaggaactcctcaaacctccatgatttagcaggagacaagataaaagtaatcaccccagcacctgtacccatttaaattaagtaaatttactgaggattcagaggaaggtattgaggactcagatcttagttatagattaaaagaagttaatcacttaagtctttagatgaattcacacttacacataaacacatagcttagaaggtatataagctctggaaaacttagtaactttgagtttgtgtggagttattttccaggccttctccttgtacctggttacagaaataaaaactctat

SEQ ID NO: 289656 - DNA, 567 bp, Homo sapiens
gaaggaactcctcaaacctccatgatttagcaggagacaagataaaagtaatcaccccagcacctgtacccatttaaattaagtaaatttactgaggattcagaggaaggtattgaggactcagatcttagttatagattaaaagaagttaatcacttaagtctttagatgaattcacacttacacataaacacatagcttagaaggtatataagctctggaaaacttagtaactttgagtttgtgtggagttattttccaggccttctccttgtacctggttacagaaataaaaactctattctttctcagttcatctgcatgttgttattgggccaagagaacaagcagcccgacacacagtttggttcaggaacaatagcgtttttttttttttttttttttkttttttctgaaaagagttacagactttttcccacccgtctgtttacaacacagggtaaggaagccagagagccttcccccctccacaaagatttgtttatatgctagggtttctctctccctagaggggaggatggatcaatgtgccaaccaccctgctta

SEQ ID NO: 289657 - DNA, 567 bp, Homo sapiens
gaaggaactcctcaaacctccatgatttagcaggagacaagataaaagtaatcaccccagcacctgtacccatttaaattaagtaaatttactgaggattcagaggaaggtattgaggactcagatcttagttatagattaaaagaagttaatcacttaagtctttagatgaattcacacttacacataaacacatagcttagaaggtatataagctctggaaaacttagtaactttgagtttgtgtggagttattttccaggccttctccttgtacctggttacagaaataaaaactctattctttctcagttcatctgcatgttgttattgggccaagagaacaagcagcccgacacacagtttggttcaggaacaatagcgttttttttttttttttttttttttttttctgaaaagagttacagactttttcccamccgtctgtttacaacacagggtaaggaagccagagagccttcccccctccacaaagatttgtttatatgctagggtttctctctccctagaggggaggatggatcaatgtgccaaccaccctgctta

SEQ ID NO: 289658 - DNA, 471 bp, Homo sapiens
tattggagtttctctgatgtttttctcgtgattatactgaggttaggggttttgtgaggaagttagcagaggtaaagtgtcatttacatcaaatatccagggtgtgctttaccaacattatttaattgttgacattgagcttgatcacctggctgaaatagtgtttcttaagtttcctcaccgtcaagttatgtgttcttccaccctaatttccatatttactcttcagaagaaagtcagtatgtacagtgtgcagttaaggagtggagaattatgcttcaccttcttgagggcaaatatctacataaactatttggaattctttcttaagagatttgccytttctccctcatttatttctttttcagtcatttgtttacattagtatggattcatagatatgtattttataatttgggttataatcctattcaactactttattttttcatcaaattgttacagcattta

SEQ ID NO: 289659 - DNA, 567 bp, Homo sapiens
gaaggaactcctcaaacctccatgatttagcaggagacaagataaaagtaatcaccccagcacctgtacccatttaaattaagtaaatttactgaggattcagaggaaggtattgaggactcagatcttagttatagattaaaagaagttaatcacttaagtctttagatgaattcacacttacacataaacacatagcttagaaggtatataagctctggaaaacttagtaactttgagtttgtgtggagttattttccaggccttctccttgtacctggttacagaaataaaaactctattctttctcagttcatctgcatgttgttattgggccaagagaacaagcagcccgacacacagtttggttcaggaacaatagcgttttttttttttttttttttttttttttctgaaaagagttacagactttttcccacccgtctgtttacaacacagggtaaggaagccagagagccttcccccctccacaragatttgtttatatgctagggtttctctctccctagaggggaggatggatcaatgtgccaaccaccctgctta

SEQ ID NO: 289660 - DNA, 613 bp, Homo sapiens
gggttctaccatgttgcccaggctggtcttgaactcctgacttcaggtgatccacctgctttggtctcccaaagtgctgggattacaggcatgagccaccacacctggcctatagtaagtttttaaaagaaaaaaatgatgaagcaatttgagtttttgacaaggacttgccattgttgtcctatatctcttacatacatactcgataatatatctctgtggctacctttgatagaacatcatgagtcattcaactcagaggaagcaaattcatttattgaattcagaaaatctgttttctttttcttccttttttctgagaaacttttgttaagaaggtgttatcagtggaaaggtgtactttgctgtgctgggtcacattgagtttaaaaaactaaaagactctgtgccttctaagttgttgtcactcatcaaacatttcattatggccatatcacttgtgacatacattagcttttaatatatgaccagtgattaaagtaaactgagggtcaagtaaagcactggtcaaatattraaagcttatgtatatatagatcaactaagaaccttattaaaatatagattgtgatacaggtctgaaatgaagcct

SEQ ID NO: 289661 - DNA, 584 bp, Homo sapiens
ttcttctaaactcatccaaaaaattgagctggagagaatatttccaaactcatttgacaagaccaacattacctcaataacagagccagagaagaacacacacacacacacacacacacacacaaaatgaaacatcaacatccttgataaacatagatgcaaaaatcctcaacaaaatgttagtaaaccaaattcaacaactaatttacaaaatcattcatcatgctcaagtgggatttatccattggatgcaaggatgattcaacatacacaaatcaagaaatgccatacaccacatcaattaaaggaaggataaaaatcaaataattatctcaaaagatgcagaaaatgcatttgaaaacatttaatgtcctttcatgaaaaaaaatatctcaacagtttagatatagaggcaatatacctcaacacaatgaaggtcatgtatgacaaacccataactaacatcattctcaatggtgaaaggttgaaaagttttcctctaagatcaggaacaagacaagcatgcccactctcaccacttcttttcaacatactrttgaatgtcctagccagaaaaattagtc

SEQ ID NO: 289662 - DNA, 558 bp, Homo sapiens
attgaatctgtagatcactttgggtagcattgacatcttaacgatattaagcctttccatccatgaatacaggatgtcttttcattttttgtgttttcttttattcctttcagcaacattttgtagttttcaatgtacaagcctttcacatctttggttaagtctattcctctaagtrttgtttttctttttgatgctattttaaatggagttcttttttttaaatttccctgtcagattgatcaatgttagtgtacagaaacacaaatgatttttgcatgttggttttgtgtcttgcagctttgctgaatttattaattctattatagcatttttgtctgtgtgtataaaatctttagggttttctacatataagttcatattgtctgtgaacagggataattttatttctttccttccaatttgaatatcttctattcctttttctttcctaaatggtctaactagaacttcatgttgagtagaggtggaagaagcaggcatccttattttgttcattgtcttaaatgaaaaaatttaattctttcatctacatat

SEQ ID NO: 289663 - DNA, 551 bp, Homo sapiens
attatgtcttcaattttttccatttgttttctatatggctcaggtcatttctcttttttgcttcctcttttactgtcttcttttttgttagattgatattttctagtgtatcayttatttttcttttttgttaaattattttctttgaggatgttctcaattttgcaacatgtatcttaactaattacaatctactccagagtcatatccattcataaaataaactttgctccaatataatttctttgtggtattgtcatacaaatgacatttttctataagctcgacaatatggttttataattatagttttatacaatcttacacattttaaattacacaagagaaaagagaaaaatatttattgcctgtcacacctccaatatatttacctttccccatgctttttttttgtgtttgtggattttagttattgtctagtgttattccctttcagcctgaaggattctttaatatttcttgtaagacacgattgctagtgatgaattctcttagcctttgatcatttgggagtgactttattttgcctt

SEQ ID NO: 289664 - DNA, 551 bp, Homo sapiens
attatgtcttcaattttttccatttgttttctatatggctcaggtcatttctcttttttgcttcctcttttactgtcttcttttttgttagattgatattttctagtgtatcatttatttttcttttttgttaaattattttctttgaggatgttctcaattttgcaacatgtatcttaactaattacaatctactccagagtcatatccattcataaaataaactttgctccaatataatttctttgtggtattgtcatayaaatgacatttttctataagctcgacaatatggttttataattatagttttatacaatcttacacattttaaattacacaagagaaaagagaaaaatatttattgcctgtcacacctccaatatatttacctttccccatgctttttttttgtgtttgtggattttagttattgtctagtgttattccctttcagcctgaaggattctttaatatttcttgtaagacacgattgctagtgatgaattctcttagcctttgatcatttgggagtgactttattttgcctt

SEQ ID NO: 289665 - DNA, 551 bp, Homo sapiens
attatgtcttcaattttttccatttgttttctatatggctcaggtcatttctcttttttgcttcctcttttactgtcttcttttttgttagattgatattttctagtgtatcatttatttttcttttttgttaaattattttctttgaggatgttctcaattttgcaacatgtatcttaactaattacaatctactccagagtcatatccattcataaaataaactttgctccaatataatttctttgtggtattgtcatacaaatgacatttttctataagctcgacaatatrgttttataattatagttttatacaatcttacacattttaaattacacaagagaaaagagaaaaatatttattgcctgtcacacctccaatatatttacctttccccatgctttttttttgtgtttgtggattttagttattgtctagtgttattccctttcagcctgaaggattctttaatatttcttgtaagacacgattgctagtgatgaattctcttagcctttgatcatttgggagtgactttattttgcctt

SEQ ID NO: 289666 - DNA, 551 bp, Homo sapiens
attatgtcttcaattttttccatttgttttctatatggctcaggtcatttctcttttttgcttcctcttttactgtcttcttttttgttagattgatattttctagtgtatcatttatttttcttttttgttaaattattttctttgaggatgttctcaattttgcaacatgtatcttaactaattacaatctactccagagtcatatccattcataaaataaactttgctccaatataatttctttgtggtattgtcatacaaatgacatttttctataagctcgacaatatggttttataattatagttttatacaatcttacacattttaaattacacaagagaaaagagaaaaatatttattgcctgtcacacctccaatatatttacctttccccatgctttttttttgtgtttgtggattttagttattgtctagtgttattccctttcagcctgaaggattctttaatatttcttgtaagacacgattgctagtgatgaattctcttagcctttgatcatttgsgagtgactttattttgcctt

SEQ ID NO: 289667 - DNA, 599 bp, Homo sapiens
taagcatacacatgcacttaaaccaaacatttgaatctcagaagatttgtccacaactagattgagaacctatgccatgtgattgtttgagtaaatacatgaacaaatagttataaagcattattacaaatgaagcagtagcaatgttcccagtgtattttttaaagaggggggatctcagttgatctctaaccttccatgaacctctgctcttaaataatggtaggttagatatttcagaccaaccactgaactttagataattaaaaaatgtggataaaatataaaatttttattctaaaaatcaatgttctaatgayaaaatgagcttgtaatggattgaagtcaagagaggtgagaaactcagggaaaagagcaaaactctggtatttttgcctcagtcttagtccattttgtgctgcagtaacagagtaccaaaaactagacaatttaaaatgaacggaaatttattggctcatagttctagagcctgggaattccaagatcaaggggctggcatctgaccaggaccttcatgctgcatcatgatgtgatagaaggcatcacatgatggaaagccaaagagagggagagtgaga

SEQ ID NO: 289668 - DNA, 602 bp, Homo sapiens
ctggcataactttgaggtccaataataataggaaggcttcccttggtgttgggagaacattcttgaccaccactcccccagcttaattatcagagtcttagtcatacttgtccaagattcagaaagctcatcaccctgccttttcttatctacaaatcctggtctattaaacaggtgtccaggtgataacttattctccttcactgtcttggaaggtttttctcctcctcctggttgatgtgaagcaaagcccacatccttcaggacctatggraagtggtagaatacaaaagtcacacaaaggggaacgcctagaacagtgaggggaggtttcagtggcagttgatttatcctccttctctcagtagtgctcacctgccccaacccaaccacacaccaccaccacccaaacctcctacccctttgacctctagtgtggagtgataagggttataattaggatgagttcatacagggagaagattgtgtgaggctgtggtctcacaaggagtttcttgtgaactatggaagccttgctttcaaatgcaaactttttagatgggatcaaggaccatattgctcgtttatatgtaaattgtatt

SEQ ID NO: 289669 - DNA, 602 bp, Homo sapiens
ctggcataactttgaggtccaataataataggaaggcttcccttggtgttgggagaacattcttgaccaccactcccccagcttaattatcagagtcttagtcatacttgtccaagattcagaaagctcatcaccctgccttttcttatctacaaatcctggtctattaaacaggtgtccaggtgataacttattctccttcactgtcttggaaggtttttctcctcctcctggttgatgtgaagcaaagcccacatccttcaggacctatgggaagtggtagaatacaaaagtcacacaaaggggaacgcctagaacagtgaggggargtttcagtggcagttgatttatcctccttctctcagtagtgctcacctgccccaacccaaccacacaccaccaccacccaaacctcctacccctttgacctctagtgtggagtgataagggttataattaggatgagttcatacagggagaagattgtgtgaggctgtggtctcacaaggagtttcttgtgaactatggaagccttgctttcaaatgcaaactttttagatgggatcaaggaccatattgctcgtttatatgtaaattgtatt

SEQ ID NO: 289670 - DNA, 1223 bp, Homo sapiens
tccattcagtgttgctttaaaggaatgcctgaagctgggaaatgtataaagaaaagaggtttatttggctcatagttctaaaggctgtacaagaagcatttgcttctggtgagggcttcaggctgcttccacttatggtgaaaggcaaaggggagcyagtgtatgtagagaccatgtggtaaaagaagaagagagagataggggaggtgccaggctctttttaacaaccagctctcacaggaactaatagagtgagaactcactcactctcctgcttcagggagggcattgatccatttatgagggatccacccccatgaccccaacacttcccactaggccccatctccaaacactaccacactggggattaaatttgagcatgagatttggaaggatcaaacttccaaaccatggcaccagagttcctttcattaatcttcagtttaattccattacggacaaagaacatattctaaatattggaagatttctgtcatttgaaatttactgagacttcatttttgacccagcatatagttaatcttaaagaaaattaaatgtgtaaataaaaaagaatgtaggttctgagctgctggatgtaacatactwtccattcagtgttgctttaaaggaatgcctgaagctgggaaatgtataaagaaaagaggtttatttggctcatagttctaaaggctgtacaagaagcatttgcttctggtgagggcttcaggctgcttccacttatggtgaaaggcaaaggggagctagtgtatgtagagaccatgtggtaaaagaagaagagagagataggggaggtgccaggctctttttaacaaccagctctcacaggaactaatagagtgagaactcactcactctcctgcttcagggagggcattgatccatttatgagggatccacccccatgaccccaacacttcccactaggccccatctccaaacactaccacactggggattaaatttgagcatgagatttggaaggatcaaacttccaaaccatggcaccagagttcctttcattaatcttcagtttaattccattacggacaaagaacatattctaaatattggaagatttctgtcatttgaaatttactgagacwtcatttttgacccagcatatagttaatcttaaagaaaattaaatgtgtaaataaaaaagaatgtaggttctgagctgctggatgtaacatact

SEQ ID NO: 289671 - DNA, 611 bp, Homo sapiens
tccattcagtgttgctttaaaggaatgcctgaagctgggaaatgtataaagaaaagaggtttatttggctcatagttctaaaggctgtacaagaagcatttgcttctggtgagggcttcaggctgcttccacttatggtgaaaggcaaaggggagctagtgtatgtagagaccatgtggtaaaagaagaagagagagataggggaggtgccaggctctttttaacaaccagctctcacaggaactaatagagtgagaactcactcactctcctgcttcagggagggcattgatccatttatgagggatccacccccatgaccccaacacttcccactaggccccatctccaaacactaccacactggggattaaatttgagcatgagatttggaaggatcaaacttccaaaccatggcaccagagttcctttcattaatcttcagtttaattccattacggacaaagaacatattctaaatattggaagatttctgtcatttgaaatttactgagacttcatttttgrcccagcatatagttaatcttaaagaaaattaaatgtgtaaataaaaaagaatgtaggttctgagctgctggatgtaacatact

SEQ ID NO: 289672 - DNA, 528 bp, Homo sapiens
ggcatgcatctggggatgagaggaatggctgcagccctttttgcaaacagcattattccctatcactttcaaatactaccttgtagtctactgtaccataactctttattcactttctaacttttacatttgggttatttctttatgttgttatgaactttgtttcaaacaacaggcatttttgtgtacttgtctaattttgtgtatttttttctcttmtgagttagaaatcactgccttatgtcagagcccagctttatcacttactgtgtgtccgggggaaaaattgcttagcagcttcctacctcagtttccttatctgaaaatgaagacaaaaatatgactcatcatatggggttactgtgaaggtcaaatagatactgaatataaaatgctcaataactgttgataattattaagataaatccctggaagcaaaattattaggccaagtggtatcaaaatatttaggacaattgctgtatattaataaaggggaccactaaaaatatattttaaattttagat

SEQ ID NO: 289673 - DNA, 664 bp, Homo sapiens
agattgtactctttttgtccagtcatagttcackactatccattctttattgaacctaagcatacaaacgggtagtcttccctgtatctttgggccttcaatctgaagtctcctgtgccatgtaaaactatgaacaaatacataattcaacatctctttatcataaaaactctcaaaaattaggtataacagcaggaacaaacctcaacataataaaggctgtttataacaaatccacagctaacattataataagtggagaaaagccgaaagctttctctttgagatctggaacaaggcaaggatgtccacttcccccacttttattcaatatagtactggaagtcctagccagagcaatcaagcaagagaaatttgtaaacaaagggcacccaaattggaaagaaggaagtaaaattgtccctgtttatagatgacatgatcttatatatagaaaaccacaaagactcctccaagaaaccattagaactaataaatgaatttagtaaacttgcagggcactaagtcaacacacaaaaataagtagcatttttatacaggattagaaaattatctgaaaaataaaaaattccttttataatagctacaaaaaatatctaggaataaatttaaccaaggaggtgaaagacttgtgcactgaaaa

SEQ ID NO: 289674 - DNA, 474 bp, Homo sapiens
tgaagggtggaaaggtcctctcctgttcctttcccagcctctgtacttcttattaggcaaatttatcttactaggcaagacattaagtaaatatgttcacttgacttactctagctttaatgtttacaaaatattataataggattccaggtatcttgtggccaaagccatttctcattccaagactcaaagcctkaagagttataagcctcatcttcaattgtgaccctctgaagcacggaaggatgtttaagtacattacccacagaagctcagatggaagttcccaaccatgcttcctctttgcaatgctggaattcctggagcaaaatctctcattcttccatgctgaagaactctccatttatgtcttcctgtccacatcatctcctagttattgaaagctctcccctccctctggagtaccactgcatgtgacacagtcctaatgtgtcatgtcctcccaccatgtcc

SEQ ID NO: 289675 - DNA, 474 bp, Homo sapiens
tgaagggtggaaaggtcctctcctgttcctttcccagcctctgtacttcttattaggcaaatttatcttactaggcaagacattaagtaaatatgttcacttgacttactctagctttaatgtttacaaaatattataataggattccaggtatcttgtggccaaagccatttctcattccaagactcaaagccttaagagttataagcctcatcttcarttgtgaccctctgaagcacggaaggatgtttaagtacattacccacagaagctcagatggaagttcccaaccatgcttcctctttgcaatgctggaattcctggagcaaaatctctcattcttccatgctgaagaactctccatttatgtcttcctgtccacatcatctcctagttattgaaagctctcccctccctctggagtaccactgcatgtgacacagtcctaatgtgtcatgtcctcccaccatgtcc

SEQ ID NO: 289676 - DNA, 588 bp, Homo sapiens
aatatgaggtttattgaggtataatttacacagaatagaatccaccgtttcatagcatacaactcaatgaaatttttttttaagacaaagtctcactgtgtcacccaggctggagtgcagtgggaccatctcagctcactgcaacctctgcctcctgggttcaagcgattctcctgcctcagcctcccaagtagctgggattataggctcctgccaccaccacctggctaatgttttgtatttttagtagagatggggtttcaccgtgttggtcaggctggtcttgtactcctgacctcaggtgatccacccgcctcagcctcccaaagtgctgggattacaggcgtgagctgccatgccyggcctcaatgaactttaacaatgttaggtaaccaccgccacaattgtggtgtacagcagccccatcgttccaaaatgttttctcatccccctctttaagttaaatctctccctccaccccagcaacctgacaagcattggcctagttttgccttttaaaaaataatgtcgaataaatggaattatataatatgtaggctgctttgctaggtttctttcacttgccat

SEQ ID NO: 289677 - DNA, 588 bp, Homo sapiens
aatatgaggtttattgaggtataatttacacagaatagaatccaccgtttcatagcatacaactcaatgaaatttttttttaagacaaagtctcactgtgtcacccaggctggagtgcagtgggaccatctcagctcactgcaacctctgcctcctgggttcaagcgattctcctgcctcagcctcccaagtagctgggattataggctcctgccaccaccacctggctaatgttttgtatttttagtagagatggggtttcaccgtgttggtcaggctggtcttgtactcctgacctcaggtgatccacccgcctcagcctcccaaagtgctgggattacaggcgtgagctgccatgcccggcctcaatgaactttaacaatgttaggtaaccaccgccacaattgtggtgtacagcagccccatcgttccaaaatgttttctcatccccctctttaagttaaatctctccctccaccccagcaacctgacaagcattggcctagttttgccttttaaaaaataatgtcraataaatggaattatataatatgtaggctgctttgctaggtttctttcacttgccat

SEQ ID NO: 289678 - DNA, 538 bp, Homo sapiens
tttaaccaactcttccttctaccagtccctcaataataagtcctctactccattcacttcaactcccatcacttcacttcacctctgtcgtagaaataacttattttaaatctattttttgtttgtttattttgagacaaggtctggctctgtgacccaggctggagtgcagkggttagatcttggctcactgcggccttgatcttccctcaagcgattctactactccagcctcctgagtagctgggtctataggtgtgtgccaccacatccagctaattctttctttattgtttttattgtttgtagagatgggttatccatcatggtgcccaagctggtcttgaactcctgggctcaagttacctaccttccccagtctctcaaagtgttgggtttacaggtgtgagccactgtgcccggcctgaaataattttatgtgaattcccatggcctgcaaatctggctaccctagggctttccaacttagaaggaacaagtttcagagcttcagatgagggcagataacccctaaaac

SEQ ID NO: 289679 - DNA, 521 bp, Homo sapiens
ttacagcctgtggaggctgagatggctagcagctgttgctggcaggcagccgcttggtccgggactacactttccagaacacttgcatccaggtccagccacatcagaaccaaccgtgaggagcagaagcaatgagtggctgcctcyctatagaaaaccctcttctctcatttctcatctgcacactgactgcagagcaccgacgccctaggggttgggacaacttgggttcctgaggcaccacatcaaggaaaagtgttgcattggattattacagggagtgagaaataagctgcttctgcgttaagccccgtttgtttgtagcagctgctagcattcccttaatgaataactcctccaacagaggactgggggattctcgacatctggaagggtggtactggcaggaaagggtacttgggagaagctggtgatgctgagacacacttctatcacaattcatgggtcacctactatgcccagggcattgtgctgagcatcaaagaacaaaacaagataac

SEQ ID NO: 289680 - DNA, 531 bp, Homo sapiens
ctcctcagtgaagccctgcctctgttcagcttggcatttagttcctgtagttctggcttgcagtccctccagccttcactgaagcagaaggaagcatctggactggcggccctgatggctratatctctattcctcctcctccctactctgggcagcctgacctgaggagcccttggttccagcttgtttgtgacctgatacttcagctttagggcccagaacccatgagcctctgggctggcccagctgcaagggtctgatggacattctacacctgtcagcactgcaggtctggccacggataaaacagcctgggtgggagggtagcgattgtcttggctttccctgaagaactttgtcaggtgtccatggcaacaaagtcctgagtggatgctgagtagagttggccctctgcctcatagggccaaggataggatgacctctgagctgccacttgctgacaaggctggcaatactggcatgtatactagcccagagagggggctttcctctttcattggaggcaactg

SEQ ID NO: 289681 - DNA, 1257 bp, Homo sapiens
ctcctgcctcagcctcccacgtagctgggattacrggcaggtgccaccacacccaactaaatttttgtatttttagtagagacagggttacatcacgttggccaggatggtcttgatctgctgacctcgtgatctgcccaccttggcctcccaaagtgctgggattacaggtgtgaaccaccatgcccagcctggaatgaagttttatcaattttattgatctcaaagaaccaacttttgattgaattgcttattgtttttctatttgtaattttatttatttctattctgatttttcttatttccttcattttacttactttatatttcagtcttctttttatcctttcttatggtggaagctgaggttgttgattagagattccatctttcttcttttctgatatgtgcctactggtctataaatttcccccaagaatgtggcatcccagagattttaatatgctatactcatttcattcagttcaagatactttctagtttcacttttgatttcttctttgacctatagttcctttagaagtacattatttaattttcaaattttggggactcttacagaaacctttctgttgttgataatttaatttccttgtggtcawtttctccaggacaaagggagctgaagcatgcactccccggaacctgagagccacctgactggggctgctgccactgacagcaaccttgcatccccagacacagacactctgcacatgcatgtgctttcagcaggcttggagtctggtctgtctgggagccttcctggggcctgaagacaagcctgtcctcaccactgccaccaccatgaccacaccatctagggacctacacatcaataatgcttgccagtttgggtgcttatgtgcaccatcagcaggcttcaggacagttctgcctcacctggcatcattccccatgctagcacaatcagggaacttggagattaacctgctctacccaccawtgaccttactggagagatagactccaattcaataatagttggggaattcaacacctcactttcagcattggacagataatctagacagaaaatcagcaaaaaaacattggatttagactgcacctgagaacacgtagacctaacatttacagaacatttcaccaaacagctacagaatacacattcctctcatcagcacatggaacattccccaggacagaccatatgttaggccacaaaattaatctcagtaaattttaagcatcaaa

SEQ ID NO: 289682 - DNA, 625 bp, Homo sapiens
tggtctgcattcaacagcactagaatcccaagataaaaccagaacttctcaaactgggttccaaagaacactagtgttccctgggatgccagtgggtgtgccactcaaaaagcgttgtggaaacagatggatttgaaatgtcaggataaatttactatatttctttactaaagaatcttcattttttaaaaaatctttaaagacactcatggttttcaattctcagtttaaataccttgtactcagagaggatttctctgacagcccaattagctaccgggtcactgtatgccccacctctctcatttacytgtctgcatattctctaatatttgtttttgtgctccttttcttcttccatcatggttggaatcttatctgtcttgcttactctttttccatactacctaaagcactgtctggtacatggtaggtgctcaataaatgtttgttgattgactaataaaatgaatgtgcatagtatattaataagtttgagacataatatatgtcattttgaaaccatcttggaaataaaaatttttttggcaaaacccactagtatttcataggacattagggatccatggaacacatttggcaaataatggttttagaccaatgc

SEQ ID NO: 289683 - DNA, 561 bp, Homo sapiens
cttaatgatgtttgagtttcacaccatatcatttcctttttcttatatcttgttgctttcatagagcttctctgccatactactattcacttgcttatgccaagagtcaacacatttatggctttaaaatttcttttactggaagrcctcatttctgtaccacccaatagagctctgcaatgataacatttgaaagtttgaaatctgatatacctatttatttaaattaacatatataggtttcttggctgggctttaggaaggccaaagttgattttgggtactgccaccgactttctggttgacttgaatcctatgggtcagcatcttctctgtcttgacatcagtgctaggagatttgcctagcaatataatctgtttctttggcatattattattttcttgttattgttcatatgtctattaaatgcctccctgtgccagggagtggaaagtagtgggtggaaaggttttcagaattttatcagcagacgctttcctactgaaattctttcaaatgctaatgtctgatgtcaggaagaaagagatccagaatgttgt

SEQ ID NO: 289684 - DNA, 603 bp, Homo sapiens
ctgttctagcaaattatcaaacctgaagacggagctgtgggaactccctggctatgaagccaattggtcggaagtttcaggtgattggcatctgaagtagaagcagtctcatgggattaagcccttaacttgtgagatctgatgctaactccaggtagttaggatcagaattgaagttaaaggtaggatacccaggtggcatccagaaagttgaagagttggttgttggtgtgggaaccacctcacacatttgatatcagaagtgctatattgatacaaacagatcatagtagccatgtcccatatctggaagcagccttcatccaatgactggtcaatgatgcaggggagaaggtgtacagcctcaacccctttgctgtaggattagatgactgctgaaggaccatctaagttccagagctcggtgtggaatcatctggagcctctgttgtgactacattgcagatcaatctcccctctgcccaatcctacttccttcatgatcccacatgtrgatccaggcactcccccaataaacttcctgcatgaaaatctttgtctcagaatctgcttcccagggaagctacaaaacatcatttttct

SEQ ID NO: 289685 - DNA, 530 bp, Homo sapiens
gccctcctcacccatcacagctgctgccaataccagcacaggccacttgggagctagagggttgtcctgctatggctactgccattactcatgccatgcccactgtccagggtcctaargacccacccatccacctggcccattgctgtcattgcttgcatctgagcaagtcagcaagccacctggcgacccaagaaccaaattgcctagaatagctaacaccaacgccagcatatgccaccctgaggaccaaggaaaggcatgctcagcctgcaactgccttcactggggcctgaggattggactgtctggtgttttcatccccagcaaaacttcaccacagcctccactaacaactgcaacctaagtcactgagaaaatcacagacaccactaacactgtttacaggtgaagaaattacatggagactatactactgcacacacccagaagcaaagccaaagtgtcctagctaaccaacaccattggtatgtcttcaggaaaaagccctcccctacaaaagcaaatcc

SEQ ID NO: 289686 - DNA, 530 bp, Homo sapiens
gccctcctcacccatcacagctgctgccaataccagcacaggccacttgggagctagagggttgtcctgctatggctactgccattactcatgccatgcccactgtccagggtcctaaggacccacccatccacctggcccattgctgtcattgcttgcatctgagcaagtcagcaagccacctggcgacccaagaaccaaattgcctagaatagctaacaccaacgccagcatatgccaccctgargaccaaggaaaggcatgctcagcctgcaactgccttcactggggcctgaggattggactgtctggtgttttcatccccagcaaaacttcaccacagcctccactaacaactgcaacctaagtcactgagaaaatcacagacaccactaacactgtttacaggtgaagaaattacatggagactatactactgcacacacccagaagcaaagccaaagtgtcctagctaaccaacaccattggtatgtcttcaggaaaaagccctcccctacaaaagcaaatcc

SEQ ID NO: 289687 - DNA, 530 bp, Homo sapiens
gccctcctcacccatcacagctgctgccaataccagcacaggccacttgggagctagagggttgtcctgctatggctactgccattactcatgccatgcccactgtccagggtcctaaggacccacccatccacctggcccattgctgtcattgcttgcatctgagcaagtcagcaagccacctggcgacccaagaaccaaattgcctagaatagctaacaccaacgccagcatatgccaccctgaggaccaaggaaaggcatgctcagcctgcaactgccttcactggggcctgaggattggactgtctggtgttttcatccccagcaaaacttcaccacagcctccactaacaactgcaacctaagtcactgagaaaatcacagacaccactaacactgtttacaggtgaagaaattacatggagactatactactgcacacacccagaagcaaagccaaagtgtcctagctaaccaacaccattggtatgtcttcargaaaaagccctcccctacaaaagcaaatcc

SEQ ID NO: 289688 - DNA, 1162 bp, Homo sapiens
gaagtaatacatacagcaaggccagaagtaccactcagtccagtctcccaaaatcaggccagcgctctttgcactgtaagatatttggaggagagggtattttatttaaggcaaagccttaatcttccataagactcatactcctcatccacttcaaaggcctcaataattccccatcacatataggataaagtcatagctcattaatagaatttccaaagctctttatgatcttgtccttcttatgtcttcagcttcattattcattacaacaccctgcctgaaatagatgtttcatcaacacggaaccccttggagtttcctgctcaaaccatgccatttcatgcctctgtaactttgatcacactcttccctcttccagccgcrcttttccttacctctcagcctagtcaatgccagctcatccttcaagtgcactccagctccacgagatcccatccaacccccaagctgggtctggagtcccttctatctccacatcactctgggctcagccctgacattgcacttaccacatggtgttggtatcatggtataatcttgcttcccawctcatctttctatgaagaggaggggcataaaagcctttggaaaggctgtgcaaatgttgggtaaattttaaaatgctgaagtcattagttgattataaatcatgagcaaggaaaaggaaaataagagagaaaatgaggagatgagaaaaagaggaaggagaaaagggaaagaagaaaactaataaggtaaaaactgattaaaggggaataaaaggtccagatataatttattttcattcaatgattcatgcattcatctcgcaaacattcactgggaatcatctacattccagccaccaagctgggcactgaggataaaaatggatgacagcacawccttccttcatagggctccaggcctggctgagatgaacagctggcagacaggacccaagacagcaagggctgtgacaaaggtaaactgggagaagtagagagaatcctggaaagaaacattgaacccagccagatccatgaatgataactcttgagaaacctctcagaagctaaacagggttgggcctggttagtacttggatgggagactcttgagaaaccaagttgaaaggggagaaaagaatgttcccact

SEQ ID NO: 289689 - DNA, 548 bp, Homo sapiens
aatttctcgtctattgtgcgaaaaagtgtctcttggcataagcataataatagcaactcccatttatgtagcatccactgcttaccagacagggtaccaggaactttacagacatgatttcaagctgccacagcaaaattgtgggtgagtattatgtaatactctgagagtctctgagagggcacacaaggggtgcatagctagtaagtgtcaataccaacatttaaacccacagggtccaaagtgcttgctcctttctctagattattggcttgattaggactcatttggttgcaagtaactaaagcctacttctgaatttcaaccaactcaacttaaaccacactctgggtttagtaaagctaatrtaattcaatttcagtttacatataaaagagaatttatcacagagatgcaaaggtttctcatcagacactaaagtgagtctgtgtctcctgagtgaactggaaccagtgcttaagtgtaggtaggactcctgcagatttttgtctttgctttttttttttggcacacctcagttcactttt

SEQ ID NO: 289690 - DNA, 590 bp, Homo sapiens
gatgaacacctattggctttaaggcaaagttccagtattctctccccagccttgtctttgcaacactctccttgctcttaaygcaaagctaagtcactcctaatgttcccatagtactcagtgagcctgtctccaggatgcccattaacctacagtgtacttgtctgtcagtgaaaagatggtgtcccctcctggagacactttgtcaaatgctaaaaaattgtattaagcatgcaaatcaatactgattgtgatggtagatgtgccctcttagacctggccccatggagaagagcacaaggtgcatgggtagatgcagtggctgtgaaccacctccactgcacaacagcctgcgcttttctgtttgtgtgtctgtctccaccattgtgccactggcacaaattgtttctcactaattgtggatccctagtgactagcagaactcttggcacatttttggttctcaataaaggtattttggttcaatgcaaaaatgagtaaaatataagacaagagtattaatttctctagaaatacccctttggcataataaatgtgtttctggtttctgccccaaggataaaagaaac

SEQ ID NO: 289691 - DNA, 531 bp, Homo sapiens
ataaaagaaacttttgggctcatgtatttcctactgcctacttccctctccttttccctttaagttcttgtttgcttttatggattttttttttttttaagatggagtcccgctctgttgcctaggctggagtgcagtggcatgatctcaactcactgcaacctctgcctcctaggttcaagtgattctcctgcctcaacctcctgagtagcttggactacaggcatgtgccaccatgcctgcctaatttttatattttttagtagagacaggatttcrccatgttggccaggctggtctcgaactcctgacctcaggtgatctgcccgcctcaatctcccaaagttctgggattacaggtgtgaaccgctgtgcctggcccacttttatcattttttattatagaaagggtctatggtcattttagaacaattgaaaattgaataagcaaaaataatttgtcattttactattaagaataacaactattaatatctactttcccagatatttttctgtgccaaaaatata

SEQ ID NO: 289692 - DNA, 546 bp, Homo sapiens
aacattcctagttgaagggaagatggaagaagggcctagagttctttccatttaggctccatagtcatttctctttcaccaaggaaaaccctgaaacatttccctaaaactctagaagttcttggagcacagtttaaaagcatgggcactcaggactcatgcagacattgcaaacgagtcacaagtgttaagttctaattgtgtgctgagtcttatataggtcacagctgagaagctcagatcctctgaaaagtgggcctttgatgtccagygctatcagtggcagccaaatgcccagggggtctggagcactcttccttccaatatttggatctccacgctgagtccattcaacatgctgctgataatgatggagaactaggcttttgccaacacctgcatgagcgtgtcccagaaaaaatcaatacaattcgtttggtgaatattcaacagatatttactgcatgtctcctagggccaggtgctttaggcactaggaacaccatgatgaccaaggcagttaaggacctgctctcatggaactta

SEQ ID NO: 289693 - DNA, 841 bp, Homo sapiens
cctcctcggtaaaaagggtattcacggtctagaacaaggtaaagatagaatgtagtctgtttttcatttatttggtagatgtttgttgagcatttgctatgtaccaggaactgcgctaggtgctacgaatacatagacagcatgtatacagacagtccttgttcttacaaagcttcgaagttagttggggagggatgtattgtgcagagtcacccagatataaaagtgcaaccaggartaggtgccgggtttattgtgacatgtgagcataaaatagagttatttgatgtgwctgcagctgtgtaggatcacataacccataaagaggacatcaggcwtctcttctctaattgccagggctgaattccaaaaactaaggagatattcaatgatctcttagttcaatgctcccacttaaggaatacaaatttgtttcatgcctgttttccggaattccactttatgttgaattatcaagtaaatgtcatgatgatagaagttgtttttgactttgatcctttccatgaatctgggacacatggctgggacactaatatgcagagatccctgcctaggttgaagagggatgagttttaaattattgattgaaagtcaccaggacatacagtcatagagagttgtggcttccctcataagcagtcacttgacagaatgtccattgtctgtccttctatatatccattaatcaattgtttattaagactattagatgttcatcaatacatttagccatggatgaaggggactcagaggatgccagcagaatgggagttctcaacgcagctgcaaaacaagccaaaaaggacacagaaatattgac

SEQ ID NO: 289694 - DNA, 549 bp, Homo sapiens
ctgcagctgtgtaggatcacataacccataaagaggacatcaggcttctcttctctaattgccagggctgaattccaaaaactaaggagatattcaatgatctcttagttcaatgctcccacttaaggaatacaaatttgtttcatgcctgttttccggaattccactttatgttgaattatcaagtaaatgtcatgatgatagaagttgtttttgactttgatcctttccatgaatctgggacacatggctgggacactaataygcagagatccctgcctaggttgaagagggatgagttttaaattattgattgaaagtcaccaggacatacagtcatagagagttgtggcttccctcataagcagtcacttgacagaatgtccattgtctgtccttctatatatccattaatcaattgtttattaagactattagatgttcatcaatacatttagccatggatgaaggggactcagaggatgccagcagaatgggagttctcaacgcagctgcaaaacaagccaaaaaggacacagaaatattgac

SEQ ID NO: 289695 - DNA, 549 bp, Homo sapiens
ctgcagctgtgtaggatcacataacccataaagaggacatcaggcttctcttctctaattgccagggctgaattccaaaaactaaggagatattcaatgatctcttagttcaatgctcccacttaaggaatacaaatttgtttcatgcctgttttccggaattccactttatgttgaattatcaagtaaatgtcatgatgatagaagttgtttttgactttgatcctttccatgaatctgggacacatggctgggacactaatatgcagagatccctgcctaggttgaagagggatgagttttaaattattgattgaaagtcaccaggacatacagtcatagagagttgtggcttccctcataagcagtcacttgacagaatgtccattgtctgtccttctatatatccattaatcaattgtttattaagactattagatgttcatcaatacatttagccatggatgaaggggactcagaggatgccagcagaatgggagttctcaacgcagctgcaaaacaagycaaaaaggacacagaaatattgac

SEQ ID NO: 289696 - DNA, 581 bp, Homo sapiens
taatagtgatggacagtgaggaagtggagggtctttccaaatagaggcaacarttatcttggttaaccatggctatcacagggtggaaacctctttcaaaaaccttattgattatttctgactctgtcttaagttttggctcccattttcttcaaggaagtcaaccaatcatgtaaagtaagcacacattcaccatgactgaaaaccaaagttctttactctcacaaagtggatgtgggttggctagacaagcacaagcagagagcccctcatgaatcagagatgctgcaaagccattattgcacttggagagatatttgaacaacttaattctaaaacccctttttattaattcctccccaaaataaagtctaccattctaacatcaatcagctttatgcccatttactgagagtaattataattgtgccctgccattatatagactgttgcgagcgactgtatacataattacataattaggttaagcattacaaccttcttctgtttgtcagactctatggtgaattgtcaagcagttgataatgaatggctactctaaccatttactcttaagaatt

SEQ ID NO: 289697 - DNA, 634 bp, Homo sapiens
gctaacatgtaagtgaccaataaataatatcatgtttctcattggcattcttatattcaataaaataggtcattatattacatatgacatctaatttgtaaaaatatacactttcccccatgggactcagtgtaactatttgcatcttgagtgtggaaaaacctgtgtcccatgaaaacgtctgtattctttaagtggctctcactccaatgtagatagatataggcataggtgcagatctagatgcaggtataggtataggttgttattactgtacatcatgttatataaggaattctcttctccctactctttttctgaaacaaagctctccttttcacaggctatctgcactcagcttgtagttatcagaaaacagttagtaatttattttaaaagtaacttcaggaagaaatggatrttgtgaatgaaggaatttaaagcagcatgaagaataaaatcagtcatttagtctgacaggcagtcgtgggcagctatttgggttataaggcaactatcttgctgtttaaaccaaaccccatgccacatgcacgaccattggagtattatgtaagtgttcaaccagtgccaaaattctatcattcttagctgtctactcactataggtagggcc

SEQ ID NO: 289698 - DNA, 548 bp, Homo sapiens
aacatttaaaaaatatcccagcactatacaacattatatgttaatgtagtggtaatattttggtaatatttcgttgactttaaatgattttgaggttccaatcacgatttcttaaaagtatgcacctagattgtaatactgaaagcctattggtttaactaggcatgctagcttggcrtccagggaactcctgaagaagccagaattaagtgaactcgcagtttcattaatatccaaagaagagttagcctggtaacaagatgtttcatctactacaattccaaaaagctttagaaaaggcaatggaggactacagctaggagaaaatttactggtcagataaatacaaaaattatttcactcttccctactagactagtaaatttttaaaaactatgtttttatattctcgtatttctcacaacccagtttttaaaatttattagtacctaatacacaattgtaaatttaatgtcacatatctgttgttggtcttttaattagaacctggtaccaacagagttttaaatactgacagtgatgagccc

SEQ ID NO: 289699 - DNA, 491 bp, Homo sapiens
tttttgcagttttgagtgtacacactttaaaatgttatcaaaaatgtttctaaatatttgataaatttggtgytgttataaatgacaatatttaaaaaaagttatttttagaattttttgggtatgtagtaggtgtaaatatccatgaggtacatgaggtgttttgatacaggcatgcaacgtgaaataagcacatcatgaagaatggggtatccatcccctcaagcatttatcccttgagttaaaaacaatccaattatattattttaaaatatacaattattattgactataattacctgattgtgctattagtttgtcttattcatttttttctatattttttagtacccattaaccatccccacccttgccctcaccctactccccttcccagcctctggtaaccatctttcaactctctatgtccatgagatcaattgatttgatttttagattctacaaataagtgagaacatgtgatgttggcc

SEQ ID NO: 289700 - DNA, 1198 bp, Homo sapiens
tttggtgttgttataaatgacaatatttaaaaaaagttatttttagaattttttgggtaygtagtaggtgtaaatatccatgaggtacatgaggtgttttgatacaggcatgcaacgtgaaataagcacatcatgaagaatggggtatccatcccctcaagcatttatcccttgagttaaaaacaatccaattatattattttaaaatatacaattattattgactataattacctgattgtgctattagtttgtcttattcatttttttctatattttttagtacccattaaccatccccacccttgccctcaccctactccccttcccagcctctggtaaccatctttcaactctctatgtccatgagatcaattgatttgatttttagattctacaaataagtgagaacatgtgatgttggcctttttatgcctggcttatttattatttcacttaacatattttccagttccattcatgttgttgcaaatgacaggatctcattttttttaatggttaaatagtacgccattgtgtatatgtactacattttatttttccattcatccgttgatgaacatttaggttgcttctaaatcttgcctataatcaatagggctgcaacaaaaatwacccataaaagaaagaaggcaaaacattatttaaggaaaaaatggtacatatgtgtgagcacaatacattcctccctggtctatactttgcccaaacaaagagttatctatacattcagaaaaaaacattgttgacactgcatttcaaatggctgctttgctattgcttgatgtagttacagtggaagagacaggttgaattctgacaaatggaatacaattcctggatgggtgaaataatggtgtgtttagaacwttcccttgaagaacactcatcatcagtaaccagtccaagtgatatacctggtttgagaggcatcggctgccaaaaaactgcatgttcaacaatggtgccagagcaccctgccaacatttcctcagaagttaactcatcagataaatcctttaatgacagcaaaggtgtgttggtaaatttgaaacaatcagctctctggagacaaggtcctgattttttgtagcattttacaatttccaccatgctcccatcactaaatacttcaaccatgttgactttccacctaccagtgtgacatccctgcatc

SEQ ID NO: 289701 - DNA, 573 bp, Homo sapiens
gtaaatttgaaacaatcagctctctggagacaaggtcctgattttttgtagcattttacaatttccaccatgctcccatcactaaatacttcaaccatgttgactttccacctaccagtgtgacatccctgcatcactgaacatggagctgggaagtgatttgcagttggattcccacagctggtacatactggccccagcacaccactgaatgaaaggtcctttgcaccagctccagaaatagaaagggggaaattaattattttattttgtggaaactattttttttttctggttttatgcactgcaaattcttctttttcttgggctttaaagatggatctttttcattacctcttcttrgggttcttcccaagaaatccacaaactgccctcctttggatcccccatcacctgtcaatgcaacaacctatgtaattttatgttttcttttagtgcagttgtataatttagctgtcaggtggctaattagagccagtctcgttgtagaggtgttgtagatataacactgaatgaagattagaccacttatgattcagaagatagggcaaa

SEQ ID NO: 289702 - DNA, 573 bp, Homo sapiens
gtaaatttgaaacaatcagctctctggagacaaggtcctgattttttgtagcattttacaatttccaccatgctcccatcactaaatacttcaaccatgttgactttccacctaccagtgtgacatccctgcatcactgaacatggagctgggaagtgatttgcagttggattcccacagctggtacatactggccccagcacaccactgaatgaaaggtcctttgcaccagctccagaaatagaaagggggaaattaattattttattttgtggaaactattttttttttctggttttatgcactgcaaattcttctttttcttgggctttaaagatggatctttttcattacctcttcttggggttcttcccaagaaatccacaaactgccctcctttggatcccccatcacctgtcaatgcaacaacctatgtaattttatgttttcttttagtgcagytgtataatttagctgtcaggtggctaattagagccagtctcgttgtagaggtgttgtagatataacactgaatgaagattagaccacttatgattcagaagatagggcaaa

SEQ ID NO: 289703 - DNA, 507 bp, Homo sapiens
gtgggaactgaacaatgaggacacttggacacagggaggggaacatcacacactggggcctgttggaggatagggtcctgggggagggatagcattaggagaaatacatcatgtaaatgatgagttgatgggtgcagcaaaccaacatggcacatgtatacctatgtaacaaacctgcacattgtgcacatgtaccctagaacttaaagtataataaatacatatatacacacacayacacacaaaagaaaaacatgatcaagtttgatatgtagttatatcaactgtatttttcataattccttatatcttgaagatattcccatttgccttgcatgcatatttcaaacacatcccagattatcatgtcatagggtgaggccaaatgcttcagccatttctggaatttatcgagtcttatgtgatataagattagaaaaacatttatatcatctactctaatttccttattttaagaatgaagatactgaaacatagatatgctcc

SEQ ID NO: 289704 - DNA, 507 bp, Homo sapiens
gtgggaactgaacaatgaggacacttggacacagggaggggaacatcacacactggggcctgttggaggatagggtcctgggggagggatagcattaggagaaatacatcatgtaaatgatgagttgatgggtgcagcaaaccaacatggcacatgtatacctatgtaacaaacctgcacattgtgcacatgtaccctagaacttaaagtataataaatacatatatacacacacacacacacaaaagaaaaacatgatcaagtttgatatgtagttatatcaactgtatttttcataattccttatatcttgaagatattcccatttgccttgcatgcatatttcaaacacatcccagattatcatgtcatagggtgaggccaaatgcttcagccatttctggaatttakcgagtcttatgtgatataagattagaaaaacatttatatcatctactctaatttccttattttaagaatgaagatactgaaacatagatatgctcc

SEQ ID NO: 289705 - DNA, 526 bp, Homo sapiens
ttttacactcttaaacacatttctcctcctgacatttatttttggccatcaacttatagcaayaattccagaaatgaaattgcatactggaaatagttttaaaatataaattattattcgggacaaaatttaaacataatgagtgtgattaaaatcacttgcagcaaaggcaacttgtgtggcaatgtcagtcagttaccaaaaaacaaagaaattgccatttcttttcaagcttttgaaatccagacattttcactttcagtaatgattaaaatgaaattacgattgacttgagtgtcagaaaatcacaggaaagtttcaagatcattttctaagataaaaacttctttatgatgatgtaggagctatttattttcattgaaaagccaaaaatatttaaattaattgaggaaaataaaaataaaatttaagagaagagaaatggaagtgcaatataaaaaacagaaaagaggaaataaaacatcacaaattcaaaatgagggaaaataatgttttttcatacaca

SEQ ID NO: 289706 - DNA, 606 bp, Homo sapiens
gaggcacatgtacagagtatttcctttgagttgagtgttccacatttacagctcacagctgctttacatgcataacctgctaaccctcacgacagtactatgaggatgagattattactattctctttccacagataaccatgtaagatggataatttgttcaattacaaaatgtcgatgctctaaactaaatccatctgactccacagcccattctgagcttctaactactttgccctcaggggatgaacatcgttccagaaagagcaactcctggccgtgagtcaaaaaacaatttaaaaactattgtttggaagaacttgcttaaatcaatatctgtttttagaaatgagacaataaaratcacaggatctcatatcccagaatcacaaagaattagagccatgttagacaaaggaatttgaaattattcaacgcattgtgtctctattctgtgctccacatgatacctcaacactatgaaacattttgtaatacagatttatgaaatatgaaaagagattctcaatctctttgtgttttaagtccctaatgccaatcttttattatgaaaaagaaaagaagtgttatttttttttagaatta

SEQ ID NO: 289707 - DNA, 584 bp, Homo sapiens
tatatttattcaacatgtacttatacattatttggttaatggacatttagactttttctgggggtttttaattaaactcttatyaacagtgtgtattagtcagttttcatgctgctgataaagacatacccaagactgggaaatttacaaaagaaagaagtttattggacttacggttccacatggcagaggaggcttcacaatcatggcagaaggcaaggagcagccagtcatgtcttatgtggatagcagcaggcaaaaagagagcttgtgcaggaaaactcccccttacagtaaccatcggatcctatgagacttactttctatcacaagaacagcatgggaaagatctgcccccatgattaaattacctccctccaagtccctcccacaaaacatgggaattcaagatgagatttgagtggagacacagacaaaccatatcattccagcctggtccctctcaaatatcatgttctcacatttcaaaaccaatcatgccttctcaacagttccccaaggtcttaactcatttcagcattaactcaaaagtccacagtccaaaatctcatccaagacaaagc

SEQ ID NO: 289708 - DNA, 584 bp, Homo sapiens
tatatttattcaacatgtacttatacattatttggttaatggacatttagactttttctgggggtttttaattaaactcttatcaacagtgtgtattagtcagttttcatgctgctgataaagacatacccaagactgggaaatttacaaaagaaagaagtttattggacttacrgttccacatggcagaggaggcttcacaatcatggcagaaggcaaggagcagccagtcatgtcttatgtggatagcagcaggcaaaaagagagcttgtgcaggaaaactcccccttacagtaaccatcggatcctatgagacttactttctatcacaagaacagcatgggaaagatctgcccccatgattaaattacctccctccaagtccctcccacaaaacatgggaattcaagatgagatttgagtggagacacagacaaaccatatcattccagcctggtccctctcaaatatcatgttctcacatttcaaaaccaatcatgccttctcaacagttccccaaggtcttaactcatttcagcattaactcaaaagtccacagtccaaaatctcatccaagacaaagc

SEQ ID NO: 289709 - DNA, 584 bp, Homo sapiens
tatatttattcaacatgtacttatacattatttggttaatggacatttagactttttctgggggtttttaattaaactcttatcaacagtgtgtattagtcagttttcatgctgctgataaagacatacccaagactgggaaatttacaaaagaaagaagtttattggacttacggttccacatggcagaggaggcttcacaatcatggcagaaggcaaggagcagccagtcatgtcttaygtggatagcagcaggcaaaaagagagcttgtgcaggaaaactcccccttacagtaaccatcggatcctatgagacttactttctatcacaagaacagcatgggaaagatctgcccccatgattaaattacctccctccaagtccctcccacaaaacatgggaattcaagatgagatttgagtggagacacagacaaaccatatcattccagcctggtccctctcaaatatcatgttctcacatttcaaaaccaatcatgccttctcaacagttccccaaggtcttaactcatttcagcattaactcaaaagtccacagtccaaaatctcatccaagacaaagc

SEQ ID NO: 289710 - DNA, 615 bp, Homo sapiens
agctgagtggttagaactacaggtgataacctattacttgcatttggcatctgaaacggcagtcctgtgggactgagccctcaaactgctatctccaggtagatgagtcagaattgaatggaatcaaaggacacccagcattcatgtttgttgaagaagtgattgctttggtgtgtggttttgtgttgaatggtgtgtaacaggaaaaaatccattttttgtgtgtattacagaataggaaaggtagtatacctaaaaaaacagcmtaagttatttaaaatgaatttctctaacacctagaaatatttcctttccctgctaatgactgaatttcattgtcattaggtaattaatgagttttaccccaaaccaaaaagcttttcttacctgaattagtcatcaatgacaaaggtgtttattttaatacaaaaatacaacttatatcattgaattaaacagttcgctgatgtgtttggggcagtaaatggaatgtgaaaccctgcaaagtcaaaggaactcaggaaaatgcaaaggcttgataattgcccagaggctaaagttgaaactaaggcaatggtcatttggtttttacatttaaaaaaatgattcacattt

SEQ ID NO: 289711 - DNA, 615 bp, Homo sapiens
agctgagtggttagaactacaggtgataacctattacttgcatttggcatctgaaacggcagtcctgtgggactgagccctcaaactgctatctccaggtagatgagtcagaattgaatggaatcaaaggacacccagcattcatgtttgttgaagaagtgattgctttggtgtgtggttttgtgttgaatggtgtgtaacaggaaaaaatccattttttgtgtgtattacagaataggaaaggtagtatacctaaaaaaacagcctaagttatttaaaatgaatttctctaacacctagaaatatttcctttccctgctaatgactgaatttcattgtcattaggtaattaatgagttttaycccaaaccaaaaagcttttcttacctgaattagtcatcaatgacaaaggtgtttattttaatacaaaaatacaacttatatcattgaattaaacagttcgctgatgtgtttggggcagtaaatggaatgtgaaaccctgcaaagtcaaaggaactcaggaaaatgcaaaggcttgataattgcccagaggctaaagttgaaactaaggcaatggtcatttggtttttacatttaaaaaaatgattcacattt

SEQ ID NO: 289712 - DNA, 615 bp, Homo sapiens
agctgagtggttagaactacaggtgataacctattacttgcatttggcatctgaaacggcagtcctgtgggactgagccctcaaactgctatctccaggtagatgagtcagaattgaatggaatcaaaggacacccagcattcatgtttgttgaagaagtgattgctttggtgtgtggttttgtgttgaatggtgtgtaacaggaaaaaatccattttttgtgtgtattacagaataggaaaggtagtatacctaaaaaaacagcctaagttatttaaaatgaatttctctaacacctagaaatatttcctttccctgctaatgactgaatttcattgtcattaggtaattaatgagttttaccccaaaccaaaaagcttttcttacctgaattagtcatcaatgacaaaggtgtttattttaatacaaaaatacaacttatatcattgaattaaacagttcgctgatgtgtttggggcagtaaatggaatgtgaaaccctgcaaagtmaaaggaactcaggaaaatgcaaaggcttgataattgcccagaggctaaagttgaaactaaggcaatggtcatttggtttttacatttaaaaaaatgattcacattt

SEQ ID NO: 289713 - DNA, 615 bp, Homo sapiens
agctgagtggttagaactacaggtgataacctattacttgcatttggcatctgaaacggcagtcctgtgggactgagccctcaaactgctatctccaggtagatgagtcagaattgaatggaatcaaaggacacccagcattcatgtttgttgaagaagtgattgctttggtgtgtggttttgtgttgaatggtgtgtaacaggaaaaaatccattttttgtgtgtattacagaataggaaaggtagtatacctaaaaaaacagcctaagttatttaaaatgaatttctctaacacctagaaatatttcctttccctgctaatgactgaatttcattgtcattaggtaattaatgagttttaccccaaaccaaaaagcttttcttacctgaattagtcatcaatgacaaaggtgtttattttaatacaaaaatacaacttatatcattgaattaaacagttcgctgatgtgtttggggcagtaaatggaatgtgaaaccctgcaaagtcaaaggaactcaggaaaatgmaaaggcttgataattgcccagaggctaaagttgaaactaaggcaatggtcatttggtttttacatttaaaaaaatgattcacattt

SEQ ID NO: 289714 - DNA, 563 bp, Homo sapiens
ctgttggcaatgaatagctgtgtgtctacaccatttcatatttttgtcaatgtatcattggaataggttcctaaaaggagaaactctgagtcagagaaacatatgcatgtgtgattttactagatattactaaccttctctccatagtggttgaacagtcctgaaatcttaccaccaacatataagagtatatgtttctctatagtttcccccacagagattttcacttttattttggttagctctagtataatactgtataataaaattcattagtttaaatatataatttgatgagctttgacaaatatagacagtggtgtaaccaccatcaccattactgtatgtaaaattttaaacatacatttgtgtccctttgcaattaattctctcctccaaatgcctagaccccgtgcaacyactgacctgctttatatgactatagtttctgtttttttaaagtctgttaaataaatgaaatcttataacatgtagtcttttgtttctagtttctttcactttgacatttgttcatgttgttcttactagaggtctttccaatt

SEQ ID NO: 289715 - DNA, 597 bp, Homo sapiens
cataatatcaaaattttaaaacttaaaaataatggtttacacagtggtgcagtcccacagcagctaactggcaaatgtattggaaaggcttttagagggtactaacctgacagtagcagagacagtcaaggtgctgctrttgaaacggccaaaactgtataagcactggtgcagttacacatgtttataattttgatcctgggatatccaaaaagtgaaaattgccttcaattattttctgcttaagtgggcatgaaatcaagttacatatttaaaaaatatagttgacccttataatccacaggtttcatatctacagattcaacaaatattttcaaatgttttgaaaatgttcaaaaaagaactaataaaaacagtgtaccaatcaaataatacaacaaaaataacacagcataacaactatttacatagtatgtacattctattagatatcataatctaaagatgattgaaagtataagaagggatgagcataggttatatgcaaatacaacactttttaaaaattttccaacttttaagttctggggtacatgtacatgcaggaagtggaggtttgttacataggtaaatgtg

SEQ ID NO: 289716 - DNA, 1195 bp, Homo sapiens
cataatatcaaaattttaaaacttaaaaataatggtttacacagtggtgcagtcccacagcagctaactggcaaatgtattggaaaggcttttagagggtactaacctgacagtagcagagacagtcaaggtgctgctgttgaaacggccaaaactgtataagcactggtgcagttacacatgtttataattttgatcctgggatatccaaaaagtgaaaattgccttcaattattttctgcttaagtgggcatgaaatcaagttacatatttaaaaaatatagttgacccttataatccacaggtttcatatctacagattcaacaaatattttcaaatgttttgaaaatgttcaaaaaagaactaataaaaacagtgtaccaatcaaataatacaacaaaaataacacagcataacaactatttacatagyatgtacattctattagatatcataatctaaagatgattgaaagtataagaagggatgagcataggttatatgcaaatacaacactttttaaaaattttccaacttttaagttctggggtacatgtacatgcaggaagtggaggtttgttacataggtaaatgtgwcataatatcaaaattttaaaacttaaaaataatggtttacacagtggtgcagtcccacagcagctaactggcaaatgtattggaaaggcttttagagggtactaacctgacagtagcagagacagtcaaggtgctgctgttgaaacggccaaaactgtataagcactggtgcagttacacatgtttataattttgatcctgggatatccaaaaagtgaaaattgccttcaattattttctgcttaagtgggcatgaaatcaagttacatatttaaaaaatatagttgacccttataatccacaggtttcatatctacagattcaacaaatattttcaaatgttttgaaaatgttcaaaaaagaactaataaaaacagtgtaccaatcaaataatacaacaaaaataacacagcataacaactatttacatagtatgtacattctattagatatcataatctaaagatgattgaaagtataagaagggatgagcataggttatatgcaaatacaacactttttwaaaattttccaacttttaagttctggggtacatgtacatgcaggaagtggaggtttgttacataggtaaatgtg

SEQ ID NO: 289717 - DNA, 535 bp, Homo sapiens
cagttccacatttttgggtatccttataacagcacgcctctccctcagataccaattttctgtattagccttttctcatgctgctgtaagaacatacccaagactaggtaatttataaaggaaagaggtttaattgactcacagttctgcatggctggggaggcctcaggaaatttacaattatggcagaaggggaaacaaaaacagccctcttcacatggtggtggagagagaagtgccaagcaaagttgggggggagcaaattcccttttaaaccatcagatctcatgagaattcactcactatcatgaggacagtatggaaataacctcccycatgattcaattacctctcactgggtccctctcacaacacatgggaattatgggaactaaaattcaagatgaaatttgagtggggacacagtcaaaccatatcatcatcacctaggtattaagccagcatgcattagctgtttatcctgatgctctccctccccttatcccacccctgacaggctccagtgtatgttgtt

SEQ ID NO: 289718 - DNA, 592 bp, Homo sapiens
tggtttgccaggattttgttgagaattttggcactgattttcatgaagtgtattggcccaaagtttctctctctccttctctctctctctctgtctctctctctatctcactctctgtatctctgccaggtttttgtatcaggatgatgctggcctcataaaatgakttagagatgagcccctccttttcaatttttttgcaatagtttcagtaggaatggcacaaggtcttctttgtatctctggtagaattcagctgtgtatctctctggtctggggatttttcatttggtaggctacttataactgcctcaatttcagaactcattactggtctactcagggattcagtttcttccttgttccatcttaggaggatgaatgtgtccaggaatttattcatttcttctgtattttctagtttatgtgcatacaggtgtttataatattccctgctggttgtttgtatttctgtggggtcagcaggaacatctctcttgtcattcctgtttgtgtttatttgaatctcctctcttttcttctttattagtctagcttgtggtctattttattaatttttttcaaaaaaaat

SEQ ID NO: 289719 - DNA, 1137 bp, Homo sapiens
tggtttgccaggattttgttgagaattttggcactgattttcatgaagtgtattggcccaaagtttctctctctccttctctctctctctctgtctctctctctatctcactctctgtatctctgccaggtttttgtatcaggatgatgctggcctcataaaatgagttagagatgagcccctccttttcaatttttttgcaatagtttcagtaggaatggcacaaggtcttctttgtatctctggtagaattcagctgtgtatctctctggtctggggatttttcatttggtaggctacttataactgcctcaatttcagaactcattactggtctactcagggattcagtttcttccttgttccatcttaggaggatgaatgtgtccaggaatttattcatttcttctgtattttctagtttatgtgcatacaggtgtttataatattccctgctggttgtttgtatttctgtggggtcagcagkaacatctctcttgtcattcctgtttgtgtttatttgaatctcctctcttttcttctttattagtctagcttgtggtctattttattaatttttttcaaaaaaaatwatggttttgagtgaatttcttaataatgaggtctaatttgtttgtgttgtggtccaagaaactgtttgttattatttcatttcttttgtatttgctgaggagtgttttagttttgactatgtgatcaattttagagtaggtgccaatactacaatattttatatccaggwcttgaccatctgcagatttgggtatctgcaggaggttatggaaccaatctgtgtggatacctatgaaggactgtagcattaaaaatattttaaaaaatttttattattaaaagtgttgatattttaaggagctatgttcattgaactggaaatctctcttgaacagtataacttattatttaaaatggttggctaaatgaagcttccaagtattaatagtttttgctaatttaggttttgagtcttctagtggttaattgattgttttaacttttttccaccttattaaatagtatagctttggggaatagtaaaatgaattatttatattcatgtgcgaaaccagaaaagacccttagaagttaagcagcctg

SEQ ID NO: 289720 - DNA, 839 bp, Homo sapiens
ggagacgtggccatacaatcacttatatgcaaatcattgaattaaaggaaacattcttctccaaagtacaaagatycatcttccaggataattgagtcaaaatcaacatttagaagaaataaataatattttatttatcactacaaatgcacaagtctactaagtggccagtcaatttacattattcagcaaaacacttttctcattctttgtaattataatttcatagtattctccaaaaataatacatggattttttttgttgtttttgagacttaaggggatttttgataactttttttcaacataaaatttacctattccaaaggttaaatgatagcttcatcccaggagtcgaaacactgctagcaactttcaaataacattttctagatttcagaaatattactttacctgggwggagacgtggccatacaatcacttatatgcaaatcattgaattaaaggaaacattcttctccaaagtacaaagatccatcttccaggataattgagtcaaaatcaacatttagaagaaataaataatattttatttatcactacaaatgcacaagtctactaagtggccagtcaatttacattattcagcaaaacacttttctcattctttgtaattataatttcatagtattctccaaaaataatacatggattttttttgttgtttttgagacttaaggggatttttgataactttttttcaacataaaawttacctattccaaaggttaaatgatagcttcatcccaggagtcgaaacactgctagcaactttcaaataacattttctagatttcagaaatattactttacctggg

SEQ ID NO: 289721 - DNA, 574 bp, Homo sapiens
agttgcaatttaaatattgcatctttataatattatttgtgtttagttatacctcttcaaataaactatatctaacatctytgagctgaggtcttttgggagacaactctcacatatttctgcacattttacaagcaaaggtactagctgccttttttccaaaactatctttcaaaaatttttgcgagtgaacaactttggaagagatgctatctccccctggagcaaagttcaggtttgtttactgtacagtataataaagataatgtcttcctttgaggaaaagttcaagaaggcttactgtcaattttaaaagagttgcatctgctaaacttgggattcttctgttgtaggtatcacatcctcttcttcctgttatcctgtgagtactgtggcctgataagctggtacaaaatgaacatgctctggctactgttatgaataataaattactgtgtgagtaataaattgcctattgtctcttatccagaagtgtcgtgtcttctgctggactggcattcaagatactgtggcaggctaatgtgttagttccaagtaagttcagatctcagat

SEQ ID NO: 289722 - DNA, 574 bp, Homo sapiens
agttgcaatttaaatattgcatctttataatattatttgtgtttagttatacctcttcaaataaactatatctaacatctttgagctgaggtcttttgggagacaactctcacatatttctgcacattttacaagcaaaggtactagctgccttttttccaaaactatctttcaaaaatttttgcgagtgaacaactttggaagagatgctatctccccctggagcaaagttcaggtttgttyactgtacagtataataaagataatgtcttcctttgaggaaaagttcaagaaggcttactgtcaattttaaaagagttgcatctgctaaacttgggattcttctgttgtaggtatcacatcctcttcttcctgttatcctgtgagtactgtggcctgataagctggtacaaaatgaacatgctctggctactgttatgaataataaattactgtgtgagtaataaattgcctattgtctcttatccagaagtgtcgtgtcttctgctggactggcattcaagatactgtggcaggctaatgtgttagttccaagtaagttcagatctcagat

SEQ ID NO: 289723 - DNA, 507 bp, Homo sapiens
agaagcagccacattggcagtcactgtggatgactgatgatgtgacaaagcccttgaagctttttgcaggctgagaacataaaactacaaagtagcacaagcggaaaycaaaatagctgaagcaaaacacagcaagaaaagagaaaatgttaggaagagaatagtgaaatacctggaagaaaataatggaagagtagaacatgagatgaagaacagagttcataatacaatacatgcatttcagatataaaaattgaaatacatttattcaacaaatatgcattaagatctgattgtgtcccagacactactgtacacacttgggatacatctgtgaatgaaagaagacagtaagcccagccatcaggtagcttatatggggaagtaggccagagaggcaaacaataaaaaaaaaaaaaatagatgtgaggcttcaaacaagataaaggatttaaggtcaacaatcatgctaagtattcagtctacacatgcagagaaagaattaga

SEQ ID NO: 289724 - DNA, 507 bp, Homo sapiens
agaagcagccacattggcagtcactgtggatgactgatgatgtgacaaagcccttgaagctttttgcaggctgagaacataaaactacaaagtagcacaagcggaaaccaaaatagctgaagcaaaacacagcaagaaaagagaaaatgttaggaagagaatagtgaaatacctggaagaaaataatggaagagtagaacatgagatgaagaacagagttcataatacaatacatgcatttcagatataaaaattgaaatacatttattcaacaaatatgcattaagatctgattgtgtcccagacactactgtacrcacttgggatacatctgtgaatgaaagaagacagtaagcccagccatcaggtagcttatatggggaagtaggccagagaggcaaacaataaaaaaaaaaaaaatagatgtgaggcttcaaacaagataaaggatttaaggtcaacaatcatgctaagtattcagtctacacatgcagagaaagaattaga

SEQ ID NO: 289725 - DNA, 596 bp, Homo sapiens
tacacattaggtcacaaaacaagtcttaacagatttatgaagactgaaatcacaccaagtatcttttctgaccacaagagtatgaaactaggaatcaataaccagaggaaaattggaaattcacaaatatgtgacaattaagcaacatatttctgggaaaccaatgggtcaaataagaaaacaaacataaataaaaaattaatctaaatgaaaatraacacacaatatgccaaaacaagggatgcagcaaaagcagttctaggaaagaagtttatagcaataaatgcctacagtaccaaaaaagaaagatctcaaataaacaacaaacctttacaaataactaaaaaaaagaagagtaaactaagcccaaagttagcacaaagaaggaaataataaagattacagcagaaataaatgaaataaaaacattaaaaattagaaaaggtcaacaaaacagttggtttcagacaagatgaatgaaatgacaatcctttgactagattaactaataaaaaaagatatcagactcaaataaaatcagaattgaacaagacttaacaactgataccacagaaataaaaaggatcataaaagac

SEQ ID NO: 289726 - DNA, 409 bp, Homo sapiens
tctcactacgttgctctggctagtctcaaactccctgcctcaagcaatcctgccaccttggcctcccaaaatgctaggattagaggcctgarccactgtgcctggcaaattctcattccaagagctaggaagcgcagtatccagcatcaatccacaactccattaatagcaaatgtggaagaagttcaaagaccagtgctcactggtgcagactattctctgtgcttctgaacttactatactcacaatttccaattttcacaacttgggacagaattcatttgctcacttatttagtaatttatttatacagcaaatgcttattgaatgcctattgtatgcctggaactgcaaatacagtactgaacaaaacagaaaacgttttatcctactggaacttatatttcag

SEQ ID NO: 289727 - DNA, 572 bp, Homo sapiens
gttgtagttacagatgtgttgaaatctgtttctctgtggaatagttttcttagatttttagttcattctttaatctggaatcagaggtaagaattaagttgtttctcacttttctaaatatacagatcaatattctgctacctaaaattatgattcctacataatacttaataaaaaatacttatttgttaagtgcaagtgaaaatgtgtgttaaataagttggttttgaaaatattcttttaagtgacataagargctgagcgcagtggcttacgcctgtaatcccaacactttgggaggccaaggcaggcagatcacctgaggtcaggagttcgagaccagcctggccaatatggtgaaaccccatctctactaaaaatacaaaaattagccaggcatgatggtgggtgcctgtaatcccagctactcgggaggctgaggcaggagaatcgcttgaacctgggaggcggaggttgccatgagccaagatcgcaccgctgcactccagcctgggtgacagagcaagacggaaaatgattgttgtgttcttcatacctcattgcttacttat

SEQ ID NO: 289728 - DNA, 576 bp, Homo sapiens
tcactgcagccttaacttccctgggtcagatgatcgtcccaagttagccttcctcatagctgggaccacaggcatgcaccaccacacccggctcatttttgtattttttatagagatggggttttgccctgttgcccaagctggtctcaaacccctgggctcaagtaatctgcccgtctcagcctcccagagtgctgggattacgggtgtgagccatcatgtccagcccaaaaatgtttttaaggctgcatatgaaatgtattattgttttaacttccattgtcaatatatgagtggtttttttactatgcccttcctattgctaaatgctatcatttttatagctttattgacrtataattgatgtacaataaactccacgtatttaaactgttattgaatgagttttgacatgtgcttgcactagtgaaactgtcaccacaacaatcaagataaggaatacttctattccttccaaaagttccttactgcctctttgtaatatcccttattctttcttccacccccatccacaggcaagtattgatcagctttttatcactagacattggcagg

SEQ ID NO: 289729 - DNA, 475 bp, Homo sapiens
ctggccaggtgtctgcactaagtttggcatgaatatggtgacctcccaggagagggaggtcagaaatggacgcaggtcaaaactcctgtgctggtcagtggtgggsttgcacccatcattagccactgcgctccagcctgggcaacagtgaggccctcttataaaaatatctctttattaaaaaatataaataaaatatattagcataagtatatattgtttgcatgaagccaatgactgcatctgtaagtgcagttctgtttgcttgagctagcctgtgtcttgtttatatatgattaagggactttatttggctttagtttttctatgcgttcctcctcttctctgcacaagttttgatctcatttattccctagatgtttgaaagtggacacactagatttctctaatgtaaaaggaatgatgtgttttaaatttacatgactaatattttttcatgcaaatcattcaaatt

SEQ ID NO: 289730 - DNA, 365 bp, Homo sapiens
agttttaaaattatgtacatttttaaagatataatgctactgtaaacttaatagactacaggacagtataaacataagttyagtatacactgagaaacaaaacatttgtgtgactcactttattgtgctatttgctttactgtgttgctctggaactgaatctgcaatatttccaaggtatgtctgtgtgtatccatagtaaatatcaattagagattatataaatcataatatttagaatataacagaataaattcaccaaatgatttcaggagcataaaaatatcgaatatattagtcctttaatagtcttatcagtcttcatagaaataatgactcaatgcatgctctattgctaagagaat

SEQ ID NO: 289731 - DNA, 638 bp, Homo sapiens
tgatacaagttcatgtgaaaatgtgttatggataaaagtaaaggatgaaagagagctagaggaaggctgagcaagaaggctagctctgttagcttatcagaaagctttactgataaggagagatttgtgctgagtgaattaagggaagmattatgtagataggtggggaaagaatattccacacaggaaaaaagcaaatacagaagctctctcagggtggggcaaataagcaggtcttgacatgtttaagaaacttcaaggcctgagcgtctgaaagtgagatgaggttagagagatagtcaagtgctacatgatgggatgcatgtacacgtccaccctcacacatacacacaaacacgctgtggttcatacacacgtatgcatacgtaaataatattaaaaatgaagggtctatttctaatagggcataaggatagcaacggtggtaagtgctgattgtgaataaggaaagctgcattgcatttcatatacattttgccacacatttggcctttcttaaaatgttatattgctgtctaccctaaaatggttcaacaagtaaggtatgcattgaaatacctgtgttgactccaattatgaccaaatcctaaactgtggacaatggatatttaccatgc

SEQ ID NO: 289732 - DNA, 638 bp, Homo sapiens
tgatacaagttcatgtgaaaatgtgttatggataaaagtaaaggatgaaagagagctagaggaaggctgagcaagaaggctagctctgttagcttatcagaaagctttactgataaggagagatttgtgctgagtgaattaagggaagaattatgtagatakgtggggaaagaatattccacacaggaaaaaagcaaatacagaagctctctcagggtggggcaaataagcaggtcttgacatgtttaagaaacttcaaggcctgagcgtctgaaagtgagatgaggttagagagatagtcaagtgctacatgatgggatgcatgtacacgtccaccctcacacatacacacaaacacgctgtggttcatacacacgtatgcatacgtaaataatattaaaaatgaagggtctatttctaatagggcataaggatagcaacggtggtaagtgctgattgtgaataaggaaagctgcattgcatttcatatacattttgccacacatttggcctttcttaaaatgttatattgctgtctaccctaaaatggttcaacaagtaaggtatgcattgaaatacctgtgttgactccaattatgaccaaatcctaaactgtggacaatggatatttaccatgc

SEQ ID NO: 289733 - DNA, 548 bp, Homo sapiens
tgctggtgagatacgaaattgttaaaagcttctccaaaagcagtctggccgcatctgtggatatgtgaaatagagatactccttgacccagcarttttaaccccggtgctctgccccattaaaatgaaggcatcagatttaaataagaatacatcatatatcgaaatatttttgttgcattgtttcttttggcaaaagaatgaaatggtaaatgcctttcatggagaatgacaaaatgtattttgagatatagtattcttatggcatattatacattccttaaaataattagtataccatttgacatcaacaaatttgcgtgcagtattgacaagcagaccatagagaagtgtgtataattagtaccctaatttggaatatgaagggcagcacacccctttgtgtgtgcacacatgcatgctctacatgtggctctttgggaacatgtggaaaagcacagaaaaatagatgccagcttcttaacatggattatagggtggtagagtggtggtggagatggaggagtggggtggcaagcaaaaagaaca

SEQ ID NO: 289734 - DNA, 584 bp, Homo sapiens
gcttaataacatagtaaaatatttgcatatatacttaatttgtcaaatcaaaaatattagaagaaatctacaaggaacatatatcagttgcttccattgtgtttagtaaaaaaaaaatggacttgggagagcactaggtagtattctactatttctgagggggctaacctggtttggaataatctctgtgtgttccctttttatttactcccttactcttctggtaaaaccaatcaggaagagaaaataagttatgaaaatagtgtttcccttttagttctgttttatctcatattgaacaaaaggtctctacacaagggtaacatttgtttagttaatactttctaaaatttaattttgaatttttctaatatcattcacacatgggcagatgtccatctgccattaaaktcctaggtatcttaaaagtgaattaatttttagcagttttagaagttccatttcatgtttggtttaggttagcatctcataatttcataaagtaaataaatttatatgggcaatactttcttcgctaatatgggtgttttgataatgtaggagcattatcatatataatgata

SEQ ID NO: 289735 - DNA, 584 bp, Homo sapiens
gcttaataacatagtaaaatatttgcatatatacttaatttgtcaaatcaaaaatattagaagaaatctacaaggaacatatatcagttgcttccattgtgtttagtaaaaaaaaaatggacttgggagagcactaggtagtattctactatttctgagggggctaacctggtttggaataatctctgtgtgttccctttttatttactcccttactcttctggtaaaaccaatcaggaagagaaaataagttatgaaaatagtgtttcccttttagttctgttttatctcatattgaacaaaaggtctctacacaagggtaacatttgtttagttaatactttctaaaatttaattttgaatttttctaatatcattcacacatgggcagatgtccatctgccattaaagtcctaggtatcttaaaagtgaattaatttttagcasttttagaagttccatttcatgtttggtttaggttagcatctcataatttcataaagtaaataaatttatatgggcaatactttcttcgctaatatgggtgttttgataatgtaggagcattatcatatataatgata

SEQ ID NO: 289736 - DNA, 579 bp, Homo sapiens
gttgaccatgaacattcatgcttcttccaagccatcctttctagatcacccctctatgtgtggctatgaagctccacattcagcactacacacatcctctaaggtccacttaaaatttcacagtgttttttgaacacacattaattgcgctttccccttctgttacattcccatcacattttgtttttctctctcctttccctgccatagtcttttatatattagagttattgcatgcagtaactatttcttgagctcacactccatgctggacactttgctagtgtgcagaaccttttttatgcttattctctagtaaggagacagatactaaagacagccatgcattccataacaacattttggtcaaggatagaccacatatatgacactgggcccagaagattataatggaacacaaaaatccctytcacctactgacgtatgagccttcctaatgtcatagcacaattactttatttttaataatttagtgtagcctaagtgtacagtgtttatgatgtctacagtaccatgcaataatgtcataggccttcatgttcactcatcagccagtcg

SEQ ID NO: 289737 - DNA, 589 bp, Homo sapiens
tacccaccttctgaagcctacttctgtcaattcgtcaaactcattctccatccagttgtgttcccttgctggcgaggaattgtgatcctttggaggagaagatgcattctggtttttggaattttcagccttttggtgctgttttttcctcctcatcatggatttatctactgttgctctttaatgcagaggacctttggattgagtttttgcatgtgtgtcctttttgttgatgttgatgttattgctttctgtttgctagttttcctcctaacaatcagtcccctcttctgcagatcagctggagtttgctggaggtccactccagaccctgttttcctgggcatcaccagtggaggctgcagaacagcaaagattgctgcctgctccttcctctggaatcttcatcccagaggagcacccgccagatgccakttggagctcttctgtatgaggtgtctgtcgacccctgctcggaggtctctttcagtcaggaggcagtctgtctgtagcagagcttgagcgctgtgctgggagatatgctgctctcttcagagccggcaggcaggaacgtttaagtctgctgaag

SEQ ID NO: 289738 - DNA, 497 bp, Homo sapiens
cagaaacagggagctatgtaattatacaagaatcatgtgcccaaggtaaaccgaagatttcctacctcctaaaagagtaaatggttcacactgcttaactttctcaaagagtagcataagggacatattactgagtttttgcccagttttaatctggttatttaggcttttttgttgttattcagttacagaagttatttatatactctggatgttaacccttaattaaatatagagagttctccaaagaagatatatgaatggccaataagcacataaaaagatgattaacatcactaatcattaaagaaatccaaataaaaactacaaaraaatatcatctcatattcattagggtgaccattatcaaaagaaaaaaaaaaaacagaatacaacacgtgttggtgaggatatagagaaactggggcatttatgcaatgttggtgggattgtaaaatagtgcagccattatggaaacagtataaaggttcctcaaa

SEQ ID NO: 289739 - DNA, 608 bp, Homo sapiens
gtatgccagcaaaaaaaaaagcatatgaaattcttaccagccaagtttctggkctctttctctctctctctttctctgtgtgtgtatgtaaatggtagacatcactatttgtcttctctgcatgagtctgattgatagaaaaaaggatttgtgaaactagtcttaggctgtagcaaatctggtgtgctttgtgctaagaatttgtctttctgtgtcattctgtaataggtatcacaggatacactgatggtttagggcccctataaggctgcttttaaagccagcctagcaggctggtcagttacaaactttgctgtgggaccctgacaccaatactggatgaaatttctctatcttgtgttgtgtccttaagagcttaactttgtgaccatgtggggatactttcccttggtttctgccatccagaggacagtaattttatggttcatatcatagccctaaaattatcttgagcagttaagagcctctgcaagcttgaaattggctgctttagacttcttctgggaagagcaatagaaactgctcaatgctgtgtagctcagtagctaaagctttgttttttgacaatggcagtccagattcaattc

SEQ ID NO: 289740 - DNA, 608 bp, Homo sapiens
gtatgccagcaaaaaaaaaagcatatgaaattcttaccagccaagtttctgggctctttctctctctctctttctctgtgtgtgtatgtaaatggtagacatcactatttgtcttctctgcatgagtctgattgatagaaaaaaggatttgtgaaactagtcttaggctgtagcaaatctggtgtgctttgtgctaagaatttgtctttctgtgtcattctgtaataggtatcacaggatacamtgatggtttagggcccctataaggctgcttttaaagccagcctagcaggctggtcagttacaaactttgctgtgggaccctgacaccaatactggatgaaatttctctatcttgtgttgtgtccttaagagcttaactttgtgaccatgtggggatactttcccttggtttctgccatccagaggacagtaattttatggttcatatcatagccctaaaattatcttgagcagttaagagcctctgcaagcttgaaattggctgctttagacttcttctgggaagagcaatagaaactgctcaatgctgtgtagctcagtagctaaagctttgttttttgacaatggcagtccagattcaattc

SEQ ID NO: 289741 - DNA, 615 bp, Homo sapiens
gatcaattttcaaaggatttttaagtatccacgtgtctaatagatttccccatggcttatctattaaaattctagatgacagcaatgacattcacagacatgactgcaatttgggaggcatakaagtgactggcctcaagttaaaagaagctcttcagggtggtcccatgaaataactacaagaactcggtgcttccaggagctgaagagagaagtaaggctctcattcaaggaaatgtcgttttaactagaacacaaagataatttttccaagatacagtaactcgtcaggattcttcaagagaattgtatgagtaataagtgaattcactgagtattgagtagtgagtaattctgtcagagaactgtatgtgttcaaaatattgtataatatctaagaaaactctgaaggaagacataagaggaggaaataagcactgggactcagagaagaattcatgccaacaaaatttccaagatacctgagcaggtcactcaatgaagtaaggacaagaaaaacctatgaagtccaactgaaaactccagtggaaagaatcaagtctaagtatatgatcagtaggtgaagtgcagggggatagaggcagggaatgggct

SEQ ID NO: 289742 - DNA, 618 bp, Homo sapiens
actgtaattaatgtgaaccatcctctcatgaacagacatttacggaactaaaggggagtcagagcatttcaaggtatgaactcattaaaactaagcttctctgaaatgagaatgactaagtacaaaatatctcatgcaactgataacttgttttttagacaattaaaaatatgaaaaagaaaytaacttctaatacttttatatattcaatacttttaaaggcacattttcatataaattagtgaagttttggacctactttcaacttgttcccccactttggcattctatcacatcaaatcacagtagtgtacaggtctcctctttggaattttgaaactcagtgtgaaatataagagcactattttagatgaaagtaaagatcttgctataagaaacagccgaagtaatcaattctttttaatcacagggctaagatgagtcctttagtagataatctgtgacatgaggccaaaaaaaaaaaaaaaaagaaacaattgtcaaaggtgactgggacaatgagcacagtgagtatagctgttcttatctctggagactagagcgctcatgtggatggagcattagtcaaaaattggggtggtgaatgcaattgttgct

SEQ ID NO: 289743 - DNA, 574 bp, Homo sapiens
tgttacataagtgtaaataattcagtacagacttggatatttaatttatgaacatctgcgctggttaagcttgcctgcaaagtctttcaatgattcagtgtaaaaattattcaatgtaatgttgcttgaacatttcatacaactttgctggcccacctgcccaacggtagcaaccayacttgtatgacatacttgtattgcatagcaagaatgctccacgatgttgtaaaacatcaacagaaaacagaaaaagttgcaacaactgacaattatttctgtgtctgttacaaccttatgagctaacaactaacacttaataacatcagacatggagctatgcacaattcatgtacactaaccccattctcagaactacgttgtagggttggtgctattatttaccacaggaaactgtgcaacagacataatcacacagaactgatcagtggaggagtcaaggtttgaactctggtcagctggtcttaccactgtgtaactattaatgataactgaaattaattaagttatttatcattgaattggttgaagtttggatattcaaaatattagactt

SEQ ID NO: 289744 - DNA, 541 bp, Homo sapiens
tgataatttccctgaatgtaaatggattaaattctcccataaaaagacacaaagtcactgaatggactgaaaaaacaagacccaactatatgctgcatacaaaagaataatggcacacacaaatacactgaaagtgaagaaatgtaagaagacattccatgcaagtggaaaccaaaagartagtgttagctatacttatatccaataaaacagactttgtcaaaaactgtaaaaagaagcaaaaaaaggacattatgtaatgataaatgggtcaatttatcaagaaaatataactgtaggtatacatgtacccaacatcagagcatctaaatatataaaacaaatattaaagggtctgaagggagaaataaatcacaattcaataattatagaagatttcagtacccccacttaaaacaataaatagatcatccatacagaaaattaataaggaaacattaaacttgaaaaatattttagactaaatggatctaacagacatacatagaatattccatccaacagcagcagaatacacatt

SEQ ID NO: 289745 - DNA, 541 bp, Homo sapiens
tgataatttccctgaatgtaaatggattaaattctcccataaaaagacacaaagtcactgaatggactgaaaaaacaagacccaactatatgctgcatacaaaagaataatggcacacacaaatacactgaaagtgaagaaatgtaagaagacattccatgcaagtggaaaccaaaagagtagtgttagctatacttatatccaataaaacagactttgtcaaaaactgtaaaaagaagcaaaaaaaggacattatgtaatgataaatgggtcaatttatcaagaaaatataactgtaggtatacatgtacccaacatcagagcatctaaatatataaaacaaatattaaagggtctgaagggagaaataaatcacaattcaataattatagaagatttcagtacccccacttaaaacaataaatagatcatccakacagaaaattaataaggaaacattaaacttgaaaaatattttagactaaatggatctaacagacatacatagaatattccatccaacagcagcagaatacacatt

SEQ ID NO: 289746 - DNA, 594 bp, Homo sapiens
aatatcactgatgaaattagatgcaaaaattctcaacaaaataactagcaaaccaaaatcaacaacacattaaaaagatcattcaccatgatcaagtgggattcatcccagggatgcaaggatggttcaacatatgcaaatcaatagatgtgatacatcacagtaacagaaccaagaagaaattatatgattaattcaacagataccacaaaaatattcaataaaattcaacatccttttatgataagaatcttgtcaaaatgggtatagaaggaatatacctcaaaatatgacagacacatagctagcatcatattgaatggggaataattgaaggtctttcctttaaggactggaacaagtcaagaagacaccactttcatttaacrtaatactgaaagtcctggccaaagaaattatgcaagagaaagaaatgaaaggcatctaagttggaaagaaagaagtcaaactagccttgttcacagatggcataattttatatattgaaagcctaaagacactactgaaaaactgttggaagtaataaatacagtaaagttacaaaatacaaaattgtcatgcaaaaattgccca

SEQ ID NO: 289747 - DNA, 607 bp, Homo sapiens
agacagtcacttcagtaaatgacaataggaaaaccaaatatccatttgcagagtaaaactagacctctatctctcagtatgtacaaaaatcaaatccaaatggattaaagacttaaatctaagatatcaaactgtgaaacaactacaagaaaacattggggaaaatctctargaatttgtctgggcaaaaatttcttgagcgatgatagcccacaagcgcaggcaaccaacgcaaaaattgacaaataggatcacatcaagttaaaaagcttgtccagaacaaaggatacaatcatcaaagtgaagacactacccacagaccacaacccacaggagaaaatatttgaaaactgcctatcagaccaaaggattcataatcagaatatataagcagcccaaataaccctacagaaagaaatctaataatctaattaaaacataggcaaaatattcaaataaacatttctcaaaaatgacatataaatagtaaacaggcatatgaaaaggtgctcaatatcaataataatcagagaaatgcaaattaaaatgacaatggtatgtcatctccccctagttaaaatggcttgtattcaaaagacaggcaaga

SEQ ID NO: 289748 - DNA, 586 bp, Homo sapiens
gaggtgacaattatgctgagatctgaggactaaggagagacagccatgaagagagagaacaggtggtacagaggctgtcctatctccattcctccagcctacaaggagaacctggcttttccctgcagccaagtgtctgccactcactgatctggagggagttgcaggagctcagaggagaacaggcatttaactccagacagcattcagagtcttatagaaaccccagggagtttatcacatctaagaccctgatagcatctgtattagaaataagaatccaaccasacagctcatgaaagattagctttaattctttcagaagagaaaatggcttataccaaaaaacagaagaaatatcactatgatcctacacacacttaaaaaaaggtactattatttaaatttttaagtgaaaaaatgttgattgcttagttgaaacagacatatttcttgagagaatgagttaccaaaactgattctataagagcagaaaatctgaataactcccttgtgaattaaagagactgtattagaattaagcccttcctataaataaaattcaaaactcagatgacttcacttg

SEQ ID NO: 289749 - DNA, 586 bp, Homo sapiens
gaggtgacaattatgctgagatctgaggactaaggagagacagccatgaagagagagaacaggtggtacagaggctgtcctatctccattcctccagcctacaaggagaacctggcttttccctgcagccaagtgtctgccactcactgatctggagggagttgcaggagctcagaggagaacaggcatttaactccagacagcattcagagtcttatagaaaccccagggagtttatcacatctaagaccctgatagcatctgtattagaaataagaatccaaccacacagctcatgaaagattagctttaattctttcagaagagaaaatggcttataccaaaaaacagaagaaatatcactatgatcctacacacacttaaaaaaaggtactattatttaaatttttaagtgaaaaaatgttgattgcttagttgaaacagacatattycttgagagaatgagttaccaaaactgattctataagagcagaaaatctgaataactcccttgtgaattaaagagactgtattagaattaagcccttcctataaataaaattcaaaactcagatgacttcacttg

SEQ ID NO: 289750 - DNA, 602 bp, Homo sapiens
catcatgcttaatagtatgatattacactatttcagtagtagtgaagacaaggcaaagatatctgctgtaacttctgtttcacgttgtgtttgaggttgtactcaagaaaccatgcaagaaaagaaataaaaatcatactacttggaaaaaaagagccaaaattgtcttaatttgcaagacatgactgtacataaaaaataccaaaaaatttacccaaaaagtgactagaattaagaaccaaacttagcaaatttgcaggatacaaaatcaatatgcaagactcagttatgttgatatatcccagcataaacaattagaagatgagatttagaaaataatactatttacagtaacataaaaatgagatatttagggataaatttaataaaatatgtayactgaaaattataaaacatggctgagaacaattaaagacctgtgtagatgaaagatattgggaaactcaataaaattgatccaaagattcaatacagtcctaatcaaaattctatcaggttttttctaaaaggtaaaaacttgattataatatttatatggaaataaaagagacatataacagtaaaaacaattttgaaaaaga

SEQ ID NO: 289751 - DNA, 586 bp, Homo sapiens
cacagctcattaggccccacctcttaacattgtcacattggagattgtttctagcacatgaactttgggggacacatttaaaccacagtaccctctcttctcaaactcctgtggacaataccctttgccactgtggctgtggctgtaataccattggctttctttcaccctggaaaacctttactaaaaaccctcttgacctacaatggcccttctggggatccttgtctgtcttgatattggttcacctagaagacacttagagtaacaagaaacaaaaatcttggatgcacaattcacttattctgcttggtatgaagaagctgaaaaatgactaaataattcaagctgtactcaaaactctaaaacaagaagaacttcttaaacaaggtattcagaaaacattttctgacccagttagccctgtatacccctcctatgrtattcccggagtcccctcgcagccctcctctgtatctttctttctcaaaatgtcccctgcacgtctcacccctagtccttcagctccctagagctgtcaggctcactgggccctctctcctgtaggtgaagccagagacgcagc

SEQ ID NO: 289752 - DNA, 586 bp, Homo sapiens
cacagctcattaggccccacctcttaacattgtcacattggagattgtttctagcacatgaactttgggggacacatttaaaccacagtaccctctcttctcaaactcctgtggacaataccctttgccactgtggctgtggctgtaataccattggctttctttcaccctggaaaacctttactaaaaaccctcttgacctacaatggcccttctggggatccttgtctgtcttgatattggttcacctagaagacacttagagtaacaagaaacaaaaatcttggatgcacaattcacttattctgcttggtatgaagaagctgaaaaatgactaaataattcaagctgtactcaaaactctaaaacaagaagaacttcttaaacaaggtattcagaaaacattttctgacccagttagccctgtatacccctcctatggtattcccggagtcccctcgcagccctcctctgtatctttctttctcaaaatgtcccctgcacgtctcayccctagtccttcagctccctagagctgtcaggctcactgggccctctctcctgtaggtgaagccagagacgcagc

SEQ ID NO: 289753 - DNA, 588 bp, Homo sapiens
tggcctatgttctttggtagggtggtaatagctgaaatgttccttaactctgtccactaatgatatcttgtagcttgacctcttgagaacccagtctcacttgtcaagctgtttcttgaggtttgggtgaagcasatgatccaatcctgttgtagcatgaatcttttagagtatggcaataagagaattgtagatattgacaaaatttctggaaggattacttttgaaaaattaattaaaattggtttattaaaaatcccacgaaaattttctacatgagatttagataaacacaataaaacatataaaagaaaaatgtttttcctgccatgtgtaatacacttttgaatactcttatagttaaattttatttgagatgggccatccaagtaccagcacttgcattatacctgataaattaataccattaacaccttgagaatgtattatctttgcataattaaaatgcattttctttactagtaatataaacaacttgagatcaggattgtatcttattcacttctgtgtcaggagtctatcatgataactggaatgctgtaaatgtttaacacatgtttgccccct

SEQ ID NO: 289754 - DNA, 588 bp, Homo sapiens
tggcctatgttctttggtagggtggtaatagctgaaatgttccttaactctgtccactaatgatatcttgtagcttgacctcttgagaacccagtctcacttgtcaagctgtttcttgaggtttgggtgaagcacatgatccaatcctgttgtagcatgaatcttttagagtatggcaataagagaattgtagatattgacaaaatttctggaaggattacttttgaaaaattaattaaaattggtttattaaaaatcccacgaaaattttctacatgagatttagataaacamaataaaacatataaaagaaaaatgtttttcctgccatgtgtaatacacttttgaatactcttatagttaaattttatttgagatgggccatccaagtaccagcacttgcattatacctgataaattaataccattaacaccttgagaatgtattatctttgcataattaaaatgcattttctttactagtaatataaacaacttgagatcaggattgtatcttattcacttctgtgtcaggagtctatcatgataactggaatgctgtaaatgtttaacacatgtttgccccct

SEQ ID NO: 289755 - DNA, 588 bp, Homo sapiens
tggcctatgttctttggtagggtggtaatagctgaaatgttccttaactctgtccactaatgatatcttgtagcttgacctcttgagaacccagtctcacttgtcaagctgtttcttgaggtttgggtgaagcacatgatccaatcctgttgtagcatgaatcttttagagtatggcaataagagaattgtagatattgacaaaatttctggaaggattacttttgaaaaattaattaaaattggtttattaaaaatcccacgaaaattttctacatgagatttagataaacacaataaaacatakaaaagaaaaatgtttttcctgccatgtgtaatacacttttgaatactcttatagttaaattttatttgagatgggccatccaagtaccagcacttgcattatacctgataaattaataccattaacaccttgagaatgtattatctttgcataattaaaatgcattttctttactagtaatataaacaacttgagatcaggattgtatcttattcacttctgtgtcaggagtctatcatgataactggaatgctgtaaatgtttaacacatgtttgccccct

SEQ ID NO: 289756 - DNA, 588 bp, Homo sapiens
tggcctatgttctttggtagggtggtaatagctgaaatgttccttaactctgtccactaatgatatcttgtagcttgacctcttgagaacccagtctcacttgtcaagctgtttcttgaggtttgggtgaagcacatgatccaatcctgttgtagcatgaatcttttagagtatggcaataagagaattgtagatattgacaaaatttctggaaggattacttttgaaaaattaattaaaattggtttattaaaaatcccacgaaaattttctacatgagatttagataaacacaataaaacatataaaagaaaaatgtttttcctgccatgtgtaatacacttttgaatactcttatagttaaattttatttgagatgggccatccaagtaccagcacttgcattatacctgataaattaataccattaacaccttgagaatgtattatctttgcataattaaaatgcattttctttactagtaatataaacaacttgagatcaggattgtatcttattcacttctgtgtcaggagtctakcatgataactggaatgctgtaaatgtttaacacatgtttgccccct

SEQ ID NO: 289757 - DNA, 261 bp, Homo sapiens
tgttgggaaatcaataggtcatgaaaatattaaattaaragtttatttatacatgtaatgtagatgtatatttgtgatacacatattatataatcatactgtagcacaagtcttgtcactttgtaaaaggctccaatattttgattactgagtgttcaggaaagccagtgcattctttcagtggttataaaaagatctggcagatatggcaaggtaagcagtttacaagtgtctttgagggatttttagttcaggttgccc

SEQ ID NO: 289758 - DNA, 261 bp, Homo sapiens
tgttgggaaatcaataggtcatgaaaatattaaattaagagtttatttatacatgtaatgtagatgtatatttgtgatamacatattatataatcatactgtagcacaagtcttgtcactttgtaaaaggctccaatattttgattactgagtgttcaggaaagccagtgcattctttcagtggttataaaaagatctggcagatatggcaaggtaagcagtttacaagtgtctttgagggatttttagttcaggttgccc

SEQ ID NO: 289759 - DNA, 521 bp, Homo sapiens
taatccttttgcatataacatcttagtttttcattagactgtkgcatgttgtgtttattcctgatatttagaaaatataatctactgagactgttaaatacaagtagtgattagatcaggaataaggcttaaattgcaaattattttctgggatttggaagtatgtataaatgcgtgtgtgtgtgtggtgtgtgtatgcatgaatgcacttatgtgcatggtaggatttcatcaaatatttattgataaatattatttctcttatttttttgtggactatagagcccctttagttattgttgctttaaggttaaacaatggttttatttatagttttgttttgtgtctggcagtgtgtcttgctaactagaaatatgaggtcatataaattagggattgcatttctatgttgctctgtgaactctgcatagaatttctaggggtttctattagcagcagaatactgttactttttctgagctcctagagaagtgaatggagtatatttttttccctaggaa

SEQ ID NO: 289760 - DNA, 521 bp, Homo sapiens
taatccttttgcatataacatcttagtttttcattagactgtggcatgttgtgtttattcctgatatttagaaaatataatctactgagactgttaaatacaagtagtgattagatcaggaataaggcttaaattgcaaattattttctgggatttggaagtatgtataaatgcgtgtgtgtgtgtggtgtgtgtatgcatgaatgcacttatgtgcatggtaggatttcatcaaatatttattgataaatattatttctcttatttttttstggactatagagcccctttagttattgttgctttaaggttaaacaatggttttatttatagttttgttttgtgtctggcagtgtgtcttgctaactagaaatatgaggtcatataaattagggattgcatttctatgttgctctgtgaactctgcatagaatttctaggggtttctattagcagcagaatactgttactttttctgagctcctagagaagtgaatggagtatatttttttccctaggaa

SEQ ID NO: 289761 - DNA, 615 bp, Homo sapiens
caaactatattatccattgggtcattaatagtcctgagaataaagtcaagtcccattctaaggtctttatatgcattaatttttccacctctacctgttattctcctaataattttcagttactaacttttagaagaatttaaactacgttaattgccaaagaaattcaatgtttttctccaaaaatggaaattctccccttgagagtcatggtcacatttaccaacaaaataagtggcccatatgacatttctttggcctttattgtcatataggcttttgttgcagtttatcttttaaataaaaagagtggactttgttgtccaagtgcctgaactcaaatccaagcttgctgttcttaacaaatgtgtgacattttgtgaattaatctttctctgtctcagtttcttatttcggataaaaaaaataacacgacttttgtgtakgttaaacacgagaatatatgtgagttaaaacactgagcatttaatatgactattactgtggctattacatactcttatttccatgaactgctggaggtgttcaggacttatctcaggtgtaggaagtacaatttctggaccacggggttgaccatttttaaagcctctt

SEQ ID NO: 289762 - DNA, 601 bp, Homo sapiens
aaactatattatccattgggtcattaatagtcctgagaataaagtcaagtcccattctaaggtctttatatgcattaatttttccacctctacctgttattctcctaataattttcagttactaacttttagaagaatttaaactacgttaattgccaaagaaattcaatgtttttctccaaaaatggaaattctccccttgagagtcatggtcacatttaccaacaaaataagtggcccatatgacatttctttggcctttattgtcatataggcttttgttgcagtttatcttttaaataaaaagagtggactttgttgtccaagtgcctgaactcaaatccaagcttgctgttcttaacaaatgtgtgacattttgtgaattaatctttctctgtctcagtttcttatttcggataaaaaaaataacacgacttttgtgtatgttaaacacgaraatatatgtgagttaaaacactgagcatttaatatgactattactgtggctattacatactcttatttccatgaactgctggaggtgttcaggacttatctcaggtgtaggaagtacaatttctggaccacggggttgaccatt

SEQ ID NO: 289763 - DNA, 615 bp, Homo sapiens
caaactatattatccattgggtcattaatagtcctgagaataaagtcaagtcccattctaaggtctttatatgcattaatttttccacctctacctgttattctcctaataattttcagttactaacttttagaagaatttaaactacgttaattgccaaagaaattcaatgtttttctccaaaaatggaaattctccccttgagagtcatggtcacatttaccaacaaaataagtggcccatatgacatttctttggcctttattgtcatataggcttttgttgcagtttatcttttaaataaaaagagtggactttgttgtccaagtgcctgaactcaaatccaagcttgctgttcttaacaaatgtgtgacattttgtgaattaatctttctctgtctcagtttcttatttcggataaaaaaaataacacgacttttgtgtatgttaaacacgagaatatatgtgagttaaaacactgagcatttaatatgactattactgtggctattacatactyttatttccatgaactgctggaggtgttcaggacttatctcaggtgtaggaagtacaatttctggaccacggggttgaccatttttaaagcctctt

SEQ ID NO: 289764 - DNA, 605 bp, Homo sapiens
cagtttgtgaggcattattttaatatttagtagtcactatgccttttttattggggtaaaatatatgcaacataaaacgtactattttaacaatttttgaagggttttgctatgtttcccaggctagcatcaagtgatcctcctgccacacaaccttccccttagatgggagtacaggcaggtgccactatgcctggcacattttagccatttttatgtgtataattcaagtacattcacaattatacaaccatcaccactatcatttcctgagcttttaaaaaaatttattttaagttcaggggtacatgtgcaggatrtgcaggtttgttacataggtaagtgtgtgtcacaggggcttgtacagattatttaatcatccaggtattaagcctagtatccattggttatttttcctgatcctgttcttcctcccaccctctgccttctggtaggcccagtgtgcattgttccccctatgtgtccatgtgttctcatcatttagctcccacttacatgtgagaacatgcagtatttggttttctgttgctgtgttactttgctaaagataatggcctccagctctatccatgtttccgcaaaag

SEQ ID NO: 289765 - DNA, 647 bp, Homo sapiens
cattactttgatgaaagtgtgttaatacttgcttaaacacgaggacamttttttctgcaggattttagtgagccactctaacaaaactgatattcttgcaaaatgtgtttgtcatctatttcttttttctcttttgcttgttttctgagataccttactcagcttcctgaagagaattttatgtttgtctaatcaacagagaagacagtctaactttgacaataaaaaagaaaccaccacttgccaaataatagcatatactctggggtatggcacagtggccagattttaaggatatctgtacctgagaagaaagcgaccagcaggtggcaatacccttacatggaatccctgtccagacaaatggacagtgcctaaagtaaactgatactccagtgaagtcacatgccatttcagagaaacctgatagctttggctgggtaggagcccatttaacgttctctttcagctattatctcatctctccatttccatctgacaattctccaactcagcgtgttgtatacactctcctaaaggtcatgcatggctactagggtgggtactctgaatgtggtccctgagtttggtattaggagcacacaattttaataagtaacttgtgttgactgctgtcagcagtgacc

SEQ ID NO: 289766 - DNA, 647 bp, Homo sapiens
cattactttgatgaaagtgtgttaatacttgcttaaacacgaggacacttttttctgcaggattttagtgagccactctaacaaaactgatattcttgcaaaatgtgtttgtcatctatttcttttttctcttttgcttgttttctgagataccttactcagcttcctgaagagaattttatgtttgtctaatcaacagagaagacagtctaactttgacaataaaaaagaaaccaccacttgccaaataatagcatatactctggggtatggcacagtggccagattttaaggatatctgtacctgagaagaaagcgaccagcaggtggcaatacccttacatggaatccctgtccagacaaatggacagtgcctaaagtaaactgatactccagtgaagtcacatgccatttcagagaaacctgatagctttggctgggtaggagcccatttaacgttctctttcagctattatctcatctctccatttccatctgacaattctccaactcagcgtgttgtatacactctcctaaaggtcatgcatggctactagggtgggtactytgaatgtggtccctgagtttggtattaggagcacacaattttaataagtaacttgtgttgactgctgtcagcagtgacc

SEQ ID NO: 289767 - DNA, 577 bp, Homo sapiens
cttgcatttcaattaggtgacacataaggtcaattttcccccatagtggtggtataaattctaattacttgattaacatattgtctcccaggatcctccattgtaaagttgctttttaatcctctgtaattaagtattttgtgtggaaatactttgaaactatgtaaatatctgttcctcatctcactctcacctactacttttagcatccattgatgtttcgtgcttgaattaattattactatgatggtttctaagtggtgctttttctaattccatctagttagacaaaatagatatctcattcctacatttattagttaatattatagtgtaaacagagcttcctttactctctttttacttactgatttatgtatttagatcagtgtagactcatggatttctgttttatttgatggcttataatatgtcatcatcattattctgactttcagattatcccagatttggccataagatgcacctttatgctggcttstgtgtgcttttgaaatatcttcacagttcttttagcacaatttttaccatttggcaccaaaagatgtattaggct

SEQ ID NO: 289768 - DNA, 610 bp, Homo sapiens
gtcactttaaaaaaattcgttggtggaaaggcaattgctcacatactagatatgatggctggattttatgaaatgtatgctcatgtttcatttattaatatttctctcaagaataggtgtgaaaatgatactgcaaaatgtagttaccttctatacttatgaagccatctctaaaaatctgtagaattttatatatttgtttactttttgtatttttatatttttttacttttatatttctattaaaaatcaaaataatttacagagcttcttttcacttacgtaaaatttcatcgtcttatgaaaatgtagtttgttttctcattaggaggagacaaaactaaagcaggaaataataagaattaccagcgttggcctctgttgtttaagacacagaaccatactgagtgttccaaaagggaagcataaaatagtgaggaaattaatgttccataggtctgttctatgaggatcctaccttgaccctaacacatatggtgtaggggttcagtaaaaagcaagakccttcctgagaaagaaagagggaaccaattctagtgaacatagagagaaagcaaatgaaatcatcctggtctcatctgtgttgacc

SEQ ID NO: 289769 - DNA, 566 bp, Homo sapiens
tttaaatggaaactaaggttcaaagtgtttatgagagattaacacacttttgaaaagagtgaagatgaagcagaattcagccaatggagtgagctacagttcaggctccagtggtatgccgggagttgtcgttgttgttgttattgttgtttttaaggtacacaactctgcactgcatataacattaccttgatcaagaaaccagaagactttactgtaattcttccactggggcatgccagaaattccacacaacatttcttccaacctctatygtattgacgaatatcagcctcaccagatcgatcatgtgagcaatttatactatgtgagcaattcaatggttatgaattttcaaagaagtatttatccaatcccccaccaagattctgtgtgtgtgtgtgtgtgtgtgtgtgtgtgtgtgtgtttctagcacacccttttatttcattctaaggatattaacggtcccggtttatgcagggatccccacttcatctccccattttgaatctttttttaacccactgaggccattcaaaaccaatcttgtacatcagagaccc

SEQ ID NO: 289770 - DNA, 442 bp, Homo sapiens
atttggaatatgtaaccatgattgtaatttaaaatttagcctgtcctctcttttagttacactccttttaagcctgtatgattgtattatgaaagttgaaacttgtttttttttacgtttatgccaccactatttattaaatcttaattccctttatgtgaagattatgacacatttttagttgtatattgcaatcaaatgcccatgatatatgtggaagttgtctaataagtatattttttggcagttgaagcctggtttgttattagatattttatttcgcaacaaattcatmatagtaataaaactcttagtaccttatgtgaaaggccacaaaaagctattgtcgtaattaaatatttacctattaataaagctcagaatacttttgttatgcatcatggccatcaaagttgtatggagacaaaaaattacaaagaca

SEQ ID NO: 289771 - DNA, 536 bp, Homo sapiens
atactcataagtgggaactaagctatgaggatgcaaaggcataagaatgatacaatggactttggggactgaagggaaagggtgagagtagggtgagggataaaatattagacactgagtacagtgtatactgctcaggtgatgggtacaccaaaatcccacaaatcagcactaaataacttatccttagaaccaaacaccacctgttccccaaaaacctattgaaataaaaaattaaaattaaaaagaagaaaaaaggtgattaggcagattgagacagctagtacaaagcaccgaaagcacaaaagagttcgggatgattaaggtttaagaagaagagttaatttaaatgtatgcaaggtcacaaataagcctaggttaktttatgtgaagctttgtaaagagtcataaaagtttggatttaaggagtgtgaataggatctttaaaaggttttaagcaggatagttacatttgcttaaagtagaaactggtaggtgagtaagtcagcaaggggcttctaaaactgaccaggtag

SEQ ID NO: 289772 - DNA, 839 bp, Homo sapiens
ttttgttaaatctctttctcattagaacaattagtttagagttaaattagccttgcttattaaaagctacacataaggaaaatgaatattttaatcacttagcagtaattatgtaagagctgttacaaattcyaagcttattcctatgatctgtttctagatggacagctgactagaaaacgaatgacacagcttttctgtactctttcagaattatcatcttcaatgggcctcaaaattgcactcttagttaatagcctcccattactacaaaatcatttttccctcttttgggatagagttgaaattaacagcaactcttgtaggcatattctctcttaataatagttacagagattgaaaattatatctattactatcatcaaatctcttatctaaattgatacttcagaatttctgtacattagaattacagggtttgtctcagtgttcaccaatagaatccccgaaggttaacttaattatggatttcaaatgtttaaggatagaggtcagctattttctacctagagtgaaaaagawtctaaaacttaaagatatagaaataacaacatatagaataaaaaattcatacaaaccagaaagccagatattgtttacttatttataaaatttgccattatgttttacaagactgataaggaatcctaaaatacattttaaaaaatagtttatgtagctcaaatggaaaaaatgtgatttacagtcttctaagactaggtaaagtaatatcagaaaattattgtaawattatattttaacagacttaaaagcatctgtaaagaaattttataaccttttcaggtagagattttatt

SEQ ID NO: 289773 - DNA, 1781 bp, Homo sapiens
agaagtttaatataaaaatcaaataaataaacttaataaaatactttagcaaataattgaaggaacaataatatgtttgttcagatattttagtcatacatacagccgaactagacacattgcttacttactgtgcatggtagtacatcaacagggttgtaattacgaaaacgcatagaatttgcaacagagattatagataatagcatgcattacattccaaacaagakaatgtctattcccttgaatttctctagcgtaatctgcaagatcatcaatgtctaagagaaaatattttcattcgatgtgatgttgccatagaggatctcaaataatctatatttccctgatattctgtcttgtttaggatttagatctgtgagttagtattcagcgtagtgggactaactcacttttgtacgtaagaatcacataaggagctgtatacaagtaaacctgactgagcctcactccctaagatataactgcacctacctttcagatcttttgatacactaactttcagtggggattaaagagtttcattttgaaaatgtccagaaatggttcttgtgtatatgcccwagaagtttaatataaaaatcaaataaataaacttaataaaatactttagcaaataattgaaggaacaataatatgtttgttcagatattttagtcatacatacagccgaactagacacattgcttacttactgtgcatggtagtacatcaacagggttgtaattacgaaaacgcatagaatttgcaacagagattatagataatagcatgcattacattccaaacaagagaatgtctatwcccttgaatttctctagcgtaatctgcaagatcatcaatgtctaagagaaaatattttcattcgatgtgatgttgccatagaggatctcaaataatctatatttccctgatattctgtcttgtttaggatttagatctgtgagttagtattcagcgtagtgggactaactcacttttgtacgtaagaatcacataaggagctgtatacaagtaaacctgactgagcctcactccctaagatataactgcacctacctttcagatcttttgatacactaactttcagtggggattaaagagtttcattttgaaaatgtccagaaatggttcttgtgtatatgcccwattattttatcttaataacttctgttagatcctctctgaagagtttcttatcttttaattgaaggcttctaacaatcacaaaaagcttgatttgtatatagagtgtttgtataaattacctgttcttcatggagggttgctttacactaagacaacaaaaagcaaaatcaaaactgaaaagcaactcagtggagttcatctatttgttatccacacttttagtttttagccactcatctcttagagataggttgtttctatgtctctataacaaaaataatttgatgaaattgcggttttcagattttaatttttttagtattttgatgtttctttcatgttctgtataaaatatttccaataaatataggcatatttatttaaatataaatctgttatcaattatacatgagttaacaagacagcctgaggatcattcaaagctcacaatatagatatattttacccttcttgaacttctcacccaatgtgtagttataaggcatcatgacaaataawgcatatgaaccattcagcatgtctccatattcaaaataaaacatatatttgctataataatatcagcacatacaacagtaactatacatata

SEQ ID NO: 289774 - DNA, 611 bp, Homo sapiens
attattttatcttaataacttctgttagatcctctctgaagagtttcttatcttttaattgaaggcttctaacaatcacaaaaagcttgatttgtatatagagtgtttgtataaattacctgttcttcatggagggttgctttacactaagacaacaaaaagcaaaatcaaaactgaaaagcaactcagtggagttcatctatttgttatccacacttttagtttttagccactcatctcttagagataggttgtttctatgtctctataacaaaaataatttgatgaaattgcggttttcagattttaatttttttagtattttgatgtttctttcatgttctgtataaaatatttccaataaatataggcatatttatttaaatataaatctgttatcaattatacatgagttaacaagacagcctgaggatcattcaaagctcacaatatagatatattttacccttcttgaacttctcacccaatgtgtagttataaggcatcatgacaaataaagcatatgaaycattcagcatgtctccatattcaaaataaaacatatatttgctataataatatcagcacatacaacagtaactatacatata

SEQ ID NO: 289775 - DNA, 1181 bp, Homo sapiens
ggatttgaggtgtgctgagggctcactttgtcaaagatgctgttttcttcttgtgttcttatatggtgcatgggactagctagctttctgtgggctcttttattgggcactaattctaataacaagggctttaccatcatgatctaatcaactcccaaaggcccaacctccaaaaataccagcacagtggggyttaggatttcaacatatgaactttgaggggacccaaacattcagaccatagcaccctctctaatttactttttttcctgcagtgtgagtgatctttttaaatcacaagtgcatctactttattcctctgcctaaaacctatcctgtccatttccaattgttcgtaaaacacccaataaccttcaactgatatttaccttttcacagtgttatttatgtataagtcacatagcaaacaattcacccattaaactgtgcaattaaaagccttttttcctagagttgtgcaatcataaacacaatcaattttggatcatttaatcacttcttttggtcatcaccccccaatctcctcaccaccacctcccattcccttgcctgccctaagcaaacattatwggatttgaggtgtgctgagggctcactttgtcaaagatgctgttttcttcttgtgttcttatatggtgcatgggactagctagctttctgtgggctcttttattgggcactaattctaataacaagggctttaccatcatgatctaatcaactcccaaaggcccaacctccaaaaataccagcacagtggggcttaggatttcaacatatgaactttgaggggacccaaacattcagaccatagcaccctctctaatttactttttttcctgcagtgtgagtgatctttttaaatcacaagtgcatctactttattcctctgcctaaaacctatcctgtccatttccaattgttcgtaaaacacccaataaccttcaactgatatttaccttttcacagtgttatttatgtataagtcacatagcaaacaattcacccattaaactgtgcaatwaaaagccttttttcctagagttgtgcaatcataaacacaatcaattttggatcatttaatcacttcttttggtcatcaccccccaatctcctcaccaccacctcccattcccttgcctgccctaagcaaacattat

SEQ ID NO: 289776 - DNA, 590 bp, Homo sapiens
ggatttgaggtgtgctgagggctcactttgtcaaagatgctgttttcttcttgtgttcttatatggtgcatgggactagctagctttctgtgggctcttttattgggcactaattctaataacaagggctttaccatcatgatctaatcaactcccaaaggcccaacctccaaaaataccagcacagtggggcttaggatttcaacatatgaactttgaggggacccaaacattcagaccatagcaccctctctaatttactttttttcctgcagtgtgagtgatctttttaaatcacaagtgcatctactttattcctctgcctaaaacctatcctgtccatttccaattgttcgtaaaacacccaataaccttcaactgatatttaccttttcacagtgttatttatgtataagtcacatagcaaacaattcacccattaaactgtgcaattaaaagccttttttcctagagttgtgcaatcataaacacaatcaattttggatcatttratcacttcttttggtcatcaccccccaatctcctcaccaccacctcccattcccttgcctgccctaagcaaacattat

SEQ ID NO: 289777 - DNA, 603 bp, Homo sapiens
gaacagtttcttttttctttttgccagagaaacatgggaagtaacataatgttatatgtttggtcaccattttgcacacacaagcataaaatctttctttttcctgaatcgatgtaaacagagccyggacggccgtatcgaagtcaaagggcagcatggaagctcatcactgcatattaaagatgtgaagttgtcagattcagggagatatgactgtgaagctgcaagcagaattggagggcatcaaaagagcatgtaccttgatattgaatgtaagttactttcctttgtattttcattaaaataactttgcatgctttgaaacatatgatttttcaataaagaccaaaatatatatgtagttcacatttcagtacttaatgcatagctttagaggaaatataggaatcattcagtcagttattggagacatctagtggaaattacgggatatttcacagtgctgtatatttcatcattttgatattgcttttcctgaaaatggtctttctttttttgcaacattgaactcaaaacacagtatcaactgaaaaatattaattataagtaattggtcgatatcactttagattttttatttct

SEQ ID NO: 289778 - DNA, 603 bp, Homo sapiens
gaacagtttcttttttctttttgccagagaaacatgggaagtaacataatgttatatgtttggtcaccattttgcacacacaagcataaaatctttctttttcctgaatcgatgtaaacagagcccggacggccgtatcgaagtcaaagggcagcatggaagctcatcactgcatattaaagatgtgaagttgtcagattcagggagatatgactgtgaagctgcaagcagaattggagggcatcaaaagagcatgtaccttgatattgaatgtaagttactttcctttgtattttcattaaaataactttgcatgctttgaaacatatgatttttcaataaagaccaaaatatatatgtagttcacatttcagtacttaatgcatagctttagaggaaatataggaatcattcagtcagttattggagacatctagtggaaattacrggatatttcacagtgctgtatatttcatcattttgatattgcttttcctgaaaatggtctttctttttttgcaacattgaactcaaaacacagtatcaactgaaaaatattaattataagtaattggtcgatatcactttagattttttatttct

SEQ ID NO: 289779 - DNA, 603 bp, Homo sapiens
gaacagtttcttttttctttttgccagagaaacatgggaagtaacataatgttatatgtttggtcaccattttgcacacacaagcataaaatctttctttttcctgaatcgatgtaaacagagcccggacggccgtatcgaagtcaaagggcagcatggaagctcatcactgcatattaaagatgtgaagttgtcagattcagggagatatgactgtgaagctgcaagcagaattggagggcatcaaaagagcatgtaccttgatattgaatgtaagttactttcctttgtattttcattaaaataactttgcatgctttgaaacatatgatttttcaataaagaccaaaatatatatgtagttcacatttcagtacttaatgcatagctttagaggaaatataggaatcattcagtcagttattggagacatctagtggaaattacgggatatttcacagtgctgtatatttcatcattttgatattgcttttcctgaaaatggtctttctttttttgcaacattgaactcaaaacacagtatcaactgaaaaatattaattatmagtaattggtcgatatcactttagattttttatttct

SEQ ID NO: 289780 - DNA, 605 bp, Homo sapiens
tattaagtcacaaacgtttaggctattggtattactagcattgcttaactagacttttgttatacgttgaatctataaagtatgttattgcagttttaacccctgctgtgtgagtatctggcctttgcaaattcactgaccatgagaaaagtgctaggacaaataatattgccattttaaaaacaggaataaagatttacaaaccagtacatttaactttaaacctcagcaatttcagtttcttaaagaaatgattgtatatttagaaaacactgtggtgagtgatgagcgttgggattggcgaagaagatttacttcaaattaatttaatgtattttctacttagacaggtgtcaacaaactacagtccatagggcaaatttggcttccagcctgttttggtaaataaagctttattgaaactaaagcaaaagagtaatttaaattcaaaaaagtctgactgtcatycaatgctttaccctttagaaattgtctttctgcagtagaagtgtaggttctgctttcatataatttagaatctaatgtagagaaataggtacaaacaaattactgcattgtgatgacctttaaccagaatgcattca

SEQ ID NO: 289781 - DNA, 604 bp, Homo sapiens
gtgttatttgaactctttttaatatgagtttttaatatgaattttttcatctttaaaatgttgatatttaccctcttgttataaggaagatgagcacattacaaatgcatatcaatgtttatcatattataaatatccaataaactttactgtttaccttgccatattacaaatttacagtacaaatttacacattttactttgtcatattacaaatttacagtatggcctcacataatacagcttagaaatgaaattacatatgagaatggtcaagtcacgcttgaagcatagtttatcttgttgcctctgtaaagtataactaaggtttgattgaactttaatgagatcatattattcctatcatggaaagtagcatgggattgtactttccataagaatcrcgtgggaagactatgaaaatgcagattctagattcccacttcttgaagttgatttagtatatgcagcccagggcataggaatgcatattaaataaactcatcagttggtgtcatattgttagtcttcaagccatattttgggaaacaacttcaagtaaggatgaaaattaacagctaatatttccaacagaaaaatgatc

SEQ ID NO: 289782 - DNA, 586 bp, Homo sapiens
gtcaaggataaaaaagcaaaaaactaaatcatatcaccagagaaaatcaccctcactgaaggaagacaggaaggatagaaagaaggaagagaagaccacagaacaaccagaaaacaacaaaatggtagtagtaagtcctaacttatgaataataacattgaatataaatggactaaactctccaatcaaaagacatagactggctgaatggataacaaaaataagacccattgatctgttgcctacaagaaacatacttcatctataaagactcacatagactgaaaacaatattccatgccaactgaaaccaaaaaaaaaaaaaaaacaggagtcactatacttatgtcaaacaaaatagatttcaaaacaaaaactataagaaaagacaaagaaggttaatatataatgacaaatgtgtaaattcagcaggaggatataataatttaaatatatatgcacccaacatgggagmacccagatacataatggaaatattattagagctgaagagagaggtcccatcacaataatagctggagacttcaacacccaactttcagcattggacaaatgtttcagacag

SEQ ID NO: 289783 - DNA, 622 bp, Homo sapiens
ttcttgaagtgcttttttcacattgcatgcctgtatcaaaacatctcatgtaccccacaaatacatacacctactatgtaccccaaaacttaaaaatttaaaaattaaaaattaaaaaaaatctagaaacttaacactattctcactgtaaaataaatgattaagatagtaaataaatattttcagagttcatcttcaatgataatgggttaaagttttaataactgtaactcactaactacgatgtgttcctaattgtttttattttattattgggcacaattttatactacaatccaggacagcttcaaatagtgatagaattatattatttcacataaatgctactgggaaaaaaattatgccttttatatgaaatttctcatattctactggtttctgatgctaataacccttccttgctttgaggaagatattgaactgttgaactgtgcatatgaatacagcacaaaatagctttgcataatgtgatatccttcaaaaacaacagaattcacactggttaaaaacagagctattttaaactartgactattgttatctgtcatccaaagcattttatgtacatgtaaaataatatatgcaatttttaaaactgttc

SEQ ID NO: 289784 - DNA, 426 bp, Homo sapiens
ccttcacttcctactgtttgtctttgttatgaacttcagattgcactggttgtatattcttcatgttcctgagacacctaaaatgtgggccatgtttcagttcatagtgctacatattttgaaaaaaccattgtgataccctgctgttaaaaattcactggcaaacctgagggagaattaaagtaattaattaataaaaataatttattatagaacaagatgyatggataaagtaggaagaaagtgaaattcagacatagctatctgaaattgctttgagtttagtacagaatgagagattaaaatatttagaagtcaggtcttcctattactaggatacatttttcaaaaccttagaacactgaaattttgtttgctgtactgaaacatatatctaaaaatatcagtttccaaccaagatgcaga

SEQ ID NO: 289785 - DNA, 573 bp, Homo sapiens
taatgcaaaaaatgctggggtagctatattgctaacactcaggtattggagcaaatattatccggaataaacagaatcaattcctaatgagaaagacgtcaattcatcaggaggacatcatgattctaaacttttatctatataataagagagcttaaaatacatggagaataaactgacagaactgtgaaaagaaatagacaaattcttaattttattagagtttaaacagctatttctcaataactaatagagcaagtaggttaaaaagatacagaagacttgattaacattaccaattgactgtaacctaactgataattaccaaaacattaacyaacatcaacaaaatacacattctttttaagtgcatcaggaatatacttgatctaaatcatagtatgttctctgacctcattagaatcaaattagaaattcatgacagaactatctctggaaaatccacatataattggaagctaagtgcatacttctaaatgtttcatgggataaataataagtcaaaagggaaattacaaaacattttaaaatgaatggcaatgtatatgcaat

SEQ ID NO: 289786 - DNA, 562 bp, Homo sapiens
aacaattaaaatgtggtttataatagcatcaaaatatatggaataattagagataaatctgccaaaagatgagttaggactgtataaaaaacacttaagaacactgctgagagaaattaaagagacctgaatatacagagattttctgtttctggaacagaaggatcaataatgtcaagaagacaattattctcaaagtgatctatagcttcaacacaattctaatcaaagttatggtagtggatgtgtatgtgtgtgttagtgcatatgtrtatgtaaaaattgaaagcttgattctaaaattaatatggaaatgaacagaacctagagtattttattctatattaaaactactttgaaaagatgaacaaagttggaggacttataatacattattctaacttatcataacggcttttgttggtgtaaagggacaaataaatagatcaatggaacagaatagattccctaaaacacatatattaaaatatattttaaataatgaaaaggcaattctgttgctaaagtacggtgtttttagccaatgatgaaaaatcggaca

SEQ ID NO: 289787 - DNA, 562 bp, Homo sapiens
aacaattaaaatgtggtttataatagcatcaaaatatatggaataattagagataaatctgccaaaagatgagttaggactgtataaaaaacacttaagaacactgctgagagaaattaaagagacctgaatatacagagattttctgtttctggaacagaaggatcaataatgtcaagaagacaattattctcaaagtgatctatagcttcaacacaattctaatcaaagttatggtagtggatgtgtatgtgtgtgttagtgcatatgtatatgtaaaaattgaaagcttgattctaaaattaatatggaaatgaacagaacctagagtattttattctatattaaaactactttgaaaagatgaacaaagttggaggacttataatacattattctaacttatcataacggcttttgttggtgtaaagggacaaataaatagatcaatggaacagaatagattccctaaaacacatatattaaaatatattttaaataatgaaaaggcaattctgttgctaaagtayggtgtttttagccaatgatgaaaaatcggaca

SEQ ID NO: 289788 - DNA, 591 bp, Homo sapiens
catcagcaaacaaattcaaatttgaaagtaaaatgtaatttcatgacttcaatttttccactctacactgctttgttacacctttttttttttcctaaaaraataaaataaaatacattcaagactttatatccacataaaatggttaggctattatttccccttggtactttggatgcagaaatgatacacaaaagaacaatgcagagagattaggtatcacagatgtgcaaacttttgactgcaaatatgcggcaacatgggtggaaaagggctagaaaatttattgaacatccttcttcatacaataattaaacaaaaaattttgcgtctctgtggaggcaactaaatgatataataatattcaagtcatataaaggatataaaaaagattatatctcaaatttattcaagggatttttttggctaataagataatctgtattaggaataaatagattagattttgttattttatttcaagattccatttgtgtgtgtgtgtgtgtgtgcacatgcatatataaaaaaataagctggtatacagcctgcattcactgattgtgtaaagtaatctgctacagtaatctg

SEQ ID NO: 289789 - DNA, 607 bp, Homo sapiens
ataagagacaccccgcctctatccctttgggatttttgatcaggtagaaaggtgattattttaaggtacccagcctctaacatatctacagtctattgtttactctttgggcctgttccaatgtgtactgcttttttccctatctgttggcttgataatgaggttaggaaaaccacttgaagccacatgtgaaaaaggcagagtctccatcagcctgatcgtggaaaggatatggtaggatcctgcctatacctctgctgccaactggactttgcatgagtgagccatraactgctagggtagtaggccactccaatttgggggcaaatttgtcatagccgttccttaatgagaggggagaagtcggggctagaaataacaaatagaagagtcatcagggcatagatactcattaaacggacaagcctgtagttgctttttgtttaagaggtaactaatcaggggtgaaaatgcacagattcagaggctcccccaaagtgaaaatagtgattctaatgctacggccacatgatttgcagcccatgaggtgtaaacttttccataatgctcactttttccttaggttgaacctaagaagagagacaaa

SEQ ID NO: 289790 - DNA, 537 bp, Homo sapiens
cttgttctcacactgatttacctatttatctttccctctagattcttagtattttgaaggcagtgaacttatcttgcttaccatgaatcataatcatctggtacactacagcatagatcctgtgtattccataattgttgaattaatcttttatactagaagtaggttatataaaaattgtattgaacaaggtaatyttaatcagtttttttaatgcagaaggagtatatcaattaggtgttggccaaagcatttaaaaagtttaagagagaatttccaaactggccaagattgaatggatatcagcaaatagcatatccctccatcacgatgacagatattcaacttgtataataaaatgtcacctttactcccacaatgcttggatcctttagcatacggatctcctttctatgagcaacatggaaaatctccactgcttttctgcaggaagtttaattctgaatatctgccacgcagctacaatcaaaagcatagctaataagatgagcatttccaagctttcattatttcctc

SEQ ID NO: 289791 - DNA, 585 bp, Homo sapiens
tgtaatttagaatatatgggaggatgtacataggttataccaaatactatgctttttatataagagactttggcatcggcttattttggtatctgtgggaggtcctggaacaaatcacccatagatgtcaagaaaggactttatgtctaaagtctcatttatgacacaaagccattattttaaatgaaggcaatcatctrtgttttacagataaagagtctgatttaggcacagaacatttagaaaagatgttcaaagcttcagggccaaggaaaggaggaaagccaaaatggaaatctggctgtacgtcatttagtcctgggatgctggggaaatacgtatgagctctagcatggaaatatcacttctccatcaccactacccgttgtcatcagtctttgctttgaggctttgctctatttgacttttaaaaataaaatttacttcaaaatattctactaataaagttttacaataaacctacacttgaggtgtaagattagacagtctgaaaatatttagacattgtcattccaccgttacaaaaggactgctttttctttattattgaggggaaaagagcta

SEQ ID NO: 289792 - DNA, 567 bp, Homo sapiens
tgttatattttttaactgttgaacttttttatattaaaccttaaccctaaataaaataatcacacctttgtttcattaattgatgcaggtttctgataaagtcaccttctcttgggcaattttatgggagggacttggctgttagctgtcatcaggtagtatgtccagcccctggggaatgagagcctcagctctttaagagtttctgtgcagtcattccaagaggtacctggtaacagtattgtgacaactaagtgagttaatgcattcaagcacccagcacatgacaagtactcaacaaatattaggtaggtattattatggcctaattatagttcatattggtcacttttcttttggatagaagtcagtaccttgatacctctttagttattatacatcaatctagacatcaaggaccaaggcttagtaaaatgagataatgaccttacttattctgaacattatacttctattaaataatgttaaattcatttgacttttgttatttttttccakttaggagcttgtactaccaattttttacacaaactgctattaagggag

SEQ ID NO: 289793 - DNA, 602 bp, Homo sapiens
gtgtatctattttgaaggataaatgtaaatataattggtcaaatattgtgaaaaagtctaaataataatttggatttggcaattggtaaaaactaggtgagtagtgaaatgagaaggaatttacagcatttcagatgtattgcaggttggctatataatattagattaagctcacaatgtttcttgctctattctggatgctatagcaaaatatattrgactctgtaatgtattaccaacataaatatattgcttacagttctaggggctgggaaattcaagatcaaggcaccatcagatttggtttttggtgtaggtccaataaccaaattgtttttatagatggtgccttctgtgtgtccttatatggtgaaaggggcaaacatacttcattcagcctcttttatggaggcactaatcttattctcgagggtggatgtctcatgactttatcacatcccaaaagaccccacctcttaataatatattcaacatataaaatgtggagggaaaccagcattcaaaccacagcatgatcgaaacaagaaaaatgtatataaaaccttatagaagtaaggtagccactcaaaacagaaatagat

SEQ ID NO: 289794 - DNA, 536 bp, Homo sapiens
attgacaaggacaaatcaaatatctgactggatatggaattgaaagaggaaatcaatgataacaaggttcgaggatcagttatgctgcaggtctaccttgtcttcagtattttattgaagtcattcctataacatctgtgctagtgcttgcttcagtagcacatatactaaaattggaatgatacagagaagatcagcaaataaaaatttaagtacaaatttaaaaaagaaacaaacatacgtgctctaagagcactcccaacccaacagacattaaaaaggatgaggyaatacacgaacacctctgtacttataaatttgataatgtgagagaaatgggccactatcaaaattaccaaaactcacccaggacaaaataggtaaatgaaatagtcctataagtattaaagaaatagaatttgtgagaaaaacgaacaaacaaaacgacaaccaaaaaacaaaccctggcaagagtcttcttgccaggaagaaaaaaaaagaataataactttaaaaaaaaagaaagctccaggccg

SEQ ID NO: 289795 - DNA, 569 bp, Homo sapiens
gtggctgttggatttaaaaaaaaaagaacaaggatgatgactgtcacttgggcttgcttctgtacagagttgcaatgtcaaagaataatgatgggtcaaaatccatgagctggaagataacctgacatgaatacatgtttttaaggtagacttgccctctgaagatagaaccatgtatttgattttaaaaggcaatgattttgagagcatagacaatggtcattcatggcaggacaggctggactctttttttgtcattctttgaataacctaagcaggatctattgcattaggaccacrccaggccagaagtgcagtggcagccagaggtcccaacttcagtgttatatttcagcaccataacaattgcaaatggaagatcattcttagcttggaattcatagaggagctaagctggccatcatcagtgggttgttgtccagggacaaaatgaggacaaccaaaatgcattcgctgaatacaatcatcccaaaacataactgctctgaattaacatagaataagtgcccaagaaagaaaggccattgttgttggttgagttggagaag

SEQ ID NO: 289796 - DNA, 590 bp, Homo sapiens
tgaatttcatgactcacctccagtgaataaaaaccacatgcaaaattattgtcataatgaccagaaaaataactttctagcatatttattattctttctggaaaattactgcattgtaatacatctgtatacaaatatcttacctatattaaaatcttcagttgmctctaatatcatttatatatttttggcatgtctggtaccattgtatttctcaaataacagatcgtgtctgaatactgtgataagaaatatacaacaaaaggctaatatcttttcgttatttttagagacagggttttgcctgacgcccaagttggagtgcagtggcgtgatcttggctcactgcaacttctgccttccaggttcaagcaattctcatgcttcagcagcccgagtagctgggatttcatgtgtgcaccaccataacttattaattttttgtatttttagtggagacagggtttcaccatgttggccaggctggtctcgaactcctggcctcatgtgatctgccccctacagcctcccaaagtgctggaattacaggcatgagccactgtcccttgcataaggctaataactgagtt

SEQ ID NO: 289797 - DNA, 527 bp, Homo sapiens
acataccactcagtattagatcatctagacagaaaatcaacaacaaaaygttagatgtaagatgggccttagactttaacagaaatttatagaatactttatctatcaatgacagaatacatatttttttctcaggaaatgaaattttctccaaaatagaccacatgttaggccataaaacaagtctccacaaattttaaaaattcaaagcacatcaactatcatttcatgttacaatggaataaaactaggaatcataccaagagaaactttggaaactatataaatatatgtaaaataaacaacatactacagaacaaccactaggccaatgaagaaattaagatggaaatcaaaacatttcttgaaacaaattaaaataaaaatacaacataataaaacctgtcagatactgcaaaagcagtgctaacagggaagtttataacaacaaatatctatatcaaaaagtagaaaggtttcaaataatctagtgatgcacttcaaggaattagaaaagtaagaacaaa

SEQ ID NO: 289798 - DNA, 527 bp, Homo sapiens
acataccactcagtattagatcatctagacagaaaatcaacaacaaaatgttagatgtaagatgggccttagactttaacagaaatttatagaatactttatctatcaatgacagaatacatatttttttctcaggaaatgaaattttctccaaaatagaccacatgttaggccataaaacaagtctccacaaattttaaaaattcaaagcacatcaactatcatttcatgttacaatggaataaaactaggaatcataccaagagaaactttggaaactatataaatatatgtaaaataaacaacatactacagaacaaccactaggccaatgaagaaattaagatggaaatcaaaacatttcttgaaacaaattaaaataaaaatacaacataataaaacctgtcagatactgcaaaagcagtgctaacagggaagtttatarcaacaaatatctatatcaaaaagtagaaaggtttcaaataatctagtgatgcacttcaaggaattagaaaagtaagaacaaa

SEQ ID NO: 289799 - DNA, 630 bp, Homo sapiens
catattcacagaatatgaaagaggaacttacgcatcctaatagctggagaaagcattttgagaccatgagaggaactccacatggcagaagacaaagtagagaaaagaaaaaagggcgtgtcctggtttggtaaaacccttgtgatcatggttcaagcctcaggataagcatttgaaattggtttgctgttactgaagctgaatgcatacaaacagaaatatcagcattatattttttattcttaaatgaaatgcatttatgattctattttaattggaactaaatgtgcatggtatatccttctgtaattgcatgaattcctaagccctggagctacttagctaagagtagaaattaactctcttggttttctattcaaattccttttacttacctcagcatttcgccagtcaatgtccctcaaaacacctctattagctaataggatttccatgaaaatattcctttgtgcaagaataaattagaaagttttattccaaaatkttaaacatatttaagacagtttcctttctgtgtacatctcagagaggaatatactaagtgaatccacagcagagaaatttagctcaaacatttcccagtcttacataagcaccacatttttaaag

SEQ ID NO: 289800 - DNA, 616 bp, Homo sapiens
ctatatatctcaaattttctaaaatattcctgtgacaaagggtattatctctatttcttactttacaacatcatacaatttcctgtttattgaaattccctttttgattactgggtctagcagaacaataaagccatgcacaagcaaaactatgttaatctcatcatggtttttataatcagatatgagtaaaataatgaattatagtaataatagatttagaaacatttatgaaaaacagttytgaggactcagaatctctgtactcttgtgtatttgtcacattttaattactgtgtgccaaaaattttgctgactgctttatctgcaactaccattaattctgtgttgttgttattatcatcccattttagagacgagaaaattaaggttaggtgaaagtatatactttttcaaatttacatggctagagcatatgctgagtttcaaagactgatatttttgttttacttcaaagcccataacctgcaatgttcatgtaaagctccacgaggtttaaccagtcacacaaaattcagccaccaatctcagtagattctgaccttgattttagttacacttgggcttgggttgtaatcatctgtatactttctac

SEQ ID NO: 289801 - DNA, 616 bp, Homo sapiens
ctatatatctcaaattttctaaaatattcctgtgacaaagggtattatctctatttcttactttacaacatcatacaatttcctgtttattgaaattccctttttgattactgggtctagcagaacaataaagccatgcacaagcaaaactatgttaatctcatcatggtttttataatcagatatgagtaaaataatgaattatagtaataatagatttagaaacatttatgaaaaacagttctgaggactcagaatctctgtactcttgtgtatttgtcacattttaattactgtgtgccaaaaattttgctgactgctttatctgcaactaccattaattctgtgttgttgttattatcatcccattttagagacgagaaaattaaggttaggtgaaagtatatactttttcaaatttacatggctagrgcatatgctgagtttcaaagactgatatttttgttttacttcaaagcccataacctgcaatgttcatgtaaagctccacgaggtttaaccagtcacacaaaattcagccaccaatctcagtagattctgaccttgattttagttacacttgggcttgggttgtaatcatctgtatactttctac

SEQ ID NO: 289802 - DNA, 1092 bp, Homo sapiens
ttcaacctatctcctaatatatttattcccaaagaacaaaaaatgtattccctggtaaatattacctgaaaagattatgtcccaggtttaaataaaatattttgtttgtttctctaaataatctattttgaatagtgaattataatcagcttaagatgatttttttttttaccttttaagttcaggattatatgtggaggtttgtaatataggcaaacttgtgtcatggtttgcagtacagaatattgtcattcaggtattaaacctagtacccattagttatttttcatcttaaaatctttgcccattcctatgtccagaatagtgttgcccaggatgtcttccagagtttgtacagtattgggttttacatttaattctttaatcaattgatatgatttggctctgtgtccacstaattctcatgttgaattgtaatccccaatgttggtggaaggacctggtagaaggtgattgaatcatgaaggcagatttcccccttwgtgaaagctgagcaggtattgggaaaaccagcttcagagaggagcaactcactctagggcttcctgtctgctgagagctgtgcagatgatgggacaaccctctgctgatagctgaacacgcttcaggatacccaggctgctgaaagaagctgccccctgtgggtttcctctgagctgctctatcactcaataaagctcctgttcatcttgctcaccctccacttgtttgtgtaccttgttcttcctagtcacatgacaagaactcaggaccccctgaatgcgaggataaaagagctgtaacacaaacggggctaagacatgcctcttgctcaacacattgcaggagaagagaaggaaagaatagctccagcacttcagggagctcagacttgggagctccctaagccagggctgtgactcctcctttggggccccatgawcctggtgtctccaagcttccaggagccactgtgttccttgttgctagccacagcagctgcttgcagtgcacctggcctggccacagcctcacagaaagccagtgcccatgctggcacctggagctggccaccatgctacagctgctggc

SEQ ID NO: 289803 - DNA, 553 bp, Homo sapiens
tccctacatttgaggttttgggactcggactggcttaatgactcctcagcttgcatgcaagtggcgtattgtgggacttcacctkgtgatcatgtgagtcaatactccttaataaactccatttcatatacacatctatcctattagtcctgttcctctggagaactctgactaataaaggagactttagccctagaggaactgctagacctaatctctgaagggcagacttgcccatcagatgaggctggtacaacctaagcacctcttggtctgcttgcctctcccaggcccctaccctagccacacctgcttgcagggcagtcttgagtgccctaggggtccacaccatagtttctgcactggtggatcatgcctgagaactccagtgtggtggtccctatagccacacaccagctcaatctctccctcccctagaacagcttcctctgggccctcagtaaaccccacatggctttgctggattgtgtctgcacagacagtgatatggttaggctttgggtcccaacccaagtctcatcttaaattataa

SEQ ID NO: 289804 - DNA, 529 bp, Homo sapiens
tggaactgtgagtctattaaacctctttcctttgtaaattacccagtctctgatatgtccttatagcagtatgagaattaactaatacatactgctatcccgtaggtatttttatgcaaactaaaaattatttcttcaaggtggatataacctcacaggtatacataaattggcgagttggtgatgccactgttcaatttataatggcatcatttgacattagtagccctgcagactcatgatttggcaagaatagcaaagcttgtgtgtctgcccttactctctccgrgctaattgagaaaacttctcaatcagattcagctgctcttcaaactacctattggatatttttcatatagtaggcttcctacactaaagtcagtatctctcatgtcctgtctttctttgataaaacactccacaattttattatgggagtaatgtgtccatgtatatgtgcaggtgtatgtgtattgtgtatgtgtgtgtctgtcagagtccagcttaaacattgttggtagatgtaata

SEQ ID NO: 289805 - DNA, 1153 bp, Homo sapiens
actttgttgattgctaactttgctgtgcatatttttaacctaatgtaatcacattggtccatttttgctttggttgcctgtgcttgtggggtattactcaagaaatatttgcccagtccaaagtcctgcatagttttatcaatggtgtcttttagtaatagttaagtcaggtaatgtggttttttccattttttattttgctcaggatagctttggttggtctatatctcttatggttccttaaaagttttaggattattttctactgctgtgaagaatgtcatagatactttgataaggattgcattgaattggtagattgctttgggtcatatagacattttaacaatactgattcttccaatccatgaatatggaatatctttctatttttttgtgccctcttcaatttcttgtatcaatgttttatagcttttattgtagagatttttcacttctttaaatttatccctcagtatttaattttatttrtggctattgtaaataggattacattgttaatttctttctcaggttgttcactattggcatatagaaatgctacatgwggtgttataatattttgtggttttttaatgtacttactattacctgtgagttttgaacctttggatgattttttattgtttattaacatcattttctttcagattgaagaactcccatcagcatttcttgtagaacaggtctggtgtggatgaaattcctcagcttttgtttgtctgggaaagtatttctctttcatgtttgaaggatattttccctggatgtacatttctggtwtaaaagtttttctctgttagcagtttcctgccaggtttccactgagagtctgctgccagacatacaggagctcctttatatgttatttgttttcttttctcttgctgcttttaggactctttctttatctttgacttttgggaatttgattattaaatgtctggcgtagttttctttgggttacatctgcttgttgttctataactttcttgtacttgaatactgatatctttctttaggtttgggaagttctctgttattatcccactgaataaactttctaccctgctctctttctctacctcctctttaatcaaccattgttgattatttagggatcaacagctct

SEQ ID NO: 289806 - DNA, 584 bp, Homo sapiens
ggtgttataatattttgtggttttttaatgtacttactattacctgtgagttttgaacctttggatgattttttattgtttattaacatcattttctttcagattgaagaactcccatcagcatttcttgtagaacaggtctggtgtggatgaaattcctcagcttttgtttgtctgggaaagtatttctctttcatgtttgaaggatattttccctggatgtacatttctggtataaaagtttttctctgttagcagtttcctgccaggtttccactgagagtctgctgccagacatacaggagctcctttatatgttatttgttttcttttctcttgctgmttttaggactctttctttatctttgacttttgggaatttgattattaaatgtctggcgtagttttctttgggttacatctgcttgttgttctataactttcttgtacttgaatactgatatctttctttaggtttgggaagttctctgttattatcccactgaataaactttctaccctgctctctttctctacctcctctttaatcaaccattgttgattatttagggatcaacagctct

SEQ ID NO: 289807 - DNA, 1215 bp, Homo sapiens
tctctggtcttatatgcaaggttcaaaacaagatgcgtggagaaaaattaaaagcagtgattatatacaaggaatgcagggaataraagtcagtagctggaagagaatagtgggtgaggagcatttttattttaagatgggaaaaaagtaaaccatgtttgctgctgggaccaattctgtcaagagggaaaaattgaaaggacttgaagacagtcaggtaggcgggaggccgcggaaacaggaaactgcagcaggaaggatacagaacctgcacatgtgtagaaactgataattttctgtcttttaacaggagttaagatacttttcttgctttgatataatcccatttccacttgtacatatatctgcagccagaaagcaaatgatcagcatcactatcataaaaaaatcctcctcatgagtgatgaaaggtatcttctttcatctattttttcccttcctccatcctcaaccttttattaaatcaaaaggctgatatttacctgtcttcatttccttgttcctgaatagaaaactacataatgaagtttaatgtataatccaagagcagtgatagataagtgatgcattttgtattggttccttcwtctctggtcttatatgcaaggttcaaaacaagatgcgtggagaaaaattaaaagcagtgattatatacaaggaatgcagggaataaaagtcagtagctggaagagaatagtgggtgaggagcatttttattttaagatgggaaaaaagtaaaccatgtttgctgctgggaccaattctgtcaagagggaaaaattgaaaggacttgaagacagtcaggtaggcgggaggccgcggaaacaggaaactgcagcaggaaggatacagaacctgcacatgtgtagaaactgataattttctgtcttttaacaggagttaagatacttttcttgctttgatataatcccatttccacttgtacatatatctgcagccagaaagcaaatgatcagcatcactatcataaaaaaatcctcctcatgagtgatgawaggtatcttctttcatctattttttcccttcctccatcctcaaccttttattaaatcaaaaggctgatatttacctgtcttcatttccttgttcctgaatagaaaactacataatgaagtttaatgtataatccaagagcagtgatagataagtgatgcattttgtattggttccttc

SEQ ID NO: 289808 - DNA, 589 bp, Homo sapiens
ttgcttggctggcatctccagcatatcgcagccaccatacaggaagtagcccagtctctcttttctatgagcctctgaccycttatcttcattaggcagggcccccagctcgagcctgtatcacaggcactggatccccagctgcacattatcattgtcaggggctttgtgtctctctagggcagagttccaaagataactgacagcccctctgctactgtcattacagtgatacccgcccttgctgtcaccatattgatgaaggaacacaaagcctgagggctttactgctgcaggcaccatatagagaagaggccagattgtcttctcgcaagcccctccttcctccactccaactaatcttcaccaggcagggacccctggcttaggcccgcaacacagccaccctacccatggctcattattccagttggcagtggctctgcatctggggtggagccccaaaagataaagtccctctgccatggttactgccaaatgccttgtcctgatgcctccaagctggggggagaacaagaagactgagctcaccccagagctgtggagcactgcccaggagtaacaagcc

SEQ ID NO: 289809 - DNA, 589 bp, Homo sapiens
ttgcttggctggcatctccagcatatcgcagccaccatacaggaagtagcccagtctctcttttctatgagcctctgacctcttatcttcattaggcagggcccccagctygagcctgtatcacaggcactggatccccagctgcacattatcattgtcaggggctttgtgtctctctagggcagagttccaaagataactgacagcccctctgctactgtcattacagtgatacccgcccttgctgtcaccatattgatgaaggaacacaaagcctgagggctttactgctgcaggcaccatatagagaagaggccagattgtcttctcgcaagcccctccttcctccactccaactaatcttcaccaggcagggacccctggcttaggcccgcaacacagccaccctacccatggctcattattccagttggcagtggctctgcatctggggtggagccccaaaagataaagtccctctgccatggttactgccaaatgccttgtcctgatgcctccaagctggggggagaacaagaagactgagctcaccccagagctgtggagcactgcccaggagtaacaagcc

SEQ ID NO: 289810 - DNA, 501 bp, Homo sapiens
gaggagttagcaggaaaatatgtggattggtaaaattatctcatttaggagctgataccaaagcataccaaagttgaaagagtacaagaaaattcttgctaggttccactgaaataatgtatttataggtctagtataatcaaatccccttttacaaatttgagcctggcattgggatcttacagtagatagagttagacatctaaatcgtaggtatgatgttaatagccaacagttggattatctcacacagtcatccctctgaggtagctcttactattatccaccttttatgtgtgaaaggatggccatttatagacggaaagtgatataccaactttacaaattaacagtagacagagccaagactctaacccaagtgtatcctgcccgaaagcctaggattccaaccacaaataaacctacacatttattatccctgggtacagttgrcagacctaatgtggtccccatgattcctgccccctggtgttcatacct

SEQ ID NO: 289811 - DNA, 578 bp, Homo sapiens
tgacttatcattattgaagttaaccttgatcatatggctgaagtagtgtttttcagatgcatctattaaaagttggttttactccttgtcatgtactgtactctttggaagtaagtgattaagagcactccagagacttaagaagtaaagaattatgctttacctccttgaggtcatagtagctgcataaattatttagaattctgctacctttctattattaattctttgattctgttgtggcttaagaacatactttgtatagtttctattatttgcaatttactaaggtacgttttatggtcttgaaggtagtctaacgtgaygaatgttccatgtaagcatgagaagaatgtgcattctgtggtgttagacatcgtgttatataaatgtcaattagattaggttaatttacaattctgttcatgtcacctatatatgtattttttttacctgctttacttatcaatcacttaaggagagctactgaagtctgcaaataaaagtggatttctttgcttcttacttctattcatctgtgtttacctcttatatttggatgttctgctgttatgtgt

SEQ ID NO: 289812 - DNA, 311 bp, Homo sapiens
ctgcataaattatttagaattctgctacctttctattattaattctttgattctgttgtggcttaagaacatactttgtatagtttctattatttgcaatttactaaggtacgttttatggtcttgaaggtagtctaacgtgacgaatgttccatgtaagcatgagaagaatgtgcattctgtggtgttagacatygtgttatataaatgtcaattagattaggttaatttacaattctgttcatgtcacctatatatgtattttttttacctgctttacttatcaatcacttaaggagagctactgaagt

SEQ ID NO: 289813 - DNA, 311 bp, Homo sapiens
ctgcataaattatttagaattctgctacctttctattattaattctttgattctgttgtggcttaagaacatactttgtatagtttctattatttgcaatttactaaggtacgttttatggtcttgaaggtagtctaacgtgacgaatgttccatgtaagcatgagaagaatgtgcattctgtggtgttagacatcgtgttatataaatgtcaattagattaggttaatttacaattctgttyatgtcacctatatatgtattttttttacctgctttacttatcaatcacttaaggagagctactgaagt

SEQ ID NO: 289814 - DNA, 544 bp, Homo sapiens
tgtatacaatgttagaattgctatgtctttaagtatgattcttttataattatgcaatatccctctttatttttgattacttcctttgttctgaactctgttttgtaactgttttctgttagttgcatttgctttttatttctgccccctcctgcctgttctaattttaattgagcactttatgattctattttatctatttatcttatcttttaccatattattatatatatcattatctatatgcatgattatgcttgctctaataygcttgctctaaatcctgaaatatttatttccaactaatttgaggccatcctcaagtaacactttactgtttcatgggtagtagagtaccttaaacagagtattccaaatttctcccttctgttccttaaactgtgattcatgcacttaaaatgtacagttagtagattcttccaaatgaattctcataggattcccaatatcagtggcagaaaatccttggattagaagccaagaagtgctctgtgcagccgtgaccaggtgctatcaagtcact

SEQ ID NO: 289815 - DNA, 577 bp, Homo sapiens
tgcagatttccctccctaatgtgagtagtaggactcatccaagcagttgaagaccagaatagaacaacaacaacaaaaacctgaccctcccatgagtaagaggggagtcctcctgactgactaccttgtactatgacatcgacctattctgccttcagactgaaactgaaacaagtctttttgggtcccaggccttctggygttcagcatggaacttacaccatcaactctcacaggtctttagcttgccatctgcagatcttggaacttctgagcattcataatcatgtcagctgacagttgatttcttataatacatctcatatatatatatatatatatatatatatatatgtatccattcatattataatatatattctattggttcttttcttctcttttctctggagaactctgacaaatacagctgccaaaatagcttactatttgttccagccaaaacctatctataggcctctggcctctcttttcttagagcagttactttagaaaagttgtgattacaaatcctttctctgtccctttaagatataaatttcctactacctacaca

SEQ ID NO: 289816 - DNA, 603 bp, Homo sapiens
tatatattctattggttcttttcttctcttttctctggagaactctgacaaatacagctgccaaaatagcttactatttgttccagccaaaacctatctataggcctctggcctctcttttcttagagcagttactttagaaaagttgtgattacaaatcctttctctgtccctttaagatataaatttcctactacctacacattatctcctcaaggacctgggagtcatctctttgaaatgcaataatccaggaagatagttcttctatctckcagttcctttgttaaggtaaagcagaacaaactcagatggcccagtcacattgaccaacccactttaacaccctttaatacttttccgttagcatacagcaacatttacaaagtctctcaccatttcttttggtggaattgagcccaatttacactgaaatttttctctcctactgcagcggtcccaatgaaatctgtctcgcatttttaaaaagtatctagtgattttttttgacactgctcagccactctatcaaacagatattgaccttggaaatgtggttaataacataaaaggcaatgcaaacttattcacaattatttttca

SEQ ID NO: 289817 - DNA, 603 bp, Homo sapiens
tatatattctattggttcttttcttctcttttctctggagaactctgacaaatacagctgccaaaatagcttactatttgttccagccaaaacctatctataggcctctggcctctcttttcttagagcagttactttagaaaagttgtgattacaaatcctttctctgtccctttaagatataaatttcctactacctacacattatctcctcaaggacctgggagtcatctctttgaaatgcaataatccaggaagatagttcttctatctcgcagttcctttgtkaaggtaaagcagaacaaactcagatggcccagtcacattgaccaacccactttaacaccctttaatacttttccgttagcatacagcaacatttacaaagtctctcaccatttcttttggtggaattgagcccaatttacactgaaatttttctctcctactgcagcggtcccaatgaaatctgtctcgcatttttaaaaagtatctagtgattttttttgacactgctcagccactctatcaaacagatattgaccttggaaatgtggttaataacataaaaggcaatgcaaacttattcacaattatttttca

SEQ ID NO: 289818 - DNA, 603 bp, Homo sapiens
tatatattctattggttcttttcttctcttttctctggagaactctgacaaatacagctgccaaaatagcttactatttgttccagccaaaacctatctataggcctctggcctctcttttcttagagcagttactttagaaaagttgtgattacaaatcctttctctgtccctttaagatataaatttcctactacctacacattatctcctcaaggacctgggagtcatctctttgaaatgcaataatccaggaagatagttcttctatctcgcagttcctttgttaaggtaaagcagaacaaactcagatggcccagtcacattgaccaacccactttaacaccctttaatacttttccgttagcatacagcaacatttacaaagtctctcaccatttcttttggtggaattgagcccaatttacactgaaatttttctctcctactgcagyggtcccaatgaaatctgtctcgcatttttaaaaagtatctagtgattttttttgacactgctcagccactctatcaaacagatattgaccttggaaatgtggttaataacataaaaggcaatgcaaacttattcacaattatttttca

SEQ ID NO: 289819 - DNA, 428 bp, Homo sapiens
ctaagaatctgtggtttggcagatggtgtgatgcagtgtgtaattyggcatgctatgtctatcagcctgtggtaacccttaggcattttatttctacaggaaacgatgatggtgaggacaacatgtggtgacccacaggaacataatcatgttaactcctgactctgcaaaaacttagcacgtggcattgtttttagcatcttctaagaagccgacattgattaaatagacatttgtttgactgcattagattgcttctggttggtttgttctttcttccactaaatttaccaaagaatgtactagagtagtgtgaaattggaagtctggtaactgatcagcatcacctccactgctgcatacactaataacttcaactcatatttggtagtttttaaattctctcatgcaatcagaagaccttaaat

SEQ ID NO: 289820 - DNA, 610 bp, Homo sapiens
aatcccacttgtctatttttgcttttgttgcctatgcttttttgtcatatccaaaaaaactcattgcctagaccaatgtcatagagtatttcctctatgttttcttccaggagttttctagttttggttcttgcatttaagtctgtacttaattttgagtttgcttttgtgtgtgatgtgagatgagggactaatttcattcttctgcctgtgatatccagtttacccaacaccatttattgaagagactatcctttccccattgtgtgttcttgccaactctgtcaacaatctgctgactttaaatacatgaattttgttctgggytttctattctgtcccattgttctgtctctctgttttttatgccagtaccatcctgttttgattactatagctttgtagtgtatattgatgccaagtaccatgatgcctccagccttgttctttttgctcaagattactttgtctatttggagtcctttgtggcttcacaaaaaaattttaattttttttctatttctgtgaaaaatgtcatcagaattttgataaggattgcatcaaatctgtagatcacttgggtcatatgaaaattttaacaatattaatt

SEQ ID NO: 289821 - DNA, 560 bp, Homo sapiens
acacctggccaaattcatttttctatgatctttctgttgtcctttcaatatatttcttttcttcttaagttaatgagaaaatgtttctttgctttacaatgaggaatcttgatgagtatattgttatgaaacaaccttaaaaaggtcaatagaataaaaagtccaaacaaatcttctttatactattctaaaaagtaggtttgttayggccagaaatgggatggtaagaagaggtgttctgtagcttagcagagagtaagaaaagtgtcaaaaataagagactcatcacatgtatatttagaaaaggactgcttgtaacatctattaactcacaagaagacttaagaaagagattttagtcagtgccttctatgtgttaagaagagagtttgatggaaagaattatgattctataattaatgccaaatttgttatgtttccatcctgtattttgtgtgaaaccttgggaataaattctgactgctaaattctgactgctaaagtggtattgattttaaacttgactcaccaacttcacaggggttaatacagatgtgaaa

SEQ ID NO: 289822 - DNA, 648 bp, Homo sapiens
tgaattttgggagcacattcaaccatagcagtgtgagagggaaggttaaatgtcttagttaatgttgatttctgtaacaaataaaatctttaaaataataataagtgttcatttagtatcacttaaattcaaaaagcgtgtttctatcttcaaatcagtaatcaaaatttcatatatcttctatgtaaaggctcccttttgtcttaraaaatattttttccttctggccactggctatcatcttctcgtatattagaaacacaccctggttgcaatggaatctgcccaaaatccagtccagtcattgccccagctcaaagttttaagtcattaggtgatatatagtcctttcctcttccaactgtttgtatcctgaaatttataaattctctctattctcttttttatgtttacaaattgtctagtcaatgctcgtgaatttccagtaaaatatgtctaaaggtgaaagtaaaagccaacatatattatcacttcaattacttctcttgcagctataggcaatgtgaactgcctcacaagtcatggcagtaatacctttaatgtatactgtatcactacatatgatggttttgcatctcttcggcctccaatatgtttccttgttttcatctaccctattatgaagtc

SEQ ID NO: 289823 - DNA, 576 bp, Homo sapiens
tttcctagaagcccaaaagaagtataataaattaagcacatatgcttcatctgaactcaaaagctatgaaaaacagaagatattctcttgtctcactgggattcttatcctctcacctcaatttattttattctacctcttccatcatcctcttactcaacattaccttattttgttttcccttgacaggttgaatataactttcaaaaaacactacccataaatatacagttttcttgtacttaccagaaaaatgaaactgatttctcaaattaatcttctattttggagtcataagtgttagaacctatgcagcctgaaaaattgaatggatttccatattgtggtaccttggtgaaatcaccagtggttggaaatatgaggtcagatattccacctagacaaaagaactcaagagctaagcaacgaataacagatgtgcytaatacagataatgtgcacattagtttccctctgattgcagatgtgagaataaattttacctggcagaacattatggatttggaagatcttgcagagatcaggtccacacacagcatgcacaaactgtcagaa

SEQ ID NO: 289824 - DNA, 622 bp, Homo sapiens
gatgacattatgctgattggttccagtgagcaagaagtagcaaacatactagacttattatgagacatttgcatgccagaggatggaaaataaattcaaggatcttctacstaagtaaaatttctaggggtccagtggcctgtcgagatattccttctaaggtgtagaatatgttgctgcatttggtccctcctacaaccaagaaagagacacaacacctagaggtcctatttggattttggaggcaacacattcctcatttgggtgtgttactcaggcccatttgttaagtgactcaaaaggccgccagttttgagtggagtccagaacaggagaaggctctccaacaggtcaagctgctgtgaaggctgctctgccacttgggccctatgacccagaagatccaatggtgcttgaagtgtcagtggcagatagggatgctgtttggagtctttggcaggccccatagatgaatcatagtggaagcctctaggattttgaagcaaggccctgccatcttctgcaggtaactgctctccttttgagagacagctcttggcctgctattgggctttggtggaaactgaacgtttgactgtgggtcctcaagtcaacatgcaac

SEQ ID NO: 289825 - DNA, 622 bp, Homo sapiens
gatgacattatgctgattggttccagtgagcaagaagtagcaaacatactagacttattatgagacatttgcatgccagaggatggaaaataaattcaaggatcttctacctaagtaaaatttctaggggtccagtggcctgtcgagatattccttctaaggtgtagaatatgttgctgcatttggtccctcctacaaccaagaaagagacacaacacctagaggtcctatttggattttggaggcaacacattcctcatttgggtgtgttactcaggcccatttgttaagtgactcaaaaggccgccagttttgagtggagtccagaacaggagaaggctctccaacaggtcaagctgctgtgaargctgctctgccacttgggccctatgacccagaagatccaatggtgcttgaagtgtcagtggcagatagggatgctgtttggagtctttggcaggccccatagatgaatcatagtggaagcctctaggattttgaagcaaggccctgccatcttctgcaggtaactgctctccttttgagagacagctcttggcctgctattgggctttggtggaaactgaacgtttgactgtgggtcctcaagtcaacatgcaac

SEQ ID NO: 289826 - DNA, 508 bp, Homo sapiens
aagttttaatacctagccttataatttctaaagaatatattattaaaagaaataaagaaaattattatttaaaaaatagagtaaactttgctcccccaggctcacttccgatgtccttgattttttttatacttcctattttagataacttcatcttcttcttattttctgttcacaatatcttatgcttctaacyatgttgctagccatatttcatctatgttaatatatatctaaatatatccagtgacctttagattacatcattttcattgataacatcctaattcccagccccatgttcttccttcagacaatattgggtctaattttaagaatttgagagagtagaagaataagaaaaagactcggtgttcgggacaagggatacatgttatagtgacacagttgagagtatcagaaagtgtatagaactaaattggccccacaatagtggagggccctaattttaacagcagtgactcctacatagtagaatttcaggtga

SEQ ID NO: 289827 - DNA, 508 bp, Homo sapiens
aagttttaatacctagccttataatttctaaagaatatattattaaaagaaataaagaaaattattatttaaaaaatagagtaaactttgctcccccaggctcacttccgatgtccttgattttttttatacttcctattttagataacttcatcttcttcttattttctgttcacaatatcttatgcttctaactatgttgctagccatatttcatctatgttaatatatatctaaakatatccagtgacctttagattacatcattttcattgataacatcctaattcccagccccatgttcttccttcagacaatattgggtctaattttaagaatttgagagagtagaagaataagaaaaagactcggtgttcgggacaagggatacatgttatagtgacacagttgagagtatcagaaagtgtatagaactaaattggccccacaatagtggagggccctaattttaacagcagtgactcctacatagtagaatttcaggtga

SEQ ID NO: 289828 - DNA, 586 bp, Homo sapiens
agtggaatattataattttaaaaggtgataactgtccaagtaatatcaactctttcatctttcactcaacacattcctatctacctttaggaggacaacaggatgagagttcgaattaagtatattcaaactgaatttacattaagtagaaagagtgatggagttaaatttaraaacataatcgtgttaaatgtacatgccaacctgtggggtaacatggacagccagaaaagaaatagaaaggcttttgactcactctcgttttcagcatgtagcttggatcttcattctgtactctaaagggttagtcacacttgagtcctttgagaagaatatgccaagaagaaagtacttcagacagtatttcttaggggaaaggtcggtgaaggtaaacataaaaaggagaaggagctggtaaaagcctcccaaagttgggaataaaggaacagcaaagtgaatttggtaggaagagcctcagactgcagtacagcttggagacagtctcacccaggctgatgggagcttcagagccaagttgctcattaggggagtccacatttggcaggaagagccacacttagtgccc

SEQ ID NO: 289829 - DNA, 591 bp, Homo sapiens
gtcagacaactaaactgcttgaacccttagaaaagcgagggacttttttcattcctacttggggaacaattgaacatcagaagcaagaagaaggccaagtagaagaaagacctcagctctgcacagggcttagaatagagcccaagctctttctgttggcctatatttgctttcacttttgcatattttccaaagcttattatgtttttagtttctcaaagattggaaactcttctaccccagagactttgcattaatgtctcctctggctagaatttttttccaaggctttttaccatggctggctccttcccctcttacaggtctcagacctgccttgaatatcttctttaaagaggtacctctgttctctgttctcttctccattacgacaacatgtgagcatccttcaaaatgatttgtattatatagttatgcacagacatgtttttatacaggactttaaatgcattagggcrgcaacaatatagttttgtatacatatatacacaaaatcatagcataacaatacatatctgttgagaaattattcaatgaactaatgaaaagctaagtatatcttaacatttt

SEQ ID NO: 289830 - DNA, 602 bp, Homo sapiens
cagcttttttatgaaaagaaaatctttgtgattataatagcatacaaattaagacacatagtcaaattattgaattggtgaaggattttttgttctactatttgtatggacattgaatgagaactacaccttgcatatttcagagcagaaacccctcttaaacacagaaatccctttgttttaataggaggtagggaaaggtgttgatctggtggtgttcttgtgactgtttaacaataggctttgcagaaatgcaagctctcatttgtagtatttgcctctctcatactgtaaatayttccacaatgttcctgtttaagccaccagtgtatcattcatgaacagggagttggaaagaagtgtgcttaacaggctccttgaaagcctgtgtgagcagtcaccattacaccaactgtgcctctagacaagtagacaggaatataggcaaggagcaagggaagtgcagtacgtggaagaaaatgtgacttttcacgtatgacatctgagataaatatcatttccaggcaacagaagaagaaagttctgattttttctatcaaaattgaaaggcttcattaatagaatacttgccaaacagcagc

SEQ ID NO: 289831 - DNA, 516 bp, Homo sapiens
tctgtgagagcaatgaagatgggaggaattatatattcatatagttgtaagtgaacaaagtttaaatttgggttccatagaaatagagaagacttgccccacatgcttgcaaaattgaactggtcttaattatgcaaacatagactattttttaaaatttcgataacagtgtactatcacagcatattgttacactgctttaagtcaccatatataagaaataaagtaaaataaaagctcctaagatatgtctaattattcccttgcaaagcttgatactgtaaatttccctggaatggtgatattcacatgtattaaacaatatcacaaattggtgggttgatctggtacttactgagctaaatgctcccaagaagcaaatcacagcaatatttaaaagttttaggggccagrcgcagtggctcacatttgtaatctcagcactttgggaggcagaggagggtggattacaaggtcagaagtttgagacgagcctggccaatatggtgaaactcc

SEQ ID NO: 289832 - DNA, 566 bp, Homo sapiens
ttaggaaatggccaaaccatgaactccagtgacacaaacagtggaataaatcctgagtggtatgtttccctgacagaaagtgcttcaggagcaagtcagcccctaaaactcataacaaatccagacacttttggctayttatagctttcctagtctagtctatgtcacactagtcatattctctcactcggacttaggaacatagtatcctaattagtttcctttttttctctgattgtcctcttctttttctcacctataatccattcaccactctccttaattgctgctataattttctctcacttatttaaaaatccaaaatctttattatggttctttgtatgaatggatcctgccctcttctccaacgtgcatcttaacttgcatgcagacttcagagtaattagcattttaaaaattttaatgtgttagtgttttgtttttctatcagttttctttatcatcttctttaatgttaggtgattaatttttttaagtgacagcatgcctatggagtaaatcataacattaaaacttggtcaatttcctatcaatttatttta

SEQ ID NO: 289833 - DNA, 532 bp, Homo sapiens
agatttttaaagattattgaaaagcatattgatgtggcaacaaaatttttacatttcagaaacatgataaataattcatgccttgtataaaagtgtgatgacaatggtttgtctgtgataaatatggcaacattgtatctattgaatatttgggactgctcgtcacactactaataaaayagtaactaaagtataagagacacaatttctcttcttttgtcaaaaaatagcagttgatgattggcaataacagagcagaaaagattgcagaaaaatctctgcaaaatgtatatagatgttataaaattcaaatgcaatatttattattttaagagagaaatttacctttcaagaaaccatattaatgaagtaatttccctggatttgcaaggtgtgttcagagataaacatacattttagattggaaaacgtaatcctcctatgtatcaccctgagagggcaaaatttctctctacaaactctattatacaggccattttcaataacagagtaatggcattttcaacagttc

SEQ ID NO: 289834 - DNA, 532 bp, Homo sapiens
agatttttaaagattattgaaaagcatattgatgtggcaacaaaatttttacatttcagaaacatgataaataattcatgccttgtataaaagtgtgatgacaatggtttgtctgtgataaatatggcaacattgtatctattgaatatttgggactgctcgtcacactactaataaaacagtaactaaagtataagagacacaatttctcttcttttgtcaaaaaatagcagttgatgattggcaataacagagcagaaaagattgcagaaaaatctctgcaaaatgtatatagatgttataaaattcaaatgcaatatttattattttaagagagaaatttacctttcaagaamccatattaatgaagtaatttccctggatttgcaaggtgtgttcagagataaacatacattttagattggaaaacgtaatcctcctatgtatcaccctgagagggcaaaatttctctctacaaactctattatacaggccattttcaataacagagtaatggcattttcaacagttc

SEQ ID NO: 289835 - DNA, 532 bp, Homo sapiens
agatttttaaagattattgaaaagcatattgatgtggcaacaaaatttttacatttcagaaacatgataaataattcatgccttgtataaaagtgtgatgacaatggtttgtctgtgataaatatggcaacattgtatctattgaatatttgggactgctcgtcacactactaataaaacagtaactaaagtataagagacacaatttctcttcttttgtcaaaaaatagcagttgatgattggcaataacagagcagaaaagattgcagaaaaatctctgcaaaatgtatatagatgttataaaattcaaatgcaatatttattattttaagagagaaatttacctttcaagaaaccatattaatgaagtaatttccctggatttgcaaggtgtgttcagagataaacatacattttagattggaaaacgtaatcctcctatgtatcaccctgagagggcaaaatttctctctacaaactctattatacaggccattttcaataacrgagtaatggcattttcaacagttc

SEQ ID NO: 289836 - DNA, 393 bp, Homo sapiens
tgaaggctggttgggaatgagccagcaaaaaatacttttgattgaaagactgttactggaaattgttgacagtatggcctaaaaattgtctattagtagtcctttgggatgatattttgtcaaaaatgtcagaaatgaacattccccagaaagcagtggaagtattttctttggaaagaatttctgacatatattgggtcagaatttctccagtgaaaaatacagtgaagaataaatgtgtaygttttgctaagcaactatcattgctttttaagtcaaatatccactggtcccaagaaggccttaacattcctcttcactgcactcaacactgactctaggtccctgacctccttttctttgagcttttaccttaataaacatgtgatttta

SEQ ID NO: 289837 - DNA, 475 bp, Homo sapiens
gtgggagagtagaagcttaacttggataagcaccaattagcaaatacagatggctaattacatagatggacctccctgctacagttctccagtactttcccattgtttacccctttttgtttcggtaaagtgtgttcaacttcctccctcattacaataaattggacttctgttgccataatcgttttgtttctttgtttgttttgttttttcttttcttttttatttatgtattcatttttttttttttttgagacagggtttccttctgttgccccaactggagtgcagtggtgtgatcatgtctcrctctatccttgaatgcccaggctcaagggatcctcccgtatcagcctcttgagtagctgggactacaggtacatgccatcatgcccagttaatttttcaaaaaatttatgtagagacaaggtgtcactattttgcccagcctggtctcaaactcctgggctcaaac

SEQ ID NO: 289838 - DNA, 571 bp, Homo sapiens
atccaatgtatgataagtattagtcattctaaccagaatgattctgtataaaaactgtttttccaaaggtttgttctgtacctagacaatatcaaatgttatgatagataatcctgatgacctgaacatctatccacctggttccctccttcattcctaggatataatttataactttggaggattttataagagaactcyggtaggacaaatacacagtcaaaggtatttttttttttttcgttttctgaaagtaggataacttctgcaactactggagtgaagtttcttttccaaaaaaggtaaacataagagtctctgatgagattgaaatacttaaagatatacctacagtttattggctgcattttgtttcaattcttgcttttattattggcaggctgtaggaaacttagttacctagtcggtgtgataggaggttacagagtcagtctagattgtatgtctgctgcttggttaaatgtaataacttcagaagacattaaattaaaaagttaactgtgatcaaagttgtcaaagctttgcagtctttacctgtaatgtctttcac

SEQ ID NO: 289839 - DNA, 572 bp, Homo sapiens
gatcatgggggcggtccccccatgctgttcttctcgtgatagtgagtgagttatcatgggatctgatggttttatgagttttttttycccccctttgctcattcttctcattcctgctgcagtgtgaagaagtacatatttgcttccccttccaccatgattgtaaatttcctgaggcctccctagccagggcggaactgtgagtcaattaagcctctttcctttataaattacccaatctcaggtatgtctttattagcagcatgagaatggactcatatggtgggggagaaatgcattctaattaccttctaacaaatataatttataaaatgaaaactggccctcactaaccgagatcccttcagactttttataccacttaaggtcctagataaatatttttatggttgcttttccacatgtctttacctggctaactcttactctgccttctagatctggattgcataccctgcattcaagtgtacctcctgccaactactcagattgggcttcctgaccctctccatttttgagcctcctctgtatgtttctgtgtttataactta

SEQ ID NO: 289840 - DNA, 598 bp, Homo sapiens
caaagtttaaaatgctagtaatactaacaaagcaacgaaaaaggcagcaataaatatgctcaagcgtaaatacatctgagagagaagaaaatgttccaggaagaggcttaggaatgctccctgacagaatctctttcttctaatctatgttcactcttgcatgctaaatactgtgttcaataagggacacaggtttggactcactaatagcctttctttgttattctaaatttattctataactccgtagcagagaagaaccaattgtgtggtctggccttaggcagcattcatcccatcctagtcatgggggagtcctgaggagggrggtgttgttttttaatgttgttgctgtagctgtaatttccatgtaggtataaaacttaatttagaacatttcaaggcatcacatcttaaacacttcacttcattgaggcatctacaacattcataggaagattgctttcagtttaactcattataaaatattagaagcgatctacaattaccactaatttttaacacgaaaacttattatgttgagcatttaacataaagaactgtaatccatcagttttggtattcttgacatccctga

SEQ ID NO: 289841 - DNA, 608 bp, Homo sapiens
tttttatctgttattgtaataatggaaagatgaaaaatagaagtgtatttctgaagtctttaktcttcctttttttaaaaaaaaaaaagctcaatggaaatttttaaaatgacatcttgaggagggcttcaatggagaaatgtgattctctatataaggattagtaccctagcattgttttacagtgatcaaacctatagcatgttcttcagtttggaaatggttgagaacagcaaattatattcatatacaactaatgaacaattagatgtaatcccacaagtaatgctgaacattcctgagtggccacaggaaactacaacttatgccaatgtcactttctgattaatttgaatagttatcattatggacatttttagggccagatgttactgttcaaaatgaatgatttctcatgttccagaaagtggaagaccagacatttggaaatgctccagccattgcagtcttacctaaatctcttgctgagcaggttagctcctgcaggacagaaatgttgctgagtgtaaggatgctatgaggaaagtgagaagctgaatatcgctcactgaattaggaaactttggaagagattatgacttagaatc

SEQ ID NO: 289842 - DNA, 583 bp, Homo sapiens
cgagtctagacaaatagctcaaacctcttaaaagttcgatctagttttattaaaagtcttccagtttttaaaagtttgtaaatgttcagaaaaaaaaaacctgctgtgattctaggatcctttcgcatgtgttcttactcctttttaataacagtggccttgagcatatcaacctactcctcagtcagcaaattctgtgggggccttaagcaagtgattttccctttgcagtctccttaacarctaaaaatgtctctgcttagtatcatttcatgcacttctcatatttcctcatcaaggtccaaatgcagtatgaatttccatgggaaaatctgttttctgtgaatataagagtggttgatcataaggcagcattctggggcaaaccagatgtgaactctggtttgtcacaaggcgtaagtttcttaggaataaccccttcccttttgcattgtgcttttaccactgtcctgcttccatatcctctttctcaaacccagcgttccaaactaagaaacctgatctgatggagtggcttagctctcacccagtatggaatggtcactcaatggtaagtcattga

SEQ ID NO: 289843 - DNA, 558 bp, Homo sapiens
agcagaggacagacagaacataaacaattagggaactgaatacagatcaagagaatcaaamagagaggtaagtagaaaatcatagtttgagaggagtttgcagaaacaaggccagaagctaatacaggtaacactaaggtacatgacagtgattagaatccaccagaaaattttgaatagtagtaatgttaacagatttgcagttcagaaagaattttggtgacattgtggaggatggattcaactgagatgaagctggaggcatgaaggcaggttaggaaattattacagtggtccagagagcaataacgaaagtctgcactaaagcagaggtaggtagatagcagatggggatttgagagacttaggaaataatgtttgtaagatatggagtgtgagaggatagaggtgtgaggggaagaaaggatagaacctggaaacattctttcaagcacattaaaaatatcaacctatttaatatcataagagtcatattagttaagaaataatgcatgactatactacagatgtggaaatggacacaaacccaggtattgt

SEQ ID NO: 289844 - DNA, 1132 bp, Homo sapiens
aaatgaaaacatgcccacaaacacatttatatataagaatgtttattgcagttttgttcataaccaaacataaaaaaattacaaatattcatgaaccagtgaatagttccaagttgtggtatgacgatgcaatatgtactctctaataaaaaaaaggaacaagctactgatacatagcctaacatggattcagaaatgttatgttgtgtgaaggaagccagacataaaagagaacacagaacatactttatggttctctttatatgacattacagaaatcaaaacagcagttgcctcagagatggtatggagtgggatatagtggtaaagggtgggaagggaatgctctagggtgatgaatacattatgtatcttcattggggacttattatgtgggtgtatacrtttctcaaaattcattgaactatatacttaattgaactgtacactgtattttattggatgtaaattatacctcaatttaaaagataatatacaattcaaaaaacagaaggatctatggaatagatctacaatgtagagctaaccaaactaatawgtttataataaaatgaagagctagctcattaaattctatttttgacaagatgttttatttttaagattagtcactaatagaaaactctcctatgacaacaatggaaaagccttctctagagtattaaacagttctcaaaagawggtaaaagaatttgaaaagaataggccctaagagagtgaatttgtgtatatttgtccagaaaaaatcacatattcttgttgaaatccataagcacacagcaaataagtgcttactacatttgatgaactaatatccataggtccacatagatcaacaagataaagtatcatgccacacacctgaagaaaataatattcctcaagctccattcccagtaaaaactgagaatgtgaacttcctcataatagtactagaataattgtgaggctgaggcagaaggatcgcttcttcccaggagttggaggctatagtgagctatgattgcaccactgcactctagcctgagtgacacagtgaaaccctgtgtcaaaacaaagtgtttatatagataaatatatatatatatatatatatatatatatatatata

SEQ ID NO: 289845 - DNA, 573 bp, Homo sapiens
gtttataataaaatgaagagctagctcattaaattctatttttgacaagatgttttatttttaagattagtcactaatagaaaactctcctatgacaacaatggaaaagccttctctagagtattaaacagttctcaaaagatggtaaaagaatttgaaaagaataggccctaagagagtgaatttgtgtatatttgtccagaaaaaatcacatattcttgttgaaatccataagcacacagcaaataagtgcttactacatttgatgaactaatatccataggtccacatagatcaacaagataaagtatcatgccacacacctgaagaaaataatattcctcaagctccattcccagtaaaarctgagaatgtgaacttcctcataatagtactagaataattgtgaggctgaggcagaaggatcgcttcttcccaggagttggaggctatagtgagctatgattgcaccactgcactctagcctgagtgacacagtgaaaccctgtgtcaaaacaaagtgtttatatagataaatatatatatatatatatatatatatatatatatata

SEQ ID NO: 289846 - DNA, 573 bp, Homo sapiens
gtttataataaaatgaagagctagctcattaaattctatttttgacaagatgttttatttttaagattagtcactaatagaaaactctcctatgacaacaatggaaaagccttctctagagtattaaacagttctcaaaagatggtaaaagaatttgaaaagaataggccctaagagagtgaatttgtgtatatttgtccagaaaaaatcacatattcttgttgaaatccataagcacacagcaaataagtgcttactacatttgatgaactaatatccataggtccacatagatcaacaagataaagtatcatgccacacacctgaagaaaataatattcctcaagctccattcccagtaaaaactgagaatgtgaacttcctcataatagtactagaataattgtgaggctgaggcagamggatcgcttcttcccaggagttggaggctatagtgagctatgattgcaccactgcactctagcctgagtgacacagtgaaaccctgtgtcaaaacaaagtgtttatatagataaatatatatatatatatatatatatatatatatatata

SEQ ID NO: 289847 - DNA, 586 bp, Homo sapiens
caactataggtggcttgtgttagtcagctcagttagaccctctgccttattgcaaggacagaaggctttctgtatgccggggtttcttgccttggtgtaccagaagaattggatcacacatggacttgaagagtgaatgcaaggttttattgagtgcaggcagtctcagcagatggaggagccagaagggagatggaagaggaaggtggttttcttctggagtggggctactcagcagccgggttctcctccgactgccctggccaaactccacatcattttgccaactgatggcctgccggcctgcaggcacctgtcagtgtgctcttacattggtgcgttcctctcgacatccagtcacttgtgtcttcttgggctggtgtgtttctctctaagtccagccacttgtgtctctgcccactagggtcttggggtttttacaggcacaggatgacggcaaggcaggtcagggtggatttggscatgaaaacagaaatgcctgtcctcacctagctccgtaggcaaaggcccaagatagagccctagccacggactacgcccttccctttccagcacttccctgccc

SEQ ID NO: 289848 - DNA, 595 bp, Homo sapiens
tgagttactgtttgcctatggtgttagggaagrattcaacttcattatttcatgtgtggttttctacttggctcatagctacttcttaaaaaaactattctttcattcattgaatgatcttagcacatcttttgaataccaactaaacatagacatgtggtttacatctgtattcaattatatttcattgatctatatgtctatacttatgccagttacacactgtcttgatcactattgttacacattttgatattgagaagtgcaagtcttagaattttgttaatctatttaaagattgttttgggttttctgagtcccttgcaattccatgttaattttagaattagtcagtttttacaaagaagccagcgaggattctgataaaaattgcaatgaatctgtaggtcagtttggggattattactatcttgaaaatgttaagtcctctgatccatgaatatgatatatttttccatttatttagacctcctttacattctttcaacaatgttttgcagttttcagagtatacactttatacttactttgctaaatatattcccaaatattttattctttttgatgatattgt

SEQ ID NO: 289849 - DNA, 507 bp, Homo sapiens
ccatgctaaattttgatagcaacaaatgaaaagtctggccttggccaatgacaattgtgtgccatgaactatggagtgtcattaactgaattatgtgcacttcagatctttaaacaacaacaaaacgatacaattccgtgcttaggagcaaaaatggagttgcrtaggtaaaatagtgataaacatattcaaaatagtttgtatttaaaaactaggtctttcatttatttgtcattcagtcattaagcgtttagaatgacctgcaaatttctttacattagaatttaggaatttataggtggagagtgagttgtctctccactcaaggatctcgtacactcctgtgcaaactaaagactggtttacagtacaaggatcacacagtagagacatgttcaaactgctaggtaaaaagcaaaagctcaatattagtcataaatgggcaaattgtagtggataaatgctgtgtgcaaactgaggtggatttcaagatgcatagttctggaa

SEQ ID NO: 289850 - DNA, 507 bp, Homo sapiens
ccatgctaaattttgatagcaacaaatgaaaagtctggccttggccaatgacaattgtgtgccatgaactatggagtgtcattaactgaattatgtgcacttcagatctttaaacaacaacaaaacgatacaattccgtgcttaggagcaaaaatggagttgcgtaggtaaaatagtgataaacatattcaaaatagtttgtatttaaaaactaggtctttcatttatttgtcattcagtcattaagcgtttagaatgacctgcraatttctttacattagaatttaggaatttataggtggagagtgagttgtctctccactcaaggatctcgtacactcctgtgcaaactaaagactggtttacagtacaaggatcacacagtagagacatgttcaaactgctaggtaaaaagcaaaagctcaatattagtcataaatgggcaaattgtagtggataaatgctgtgtgcaaactgaggtggatttcaagatgcatagttctggaa

SEQ ID NO: 289851 - DNA, 542 bp, Homo sapiens
aaaattaaaattagactgacagccagtctccatagctgtagagctacagaagacaataaaagaggatcatcaaagtgctgaagtttacccaaaagatgtcataaacaaaatccttaaagtaaactaacagactggaaaaagatatttgaaatatacactgggtagaaacttgccaaatacacatggtggctaaataacaaacatatggctagctctgattgccaatattacaaatttaatttcttaggtatgagatcaaatctgattttttttgaaaaaatgagtaagtatggcagtttacttattgctaatttgaacggttggatttaaaagtttgacatcatgatgtagggaaaattactgctctgcactcttggctactgtaggctaatacaatcactactctgaacactgatgcactaaaagagtagttcgtttgsaacaatgtggcatgtcataatatcaccaagatatttatacacacataaattaaaatcagaaaaaaatctgtaaaatttctgggaaaaaaagttaaaaaattt

SEQ ID NO: 289852 - DNA, 422 bp, Homo sapiens
caggagatatggagaggttggttaatggaaacaaaatttcagctagacaggggaaataagttctagtcttctaaaacatggtagggtgactaacaatttattatatatatatayatatttttttttttttttttttttttttttttttactgtagagacggagtctcactctgtcacccaggctggaatgcagtggcgcaatctcgactcctgcaacatccgcctcccaggttcaagcaattcttctgcctcggcctcctgagtagctgggactacaggcacatgctgccatgcctggctaatttcttttgtatatatatttttaatagttagaagagaggattttgagtgttcccaacaccaagaaaagataaatgttttaggtgggggataggctaattactctaatttgatcattacac

SEQ ID NO: 289853 - DNA, 566 bp, Homo sapiens
tatgcctcttttctggcattctcccccgggaggatgcctaagtcatatagtcttagcagtatttctttttttgagcrtctgtttaggcaaatatatatgtcagttactgtaaggaatattaagataaagagggcacaattctgtcgtacagacactcatttgttggaatgatttaaaaaaccaaaataaatattttcaaagctaaaattaaagagtactgtggcaggaaaaaggtaaatatcttcagatatgaactgcaagaactgtggaagttaaaaggaagtgatagtgcattattctcttgggatcatggatctttgcaaatgaatgagactgtacaaaggtttgtgctttatattatgctcctcatgggtttaagatcttcccatggcttctcattgcctgtagaataaaatccaaaaatcttccacatcctggcctctccaccttcccagcctgatttctaaccatgacaggactctcgctatacagcatttctgacatttccctagttagaacacaccaaaaaacatgttcttttccatgtctcttccattgcatattct

SEQ ID NO: 289854 - DNA, 571 bp, Homo sapiens
cgtgcaaatataaaaccatcctcaatagagtttgtttttctagtacctaagatatatttatattttctatttacttcatggcaggaattagccactatcagttactagataatacactgaacaattaggaattttgaattctrttgtaaccattagcagacaaccatgttatgttaaacaagccactcaacctaagattatgtctccaggtatcaaacaagtttgtccccagctctaatattttaaaaagctctatgtttatttctgagattttactattttttctcttctacttttcatttaattttaagacaaatctaatacaggaagtaagttagaacaaaagatgaagacttaagggagagtgactttgaaaatggattatttcttaaaaatacaaattataaaattatgggtcacagaaaaattagtttccactccacttctctcaagcacataaaagcacttaccagcagaacagttgcaacagctcaacggtgccctggaaaagaagaattagagaaatgagtcattcttaatgatttttgccaaggaaatattcaaaatgtag

SEQ ID NO: 289855 - DNA, 533 bp, Homo sapiens
gtactcgtttcttaaggaatgtttaatcagaactcttgtttccaaactacatcagaggcaacttttcctacaaaaatcctgtaattggctatcacaagttatacgcctggtcagtacaattatattgcatccctgaagcattacctagatagacagatttaagaagaaacctattttkgtattaatacaatagcaacttggaatcaattaccatgtttcaaaggaccctcattagatctgctgtcagttgcacagaattcataatttgtctttattgcaaatgtatttctgttattttccactagcaaccaaaaaactagaaccctggtgagaaaaaaagttccttttaaccagaccaccttgctggttggtattccttattacagtacagagtcaactacattattttcacagtgtacttactttgacatgagtttactgacaactttcctagacaatttgtttttataaaatatgttatagaattataaagttaccaaaacaatctagaggcatcgttgagtgttaggaga

SEQ ID NO: 289856 - DNA, 533 bp, Homo sapiens
gtactcgtttcttaaggaatgtttaatcagaactcttgtttccaaactacatcagaggcaacttttcctacaaaaatcctgtaattggctatcacaagttatacgcctggtcagtacaattatattgcatccctgaagcattacctagatagacagatttaagaagaaacctattttggtattaatacaatagcaacttggaatcaattaccatgtttcaaaggaccctcattagatctgctgtcagttgcacagaattcataatttgtctttattgcaaatgtatttctgttattttccactagcaaccaaaaaactagaacsctggtgagaaaaaaagttccttttaaccagaccaccttgctggttggtattccttattacagtacagagtcaactacattattttcacagtgtacttactttgacatgagtttactgacaactttcctagacaatttgtttttataaaatatgttatagaattataaagttaccaaaacaatctagaggcatcgttgagtgttaggaga

SEQ ID NO: 289857 - DNA, 533 bp, Homo sapiens
gtactcgtttcttaaggaatgtttaatcagaactcttgtttccaaactacatcagaggcaacttttcctacaaaaatcctgtaattggctatcacaagttatacgcctggtcagtacaattatattgcatccctgaagcattacctagatagacagatttaagaagaaacctattttggtattaatacaatagcaacttggaatcaattaccatgtttcaaaggaccctcattagatctgctgtcagttgcacagaattcataatttgtctttattgcaaatgtatttctgttattttccactagcaaccaaaaaactagaaccctggtgagaaaaaaasttccttttaaccagaccaccttgctggttggtattccttattacagtacagagtcaactacattattttcacagtgtacttactttgacatgagtttactgacaactttcctagacaatttgtttttataaaatatgttatagaattataaagttaccaaaacaatctagaggcatcgttgagtgttaggaga

SEQ ID NO: 289858 - DNA, 527 bp, Homo sapiens
ctggttggtattccttattacagtacagagtcaactacattattttcacagtgtacttactttgacatgagtttactgacaactttcctagayaatttgtttttataaaatatgttatagaattataaagttaccaaaacaatctagaggcatcgttgagtgttaggagaatttaattggaaagacagaatttttttttcctcacatgacattgaacatttcaaaaacactgttgcccttttactgaaaagctaatatttccctccagatttctgattctcatattcatagggcctttggtaagctaaactttaacttgaggctcaagactatataaatatttatcatggacagaaaatttaaaaagaaatcttagtgattttaggcatcaaaagagatttgtgtggtgtaataaaagagtcctggacttaaattcagggggtttgcatctgatctttgatctgtcactatttgagctagtctcactggactcggtttctttacctcagaagtaagagagtcagatc

SEQ ID NO: 289859 - DNA, 593 bp, Homo sapiens
ggtgaaattctctggaagccagcaaggtcatgtaaatgagcaaaggaggcaaggtgtaagcaacaggcaatgaagcacaggtggcacttggggaatgtgcggtcctttccaatacctcttctaatgaaagcagttgctgctctgctccagctgacagttgccataagcaaaatagccmggttttgttttatctttcaatttatttttttaaagaaaaacaacaaatcaggattttaggtgaaatttcaaaattgttcaatattagcaacgaatttagaaaaaaaaaacaccatgtgggataaacacacataaccagatatgacccataggtgcccgcttcatggcttgtattctactatgttgtcttttcagcagtgctagcagagcccaggctaccactagctgctgctaatgtttccagcaaacttttaacccttcatggtgagttcaacaagttctgatctaaaaataacttatgaacacataatatgatagtaatggccttcatttattgagctcctatcatgtatcaactgagacaaagcctctaaggtggatattcttattaaccttattttacagataacaaagct

SEQ ID NO: 289860 - DNA, 545 bp, Homo sapiens
tgaaagcagttgctgctctgctccagctgacagttgccataagcaaaatagcccggttttgttttatctttcaatttatttttttaaagaaaaacaacaaatcaggattttaggtgaaatttcaaaattgttcaatattagcaacgaatttagaaaaaaaaaacaccatgtgggataaacacacataaccagatatgacccataggtgcccgcttcatggcttgtattctactatgttgtcttttcagcagtgctagcagagcccaggctaccactagctgctgctaatgtttccagcaaacttttaacccttcatggtgagttcaacaagttctgatctaaaaataacttatgaacacataatatgatagtaatggccttcatttaytgagctcctatcatgtatcaactgagacaaagcctctaaggtggatattcttattaaccttattttacagataacaaagctgaggaacttgagcaggtgtatactctgcccaaggtcacactggtagcaagaaatagaattagttgtttgtccaaat

SEQ ID NO: 289861 - DNA, 594 bp, Homo sapiens
cgcatgtcttacaattagtcatatagtaggtacaattagactatggcttaatgtcttcatcagatttggataattatttctaaactgtgtactttgggtgtgttgcaaggataaaatgaaataaaagatgtgaaacaagtacttatttatcttaaactctgcctcactgtagattccagccattactttttactactacttaaccaatacaagatagatcttagcttctcacccctctctggcattcctacttttgcactgttggcatttctatcttcctacagtcttctgcagcaaatggaaaactcctttcccacctaaaaacctcagcttggtattatactttaacagtagaaatatcggtggattttcaagtacagtcaaaaagtatagaagtagcattactaacgttttaaagatgtaaattccactmagcaaagaacaccctaaaattttgaccttgcaaatatgaatatccactagcagcttcttcgaggccctcaagggcaggatgttctctgagattttgaagaacccagatgccattctgaactgtttgtgtttatctgtgtaagtgacatgtcaaggtactaa

SEQ ID NO: 289862 - DNA, 312 bp, Homo sapiens
tggtaggcatgaagtgtattttctcccaaagtcatgcttctrtaatgcattatttgtagagtaacagcaattttgtttttgtttcacaaaacaaaatacaaagtttgcctttttccaccccaaagaacttcaaaactaatggagatattacataagtcaactaattgagaaaggtatgatattttgaagaactgagcgggcggaatcttgggactgggttaaaaaaatagtcttcattgttgaaataaggaatgattcttcacagggacaatggttagagagtaagagggatgttacagtgctgttcagcag

SEQ ID NO: 289863 - DNA, 552 bp, Homo sapiens
gacaatggttagagagtaagagggatgttacagtgctgttcagcagagctttctggaagaatggaaatgttctacactagtgctgtcgcccactagccacatgtaacatttgagcacttgatatgtggttagtgcaagtgagatgaatttttcattttatttatttttaattaattcacatttaaatagccccatgtggcaactgactaccatataggagagcacaacataaaggaaacaaagtgttcttggaactgaaaatgaggagatggaaaccaattgttgttcatcattataataataattcataaaacagagtatgtttctaatttaaagctttatcrtaatcatcacaggtgaaaatggacatctttgtgttcctagttactcattttaataaagtgtttgtggaaattatgttaataaaagttaggctttgatcattataaatatagcctatcaaaactacaattattacattatcaaggaaaccatttttccatactttagtttacaaaacttggtataatatgccacatatcagctttaggt

SEQ ID NO: 289864 - DNA, 552 bp, Homo sapiens
gacaatggttagagagtaagagggatgttacagtgctgttcagcagagctttctggaagaatggaaatgttctacactagtgctgtcgcccactagccacatgtaacatttgagcacttgatatgtggttagtgcaagtgagatgaatttttcattttatttatttttaattaattcacatttaaatagccccatgtggcaactgactaccatataggagagcacaacataaaggaaacaaagtgttcttggaactgaaaatgaggagatggaaaccaattgttgttcatcattataataataattcataaaacagagtatgtttctaatttaaagctttatcgtaatcatcacaggtgaaaatggacatctttgtgttcctagttactcattttaataaagtgtttgtggaaattatgttaataaaagttagsctttgatcattataaatatagcctatcaaaactacaattattacattatcaaggaaaccatttttccatactttagtttacaaaacttggtataatatgccacatatcagctttaggt

SEQ ID NO: 289865 - DNA, 500 bp, Homo sapiens
acaaaacttggtataatatgccacatatcagctttaggttaaatataacaacaacaacaacaacgaacagtgaagcagatttagtcacaagggacacctcatcaagtagttaatttgtagaaaaatttcattttttcaatttgaatgaacagatggcctattcattaaaattcaaaagtagataattacttgattccagtatttttagaaaaaggacattttataacattgtgttgggggaagactcataggtcttaaaatgtcttgtgtgactggacacatmattctccactgtctacaactgcctgccgtgctaactgaataagtaggttaaaaatagccttgcagctcttcttcaacactaaaacactcacttaaaaaaaaaaactgctcatctctctgaagaaatatcttcgcattaacctctaaaccctgctcaaacattcaatcagcaaacgtttatctatcactttttgtgctggatgcttgaaagtgggggt

SEQ ID NO: 289866 - DNA, 516 bp, Homo sapiens
gtagctgttatacccaatttttccacttctcctagtcatagggaaccctagtctaccatctgtctatactgcagatttagctagtctagacattttatataaatggaattatattgctctggctaggactttgggactatattgaatagaagtagtacaagtggggatccttgtcttttttcagttctcagggggaatgctttcaacttttccccattcagtgtggtgttggctgtgcgtttgtcatagatggcttttattaccttgaggtatgtccctttctatgctgattatgttgaaggttttaatcataaaggaatggcagttctgtcaaatgctttttctgtgtctgttgagatgatcatatgatttttgtttttaattctgcttatgtgayataatacatttattgacttgcgtatgtgaaaccatcactgcatccctggtataaaacccacttgatcatggtggattatctttttcatatgctgttggattcggttagctagtattttg

SEQ ID NO: 289867 - DNA, 506 bp, Homo sapiens
gagacaaagcaaatccctttcatgtatgtatgcattcccatacatcctctgaaatctaggcagaggttcccaaacctcaatccttgacttctgtgcatccacagactcaacaccacatggaagctgccaaggcttggggcttgcaccctctgaagccacagcccaagctctaccttggcctctttagccatggcttcagcagctgagatgcagggcaccaagtccctaggctgcacatagcagagggtccttgggcccagcccatgaaaccattttttcctcatgggcctccaggcctgtgatgggaggakctacctcaaaggtctctgacatgccctgtagatattttccccattgttttggtgattaacatttggctcctcattacttattcaaatttctgcagccagcttgaatttctcctcaaaaaatgggtttttctttcctattgcatagtcagggtgcaaattttctgctctttttcccttttaaaactgaatgctttt

SEQ ID NO: 289868 - DNA, 446 bp, Homo sapiens
ctgttacccaatttgaaagtcacttccacgtttttgggtatctttacagcagcacccaactcctggtaccaattcactatrttagtctgttctcatgctgctaataaagacatacctgagactgggtaatttataaagaaaagaggtttaattgactcacagttccacatggctggggaggccccatgatcatggtgaaagtgaaggaagagcaaagtcgcatctcacatggtggtggacaagagagaatgagagccaagtgaaaggggaaatcccttataaaaccatcagatctcataagacttattcactaccgggagaacagtatggggaaatccgccccccatgatttaattatctcccactaggtctctcccaaaacacgtgggaattgtgggagcttcaattcaagatgagatttgggtgaggacacagccaaaccatat

SEQ ID NO: 289869 - DNA, 450 bp, Homo sapiens
cactctgccaacaaacatgaaaaaatgctcaacatcactaattattaggaaatgcaaatgaaaaccacaaagagataccaccttactcctacaagaatggccacaataaaaacagtcaaaaaacattaaacgttggcatggatgtggtgaaaaggcaacacttttacactgctagcaggaatataaactagtataacccctatggaaaacagtatggggattccttaaagaactgtaagyagatctaccattcaatccagcattctcactactgaagatgaaaagaagtcattacatgaaaaagacacttgcacacacatgtttatagcagcacaatgtgcatttacaaaaatatggaaccagcctaaatgtccatcaatcaatgagtggataaagaaaatgtagtatatatacactatgggttactactcagctgtaaaacaaaatgaa

SEQ ID NO: 289870 - DNA, 324 bp, Homo sapiens
ataccattctatattttgtttattcagtcatcagttgataaagctcttcttacrcattagtctaccatcttccttgactgccaaatagagggttgttcagcagttttttcttaccctcagtttttccttattcttgagtcctccttattttgtcctcaatggtgctggaggacaaaggtcatcattctctgtctgggtagcgactttcaaagcaagtcctctcacccccaacctgccccaagccatttgtataattgcttttgagaaaataagtttaaaagcattctttttcatcttattaagcagatgtttagtattttttgc

SEQ ID NO: 289871 - DNA, 324 bp, Homo sapiens
ataccattctatattttgtttattcagtcatcagttgataaagctcttcttacacattagtctaccatcttccttgactgccaaatagaggrttgttcagcagttttttcttaccctcagtttttccttattcttgagtcctccttattttgtcctcaatggtgctggaggacaaaggtcatcattctctgtctgggtagcgactttcaaagcaagtcctctcacccccaacctgccccaagccatttgtataattgcttttgagaaaataagtttaaaagcattctttttcatcttattaagcagatgtttagtattttttgc

SEQ ID NO: 289872 - DNA, 613 bp, Homo sapiens
aagatacatagccaactaggagtaaaacaaactaaaatagggccgtttctcacaggctttattcaatgtccaaagaatgattttcaaacatccagattaatactgtgaagagttaacacatcatctaggggrcaagagttcagatccagagagactttatctattcagatttgaaagcaatcttaaactgacaactgataaggcaaggacacactgctattctttaattcaagaacaaaattgcatctcacagtggggtcatccttttccttcttatagtggcttaagaaagacatatataaatgactaacaagaagtacaggtttaagggagatatctaagtttatagtctgtccctgggaattggatggcttttccccgtaggttgccccatggcagcctcatcaatttctactttcttactgggtgacagcaccccccatctaaaatgaccctgcaaggcaagtctgatataatagtatgcctaatctattaagaaagcagatccacagatgaaccccatctcccaaaggaaaatacatccttgctggtgacagcacagctccactaccagaatattgaaagttccttttgaatctagcaactgtagaag

SEQ ID NO: 289873 - DNA, 495 bp, Homo sapiens
gtttgccactgaaaaaaaggaaggaaaatgccatgggaactatctgaagcttatgaaaagatgaatttaccggactgattttgatggggaagaattttctttcctacagtcaagaagtgaaccatgagaaagctagaatatttggccgtacctgtgtaagcaagtctttttaaaccttttgagttgttgaatttgttcattcctgactaatttctttacatacagaggggcatgcatacaccagtcaaaaataatgaggagatttttatggayttttattctaattactgcagaattctctcttcattgataccatttatgtgaaatggttttcagggtaggataatgtcctctgaagggtgaatcacgtaccactagtatatggattaaacttaaaatttaaaatatatatatttaagattttatctccatagtatttgaaaataattaatcagcacattaaacctcagttgttacaaagattattgcctagat

SEQ ID NO: 289874 - DNA, 522 bp, Homo sapiens
acatttgaagactgtgaacaacacatgaggctcagagctttagggatgggtgttgttgttacccccattttattgcaaaagcaactaagacctaaagcagttaaacaattaggcccatgttcataactagtgagaaggaggaccataagtctgacactactttgctatattgctctactatcacaagcttttaaattttgcctgcaatgtttcattttgcttttaagcaccagtgtatctgtaagactacttctattggtctgaggactccgctttcacaaaaacttatacagcatgttatggtttcraaaatttttaaatattagcacttggacccatgttaagtacatctgttgtaaaaagatgaattctgtaacataatgatgagaaggtcataagtttaatgccttagagacatacaatgggcaatcagaacctattgcaggatctactttttgtaatgcattgaaacccttatggatgtttcatgagatgaaacttcatggttcagtgtttgagaca

SEQ ID NO: 289875 - DNA, 570 bp, Homo sapiens
gtcatgacaagtgtgtttgccttcattttccccttcaatttcctctgactactgaggaaatgtaaccttagcacttcgttggtgaatctgaaaagactgctttgcttatgagatgttctttgttgactaaatttctaagtcatcatgataataatgctttataatttacaaactgtcatcccatgcagtcatcccatgcattatgtaatgtaatcttcaaaatacctcaatctagtagatgaaagaggttgtccctgattttccagttgagaaaatgcaggccaggatcatgaagtgcattagtgtagttcattaacagagtctctgatgcaaatttaggtagcagtaatttaaagcccttgctataagcacctctcctttactccttctgctccctaccyctatgtgtggactcctgaataaggctcttaatatgcctactacccatacctaatgtatgaactcttggtaagggaacttcaaatgtttactctaatgtctctcaaagtgtggtccctggaacagcagcatcagcatcacctaggccctcattagaaatgcaaaatctgt

SEQ ID NO: 289876 - DNA, 545 bp, Homo sapiens
aaagtgtggtccctggaacagcagcatcagcatcacctaggccctcattagaaatgcaaaatctgtggcccctgctctactgaaaggaaattttgggggtgggtcacagctatccgtgtgtaacaaggccttccaggtaatgcccctatagtttgaggactgaactataccctatagctgcccagttagtgttaacctacacatatgcatactatcatgttcatcaaattgtctatattgaggaatttaaaagaacattacagacactataataagtagtcagtgttattattggcatcattgcagctttatttttgttttgttgctgttgagcagagatatttaaggaaagttgcatttttcttttaaggagtaaaacacagccttagtaaagagtaccagctttctacatattattaatatattcttttgaagaatagtgagaagtaaaattaaaagaagaacagattgagagggagggaaaaaytaaaaaatcatggactgtcgagccatgttgttaacaaaaatcacttttagatttatta

SEQ ID NO: 289877 - DNA, 419 bp, Homo sapiens
cctttttgcttaatcaaggcactcatattttgttttaaacacgtcctcctgtttttcccttaatagaaaaggcaaacatctagacatcacatctgtctgaaagtcttctcctacattccctttyaggcaccctgattccctctgcctctgctctcctctaattagggctcctttagtcaccatgctcctgtttaagcttctttaactcctctattgtttctgtgaaagcaataactgctggttccctcctttaccctctctctgccattacagaaaatttcagaaatgggtgggagttcatagccaatttagctagataaaagttgttccttggaaacggattacttttattggagttggggtaagcaaaagtatggcttggctgaaaagaggccacggaagagaggaacaaaggatta

SEQ ID NO: 289878 - DNA, 581 bp, Homo sapiens
tccagttctctttggaccattctagagtatcattcattttatttatatatacatggatatctatattaatgttatattttttccacatatatttcataaattttatcttatgaattacagatctttcaaatatgatacctttctaatattttctaaagcagtaatttgaaagaaaaattctttcaagaactttttagattttttttaaaaaaggaaaggcaactatggcgttataatcttaataggtacctgtgttaaaatgatttgaactgttgcctaaaatyaactgtcttcttgcaagactgctttggagggtagcgttgattatatccatgtgatcatgtttacaacatattcctatataggtacttcttgtcatcttccatgaaacatttaaataagaataactgtggaacagttacatgacccctactaagatttgttgttattaataggtgatgaaagacccccatgtttctctaaattgatctatcttagtgtttatatttcaagggtgctttaagatgacaccatattgctttttttcctgatgcattagactagtcacagtagcaaataga

SEQ ID NO: 289879 - DNA, 1187 bp, Homo sapiens
agtcagacctatactgggttagggttagatatgtacccaagcactgcattaggcaccagggaaatggagatgaatacgaatgagtcctttctataagcagtaggacaatgtttgacccatcgttgactgtctttaattaattaaaagataaaagagcattatatactatggtgatagacatgtagacaaacagattgctagagatagagagatatcactaaaatggataggtactaaatagtatgcaaggtactcaaattaacctgaaaatatagagaccttgctatccaattaagtagacaaaaatagatgcagaataccctgaattcatttccatttccaaaagacaaaaatatatgtgtgtgtctatacacacacacacacacatatayagaagtattcatatgcatgtttgtcatccatgtcaccttctgttgctgggtagattttgttttgtttcataaattctcattctgagcacgtataaaaatacaggtgatttgtgcaaggtggacttacagaaaacaggctggggagtaaagagggcaagcaggtggtctgccatatgactttcttttttttgatatttctcttttaccttwggattaaatttaataaaatatggacaaggctgatataaaaaacgataaaccttacttcattagaaataaccaatttcacttatagaacaccatcactagtaattcactagcagttccattagagatatgacagaggccataaccaacatgacatgaaatactgaaacacatgctgagttatccatatgttttttwttatgtttctagcacttcaaacgtatagaaaactggaaatgatgcaggttttgacttttcttccatttcttccagtggcaatgtgtactggttgcctaggaaactgttaacagcaggggacagaactggctgtactatcaccctgagctgggcatagttttcagtggtagcttgttagttctcagcccccacggaagggcacctgtgcagctctacttggtaccagagtcaatcatttccaaaaagcagaggctgtatattttgctgttagcattttggcaaaaagaaagaagaaaggggttgatgatggtgactgaggaggaaagcctgagcaggggctgttgaaggtagaactaagatgtgcaggtgatgagactgcagaatacaaag

SEQ ID NO: 289880 - DNA, 605 bp, Homo sapiens
atagatcctccagtctcagtcaagactcaagtaactattgctccagccagcacctgactacaatctcatgaccccctcagctgagcatttcacaaattcccgacctaaagaaaccatgaaaaataagaaatggttatggctgttttaagccactaagttttggcgtaatttattatgaaacaatggataaataaccttttaaaagttttgtaacttaaaaaaaaatctagaaatccctaatatgtaaaataaaatgtattgaacagtaatgaaaacttagcatttaccaaaatgccttataaacagcatgggttatattttatttccaaatattaragcatatttcaagagtttttaaagtatttcattttatagtcatttaggtaacttctagattgaatgctgggcttagacaaagctctcttagggctataatatatcaaaggaggaattatatagaaattttttttctcattaaagttgtagtgaaagactatgaaatgggaaaaagaaccctaatgactatgggatatgaccactaacatcaatttcccatgtaaagcataacatataaggcttgatgttttattctcgtcaatagtttc

SEQ ID NO: 289881 - DNA, 1173 bp, Homo sapiens
ggattaaatttaataaaatatggacaaggctgatataaaaaacgataaaccttacttcattagaaataaccaatttcacttatagaacaccatcactagtaattcactagcagttccattagagatatgacagaggccataaccaacatgacatgaaatactgaaacacatgctgagttatccatatgtttttttttatgtttctagcacttcaaacgtatagaaaactggaaatgatgcaggttttgacttttcttccatttcttccagtggcaatgtgtactggttgcctaggaaactgttaacagcaggggacagaactggctgtacyatcaccctgagctgggcatagttttcagtggtagcttgttagttctcagcccccacggaagggcacctgtgcagctctacttggtaccagagtcaatcatttccaaaaagcagaggctgtatattttgctgttagcattttggcaaaaagaaagaagaaaggggttgatgatggtgactgaggaggaaagcctgagcaggggctgttgaaggtagaactaagatgtgcaggtgatgagactgcagaatacaaagwttattatgcaccaagtaccatgttaagcattttacttgtgtgttatttgatttcatgattaaacaatcccatgttgtatggatccatttatggatgagaaaattaaggcttagtcatgtcacaaatctgtaaaaagcatacagttaataaatggagaaatcagactctaatttatgcatctgagtctgaaatttgctatgccattcctatgcccagacatttgctaccatgctcagagggagggtcctccctawaactgtcagcatctgagcctacacagcacagatgaaagacccttaatctgttttttgatatctttaatcaaaacagacaagtaacactggcttgtttatctcccccaccccaagccttcccatagacaacacagcctgtctcctttaaaagttttagtattatgaagacctggaaacaaagaagttttcttcagattcttacattgattagtaactatctcaaagcaatatgtgtgagacagaaaaattacacaacatggagaataaattaggacatctatccagttggaaacaggatgttagactattctgatgtacagtgtgtagttgatt

SEQ ID NO: 289882 - DNA, 630 bp, Homo sapiens
tatcatgaggtagtattctataatacttccaatgctagcaaattaccatgtcattataattggaaagtattatctaacatcaaatatgctttgcagatgtcaaattcagtgaagttatactcatgaaggaaatgtcagttggataacagaaaaagtgattgcttttttgtaatattcataataggcaatggcattaggcttaacagctcaagtaactctgcctttaattctgagtatgccaaaatatgcctatatggccctcaaatcagtgattttagtataaaaagtaacataaaacagttgcttgattccacttacattgctgcatttcctcaaaatttcacttgagaaatatttattaggactctagataaaaatcttaatttctttatgcagaagtggcagtattttataactctcactagaatgttgaaagcattaaaataattaagtgtataatacatattttcatcctaaaagacatgcttacgtttatcttcaaataaaacscagccgcaaatccatttttaaaatgagcaacacagatatgtgttattactttatagactatgtcctgcacttcttttctgaatccaattgtacgctaatctaaaatttgaaataaattat

SEQ ID NO: 289883 - DNA, 630 bp, Homo sapiens
aaaactttatgtatctagtatatatctacaagaagaatagcttcctaagaattcagaagatggtgttggtctatgagaaacattaataatgtaatgatatggtcctgtttttccccaaagcccaaatgtccatcaggatcactgctatgcctatgaatgctgttgatgtgtttgaaatgccatggtgacagactccagtatagtgcttgtcaacatgccacatacctgaatcagycaaactaaacctgccataaccaccacttgctgaaaatggtgggcccggcaaccgactggaatggatgacttgagagatccaagagtcaggcacagcaggatttcctgaagatttatccaagatggtgtctaggtctaaaatttcccactgattcaccccttcagccagcatttattgagcctctactatgtgtcagacactggcattgtatacagcagaacaaagacagaaatctctaccttcaaaatgtggaaggtaatactatttagaatagcaacaatttctaattatctgaagtaatgtgaggaaagactaggcagtaagtaaattaagacaatcctcaaatctaaatgtattatttaatacatttccatgccctctttcttcatacaatg

SEQ ID NO: 289884 - DNA, 559 bp, Homo sapiens
ctgctcctgctgaattgctgtcattctaaaaaatagaagatgaagttaccaaggaaataaaagtttcatggtttgacctcagttacctaaaaaataaaaataactaaccataccatgtgaaatgtgtattctagtgaaatgtgtattcactagagtattttattagaacgggaactagttaagcaccaatgttgtctttttctttggaaatggtgaattgaaaagaggaaaatgcccttacgatagcagcttttatatcaataatgtattcaataggaagcttctatttctagttccaatggagtgtaaagtttcaaaggtaatgatggaaacaatgttaagatactggcatagacmgttctgttagaggtaagaagagttagtagcataaggtacgcaattatagtcaggactcaggataaaacaaactttcaaggttgtcttaatgatttcaaatttaagcaaactttagcaacttcaaaatcgtagttatgcagatataaatacctgtcacatgaaaactgaataattttatggcaaaaatcgaatttgtgccatt

SEQ ID NO: 289885 - DNA, 1154 bp, Homo sapiens
ctgctcctgctgaattgctgtcattctaaaaaatagaagatgaagttaccaaggaaataaaagtttcatggtttgacctcagttacctaaaaaataaaaataactaaccataccatgtgaaatgtgtattctagtgaaatgtgtattcactagagtattttattagaacgggaactagttaagcaccaatgttgtctttttctttggaaatggtgaattgaaaagaggaaaatgcccttacgatagcagcttttatatcaataatgtattcaataggaagcttctatttctagttccaatggagtgtaaagtttcaaaggtaatgatggaaacaatgttaagatactggcatagacagttctgttagaggtaagaagagttagtagyataaggtacgcaattatagtcaggactcaggataaaacaaactttcaaggttgtcttaatgatttcaaatttaagcaaactttagcaacttcaaaatcgtagttatgcagatataaatacctgtcacatgaaaactgaataattttatggcaaaaatcgaatttgtgccattwggctaggatgtcaaaaatagggctaatcttacagctacagagagtaggcagttgcctatataatgagacgcacccaagtaatacaataawataaaaacttaaaacatccccacctgttcactatgactgaaacctcaggccaacctcttcattccaccacagaggtgcaggagtctctgtcctgggaaaagcttccacacactaaaggccatacagaagggcaactactgatgtcaggcatgtccctgaaagcaagcttgattgtgggagaaacaaaagacatggggcccctgaagcaggtataaggccccacagagggggtgaagcaggtggttatgcactattttgcctggagctcagccagtgcatgtgcccaccaaggcaggagagtaagaatttagggaagttagttcaatcactgtggaagacagtgtggaaattcctcaaggatctagaacaagaaataccatttgacccagcaatcccattactgggtatatacccaaaggaatataaatcattctattataaagatacatgcacacatctgtttactgcagcactattcacaatagcaaagacatggaaccaaca

SEQ ID NO: 289886 - DNA, 594 bp, Homo sapiens
ggctaggatgtcaaaaatagggctaatcttacagctacagagagtaggcagttgcctatataatgagacgcacccaagtaatacaataaaataaaaacttaaaacatccccacctgttcactatgactgaaacctcaggccaacctcttcattccaccacagaggtgcaggagtctctgtcctgggaaaagcttccacacactaaaggccatacmgaagggcaactactgatgtcaggcatgtccctgaaagcaagcttgattgtgggagaaacaaaagacatggggcccctgaagcaggtataaggccccacagagggggtgaagcaggtggttatgcactattttgcctggagctcagccagtgcatgtgcccaccaaggcaggagagtaagaatttagggaagttagttcaatcactgtggaagacagtgtggaaattcctcaaggatctagaacaagaaataccatttgacccagcaatcccattactgggtatatacccaaaggaatataaatcattctattataaagatacatgcacacatctgtttactgcagcactattcacaatagcaaagacatggaaccaaca

SEQ ID NO: 289887 - DNA, 594 bp, Homo sapiens
ggctaggatgtcaaaaatagggctaatcttacagctacagagagtaggcagttgcctatataatgagacgcacccaagtaatacaataaaataaaaacttaaaacatccccacctgttcactatgactgaaacctcaggccaacctcttcattccaccacagaggtgcaggagtctctgtcctgggaaaagcttccacacactaaaggccatacagaagggcaactactgatgtcaggcatgtccctgaaagcaagcttgattgtgggagaaacaaaagacatggggcccctgaagcaggtataaggccccacagagggggtgaagcaggtggttatgcactattttgcctggagctcagccagtgcrtgtgcccaccaaggcaggagagtaagaatttagggaagttagttcaatcactgtggaagacagtgtggaaattcctcaaggatctagaacaagaaataccatttgacccagcaatcccattactgggtatatacccaaaggaatataaatcattctattataaagatacatgcacacatctgtttactgcagcactattcacaatagcaaagacatggaaccaaca

SEQ ID NO: 289888 - DNA, 568 bp, Homo sapiens
gacacttcagctcagtctaatagctttcttcgccaagggtgtctaaatgttcttaagctcgacaactttactatcaccactgccatttatttggattgagttggaaattcattttggcaacaatgtctgatattagtctgagaggcacagaagaaaacttaattttactatgcaccaagtcttacttgccatgaattcaaggtgcttacactgttgatcctaaattattggactacttttattttcaatttgtccaaaattactgaaagaacaaaaagcaaaatcctatttcccacattttgattattctctacctasaaagaggataaaagatgcattcagggtttccaaaatagtattgggggactttatcttgctataggactagtccacacagaagatgttttagcccctaaacatctgcctaacaaagtatcatagactgggtgacttaacagaaatgtatggtctcacagttctggaggctggaagtccaaaatcaaggtgccagcagggttggtcccttctgagggctctgaaggatctgctccaggcctctcttggcttg

SEQ ID NO: 289889 - DNA, 577 bp, Homo sapiens
cattacacattgtgtgcttgtgtcaaaagatcacatgttccccataaatatatatgcctattatatatccataataataaaaaaattataaataaaataatttttttaaaacaaaactaagacaaacttttcaaaaataaaaaataaaaagacccatgttctgggatgggactctgaccacaccaacaagcctccttctctggtgcatctcaggaaagggtgaaattagttcacataaacaccactcagcctgaccaggtcagaagatgtgtttcctgaaagtctaaaccttcattaaagtatccaggactatattataactttcttgggctccttcctacacaaaaaagtaaagaaataaaactatattttacaactcattggtgtaaagatgaatatattaatgctatatatcaaaacattttatttgacctaaaagttcattttttttcttcttattttaaaagaaattaaaacaggctgtgtgcggtggctcmtgcctgtaatcccagcacttcggaaggttgaggtgggcagatcatttaaggtcagcagttcgagaccagcctggccaaca

SEQ ID NO: 289890 - DNA, 608 bp, Homo sapiens
actttctctgggaaagtccaagaaagttacctaatacttaggtttctttaatgtgtatattccgctttagtagaaaagtctatgaagtccatgtacactgtaaactatgttttatcatctttatatcctgaatcagaaggcactgctgtatcctttcttttcttttcttgtttctctgcttttgcatgtcacagtcttaatcacttgctcctttattaaacaaacaaatgaacccaattaaccaaacagttccctaattatcaaaatgatgtaaacttattaatgtaacaatgaaacaatcatccatagtgtcatttcccaggaataaccactgctactactttaatttttttctttccaaatggaaygaatgtgtaatttttggttttgtttttaaacatcagcattgtagggggtctatgatctgacgtttgctcccgactggttcagtgtcattacatccgaagtgggtcttacttttcttggggctttttaatcctaaaacctacttagagaagtggagtgcaattattattaattcatctcctttcttatgcttaggaagataaacctgcaccaataataaaagtcaaaatgttccttagcca

SEQ ID NO: 289891 - DNA, 445 bp, Homo sapiens
aattggcctctattacttcagagtttatctcctgcccgttgctgccagatgaatcttcctaaaacattaattatgttgtatcatttcttgctcaacarcccacaatgacttctcattgcctagggaaagaaacttccaaattctttagcttggggattgaggtacttgacagtcttgtttctttcaatttctataatcgattttacccaaagtaactgggctctttggatggctttgctctcacctagaacccacctagaggactttcactgttatcttcaaccttgcctcccttattttctgttccaaatcaaacacataatacagcttcatctccaatgctgatgtatgggttacactgcctatcagaaaataaaatattttaattcattcttaaacatctcagttatttccccaaagtttctctccttttagttgatgccac

SEQ ID NO: 289892 - DNA, 536 bp, Homo sapiens
ggttaaataacttgttcagggcaacaaagtcgaagatttgggggtttaaactcaggtctctgtagcttaaagcttactcccattttcactgcactacactgccccctagtatgaaggaatcttggaattttgttgttgttgttttgtttgtttgcttgtttgtttgtttttgagacagttttgctctgtcacccaggctggagtccagtagcatgatcatgactcactgcagccttgacctcctgggctcaagcaatcctcccacctcagccctccaagtagctgggaccacaggtgtgtgccaccacacctggctactttttttggagagatgggggtctcactgtgttgcccatgctggtctcaagctcctgggctcaagtgatcctcccacctgggcctcccaaaatgctggaattacagacaygagccacctcatctggcaaaatcttggattttagtagagagtttcttaaaacccagtacttcccataaatcaatttctaatggaatttcagggatcagcaaaggtaaac

SEQ ID NO: 289893 - DNA, 417 bp, Homo sapiens
actttaaccatttaaaggaaaaaataatgatgacatattttacttctacctagcataagtagaagtaaaataaatggtaacaagaacacatagaattaaagggtgttaattggtagtttactgttctaagaagacaatagagagaatgaaagcaaagcaatatttgaggaaattattgccaagaaccttccagaaccaaagaaagacaagaactctcagattgagtgagtgccaccaccacaayccctaagtgtccaagtatccaaaaggatattcttttaaactcaacctacagacagagtgaagtttcagaacctcaagaacacagagaaaatactaaaagttacctatgaaaagacatattactgatagaagaacaaattcagactaacatctgatttctcagtagcagtgcta

SEQ ID NO: 289894 - DNA, 493 bp, Homo sapiens
ttgaaggaaaaactaaagaatctggcatggaaagagaaccagagtagatttaaaaatcaggtagcagcacctatgaataatctttttagggctctgcaacaatcattttccttttttgcaataactttgctgaaaagtcaaattcctggagagagagtctcatgggactagattgattcagctgtctctggcccttcaactgcctggggcttggctttcaggcaccttgattgacagatccaccaaatcagctcctaatagaggagggggcgttcctgcaatggtttatccacaaaaaaaaaaaaaaaaaaaaaaaggggaaaaatggcatcaggatgctttctctatctggaatacccttctccactgcagaccctactcagcctttcaaatccagcttggacatcaccatgtccaggaattgttccctgagccaaacacatamcctcaccagttgcttagttaggcatcccacagcctccttgtttccttc

SEQ ID NO: 289895 - DNA, 548 bp, Homo sapiens
caatgtgggaaaatgcaaggtccacattgataagatgagggaacgtctattgtaaagatccatggccacttgcattgtggagcaacagtctccaraaaactcagagatgggtgaggccacccctgaccatctggcatgtggcaaggagcctgtaagggtggagccagaagttagggtgggagtggcataggatgaaggacacctgctactgccctaccagcctggggttctgtagaccggaggcagcaccaccgtggaaacactgataggtccacaaaagccagactcaagtccaggatgggcagtgaatgcagaaccctgaataatcctgtgtccaacatgagtgaatcaccccaaatcagtatgtcattgccactctggcacaacattatgagatcctgcaaaataaacaccacacttgtccataggggtgacctgtttaccaggccactctcctggaacagggcctaatcacaggcctggataaccacagagaggttccttggggtatgtggtcaaccccacaatggggcagagggttggagagt

SEQ ID NO: 289896 - DNA, 548 bp, Homo sapiens
caatgtgggaaaatgcaaggtccacattgataagatgagggaacgtctattgtaaagatccatggccacttgcattgtggagcaacagtctccagaaaactcagagatgggtgaggccacccctgaccatctggcatgtggcaaggagcctgtaagggtggagccagaagttagggtgggagtggcataggatgaaggacacctgctactgccctaccagcctggggttctgtagaccggaggcagcaccaccgtggaaacactgataggtccacaaaagccagactcaagtccaggatgggcagtgaatgcagaaccctgaataatcctgtgtccaacatgagtgaatcaccccaaatcagtatgtcattgccactctggcacaacattatgagatcctgcaaaataaacaccacayttgtccataggggtgacctgtttaccaggccactctcctggaacagggcctaatcacaggcctggataaccacagagaggttccttggggtatgtggtcaaccccacaatggggcagagggttggagagt

SEQ ID NO: 289897 - DNA, 568 bp, Homo sapiens
cactttctcagatgcgaagctttccaaatgcttattgctggaatggagcccacatgggccctgagaagctctgaggctgagctcaattcagaggtggtaaagtagttaacccaaggtggttggtgatggaggcctaactgctgtgaagccatcattgatgaatccattctgttctgcagaagagagagccatgtcttccaaaccagttcccaatgcactatagcctccctttacagatccttgtctcccaaccccaccaccccaaaatactttttttttcaaagaagttatggtgctgacaatcccccagggaccagtggyccactcacttcttatgtcggggaaatccactcgacagcaaagggctctgtgctggctgggaatccccactgcagcagcaatctttgtggggctgagctgcaaacgcttttcagatttagcacgcagcctcatgaggaggaatagttgcagttgcctctgctgagaaacaaagctgatgacactgaaacatctgggaaatgggaatattatttctagaagatgaaaacaaatgtccaagctggaagtg

SEQ ID NO: 289898 - DNA, 582 bp, Homo sapiens
tgaccacgtagaaaggaacttggtataattaggagagaagatgaagacctgcggggttaagactgcgtagtgagcttccaggttcctggagggagatgcaggtgcagaggccagtagggattgtgttatgtaggccttataggcygtgggagggggtaatagggagttgtaggctgtggtagggagttggattttattctaaatgcagtgagaagtctttggagagctttgggcagaggagtgatttgatctgttttacatttttaagaggttggtggtggggcgagtgtaacagcagggaaacctgaatgaggggcagtaatccagaagaaagacaagagaactagtgtaaggataagaatctgtttgaaggtacagctgacagggcttgctgatgagctattgcttcagcaatctatttcaaagtgtattttctccatgttttttctttcacaggttgacagctttgtggtgataggtaagactgatacagcttaaatcccacctcctacccacatctattaaatttaggaatgagggaagcacacagaaccatgagtaaagctgagatttttttttctc

SEQ ID NO: 289899 - DNA, 615 bp, Homo sapiens
gctttttttggtatccatactgccctggtggcttctattgaatttgtggtcaagtaagaattatttgctgttgtttatttttaaatttgttttaatgtgaaccattataagccagcttcctccatcctatatacacatatacatatatgagtgtgtatatgtatctatacatatatgtgtttacatatgtgtatgtgtatatatatgcgtatatatacaatttataatggtggtggttgaattctacgtcaatttttcaaattttcttttagtattataacatagatttgataaacatacttgccatctctaccccaaagtcataatacagatgtttcaatgagagccttgytgcacacagaaggtggcctctacccacaagtttgctatgactgttaaaccacccaactattctaaatcctcctggctgttactagcacctggtggcattttcccatcttgtctgcaaggatatcacccaatgctgaatgaaatgctttgctagaatgctgatacactgactctatggtgtttccctatttaatcacttattaaagatgactttgctgtgactttgtggattctgttggtctctttctgaacccacttctttct

SEQ ID NO: 289900 - DNA, 570 bp, Homo sapiens
ccaaaactatttaattttttatgtataatttcaagtttaaggaacttcagaaakgtttatcatgtcagggtatatcagtccatttgcattgttaagaaggaatacctaagactgggtaatttataaagaaaagaggtttattttggctcaagtttctgcaggccatattggaaatgtggtgccagcatttgcttctggtgagggcctcaggaagcttacagtcatggcagctggtatgggggacaaggcatatcacatggcaaaaaaaaaaaaaaaaaaacaagagaaagcggggaggtgccacactctttaaacaaccagctcttgtcaactgccagaatgagaacttaccatggagatgacatcaagccattcatgaaggagctgcacccatggtccaaatatctcttatgaggtctcacctttgatattgggaattacatttcaatatgaggttcagagaggacacacatccaaattatattatgtgcaccattgccttttattattttttaatttagcaaattcagattcatacttttttttgatgctcataatttgatggtcata

SEQ ID NO: 289901 - DNA, 576 bp, Homo sapiens
gggttgttctctggtgggcaggggcgggggtcacaaggtgctcagtsggggagcttctgagccaggagaaggaaattcacagggttaatcactcagctaaggtggggcaggaacaaatcacaatggtggaatgtcatcagttaaggcggggcagggcgttttcacttcttttgtgattcttcagttacttcaggccatctgggcatatacatgcaagtcacaggggatgcgatggcttggcttgggttcagaggcctgacatgtatgtgtgtgtgtgtatgtgtgctttaaaatataaggctttattaagggtttaaactgtcaatttgagacaggattgaaattttaccatgaaggtcttaggatggcttgtgcaagcccacagagcaaataaaaaccacatacatcataaaaatcatctgaatgggacgccagaaaagtcacagttcagagtgttagtgatttgtaactcctgggtgcagagtagtgtacctaagggccctaatccctgtcctttgcaggtgttcaagtcagggagttcaggttccttgcaatcagatttttgcctcagtggtt

SEQ ID NO: 289902 - DNA, 520 bp, Homo sapiens
ttttttagatggagcttttaggattttctgtatgtaagattatgtcatctgcaaacagggcaatttaaattcttcctttccaatttggtcaccttttgtttctttttcttgtctaattgctctaggcaggtccttcagcattgtgctgaatagaaatggtgagagtgggaacccttgttttgttcttgatcttagaggaaaagctttcagcttttcttcattgagtatgatattagcccagggcttgtcaaaaatggcatttaktattttgtggcccattccctctgtacctaatttattgagagttttttttaatcataaaataatgttgaagtttgtcaaataatttttttctgcatttattgagatgatcatatgttttttgtctttcattctgtcaattggtttaccacatttatttgtgatgctgaaccatccttccataccacttaatcatggtgtatgatcatttaagtatgctgctgaatttgctttgataatattttgttgagagtctttc

SEQ ID NO: 289903 - DNA, 520 bp, Homo sapiens
ttttttagatggagcttttaggattttctgtatgtaagattatgtcatctgcaaacagggcaatttaaattcttcctttccaatttggtcaccttttgtttctttttcttgtctaattgctctaggcaggtccttcagcattgtgctgaatagaaatggtgagagtgggaacccttgttttgttcttgatcttagaggaaaagctttcagcttttcttcattgagtatgatattagcccagggcttgtcaaaaatggcatttattattttgtggcccattccctctgtacctaatttattgagagttttttttaatcataaaataatgttgaagtttgtcaaataatttttttctgcatttattgagatgatcatatgttttttgtctttcattctgtcaattggtttaccacatttatttgtgatgmtgaaccatccttccataccacttaatcatggtgtatgatcatttaagtatgctgctgaatttgctttgataatattttgttgagagtctttc

SEQ ID NO: 289904 - DNA, 565 bp, Homo sapiens
tccttaaaaaattaaaaatagaactactgtatgayttagaaatcccgcttctgtgtttatatttaaaataaattaaatcagtatctggaagatatatctacaccctcatgtttattacagccctatctacaatagttaatatatggaaacaaccatagtgttaatcattgaatgtatggataaagaaaatgtggtatataccatgggatattattcagccataaaaaggaagaaaattctgctatttgtgacaatatagatgaacctgcaagacactgtgttaagtgaaattagccaggcacagaaaggcaaattttgaatgatttcacttatacttggaatctgtgaaagtctgacttgtagaaagagagagtggcatggtagttgtctgggcctggcaagtggggaaaaaggggagaagtttattaaaggtacaagcttttcattataagataattaagttttagggatctcttgtacaacatgagtactgatggatgcattaatttgattgggacaatcaatgcataatgtatatgtgtatgaaatcatcatgttgtacaac

SEQ ID NO: 289905 - DNA, 565 bp, Homo sapiens
tccttaaaaaattaaaaatagaactactgtatgatttagaaatcccgcttctgtgtttatatttaaaataaattaaatcagtatctggaagatatatctacaccctcatgtttattacagccctatctacaatagytaatatatggaaacaaccatagtgttaatcattgaatgtatggataaagaaaatgtggtatataccatgggatattattcagccataaaaaggaagaaaattctgctatttgtgacaatatagatgaacctgcaagacactgtgttaagtgaaattagccaggcacagaaaggcaaattttgaatgatttcacttatacttggaatctgtgaaagtctgacttgtagaaagagagagtggcatggtagttgtctgggcctggcaagtggggaaaaaggggagaagtttattaaaggtacaagcttttcattataagataattaagttttagggatctcttgtacaacatgagtactgatggatgcattaatttgattgggacaatcaatgcataatgtatatgtgtatgaaatcatcatgttgtacaac

SEQ ID NO: 289906 - DNA, 565 bp, Homo sapiens
tccttaaaaaattaaaaatagaactactgtatgatttagaaatcccgcttctgtgtttatatttaaaataaattaaatcagtatctggaagatatatctacaccctcatgtttattacagccctatctacaatagttaatatatggaaacaaccatagtgttaatcattgaatgtatggataaagaaaatgtggtatataccatgggatattattcagccataaaaaggaagaaaattctgctatttgtgacaatatagatgaacctgcaagacactgtgttaagtgaaattagccaggcacagaaaggcaaattttgaatgatttcacttatacttggaatctgtgaaagtctgacttgtagaaagagagagtggcatggtagttgtctgggcctggcaagtggggaaaaaggggagaagtttattaaaggtacaagcttttcattataagataattaagttttagggatctcttgyacaacatgagtactgatggatgcattaatttgattgggacaatcaatgcataatgtatatgtgtatgaaatcatcatgttgtacaac

SEQ ID NO: 289907 - DNA, 565 bp, Homo sapiens
tccttaaaaaattaaaaatagaactactgtatgatttagaaatcccgcttctgtgtttatatttaaaataaattaaatcagtatctggaagatatatctacaccctcatgtttattacagccctatctacaatagttaatatatggaaacaaccatagtgttaatcattgaatgtatggataaagaaaatgtggtatataccatgggatattattcagccataaaaaggaagaaaattctgctatttgtgacaatatagatgaacctgcaagacactgtgttaagtgaaattagccaggcacagaaaggcaaattttgaatgatttcacttatacttggaatctgtgaaagtctgacttgtagaaagagagagtggcatggtagttgtctgggcctggcaagtggggaaaaaggggagaagtttattaaaggtacaagcttttcattataagataattaagttttagggatctcttgtayaacatgagtactgatggatgcattaatttgattgggacaatcaatgcataatgtatatgtgtatgaaatcatcatgttgtacaac

SEQ ID NO: 289908 - DNA, 577 bp, Homo sapiens
tggtagttgtctgggcctggcaagtggggaaaaaggggagaagtttattaaaggtacaagcttttcattataagataattaagttttagggatctcttgtacaacatgagtactgatggatgcattaatttgattgggacaatcartgcataatgtatatgtgtatgaaatcatcatgttgtacaacttcaatatacacaatctttatttgccaattagatattttaagataaataaataagacatggagaaagaaaaaaagcaagagaaaaatgaaatgttaaagaattggaaaggaagaaatgaaattgtcacaatttgcagatgactgatgctgtttgtagaataccctaaagaatctatggacatattttcagaacatatgagtgaagaagcaagtcatccagattcaagatgaacatacacacatcaattgtgtttctatataccagaagagataggataaaattaaaaattcatataaaatcaatatagcatctgaaatggagtattatgaataatttaattacttctacacagaaaacttatcagtcattattggggagaatagaaaacc

SEQ ID NO: 289909 - DNA, 516 bp, Homo sapiens
gtgtagtaagtgttttaaaaagtgagtaaccttgtacaataagtgttttaaaaggtgatccaccttaagcggcaatacttgttttaaaaggtgagcaactttaaaaggtgcttagctttggtcatcagtaaaatacaaatttaaacaacaatgtaattttttacacacctgataagatggctaacatagaaaattacagcaatacaaaggtaattgaagatgtggagccattggaatttcatatggtgttagtggaagtgtaaattattgcaaccamttttgaaaactggcaatacctactaaagctgaacatgcatatttcctacaactctatgacctatgcatctaaaacctagtataagactatttcatagcatcactgttggtaatagtccacattaaaaacacctcaattcccatcaaccatagataaaagtatggcatacacatacaatggagtactatatagcattaaactaacataaaaatttcaaatctcacacagaaaaggaagtt

SEQ ID NO: 289910 - DNA, 578 bp, Homo sapiens
actaatgagaacaaagataaaacataccagaatctctgggacacagctaagacagtggtaagagggaaatttgtagcactaaatgcccacacctgaaagttagaaagatctcaatttaacaacctaacatcacaaataaaagaactagagaaccaacagcaaaccaatcccaaagttagcaggagaaaagaaataaccaaaatcagagctgaactgaaggagattaagatgtgaaaaaccattcaaaagatcaataaattcaggagttggtgtttgaataagataataaaataggccactagctagactaataaaaaagaaaagagttaaaatccaaataaacacaattagaaatgacaaagggtatattatcactgaccacacagaaatataactgtcagagactactattttccaaaaatgtaaaatgtatagcatttgtmtaacagctcaaaagtgtaaggcaagttaaattctgtttcagctgtttaaaattgcatattaagttgctttactgtgattccaagcaccttgacatgagaaatggtactatgactttcgtatatttctacacactt

SEQ ID NO: 289911 - DNA, 578 bp, Homo sapiens
actaatgagaacaaagataaaacataccagaatctctgggacacagctaagacagtggtaagagggaaatttgtagcactaaatgcccacacctgaaagttagaaagatctcaatttaacaacctaacatcacaaataaaagaactagagaaccaacagcaaaccaatcccaaagttagcaggagaaaagaaataaccaaaatcagagctgaactgaaggagattaagatgtgaaaaaccattcaaaagatcaataaattcaggagttggtgtttgaataagataataaaataggccactagctagactaataaaaaagaaaagagttaaaatccaaataaacacaattagaaatgacaaagggtatattatcactgaccacacagaaatataactgtcagagactactattttccaaaaatgtaaaatgtatagcatttgtataacagctcaaaagtgtaaggcaagttaaattctgtttcagctgtttaaaattgcatattaagttgctttactgygattccaagcaccttgacatgagaaatggtactatgactttcgtatatttctacacactt

SEQ ID NO: 289912 - DNA, 1073 bp, Homo sapiens
ctccccagtttccagcctggtagagggcaaaaatatcaagtaaatgagtaagtaagtaaacagataacagatggcaataaatgtatgaagaagattaaaaggtgatatgatayagataaggacatatagctaagaggagctcttgttttaactgagatctgaatgatagtaattaactagccataacaagataagaagaagccccttttcaggcagaaaacacagctagtgtaaaaagccaaagacgaaaatcagtttatcctgttccagggaaacgagaagttgaatgtgcttgaaatgagtgggtaatgtgaagcataaggcaagataagttaaggaggcaggcagaattaaatgatttaagactttataagctagggaaagaattcatatcttaagcgtaatggaaaactactagagtttttaaaaatgtcttttatgtaaacagtgaattgttcacggtaaaagtaaaggctgagagttcagctagggtgtccctgtagcgattctgatgagagataacattaggtaaacatwctccccagtttccagcctggtagagggcaaaaatatcaagtaaatgagtaagtaagtaaacagataacagatggcaataaatgtatgaagaagattaaaaggtgatatgatatagataaggacatatagctaagaggagctcttgttttaactgagatcwgaatgatagtaattaactagccataacaagataagaagaagccccttttcaggcagaaaacacagctagtgtaaaaagccaaagacgaaaatcagtttatcctgttccagggaaacgagaagttgaatgtgcttgaaatgagtgggtaatgtgaagcataaggcaagataagttaaggaggcaggcagaattaaatgatttaagactttataagctagggaaagaattcatatcttaagcgtaatggaaaactactagagtttttaaaaatgtcttttatgtaaacagtgaattgttcacggtaaaagtaaaggctgagagttcagctagggtgtccctgtagcgattctgatgagagataacattaggtaaacat

SEQ ID NO: 289913 - DNA, 536 bp, Homo sapiens
ctccccagtttccagcctggtagagggcaaaaatatcaagtaaatgagtaagtaagtaaacagataacagatggcaataaatgtatgaagaagattaaaaggtgatatgatatagataaggacatatagctaagaggagctcttgttttaactgagatctgaatgatagtaattaactagccayaacaagataagaagaagccccttttcaggcagaaaacacagctagtgtaaaaagccaaagacgaaaatcagtttatcctgttccagggaaacgagaagttgaatgtgcttgaaatgagtgggtaatgtgaagcataaggcaagataagttaaggaggcaggcagaattaaatgatttaagactttataagctagggaaagaattcatatcttaagcgtaatggaaaactactagagtttttaaaaatgtcttttatgtaaacagtgaattgttcacggtaaaagtaaaggctgagagttcagctagggtgtccctgtagcgattctgatgagagataacattaggtaaacat

SEQ ID NO: 289914 - DNA, 490 bp, Homo sapiens
ggcctttcgggccctgtaaagttaaaaatgtcaaggcagcacttgaaagtttaggtcttaccctacgtcggggaaattaaggtccctttggccatgttacatttgagatgactgtaaagactgcatcgaagtggagacatcatgttgtatatgtaagtctgaaactgtgagacatcagaattggaggtaaagatttaggcgataaggacatttaacatcatgggactgagtagaagaatgtgtagatagagaagagaaaaggttgagctttagatgcgtttcaacattgagagttggagcagaggaaagggagcatcaaggagacttggaagagtagctattgaggtaggaagaaaaccaggaaggcgaagtgttatgagcygagagaagcattccaagaaggaagtgattatttctgacaaatgctgctgagttgtcatagaaggtaagtaatcatcagacctgcaacgtgataaccttgacaagagag

SEQ ID NO: 289915 - DNA, 490 bp, Homo sapiens
ggcctttcgggccctgtaaagttaaaaatgtcaaggcagcacttgaaagtttaggtcttaccctacgtcggggaaattaaggtccctttggccatgttacatttgagatgactgtaaagactgcatcgaagtggagacatcatgttgtatatgtaagtctgaaactgtgagacatcagaattggaggtaaagatttaggcgataaggacatttaacatcatgggactgagtagaagaatgtgtagatagagaagagaaaaggttgagctttagatgcgtttcaacattgagagttggagcagaggaaagggagcatcaaggagacttggaagagtagctattgaggtaggaagaaaaccaggaaggcgaagtgttatgagctgagagaagcattccaagaaggaagtgattatttctgacaaatgctgctgagttgtcatagaaggtaagtaatcatcagacctrcaacgtgataaccttgacaagagag

SEQ ID NO: 289916 - DNA, 513 bp, Homo sapiens
atgattcaggaaacacactgcacaccaagtttgatctgacgtgttacagttaggaaaggctttgatcatttgtaatcagattagtgtmcagtcaaatgactttgatggctggctgagagaatctgagaagaatgcgaggaagacatgagaatgtctttatttgtgtgaatctaaattgatattataaaaggtaactggctctgccttgcagaagaaatttttcagttggcattgtcaaatctcaagatagttttattggtgcctgatgatataccattagctttcttaacttcgaaagttatttagcagttagtggaaaaaaaattgtgtattacttaggcttccttgttcctgcatactctgttctctgtgcttgccttttttctcctcttcagataatttgtatttattctttaggattcagctcaagcatctctttgtgaaaattattccctgtttatctcttctttcctaccaattctttgacataggcagaggtcctctccccaacct

SEQ ID NO: 289917 - DNA, 513 bp, Homo sapiens
atgattcaggaaacacactgcacaccaagtttgatctgacgtgttacagttaggaaaggctttgatcatttgtaatcagattagtgtccagtcaaatgactttgatggctggctgagagaatctgagaagaatgcgaggaagacatgagaatgtcttyatttgtgtgaatctaaattgatattataaaaggtaactggctctgccttgcagaagaaatttttcagttggcattgtcaaatctcaagatagttttattggtgcctgatgatataccattagctttcttaacttcgaaagttatttagcagttagtggaaaaaaaattgtgtattacttaggcttccttgttcctgcatactctgttctctgtgcttgccttttttctcctcttcagataatttgtatttattctttaggattcagctcaagcatctctttgtgaaaattattccctgtttatctcttctttcctaccaattctttgacataggcagaggtcctctccccaacct

SEQ ID NO: 289918 - DNA, 621 bp, Homo sapiens
tctcagtctggtcatgaaaaaaaaaaaaatcagaccaacttaaagtgaggaacattatrcaaaatacctggtcaatactcttcaaaagtgtcaaggtcataataaagaaggaaagctgataaactgtcagactggaggaaaccaagaagacataactggtgccaccttggattagctcctagaacaaacaaaagacatgaatgaaaaccagtgaaattataaatgaagtctgtagttcagttaatagtattgtatctatattaatttcttgattttgataaacgtaccatggtaacataaaatgttaacattaacaaaaactggctgaagggtatatgagaacactctatgctatctttctaagtcttctatacatataaaattattcaaaataaaaagtttaaaaaatgattggacttatttaattggtaataataaatggcaaggtagtaacaataagtgtaaaaaatactgattaataaatatgcatagaatatgaaaattaattcttttcattttcaaatagaaagtgacgggccaaaatccaggtaaataaattgatttatctgacttacttatataaattagaattgaaattctctgcacatttttattaagact

SEQ ID NO: 289919 - DNA, 621 bp, Homo sapiens
tctcagtctggtcatgaaaaaaaaaaaaatcagaccaacttaaagtgaggaacattatacaaaatacctggtcaatactcttcaaaagtgtcaaggtcataataaagaaggaaagctgataaactgtcagactggaggaaaccaagaagacataactggtgccaccttggattagctcctagaacaaacaaaagacatgaatgaaaaccagtgaaattataaatgaagtctgtagttcagttaatagtattgtatctatattaatttcttgattttgataaaygtaccatggtaacataaaatgttaacattaacaaaaactggctgaagggtatatgagaacactctatgctatctttctaagtcttctatacatataaaattattcaaaataaaaagtttaaaaaatgattggacttatttaattggtaataataaatggcaaggtagtaacaataagtgtaaaaaatactgattaataaatatgcatagaatatgaaaattaattcttttcattttcaaatagaaagtgacgggccaaaatccaggtaaataaattgatttatctgacttacttatataaattagaattgaaattctctgcacatttttattaagact

SEQ ID NO: 289920 - DNA, 362 bp, Homo sapiens
tattgtatctatattaatttcttgattttgataaacgtaccatggtaacataaaatgttaacattaacaaaaactggctgaagggtatatgagaacactctatgctatctttctaagtcttctatacatataaaattattcaaaataaaaagtttaaaaaatgattggacttatttaattggtaataataaatggcaaggtagtaacaataagtgtaaaaaatactgattaataaatatgcatagaatatgaaaattaattcttttcattttcaaatagaaagtgacrggccaaaatccaggtaaataaattgatttatctgacttacttatataaattagaattgaaattctctgcacatt

SEQ ID NO: 289921 - DNA, 653 bp, Homo sapiens
ataatacatatatataactgccccacactctaacaaccaccattctactttctgtgtstctctctctctacatgtatatatcaggaaaaaagaaaacacaaatagacaatatagttttaaaataataccatttgtttccatttcggttacaacagaataagatcatattagatgactgtatcacagaaaataagaattcaaaaagcaactccctgaaagaactagagagtgaacaaaagcaaacagattctggtgacaatttaggcttaaagagaggaggaggagagctgtacaatatactttccccgttttcataacttttatccttttttatttttttaagtgcacactggtgtcaaaagcaatgctagaaaaaaatccagcctctttagatggggaaaccatagtttcagaagagaatggaagaattaagaaaagaaaatttagaatggggtgacacaaattctatcagttacatccttgctgacttctgagccatgggtgtcctgaataaactcaaaacgactaagtcaaagacaaagtgtctaacattagactggagatgccatccccaaaaaaaagtttgtaatacaacctcagtcaagataattacttgctaaaaccaacaaaacactgcccactgtacaaaaata

SEQ ID NO: 289922 - DNA, 407 bp, Homo sapiens
agcaacttcttaagagaaagaaaatcagctaaatccaaacataagatgaagtcagtactaaaactaacaggcaaggatttttaaatggctattgtaattaycctcaggaaatgcaatatggtttcatgaatggaaaatgggaaatttcagcagactagagccaataaaaaagaacaaatgtaaactctagaacagaaaaaggtagttctaaaaaatgctagatctgacattaaaaatttctgtggctgtggtttgaacagcctacagagcgcacaataaaaaagtaggtaaacttgaagacagctcaatagaaattatccaacactaaaatacagactaaagaatcttgaaagaaggaaacagagcctcggggatctgttagatatcaaatggcctaacatacaggt

SEQ ID NO: 289923 - DNA, 407 bp, Homo sapiens
agcaacttcttaagagaaagaaaatcagctaaatccaaacataagatgaagtcagtactaaaactaacaggcaaggatttttaaatggctattgtaattaccctcaggaaatgcaatatggtttcatgaatggaaaatgggaaatttcagcagactagagccaataaaaaagaacaaatgtaaactctagaacagaaaaaggtagttctaaaaaatgctagatctgacattaaaaatttctgtggctgtggtttgaacagcctacagagcgcacaataaaaaagtaggtaaacttgaagacagctcaatagaaattatcyaacactaaaatacagactaaagaatcttgaaagaaggaaacagagcctcggggatctgttagatatcaaatggcctaacatacaggt

SEQ ID NO: 289924 - DNA, 622 bp, Homo sapiens
aacatacaggtaatggcaatgtcagaaggaggatgaggaagaatgagacagaaaaaatattttaagaaataacgaccaaatgactattgaataatcatattaccatataaattttggacatgtagtrcatataacaactataatatacataatcagttaggaaacgatctatacatttgtaagattcctgtattttacatggatctgtacaagtttaacactgactgggctacaaatgttaacaatgtttattataatccctagagcaaactttttttaaaaataattaattaaaatgaagaagtacaacctaaaataaccaaaacaattttaaaaaatttaacatgcttaaataatccaaaaaagtcaagagtgtagaaccaacagaaaaaaaaatcagaagaggaaagtagaaaaaacaattatgaagacatagacaaaatccagtcatatatataattacattaaatactatagactaatcaaacgaaaactaataactaaaaaagagtaaaattgttggaatgaatttttttaaaacacaattacatgctgtaaaaaaaaagtattctttaaagacacagatatgctaaaagtaaatggatggaaaagaatacgacat

SEQ ID NO: 289925 - DNA, 622 bp, Homo sapiens
aacatacaggtaatggcaatgtcagaaggaggatgaggaagaatgagacagaaaaaatattttaagaaataacgaccaaatgactattgaataatcatattaccatataaattttggacatgtagtacatataacaactataatatacataatcagttaggaaacgatctatacatttgtaagattcctgtattttacatggatctgtacaagtttaacactgactgggctacaaatgttaacaatgtttattataatccctagagcaaactttttttaaaaataattaattaaaatgaagaagtacaacctaaaataaccaaaacaattttaaaaaatttaacatgcttaaataatccaaaaaagtcaagagtgtagaaccaacagaaaaaaaaatcagaagaggaaagtagaaaaaacaattatgaagacatagacaaaatccagtcatatatataattacattaaatactatagactaatcaaaygaaaactaataactaaaaaagagtaaaattgttggaatgaatttttttaaaacacaattacatgctgtaaaaaaaaagtattctttaaagacacagatatgctaaaagtaaatggatggaaaagaatacgacat

SEQ ID NO: 289926 - DNA, 527 bp, Homo sapiens
aaaggaactccatcaggctaacagcagaactttcagcagaaactctacaagccagaagagattgggggcctatattcagcatccttaaagaaaagaaattccaagtaagaatttcatatccagccaaagtaagcttcataagtggaggagaaataaaatgcttttcatccaagcaaatactaagggaatttattactaccagatcttccttataaaaggtctataagggaatactaaacatggaaacaaaaggctgttacctgccatgaaaaaaacctatttaagtacatagtctactgacactataaagcaactagaccatcaagtctacctagaaaccaattaacaatatgatgacagtatgaaatttgcacatatccrtattaaccttgaaggtaaaggggctaaatgccccacttaaaaggcacagagtgaaaatctgaataaagaaacaggagtgatgtatgctgtcttcaagagacccatttcacacgtgatggcacccataggctgaaagtaaaggcaca

SEQ ID NO: 289927 - DNA, 565 bp, Homo sapiens
ttgggatagtcacctaaaagaactagattccaccctccataccccaaacagtgcagcttaaaccttctcatcactgtgcttgatttcctgaaagtctgctccctttctggaaactgatgctgaagaaaaattgaataacctaataaagaccttgtttgttgacaatggtgaagtacagcaagaaccaactaagcagggaattactttagtcttccctgaaaaagaaaatcacaatgttgctggttcaattctattgtggtcaacgacaacaccacaatgaagttgcaaagtcraaatgcaggtgatattcaagtgcagaagaaagaaaacatgaagttaaagggccaaataaaaggatgaaagagaagagatttaaaaatgataatgacacataaacttgaaaatgatgccacagaacaagaatgctacacaaatctcacttgtagatgtttaccaggcacactgaaagagtccacaatgaccaaccggagacaaagccacaaatataaatataaggaatctgcatatattattgacctcactgcctgacatggtttggctgtgt

SEQ ID NO: 289928 - DNA, 582 bp, Homo sapiens
ctaatgtcatttactccttatgccatttacttgtactttctgaccttcagttttctcatctataaaaaagttttgaaaatatacatgaaaaactgcattttaaatgctaarctcatatctggatcaatgtactgtgtgcattattaaccattattatttccaaaatgcattttctctgaaattgaatgcaagaaaaaaaatataatagttttcactacaaagctgtggtttccaaccgcaattgagtgttccacattgttgaacaatactttttctttttctcatttgtctctctttatcatttttctttgtagctacccaaatttgtaccaatcttctcgaattttctttttgcaaacacctaccctacttttgcacaaatccttcatggagaaaacttgatacaaagtatctgattggtaaaatttattcagactcttgaaacttctcctaggttcatctgtgcacttccttgtaaaatccagttttagcaaataccttgctaactatgtttagcaagaatcccctacccccaatatctgctcatccttggtatccactggggttactcatcctccacca

SEQ ID NO: 289929 - DNA, 617 bp, Homo sapiens
tcccattcatctataaacttatctatttttgcacttatccaggcatccattcatccatctttctgtgagttcaagaaatatttactaaacatcctgctatgtgccagatattgggaatataataaagaacaaaacagagagttcctttactcctcaatcttacagtctagcatgacaaacagtcattgaataatttattgcagcttttccaagtattacaaagaagacaacaactttccacaggaatgtaaaacattcttaattctgaataataattgtcagctgaatcaagaaggagatgaagggcatatgagccaagagaatgacatgtacaaagtccttagggatggaaagagcaatcaaagactaaaatccgatatacctggatcacaaagaataaagaaggaargaacaacaaatgttgctgggaccgccaatgattcaccaaagttcttttcctcatcttccatagttgctggaaatatggctgcccaaatgcattacatttcccagccttccttgcaatgaagtgtgctttgtaactaagttctttccattgtagtgagaatagaaatatgttccacttccttgcttcactcataaaaaatatccatgca

SEQ ID NO: 289930 - DNA, 559 bp, Homo sapiens
tttatccagtatctggatacagtcatgtcttgcttatcaatgaggacgtattctggaaatgcattgttaggtgattctaccattgggtgaatatcaagtgtacttacacaaacctagatagtataccctactacacacctagactatacggtataacttattgctcctaggctagtcctgaatactattggcaaaattgtagcacagagtagtatctgtgtaacaaaacatatctaaacacagaaaagrttcagtaaaaatacagtactataatctcataaatctgctgtggtaaacatggtctgttattggctgaaacatccttatgtgacatgtaactgaaattttcatttcagtaaaacaccacacatcccagtacttccctgattttggaaaggaacatgaagagtgctagatgcagcacccatggagattcactgaagagatgagaaaatttgaatggctgggaaaggagggcactgtcttgtgaggaagtaggcagcattgttgaaaaaataagcctcttaaaaatgttccttcattcatttatttcattttt

SEQ ID NO: 289931 - DNA, 647 bp, Homo sapiens
gtgaactacttgaagcaaagggctgtgtctgattcatctcattatttccagctttgaccacagggtcatcgttgttcatttgtcccaatatttgtgggattccactgggaacaaagtgaattgggacaagtgaataatgatgacatacagttgtttttctgacacttctgcccccaggaaaacaaggcaaaaggcctgtgactctgtcttcaggcagtgggacatgttcttaaacgacggagccacatccatgcctctaccttccagtaaggtttgcctgcttaagcatacttgttgaaaatcaattgcacatgaaccctcacatgtacacgtgtgcacacacagatgcatgcacacacatacacacatgcacacaccagccagacactgcctctttccttctccgactcccaccctgcctccaagaggaatatttatgatttttaataaactgtgaccacagctaattaggctcctcacccatgcccccaaggccactaaggggctgtgacggttggcatttcctatctccaagtgcamcgaggccgcacatgccacactgatgaactcacggtgtagcagactccatccctgccgtctgggagaatgctcgtctttcaaaccagattaaaagaaaacaagagctg

SEQ ID NO: 289932 - DNA, 624 bp, Homo sapiens
tttcattttttgttgcagtgtagtattcctctatatgaatggaccacaatttgtttctccatctactgtttgtttgtttgtttgtttgtttgttttgagacaaggtctcactctgtcagccaggctagaatgcagtggtgtgatcttggctgactgcmacttctgctttccaggctcaagccatcctcctacctcagcctcctgagtagctgggactacaggggcatgccaccacacctcgttagttttgtttttttttgtgtagagatggggtctcaccatgttgcccaggctggtcttgaactcctgagctcaaaagattcacccacaatggcctcacaaagtactgggattacagctgtgagccactgcacctggcattctatctactgttgatagatgcttggattgttcgaagttcttgtctattacgagtaaagaactttcttgcacatgcctccttggagaacacaagccctcatttctattgggtatagatttggagaagaacttgctgggtcatgtggtgttttagctttggtaggttctgccagattgcattctcgtgaggccaagatcctgttcctctatttcttactctttggggggctacataagcacatg

SEQ ID NO: 289933 - DNA, 491 bp, Homo sapiens
aggaagggatattatcccctagtaatcagagagcagagacagacgagttgtccgatttgcagaataagcactttcaggggttacttgactcttaggatacatcactgcagatcccactgcaagtgctagttagaatcttggaatccgaaccagatgcaagcaccttttcatctgggaattaaaaacaaaatcaaaaccctagcascacattttacaaaatgtagttgaattcattgcaaaaattattgttaatgggttatttgtaagaataactatggatactgattggctctgctttttctgtaccgttcttttgaagattcgtgttatgtcagatgtgaatacatacaccagtggtttgaactactgggtgactcaaatccgtggagggaaacaacacctggtctcctggagcagctgggtgaccttgaatcacattgtacgctggatgtgagcctcttcacttatacacgatttggactaaatcatcc

SEQ ID NO: 289934 - DNA, 600 bp, Homo sapiens
gctcagcctcctcactctgagatgcctgcacccccatgagaccttgcagagtccccaccaacaggaaggctctcaccagatgccgccccttctggagacttcccagcttccagaactgtaagaagtaagttcctgcacccccatgggaccttgcagagagtccccaccagcaggaaggccctcaccagatgctgccccttctggagacctcccagtctccagaactataagaaataaattcctttccattgtaaattaccctgtctcaggtgttctgttatagcaacagaaaacagaccaagacrtcaacttaataaacaaatttcattttacctgatcgtttaaaagtttagagaatcccttttcgtggtgtttctcgctattcctttttgtacttttaaccaatttttgcttcttacaaaaatggtaaagcatgttatttgggtatgttatttggggcataaatatttgtgatgggtgctttgtcattttttctccctgggtacgcacattattatttttttatcctgaatttctagaagtgcaataggactgtcatattatctgttgagtctggagccatgtgtgatgttaccacat

SEQ ID NO: 289935 - DNA, 629 bp, Homo sapiens
accgcagcagccagttcaagtgacacattcgcatccctttcttctctttggggaaaaggaaaggcatcagcagtttcaagtcatttaatacagatttccatcattgttatcctaagcagaatcactgttatcgctgtaataacatttgcccggcatccccgcaagctgggtgccgtgcatctggtgrccacattgtctgcaccagaagcctgcagagtcgccggctttgacaaggagggggtgctctgtggggcgagtgggtgcggtcagggaagaccggcggcttctgtcccgagggatggattccattaggcggcgtttctcagggtgtctccgaggctggttgcatcacaatcgtgaatacctgctaattacatcagaacgaaaagagacttgcattttttaaggcaaattttgcagattcttcttatccacgtggaagcctgagtgtccttgctttgagccaacacagtatctgctgcactaacatggaaaatcagaatgaggaaggcaaccaggacaaggtgctcacggggctgcccggaggctttttttgttttgttttgtttttttcctttttctgctcttctatggggaacagaacaaaaagtaggtcatgaagaagcagg

SEQ ID NO: 289936 - DNA, 540 bp, Homo sapiens
atgaagttctttgaaggcagaaacatggtttttgctgtgctcagataacagagcacaaactataaacatagatgtgttcagrtgtttcctctaccccctagggccactacagaatattctggaatggccaacctcttctctgcctccttcctcttcctcaaggaatgtcttttcagctaataaggaagcagatgtatggcataacaaaggaatgagggggctggagatagagaaaggtgacccagagtggagtttcggaagcaattgtagccctcatgcagtacccaggtgtgaaggcagaatggatgcggaaaggtcttctgttggggatggtgtgcccagatccttttgtggttttggagaaatgtaaggaaaggatatgagaaattctaaaatttcttttgattttttttttttttattcagggagcacatgggcaggtttattgcatgagtatattgtgtgatgatgaggtttagagtacagatggtcctgtcacccagataagtgagcatagcacccagtagttagtttttcagc

SEQ ID NO: 289937 - DNA, 572 bp, Homo sapiens
caaattgtccctgtttgttgacgatatgatcatttaccttgaaaaccctaaggactcctccagaaagctcctggaactgataaaagaattcagcaaagtttccagatacaagattaatgtacacatatcaggagctcctctatacacaaacagcgaccaagcagagaatcaaatcaagagctcagctccttttacaatagctgcaaaaaaaaaaaaaaaaaaaaaagacagcaaacaaacaaaaaaaamcaaaaaaaacttaggaatatacctaacaaaggagttgaaagacgtctatgaggaaaattacaaaacactacagaaagaacacacatcccatgctcatggatgggtagaatcaatattgtgaaaatggacatattgccaagagacatctacaaattcaatgaaatccccatcaaaatgccaccatcattcttcacagagttacaaaaaacaattctaaaattcatatggaaccaaaaaagagcccgcatagctgaagcaagactaagcaaaaagaacaaatctggaggcatcacactacctgatttcaaactatactataaggc

SEQ ID NO: 289938 - DNA, 533 bp, Homo sapiens
aaagtgctacaattcaaagggactattaaacgaaagttctggtcaattgagctggctgtttggctagggarattataaaaatgaagagcacaagtttatgcgtagtttaataaaataaagttaaccaaaaaaaaaaaataataggtttaaccttggtaggtgtagaatcttgctctcacttcagcagagtataccactgagaagaacaataactaggcacagggaaataacacaagcatgtagttatgacagactgatgttaactctgcctttggtaatgccatgtagtcttgtcaagagccgtagtcatgtctagtctcatttaacttatacaatttaaattgtacaaaatatttttcttttatttatgtaattatagatgctgtaaaatcacattttagacatgaacattttatgtcataaaatacagtatatattttaggttcatacatacattttattattcaagtccttatactcaaattattaaaattataattttaggaggactgaaggggatttttgaaggtaac

SEQ ID NO: 289939 - DNA, 548 bp, Homo sapiens
catcatctttcaacatctcaactttattttcctgtttccatttgcatagccgtagatagtcacaatttattttttgttacagttttatggtccttgtacttataatgaatttctattttccataagatcctgcttgttgggtaactacagaatatgcataatagatagaagaataaagttttattaatcaaaatgctcagatccattgaagggaaatttcaacctctcatatttatttatttgaaaactgctctctttctaaagggtttgaggctgacagtttaaagtcctgattttattttaaaaagagtcacttaattaaamtttatcagaagctaagctaatacatttttaaatgttgagcataattgttttcccataattctaaaaatataaaaacaattttttaaaattaagagctttttctactttaaaagctaattagattatatatttggcttaatatcttattattgaaaaatttaattataaaaacctgttaattgctttatagttgtatgaaatataaaaatatgctaatttacatt

SEQ ID NO: 289940 - DNA, 594 bp, Homo sapiens
gcatgatcatggcttactgcagcattgacttctcaggttcaagagatcttctcacctcagcctcctgagaagttggaactaagggtacccaccaccacaccaggctttaaaaaaatttttagtagaggtaaggtctccatatattggctaggctgttcttaaattgctgggctcaagcaatcctcccaccttggcttcctraagtgctgggattatagatggaagccatcacactcagctaaatttccattttattaagggcaacagtcacagtagtatagtgcacacccaggtgacctcatcttaattaactacatctgcaaaacccaacttccaaataacggtcacattctgttgtactggagattagtacttcaacatataagttttgaggggacacagttcaacccataacagacccctgcactctcaaagaatgtaatctagatcagcactcttcagtagaaataagccacatacataattttaagtatccctagccccattaaaaaattaaaagaaacaagaaaagataatttaataatatattttatttagccaattatctccaaaatattattgtaatgtgtaatc

SEQ ID NO: 289941 - DNA, 594 bp, Homo sapiens
gcatgatcatggcttactgcagcattgacttctcaggttcaagagatcttctcacctcagcctcctgagaagttggaactaagggtacccaccaccacaccaggctttaaaaaaatttttagtagaggtaaggtctccatatattggctaggctgttcttaaattgctgggctcaagcaatcctcccaccttggcttcctaaagtgctgggattatagatgsaagccatcacactcagctaaatttccattttattaagggcaacagtcacagtagtatagtgcacacccaggtgacctcatcttaattaactacatctgcaaaacccaacttccaaataacggtcacattctgttgtactggagattagtacttcaacatataagttttgaggggacacagttcaacccataacagacccctgcactctcaaagaatgtaatctagatcagcactcttcagtagaaataagccacatacataattttaagtatccctagccccattaaaaaattaaaagaaacaagaaaagataatttaataatatattttatttagccaattatctccaaaatattattgtaatgtgtaatc

SEQ ID NO: 289942 - DNA, 582 bp, Homo sapiens
ttttgtgaatgtaaattttagaatctcctggattackttacaagggaagaaagcaaaacaaaaatgtaattaggttctatcagttgaacctatgacactattttctgataatgtccctgcaaacacatcctaaaacctataatgattttgctgagtggaaaactaaattttctttatgtattaaatgcagtggagtattttattaacatctcctcatggaatgatatttcactgtaacctgttacatcctatactttttatagaaatttacttgaaaatgtatgtttttaaaggagaaggtaggtgatcaggtgaatctaagcaccattagaatacttgaaaatgtcaagcaggatattggatttatcatatgaaaaaggatggtgctttaggcatttatttatacatttgaaattgtggcctcagaaacctagaaaatttaggcacatatgaattatgtccatcaaaataggctattacaatgtcattcttgtatctctaccaacacagtttcttggctagcctttagggtaattctacatacaaaacaatctgtcatggaaaaactcattcagtttactg

SEQ ID NO: 289943 - DNA, 532 bp, Homo sapiens
  misc_feature (1)...(532): n = A,T,C or G
acattttattcttgtcttatagtttttttcttttagcactttgaatacattatcccattctatactggtctggaaaatttcatctgaaaattttgctaatagtctaatgaagatttccttatatgtgatgaaatatttctcttgcagcttttagaattctttttgtctttgactttcaacagtttgattataacatgcctcagggaaggtttttttttttttttttttttttgggnggaatttcaccggggacttttgagctttttgtatctgaatgtccatatctttccctaaacttggagagtttttagctattattttgttaaacagattttctgkgcctttctttatttcttcttcctctatactcctataatgtaaacatttgttcacataatggcatcccataattcccatagactttcttctcttctatttctctgaatgggttatttcaaaagactgtcttcaagttctgaaattcatctggtctgctataaaagttctcaattatatttttattttattgaat

SEQ ID NO: 289944 - DNA, 580 bp, Homo sapiens
tcttgctaaaattagaaatctttgttgttgctcataaatgatgagtccagggatggtaaaatgtgctaaactgagagcccaggagtcagaacacacttcccataggacatgtacctcaaaagcagcagctacctgccaggcctagcttccctggtgcccctgctattgtttccctagtaaccaggcagagtgtggaatatccctgaaagtcctgcacagttactacggaaactccagggctttcctaattagatccaasttgagctgtagctggtggggatgggcagacttgcttcctatgggaaaaccctccttgaaaggcaaaccagagcaccctttatccattcacattttgcctcttaccctggtgaatttatgcacacttgatttgcctcattctgtggatgaacagcactgggccttggggcattgaaacagtcttcaaaacccttggtgtaaaacagagtctcatagatggaggctgtgtagcttcccagatgttctgggacaggcttggtttcaaatagtctgtcccttgtctccatgggcatagatatatttgacagtttattgtgaggcc

SEQ ID NO: 289945 - DNA, 1203 bp, Homo sapiens
cccagaaataaagtcacacacttacaaccaccttatctttgacaaagttgacaataaaaaataatgaaggaagcactccctattcaataaacggtgctgggaaaatggctagacatctgcagaagattgaaactggactgcttcttttcaccatatacaaaaattaactcaaaatggattaaagacttgaaacaataaaaactctagaagaaaacctaggaaatacyattccagacattggccttggcaaagaatttatgactgagtcctcaaaagcaatgcaacaaaaacaaaaattggtaagtaggacctaattaaactcacgagcttctgcacagcaaaacaacaacaacaacaaaaacaaacaaacaaacaaaaaactatcaacagagtaaactgacaacctacagaatgggagaaaatatttacaaactatgcatctgacacaggtctgatatccagaatccataaggaacttaaatcagcaagcagaaagcaaataaacttattataaaatgagcaaaggacatgaacagacacttctcaaaataagacatacgtgtggccaacaaatatatgaaatatactcagaatcacaaatwcccagaaataaagtcacacacttacaaccaccttatctttgacaaagttgacaataaaaaataatgaaggaagcactccctattcaataaacggtgctgggaaaatggctagacatctgcagaagattgaaactggactgcttcttttcaccatatacaaaaattaactcaaaatggattaaagacttgaaacaataaaaactctagaagaaaacctaggaaataccattccagacattggccttggcaaagaatttatgactgagtcctcaaaagcaatgcaacaaaaacaaaaattggtaagtaggacctaattaaactcacgagcttctgcacagcaaaacaacaacaacaacaaaaacaaacaaacaaacaaaaaactatcaacagagtaaactgacaacctacagaatgggagaaaatatttacaaactatgcatctgacacaggtctgatatccagaatccataaggaacttaaatcagcaagcagaaagcaaataaacttattataaaatgagcwaaggacatgaacagacacttctcaaaataagacatacgtgtggccaacaaatatatgaaatatactcagaatcacaaat

SEQ ID NO: 289946 - DNA, 561 bp, Homo sapiens
tttacatttctttccctcaataatctcggttcttagatccttgatgatagtgattccactaaatcttatttctctaaatactcatccttgttgtttgggtctaattaagtttccaggttgcttaggaaactgaacctaggcagcagctgccagggctttacaatgargtcccactccaattcagcttctttgtcagaggttaaatggacaatatattttatttcagaagaaatatttttaaggtagtatatttatttgaaatgtaaaaatatattttgaaatgtaatggtccaagaaatccttttttctgatggttgctgaagaaaaagagggctgtgttactgttagaactacatattccaggcggtaacaagccattgtatcagatgcaggcagtgttggggacctggctgggagtgagatgggaactgaatttgcaggagtgccagcatctctagacagcaaatgaaaaccacctgccagagcaatgatgcccaggagccttcctcaggccaggcaggcagagtcaattgttcttggaaaatgaaggaaagaaagact

SEQ ID NO: 289947 - DNA, 540 bp, Homo sapiens
acattgtaaactacattccagatggtaaatgtcagaaatgggaactttaaaactctactgtttcgcctaattccacttttctggagtccttagacaaacattcaaaaatgaatgtcaggcttacataattatggccacctataaggttcaagaaatggatattctgtttctattagtcaggcaaaggagacaatagtgagtatgtacaccgcctgttgtggacttatttattccattttctgtgggccataagttctgacttgaatgggcagcattgaaaaaggaatccagaatacctatgaaggtatcctaatagatatacctgcccccagtaggtacctataaaagtctgaattcatttttctggatttctgtttccaatagatacctataaagaaatacaaagtttaaaaaaacaaaaacttttttattgtggctggcaagatggccgaatasgaacaactctggtctgcagctcttagcgagatcaacgtagaaggcaggtgatttctgcatttccaactgaggtacctggctcat

SEQ ID NO: 289948 - DNA, 1132 bp, Homo sapiens
tattcttaagtaatctcagtaatgtctcagagcagggcatttggacctttgaatgagttgaacccatggagttattgaattctggaaatactgtagaggtcttctctacataaacattcaatttagtttaacaaatatttgccttatctcttctaatattaggcattagggaaacaggatgattaacacatgatctgtgctgctgccatagttggtatttttctgtcatgtaaaagggtaagaagtccagggctactatgacagtttgagattttggagacrtagattcttttacctttttttttttgtattgagatttctttgttgttgttgttgttgttgttgttgttgttgttgcccaggttggaatgcaatggcatgatttcggctcactgtccatttcattacggtgaatgatcttttcaatgtgctgttgaattcagcttggaaatattttgttgaggatatttgcatctatgttcatcatagatattggcttgtaattttcttgtcttatagtgattttgtctggctgtgatatcagggtaattaatgcttgccttttaaaatgaatwaattttcattacgaccttcaattttactcctgctattctgcaaatggaacaattgagaaggaggattttcctactcatgctccttcctctgttttctctaaaaagcaaaactggaaaaaggcagaatgaacttgtctctatccctacttcctagtacgtaactgcagaaaagtctttgaacttctgtgaatctccagtcctttaactgcaaaatgggaataataatacaaatatcccagagttttcattaatactaaataatattttacagaaactgcttcataactttcaaggaacaacataaagttttattattattacattctagggcagagtcttttaaactagggacaaggtgtgtgctctaatgctctatcacccctgagatacattgtttagaaaacatttttggcattgttcattttctgaataatgagtccataggaatgtgttcaaaagaaagtgaaagaaaaaaataaaaatawaaacaaccaaaactagcttaagcatgtaactcccctccctggcaaaaaaaaaaaaaaaaagatgataaagac

SEQ ID NO: 289949 - DNA, 586 bp, Homo sapiens
aattccctaatatctaagtgtaaattattcaaatcataatcttacaacagttttgcccagctcattaagtgagtcaaattcaaatggcattagttttgcctttcctactccacgttttgtaaggaaatgttaaattggccctatggaaagcatrcatggccagacataggtttttggggaagacatttttcctcaaagcttgaaattttatactaaacaccttaaagaatttctgattgtgttgtatgcacaaagattcagtctgttcaaaatatatcagtagaactcaaagcttcttcaactgctgccctggagaataaaatgtcatattttcctagtacttaattttaaagaatatcttttgctatttgaatgttcaagttctataacttttccacatctgactcaatatttccagtagatcaggttaggaaaggagtcataacccttactagaaggttttctaatatggccttaatatttacatatttattaagaattctatgtatatatttgcatgtctagtttctgcagctaatatatcatcacttgagaactgagggcatattttattcatgtctgttct

SEQ ID NO: 289950 - DNA, 586 bp, Homo sapiens
aattccctaatatctaagtgtaaattattcaaatcataatcttacaacagttttgcccagctcattaagtgagtcaaattcaaatggcattagttttgcctttcctactccacgttttgtaaggaaatgttaaattggccctatggaaagcatacatggccagacataggtttttggggaagacatttttcctcaaagcttraaattttatactaaacaccttaaagaatttctgattgtgttgtatgcacaaagattcagtctgttcaaaatatatcagtagaactcaaagcttcttcaactgctgccctggagaataaaatgtcatattttcctagtacttaattttaaagaatatcttttgctatttgaatgttcaagttctataacttttccacatctgactcaatatttccagtagatcaggttaggaaaggagtcataacccttactagaaggttttctaatatggccttaatatttacatatttattaagaattctatgtatatatttgcatgtctagtttctgcagctaatatatcatcacttgagaactgagggcatattttattcatgtctgttct

SEQ ID NO: 289951 - DNA, 1156 bp, Homo sapiens
aattccctaatatctaagtgtaaattattcaaatcataatcttacaacagttttgcccagctcattaagtgagtcaaattcaaatggcattagttttgcctttcctactccacgttttgtaaggaaatgttaaattggccctatggaaagcatacatggccagacataggtttttggggaagacatttttcctcaaagcttgaaattttatactaaacaccttaaagaatttctgattgtgttgtatgcacaaagattcagtctgttcaaaatatatcagtagaactcaaagcttcttcaactgctgccctggagaataaaatgtcatattttcctagtacttaattttaaagaatatcttttgctatttgaatgttcaagttctataacttttccacatctgactcaatatttccagtagatcaggttaggaaaggagtcataacccttactagaaggttttctaatatggccttaatatttacatatttattaagaattctatgtatatatttgcatgtctastttctgcagctaatatatcatcacttgagaactgagggcatattttattcatgtctgttctwaaataaaagtattttgagagaaataaaattagaaccataaaataccaaaatttaagggatatagcaaatgcaatcctacgagagagtttatttatatttacaaatgcctcttttggaaaaaaaaaaaacaaaaatacctcaaataaacaacctaacattacatatcaagaaaccagtaaaagaagaacaaactaaggccaaagttagcagaaggaagaaaataataaagataacaggagaaatcaatgaawtagagaaaagaaaacagtaacaaagatttttaaagtaggagtgttttttaaaaaaaggtaaacaaaattgacaacatttagctagactaaaaaagagggaagactcaaataaatagaaacagaaataaaaggtaaatattatcctaatgccacagaaatataaaagatatgaggactactatgaacaattatatgccaacaaattggacaacctagaagaaagaatacatataacctactaagaataaacagtgaggaaataaataggatatctgaacatacctataaggggaacaagattgcatcagtaataaaaaa

SEQ ID NO: 289952 - DNA, 565 bp, Homo sapiens
gccacagaaatataaaagatatgaggactactatgaacaattatatgccaacaaattggacaacctagaagaaagaatacatataacctactaagaataaacagtgaggaaataaataggatatctgaacatacctataaggggaacaagattgcatcagtaataaaaaaaacctcctttcaaaaaaaaaaaaaaaaaaagcccagaaccagatgacttcatggatcaattctaccaagcattaaagaaaaaataacatcaatccttctcaaattattcaaaaaaaattaaagaggagaaaatagttccaaactcrttttacagcaccaacattaccatctaacaagaaacacctatttgctgcctttagaagacacacttcaaaatctatcatctatctatctgtatctcctatggttatatttctctggagaatcataaataatacatattttggtactgagagtgggatatttgcttatatcaattcctggactgagggagataacaaaccaaccatttataaaaatcaaggagttaggtgcctgtgtatatgatgctttga

SEQ ID NO: 289953 - DNA, 626 bp, Homo sapiens
ttatatccagaattcacaataaattcaaaaaatttatcaacagaaaacaaacaatcccattaaaaactgggtaaaggacatgaacagacatttctcaaaagaagaaatacaaatagttaacaaacacattttaaaaagctcactatcattaatcattagagaaatgcaaattaaaaccaaaataagataccatcttacaccagtcagaatggtttttattaaaaagtaaaaaaacaacagattttggcaaggttgtrgagaaaagggagtgctcatacactattggtaggaatgtaaattagttcacctgtatggaaaacagtatggagatatcacaaagaaataaaaatataactactatttgacccagcaatcccactgagtatctatctacccaaaggaaaataaatcattttaccaaaaagacacttgtatttgtacgtttattgcagcactatttacaatagcaaagtcatggaaccaacctaagtgtgaaccaacagttgattggataaaggaaatatggtacacatacactatggaatactacgtggctatcaaaaagaatgaaattatgtcctttgcagcaatatgggtggagctggaggccattctcctaagtaaac

SEQ ID NO: 289954 - DNA, 590 bp, Homo sapiens
gattaatgtaaacgtggatgactgaaggaggaaccagtttaaagggcatcattaagagtgctggttagggcatgttaagtttgagatgaatattagacacagagcctctatytgtatttcttattttccattcatttccctatgatcataatctaagaaaagtcagtatataagaaaagtcagtagattggtcatgaatggcctccatattgtcaaacgttcatcaatcatttttcaggctttttcagactggatctttctgcaatatctggtagtattggcagcttgctcattccaaaacatcctatttatttgttgttagtgacgacattgccttatagttttccacccactcttctcatctgtccttttcaacctcttttatatccttctctgtggcctcccctttaaaagtggctccttaaaagtctaagtttagccctctgttcttctgcatatattctagtgatgacctcctcaatttatctggtttaattacaactatgtttatcattaccaaacatgtatttttgctagacagctactcaaatttcaaaattatacattttatttcctcttgaatgtgtcac

SEQ ID NO: 289955 - DNA, 590 bp, Homo sapiens
gattaatgtaaacgtggatgactgaaggaggaaccagtttaaagggcatcattaagagtgctggttagggcatgttaagtttgagatgaatattagacacagagcctctatctgtatttcttattttccattcatttccctatgatcataatctaagaaaagtcagtatataagaaaagtcagtagattggtcatgaatggcctccatattgtcaaacgttcatcaakcatttttcaggctttttcagactggatctttctgcaatatctggtagtattggcagcttgctcattccaaaacatcctatttatttgttgttagtgacgacattgccttatagttttccacccactcttctcatctgtccttttcaacctcttttatatccttctctgtggcctcccctttaaaagtggctccttaaaagtctaagtttagccctctgttcttctgcatatattctagtgatgacctcctcaatttatctggtttaattacaactatgtttatcattaccaaacatgtatttttgctagacagctactcaaatttcaaaattatacattttatttcctcttgaatgtgtcac

SEQ ID NO: 289956 - DNA, 527 bp, Homo sapiens
ttacattttattttgtatgcatgagaagtatttatttaccaataaaatgtatttattaagagcctactctgtgccaagcacaggcctaagtgcacaggatatagttgtggacaaaacagttcctgtttgtggagctcagtggggtatttactgatggactaagtaaggagtgtgagagaaagagtgttgtaaactaatctaaatcaatatggtcatgtgcaatatttaggttattccyggtagctaattataactgctaaagaagtctgaagttgtgagggagagctatttcctcacgacttcataataaaatgtctgattataataagcaaaatctcagacccaatttcatgacacacagagttatttactggccacatatttttttggcaacaggcacaaaatattttatagactcacctacacatacttaatgaagtcaagctctcatatgctgtaagaaaaatgaactctaggcagaccaggcaacttttccaaggcaggagccaggattctatgtgctatag

SEQ ID NO: 289957 - DNA, 527 bp, Homo sapiens
ttacattttattttgtatgcatgagaagtatttatttaccaataaaatgtatttattaagagcctactctgtgccaagcacaggcctaagtgcacaggatatagttgtggacaaaacagttcctgtttgtggagctcagtggggtatttactgatggactaagtaaggagtgtgagagaaagagtgttgtaaactaatctaaatcaatatggtcatgtgcaatatttaggttattcccggtagctaattataactgctaaagaagtctgaagttgtgagggagagctatttcctcacgacttcataataaaatgtctgattataataagcaaaatctcagacccaatttcatgacacacagagttatttactggccacakatttttttggcaacaggcacaaaatattttatagactcacctacacatacttaatgaagtcaagctctcatatgctgtaagaaaaatgaactctaggcagaccaggcaacttttccaaggcaggagccaggattctatgtgctatag

SEQ ID NO: 289958 - DNA, 477 bp, Homo sapiens
aatccctttgtcattaatgttgcacaagttttatggtaagagcctgagcaccatatggggtgttcaccaatccaaagagtgtaactttgaataacatctctagagttttctctcttccttgtttttgataataaaaaatgtatttcttttttactgtaaggcattattttcatttcattcgggggaaacaattaatgctctggaaagtttactgtgcttcattctataatgacacaaaacttcagtgactttacactacttataataacatataaggcagtaaggactgaaggtgaatgcatctkcagtccaggaagatccagtgttcagaaattcatctttatacttttatattctctttaattttgaaaccacttggtataattcccacactcacagatggacttgtagaagtatataccaaagtcctgttcacagctcatctaactatggcttctggtatttatagttattact

SEQ ID NO: 289959 - DNA, 546 bp, Homo sapiens
ctatcctgcctgagccactgaaacattattttaggtaccataacttagatttagaaagccatcagaaaatcctttagtctatgtcttaaatacataggtgtatagaaatatatatgtagaagattacttttcttcacttcagctatcatctttgcccagctgccatctgtttctctcctggattattgcaatagcctcctaattaggctctctgctttgtctgcctacagtgtattctcaacacaaaatccaaagttatgtcattaaaatatagatcagatcatkatactcctctgtttaatgccagagtccgtacaatggcacatgtaaacccacaggaactgttcctctgcaactccccatcttatcacctactattattccctttactcactgtgctatagctagactagcctccaagaacatgccaggaattctcctgcctcagtgctagtgcatttttactcatgtaacttggaatactaatttctccttctatttatgtgctatactttctcatctcctttggttcttgactccaatgtc

SEQ ID NO: 289960 - DNA, 552 bp, Homo sapiens
ttgttgggaatgggcccccaaatctggccmtaaactggccaccaaactggccataaacaaaatctctgcagcagtacgacatgttcgtgatggccgtgaagcccatgctggaagcttgtggatttactggaatgagggcaaggaacacctggcccacccagggtggaaaaccgcttgaaggcgttcttaaatcacaaaaaataacctgagtgatctgtgccttagggacatgctcctgctgtagataactagccacagcccatccctttattttggcccatccctttgtttcctgtaaggaatgcttttagttaatctataatctatagaaacaatgtttatcactggcttgttgtcaataaatatgtgggtaaatctctgttcgaggctctcagctctgaaggctgtgagacccctgatttcccacttccacctctatatttctgtgtgtgtgtctttaattcctctagtgccgctgggttagggtctccccgaccaagctggtcttggcagcatttttatattccagcagcaaacaagctgaaaaagaaa

SEQ ID NO: 289961 - DNA, 552 bp, Homo sapiens
ttgttgggaatgggcccccaaatctggccataaactggccaccaaactggccataaacaaaatctctgcagcagtrcgacatgttcgtgatggccgtgaagcccatgctggaagcttgtggatttactggaatgagggcaaggaacacctggcccacccagggtggaaaaccgcttgaaggcgttcttaaatcacaaaaaataacctgagtgatctgtgccttagggacatgctcctgctgtagataactagccacagcccatccctttattttggcccatccctttgtttcctgtaaggaatgcttttagttaatctataatctatagaaacaatgtttatcactggcttgttgtcaataaatatgtgggtaaatctctgttcgaggctctcagctctgaaggctgtgagacccctgatttcccacttccacctctatatttctgtgtgtgtgtctttaattcctctagtgccgctgggttagggtctccccgaccaagctggtcttggcagcatttttatattccagcagcaaacaagctgaaaaagaaa

SEQ ID NO: 289962 - DNA, 552 bp, Homo sapiens
ttgttgggaatgggcccccaaatctggccataaactggccaccaaactggccataaacaaaatctctgcagcagtacgacatgttcgtgatggccgtgaagcccatgctggaagcttgtggatttactggaatgagggcaaggaacacctggcccacccagggtggaaaaccgcttgaaggcgttcttaaatcacaaaaaataacctgagtgatctgtgccttagggacatgctcctgctgtagataactagccacagcccatccctttattttggcccatccctttgtttcctgtaaggaatgcttttagttaatctataatctatagaaacaatgtttatcactggcttgttgtcaataaatatgtgggtaaatctctgttcgaggctctcagctctgaaggctgtgagacccctgatttcccacttccacctctatatttctgtgtgtgtgtctttaattcctctagtgccgctgggttagggtctccccgaccaagctggtctyggcagcatttttatattccagcagcaaacaagctgaaaaagaaa

SEQ ID NO: 289963 - DNA, 580 bp, Homo sapiens
ctttatcagtctgaggacattttcctttatgttagtgtcttactctgtttgtacaactataaaaataccacagattggataatttataaagcacacaaatctatttttcacagctctgaaggctggaaaatccaagatcaagatgctggcaggttcagtgtctggcgagggctctcttgttgggtccttacatggcagaagtggggaggacaaaaaaggacytaagctatttaactccagtattttaataaggtactaatccattcatgagggtacagccctaatgacctaatcacatccccaaaggtcccaaattttagtacctccaaatagaaattaggtttcaacatgaatattagaggctatacatttacaccatagcagttagtttgccaagagattttataatgaacaagcattgaattttattactttttttgcatctattgacataattaaattctgaatgacagggactgattttctgatattaagccagctttttactctggataaattctacttgtcatagtgtcatatcctttttatatattgctagatttgctaatattttgctaag

SEQ ID NO: 289964 - DNA, 551 bp, Homo sapiens
agcaattttttcttactgaaatgaacacttcctcttaatatagatttgccttcccggcatgcagtgcttttgtcaaaactaccattcatggacttatagaatgccttatccatcatgttatggtattgcacacaacattgcttctgtcaagaaacacaacataaaagtgcttcagtgggcccacayttatggtattaactggtttcaccatattctgcagcattctgagacaactggcttgagggaagtgtggaatggccttttgaagacaaagttacattgtcagctgggcagcaatgccttgtaggcctggggcaaggttctccagaagaccatatacgctctgaatcagtgtccaatatatggtgctgtttctcccatagccaagctttttggggccaggaatcaagggatggaaatgtgaattgtaccactcactattatgcctagtgatccactagaaaattttttattttctgttctggtgatctcatactctgctgcactagaggtcttagttccagagggaggaatatttccaccaggaataa

SEQ ID NO: 289965 - DNA, 551 bp, Homo sapiens
agcaattttttcttactgaaatgaacacttcctcttaatatagatttgccttcccggcatgcagtgcttttgtcaaaactaccattcatggacttatagaatgccttatccatcatgttatggtattgcacacaacattgcttctgtcaagaaacacaacataaaagtgcttcagtgggcccacatttatggtattaactggtttcaccatattctgcagcattctgagacaactggcttgagggaagtgtggaatggccttttgaagacaaagttacattgtcagctgggcagcaatgccttstaggcctggggcaaggttctccagaagaccatatacgctctgaatcagtgtccaatatatggtgctgtttctcccatagccaagctttttggggccaggaatcaagggatggaaatgtgaattgtaccactcactattatgcctagtgatccactagaaaattttttattttctgttctggtgatctcatactctgctgcactagaggtcttagttccagagggaggaatatttccaccaggaataa

SEQ ID NO: 289966 - DNA, 561 bp, Homo sapiens
atgtctacataaagacttgtacaccaatgtttatggcattatcattcataatagccaaaaggtggacccaatctaaatgtacatcaactggtaaatgaataaaaacatgtagtacatctatacaatggaatattattcagcaatartaaggaatgaaacacagatacaagcttgcacttttataaacctcgaacattatgttgcatgaagaaagccagtcacaaaacgccatatttcgttattttatttatatgaaaagttcagagtaggcaaatctataggaattgaaagtacattagtggttttctaaggaagaaatagagaggggtagaatggggagtaactgctattgcataggagtttatttttggggtgataaaaatattctaaacagattatggtgatggtttcacaactgtcttaatatgctaatattatttattattgcattgtatattttggatgaataaattttgtgcagtgtgaattatttctaaatggtgctttaaaaagaaaataggttgatgcatgtataagacaattttaaagaacgacaagctg

SEQ ID NO: 289967 - DNA, 636 bp, Homo sapiens
tattgattttctaataaacaaacatggtatgtctctcaagttaattacatgttctttgatatctgtcaaaaatgctttgtattttttgtgtgcagttgttttgtgygtctcttgttaaattgattgctagttttttatgtttttcaaagtcactataaatggtattattttaattttactttccaatttttgttgatatattgaattacagttaatcttgtacgttggtattatattcaataaccttgctaaactcagttaactaattatattagtttagctaagttttttttatttataactaatcaagttgtcaacaattaatgatactttcatttcttccattctaacttttacccactttattatttttttctttatgtactatctgggactgcaggacaaagttaaataaaagtagtattagtgaacatttatgttttgtattttttaaaaaatataatcatgagataaatcagtgtaaattttttttcttgtaaagtctgttaggttttggtagtaaggttatgctgacctcatttcttaaatgtgggaggttttccaacttttctattcttaggattttttaaaatatatatcatgggaaattctctattttgtagaatactctcagaa

SEQ ID NO: 289968 - DNA, 546 bp, Homo sapiens
tcatgtgaacttaatgacaatgtgtattttgcagttgttggatacaatgttttatatatatctattaggtcaaacattttaatcatattgttcaattattctctattttttgtgtgytcattctattattaatttcagctggattaaggttttcctctgccagtttgcacttgcctatctgcttttaagtctattagtttttgctatataattgagaacatacaaatttatcctctatcttcctgatagactgaaccttttatcattatgaaatatacctttcatcattatgaaatagctctgtatattgtaatgcttcctgattaaaagctattttgtctgatgttagactggcaaaatcagcttcctttgtttagagtgtgcatgatacgcactttttaaaaaacagtttacttgctctagtcctgcatcttcaaaattaaggtgtggttcttctaattaaaatatagtggctttatttcttttccaatctgaaaaattattgtttcataaatggatagtttagtccattgacattatgtgttt

SEQ ID NO: 289969 - DNA, 546 bp, Homo sapiens
tcatgtgaacttaatgacaatgtgtattttgcagttgttggatacaatgttttatatatatctattaggtcaaacattttaatcatattgttcaattattctctattttttgtgtgttcattctattattaatttcagctggattaaggttttcctctrccagtttgcacttgcctatctgcttttaagtctattagtttttgctatataattgagaacatacaaatttatcctctatcttcctgatagactgaaccttttatcattatgaaatatacctttcatcattatgaaatagctctgtatattgtaatgcttcctgattaaaagctattttgtctgatgttagactggcaaaatcagcttcctttgtttagagtgtgcatgatacgcactttttaaaaaacagtttacttgctctagtcctgcatcttcaaaattaaggtgtggttcttctaattaaaatatagtggctttatttcttttccaatctgaaaaattattgtttcataaatggatagtttagtccattgacattatgtgttt

SEQ ID NO: 289970 - DNA, 546 bp, Homo sapiens
tcatgtgaacttaatgacaatgtgtattttgcagttgttggatacaatgttttatatatatctattaggtcaaacattttaatcatattgttcaattattctctattttttgtgtgttcattctattattaatttcagctggattaaggttttcctctgccagtttgcacttgcctatctgcttttaagtctattartttttgctatataattgagaacatacaaatttatcctctatcttcctgatagactgaaccttttatcattatgaaatatacctttcatcattatgaaatagctctgtatattgtaatgcttcctgattaaaagctattttgtctgatgttagactggcaaaatcagcttcctttgtttagagtgtgcatgatacgcactttttaaaaaacagtttacttgctctagtcctgcatcttcaaaattaaggtgtggttcttctaattaaaatatagtggctttatttcttttccaatctgaaaaattattgtttcataaatggatagtttagtccattgacattatgtgttt

SEQ ID NO: 289971 - DNA, 585 bp, Homo sapiens
ttaaggttttcctctgccagtttgcacttgcctatctgcttttaagtctattagtttttgctatataattgagaacatacaaatttatcctctatcttcctgatagactgaaccttttatcattatgaaatatacctttcatcattatgaaatagctctgtatattgtaatgcttcctgattaaaagctattttgtctgatgttagactggcaaaatcagcttcctttgtttagagtgtgcatgatacgcactttttaaaaaacagtttacttgctctagtcctgcatcttcaaaattaaggtgtggttcttctaattaaaatatagtggctttatttcttttccaatctgaaaaattattgtttcataaatggatagtttagtccattgacattatgtgtttactcttttgtcatttggttgtgtgggggttttttttgtaccatttgttctttgttatttcctttacattaattattttatattatcctatttttgcctctattagttttgtcttttaactagaacagttcatccatatttagatttctatycattatcttaaaatttgtattgttgtccatt

SEQ ID NO: 289972 - DNA, 567 bp, Homo sapiens
tgattataaaactacattttaaagggcattgaaacaaaataacaattgtggatgactaaatgtctttggacagccacagttgaagacacaattgacaaggaaatttgttacctctgtggcacacaataatttaacatgacaattataattattactgtatastaagtcaaactagaattataggagttttgcataattttgaaacacactgcaataacacatttatgcaaatacagtccaagtaaagccaaattttacctttgccttagtgtactattgatgtcaaatgcaattcttaataaaaccttatagaaaaatttatctaatgttaatcagtttgaccataaggtaagattttcattaaccttttataaccctttacaattttctgttaaaaaacagtgctttaagtgctttaagaaaactgtgctttgcttttattttattaaactgaataatacgcctttaattgtagccaatatatgcctatacagaatttcttttacaagattaatctttcacaaaccttccagaacttgcttaaaccttcagttttatgctttctaa

SEQ ID NO: 289973 - DNA, 567 bp, Homo sapiens
tgattataaaactacattttaaagggcattgaaacaaaataacaattgtggatgactaaatgtctttggacagccacagttgaagacacaattgacaaggaaatttgttacctctgtggcacacaataatttaacatgacaattataattattactgtatagtaagtcaaactagaattataggagttttgcataattttgaaacacactgcaataacacatttatgcaaatacagtccaagtaaagccaaattttacctttgccttagtgtactattgatgtcaaatgcaattcttaataaaaccttatagaaaaatttatctaatgttaatcagtttgaccataaggtaagattttcattaacyttttataaccctttacaattttctgttaaaaaacagtgctttaagtgctttaagaaaactgtgctttgcttttattttattaaactgaataatacgcctttaattgtagccaatatatgcctatacagaatttcttttacaagattaatctttcacaaaccttccagaacttgcttaaaccttcagttttatgctttctaa

SEQ ID NO: 289974 - DNA, 493 bp, Homo sapiens
cttaccaaaaacatctatttaccttaaaaatgtttgaattaaacaaaagtcattttccttccattaggaagttaaggtttgtactgcatgttgctgtgcaagccctgtgaagggggarcagatgaggaggttatctatatgctgtagaagacagcccccaacaaaagattgcttggctagacttttgctagggcttatctgaataagtatgggctatttctaaacccctgaggtaggacttcctaggttaaagttattggttaaagatttaggtaactttcccaggagaaatagagctattagagagaaaatgatcagaggttgggtaaatgttacacaggcatccatcttggaaagtatatttttgccccaaagagatgtagggtatttcaacattaccagagactggtaggagaatggaatttgatcccttgagtaatataaaggagtgttaatcttttcttttggagggagggggtgccatttgccccaa

SEQ ID NO: 289975 - DNA, 493 bp, Homo sapiens
cttaccaaaaacatctatttaccttaaaaatgtttgaattaaacaaaagtcattttccttccattaggaagttaaggtttgtactgcatgttgctgtgcaagccctgtgaagggggagcagatgaggaggttatctatatgctgtagaagayagcccccaacaaaagattgcttggctagacttttgctagggcttatctgaataagtatgggctatttctaaacccctgaggtaggacttcctaggttaaagttattggttaaagatttaggtaactttcccaggagaaatagagctattagagagaaaatgatcagaggttgggtaaatgttacacaggcatccatcttggaaagtatatttttgccccaaagagatgtagggtatttcaacattaccagagactggtaggagaatggaatttgatcccttgagtaatataaaggagtgttaatcttttcttttggagggagggggtgccatttgccccaa

SEQ ID NO: 289976 - DNA, 574 bp, Homo sapiens
gaggaactgtcaaacacttataaaaccatcagctctcatgagaactactcacaatcaccagaacagcatgggggactctactcccatgatccaatcacctcctaccaggtctctccttgaaatgtggagattatggggattacaattcmagatgagatttgggtggggacacaaagcctaaccatatcaacatcttttctcccctgattcttccactggggtgggctctccacatgcacagtggcctgccagcactttggaggggctgcatgcacagtgtgtttaccgaagttgtgcacatgctcactagaggtgttcttcccttaccagtcaagtgttcctagataaaggtaatacaccatcaaactccatcattttgcctcttagtgcacatgcttgagcccatccacccaactcctgagatcttattgggaagctgttgatcatcagcttcaggtgttttctatctattgtgaggctgcctttccctgacactggctgagaccaattattattttagagagacaatttaacaaccacctgacccatcacctgatgttcgcctgacattcct

SEQ ID NO: 289977 - DNA, 574 bp, Homo sapiens
gaggaactgtcaaacacttataaaaccatcagctctcatgagaactactcacaatcaccagaacagcatgggggactctactcccatgatccaatcacctcctaccaggtctctccttgaaatgtggagattatggggattacaattcaagatgagatttgggtggggacacaaagcctaaccatatcaacatcttttctcccctgattcttccactggggtgggctctccacatgcacagtggcctgccagcactttggaggggctgcatgcacagtgtgtttaccraagttgtgcacatgctcactagaggtgttcttcccttaccagtcaagtgttcctagataaaggtaatacaccatcaaactccatcattttgcctcttagtgcacatgcttgagcccatccacccaactcctgagatcttattgggaagctgttgatcatcagcttcaggtgttttctatctattgtgaggctgcctttccctgacactggctgagaccaattattattttagagagacaatttaacaaccacctgacccatcacctgatgttcgcctgacattcct

SEQ ID NO: 289978 - DNA, 574 bp, Homo sapiens
gaggaactgtcaaacacttataaaaccatcagctctcatgagaactactcacaatcaccagaacagcatgggggactctactcccatgatccaatcacctcctaccaggtctctccttgaaatgtggagattatggggattacaattcaagatgagatttgggtggggacacaaagcctaaccatatcaacatcttttctcccctgattcttccactggggtgggctctccacatgcacagtggcctgccagcactttggaggggctgcatgcacagtgtgtttaccgaagttgtkcacatgctcactagaggtgttcttcccttaccagtcaagtgttcctagataaaggtaatacaccatcaaactccatcattttgcctcttagtgcacatgcttgagcccatccacccaactcctgagatcttattgggaagctgttgatcatcagcttcaggtgttttctatctattgtgaggctgcctttccctgacactggctgagaccaattattattttagagagacaatttaacaaccacctgacccatcacctgatgttcgcctgacattcct

SEQ ID NO: 289979 - DNA, 551 bp, Homo sapiens
acatgcttgagcccatccacccaactcctgagatcttattgggaagctgttgatcatcagcttcaggtgttttctatctattgtgaggctgcctttccctgacactggctgagaccaattattattttagagagacaatttaacaaccacctgacccatcacctgatgttcgcctgacattcctgggttggaggggggccctcttctgccctgcttatgyctgcctacctacctactctaacataaccatgtaacaattctgcctctgtttccacatttgtaaaacaaaacaaaaaaataccacctaccttgtgagagtaagggtcaaaaaactccttaaagggtcagaaaactggaagcccctgatgttttacatgaagatgcacagagaagcaacccccaccaggcatgctggtgcctttccttctccaggcacttctcattcaagccacagagggcatctctatttttagtcctgtctcctaagggatcacgatgaagttattttttatctcagcaagttggctcaatcttacagtcccatgcatggt

SEQ ID NO: 289980 - DNA, 551 bp, Homo sapiens
acatgcttgagcccatccacccaactcctgagatcttattgggaagctgttgatcatcagcttcaggtgttttctatctattgtgaggctgcctttccctgacactggctgagaccaattattattttagagagacaatttaacaaccacctgacccatcacctgatgttcgcctgacattcctgggttggaggggggccctcttctgccctgcttatgcctgcctacctacctactctaacataaccatgtaacaattctgcctctgtttccacatttgtaaaacaaaacaaaaaaataccacctaccttgtgagagtaagggtcaaaaaactccttaaagggtcagaaaactggaagcccctgatgttttacatgaagatgcacagagaagcaacccccaccaggcatgctggtgcctttccttctccaggcacttctcattcaagccacagagggcatctctatttttagtyctgtctcctaagggatcacgatgaagttattttttatctcagcaagttggctcaatcttacagtcccatgcatggt

SEQ ID NO: 289981 - DNA, 619 bp, Homo sapiens
tccctgtctttggctcatctttcactaacaagttcaggcagagtccttggacatcattcagagagaaccagagctagcatataacactgatcctagtcgtgtgtgatttcattaaagaaatgtaccacttggtctcttcatggctaactccccagcttgtataaattgcatagtcacatgccattcagagagccattctgaatgcatatttgttacaggaagaacttgggatggtaacatcccctgcaaactgggaaggagccaagagaccaaagaatgactccatcaagtccagcttgataagtaaatgagtttattgggacctacatccagggctctcctgggtggcagcaagacagctctagagatccccactgcctgctgtctttaagttgcttttaagctaattttctggctctttgccgcgtgtgtgtgtgtgtgtgataggactatttttcttggtatrttaccaggtacacttcagtatgtttgagttctcaggaatgaacacctgctccttgtctgggtaccatggccttggctcaccacctggccttcagggtccaagccatggacatatggacaaatgcccttaagcagcctggtggggacctgtcac

SEQ ID NO: 289982 - DNA, 574 bp, Homo sapiens
agactgagaggagggggtctgggactcggtgaattaggctgagtttttttttttaaatgacagtatagcttaacataattttgagatttaaaaataagacaaaaataaaacatacatgtaagagaatataatttttgaagaatattttagaacttttaaacttgcagaattttaggacatagagacttccaaagcaacctgatgatacagatcatcagccaccgagctgggatgaaatcctggatgtcccagttcccatccagggccagccccttggagcaaacaccttggcagctctatgtctgccgccatggcacgttgccctcacctggaaccctcaagatccttcttttgaagccaatggtcacatgtccccttttctgtgaatatccctctggacaaccaccttgctttgttgctcttatgactgctactctagttatttacctgcctctgtggtatccatgccaagtgcaggtayggtgacaatgtcagtgaggcagcctggggcttgtgtgtgtgttggggagctggctcagggagctctgggggtggcccacacagagacacacgg

SEQ ID NO: 289983 - DNA, 566 bp, Homo sapiens
gttatactaactctcttgttttgatcataagacaaataagagagaactggaatatcttaacatcccacaggcatcccagtatgtcaataatattttgctaaatgaatctgataagaggaaggagcaggtgtcaaagaaggtgacagataaagttcactaatatttgggagtctgccacagtgataaagttttccagagagccagtggtctcagatatrttagaatatctcctctgaagtgagagatatgttgtaacactttgtagcattgatgtcaaaaaagtacataacccttgatagactatgcattttgaaggacacatacaggatatttcagcatgcttctatattataattattggctaacctccaagattgccagtgtggaaagtggagggaataaagagaaagaaggttcaggaagtagttcaagctgtcttgttccttagggcttgtgcttcaacacatacaatagcatttcctgtgtgtaagacggataagatattctatagagacgttgacacatcactgcatagatcccctgggttctggaatgaagctgtgccc

SEQ ID NO: 289984 - DNA, 566 bp, Homo sapiens
gttatactaactctcttgttttgatcataagacaaataagagagaactggaatatcttaacatcccacaggcatcccagtatgtcaataatattttgctaaatgaatctgataagaggaaggagcaggtgtcaaagaaggtgacagataaagttcactaatatttgggagtctgccacagtgataaagttttccagagagccagtggtctcagatatattagaatatctcctctgaagtgagagatatgttgtaacactttgtagcattgatgtcaaaaaagtacataacccttgatagactatgcattttgaaggacacatacaggatatttcagcatgcttctatrttataattattggctaacctccaagattgccagtgtggaaagtggagggaataaagagaaagaaggttcaggaagtagttcaagctgtcttgttccttagggcttgtgcttcaacacatacaatagcatttcctgtgtgtaagacggataagatattctatagagacgttgacacatcactgcatagatcccctgggttctggaatgaagctgtgccc

SEQ ID NO: 289985 - DNA, 577 bp, Homo sapiens
aaactgttaaccttacagaatagaatgactcttaaatatttagaatgtcacataaggccaggcgcagtggcttatgcctgtaatcccagcacttcgggaggctgaggccagcagatcacctgagatcaagagttggaccccggcctggctaagatggtgaaaccctgtctctactaaaaatacaaaattagcaggtcatggtggtgtgtgcctgcaatcctagctactcggtaggctgaggcaggagaatcacttcaacccaggaagcagaggttgcaatgagctgagatagcaccattgcactccagcctgggcaaaaagagtgaaactgtctcaaaaaaaaaaaaaaaaaaacagcaagtcacrtaaagtcggatacagtgaaatggtgaataatccatagttatttttctatcatagccagaatacattggtctaggaacaaaatagcgaatgttaaggatgggtcctgacagttatatctaaagacccacatgcaactagtctttatttccttttccactaactatggacttagctgaattagaggttttagaacctaagggagaaacgtttt

SEQ ID NO: 289986 - DNA, 376 bp, Homo sapiens
tgtgacacaccttgttccccttcaccttctcccattattgtaagttttctgaggcctccccagaatccaagcagatgccagcatcatgcttcctgtacagcctgtggaaccatgagccaattaaacttttcttcataaattacccaatcttggttatttatttacagcaatacaagaatggactaatacagaaaatccrttcagggagtgaggccttgctataaagatacctgaaaatgtggaagcgtctttggaactgggtagggcagaggctggaagagtttggaggactcagaagacaggaagataagggaaagtttgaaacttcctagagactggttgaatgttgtgaccaaaatgctgatagtgatacgga

SEQ ID NO: 289987 - DNA, 505 bp, Homo sapiens
gacatattgggtacagtgtacactgctcaggtgacagctcctgtgaaatctcagaaatcaccaccgaaaaacttattcaggtcaccaaaaaccacctgtacccccaaaactattgaaattaaaaaaaaaattaaaaagaaaactgcttaagaagtttgctaaacataatgagaatatatggaaatcattgatgcaaaagrgaggaaaaggggtgttctgctatttcctccagttggttgtgtgtcaaacagatggaaataaggctaagctcttatctaccctaggtggcctcggatttctctctcctccgtaagcattcaatatctagagtggacaacctagagatcctgcctgagaaaagagacaccacagaaaaaaccaaccctgataacacaaatagattctcagttttactctaaaaataattgcattttttcctgaattgtcttgacattctatttatattcatagttaacacattatcatgtgcaattagttgaagaag

SEQ ID NO: 289988 - DNA, 609 bp, Homo sapiens
gacttaggaattggcctgtttgtcatgtcatgattacttttatttatagtagaccagctatgtaggttttctgaatgtatcgtatagttgtgccccataatatgatagagataactcatttgtagttcaacacaaggatctccagactgcattttccctccagcaagtcgatttgttttggctagtctcaggaaactatggtgagcagaacagcagctcacactgacatttgctaggactgaagcagtctgaaaaattacctttcaaactctttctggaggactggcaaggtgctggggcacaacctgaagtgctggggagggaaatgcaaatcagctaccttttgggctctgccaatgaggagcgtgcagtgttacgttatatttcagatgtgctttctaagcagggtttttcacatgtgtttkgagatattctggtgcggcatagagactcttttcctgagttgcaacttttctttcatgtctgtgctgagagtggtgaaatatgtactgatgcaatcagggaaacagtggtgaaacaggatatgggttttggagaaaccccagttcaaatgccgctctttgatttactggccataagaaaactgca

SEQ ID NO: 289989 - DNA, 551 bp, Homo sapiens
ttaaaaacaaaagaatagaataatctttgccatactaatactaacgaaagaaagctacagtaggcatattaattacagacaatgcagacttcaaaacaaggactattactagggataaaagagggcattacttaatgataaagaggtaaattatccaagagatataacaatccttaagatgtatgcatctaataaaaaagcatcaaaacacgtgactcaaaaaaaactgccactgcttaacggagagatagacaaatctaccattataattggagactgtataaagacataattctcataatgctataaatacataattgactcacagttccacaggctgtacaggaagcatggttggggaggccttagaaaacttacmatcatggcagaagacaaaggggaagtcagcatgtcctatatggctgcagcgggaagaagagagggtgaaaggggaagtgctacatacttgcaatcaactagatctcatgagatctctactatgagaatagcaaggggaaagtttgcccccatgattccatcgcctcccacca

SEQ ID NO: 289990 - DNA, 530 bp, Homo sapiens
gcatgtcctatatggctgcagcgggaagaagagagggtgaaaggggaagtgctacatacttgcaatcaactagatctcatgagatctctactatgagaatagcaaggggaaagtttgcccccatgattccatcgcctcccaccaggcccctccttcaacacgtggggattacgatttgagatgagatttgggtggggacacagagccaaaccttattagagacttctgtaaacatctgtcagtaattgatagaccaagcagacagaaaatcaataaggatatagatgacctgaataccactrttaatcagcctcatctaatttataggatatgccatccaaaacagcaggtttatctcatgcttgggtggaacattcaccaagatagaccatatgctgagccataaaaaacactttaacaagtttaaaagaatagaaatcatacaaagtataggcatacattggagatactgtgagtctggtttcagaccatcacaataaagtgaatactgcaataatacgagtcacaca

SEQ ID NO: 289991 - DNA, 530 bp, Homo sapiens
gcatgtcctatatggctgcagcgggaagaagagagggtgaaaggggaagtgctacatacttgcaatcaactagatctcatgagatctctactatgagaatagcaaggggaaagtttgcccccatgattccatcgcctcccaccaggcccctccttcaacacgtggggattacgatttgagatgagatttgggtggggacacagagccaaaccttattagagacttctgtaaacatctgtcagtaattgatagaccaagcagacagaaaatcaataaggatatagatgacctgaataccactattaatcagcctcatctaatttataggatatgccatccaaaacagcaggtttatctcatgcttgggtggaacattcaccaagatagaccatatgctgagccataaaaaacactttaacaagtttaaaagaatagaaatcatacaaagtataggcatacrttggagatactgtgagtctggtttcagaccatcacaataaagtgaatactgcaataatacgagtcacaca

SEQ ID NO: 289992 - DNA, 558 bp, Homo sapiens
gaaaaacaaactaagaaagtaaccattttagagtagtctacccttatccctggagtatatgttccaagacccccagtgaatgcctgaagtaccaaacccaacacatactatttttctcccatacatacatactatattagtctgttcttatgctgctaatgaagacataccattgacacatgaggattattacaattcaaggtaagatttaggtgaggacacagccaaaccgcatcattccaccccagcccctcccaaatctcaggtactcacatttcaaaaccaatcatgcyttcccaacagttctccaaagacttaacttatttcagcattaactcaaaagtccatagtccaaagtcttttctgaggcaaggcaattcccttccacctatgagcctgtaaaattgaaaccaagttaattacttgctagatacagtggggatacaggcattgaatacacccattccaaataggagaaagtggccaaaacaaaggggatacaggccctatgcaagtccaaaacccaacagggtcatcattaaacctttaagttccaaa

SEQ ID NO: 289993 - DNA, 1257 bp, Homo sapiens
agtatgtgggagactgcccccatgattcaactgtctctgtctggccctgcctttgatacrtggggattaatacaattcaaggtgggatttggggttgtggagaaatagccaaaccatatcacacacataggataaaatttaatttataaattaggcacaataagagattaacaacaataattaataataaaatggaatgattataatagtatactttaataaaagttatgtgaatatggtttctctcaaaatatcttttaaaaaatattttaatttctaaatgacatattgtacatatttatgatatagatattaattgtattacacatcataaatagtaatcagataagggcaattagcatacccatcatctcaaaaatttatcatttctttgtgtcagacattcaatatcctcctagctatttgaaactatatatcattgttaactatagtcatcctacagtaatgtagaacactagaagttattcttcttatctatctataattttgtgttctttaacaaatctccccctatttccccttccaccacccttcccagcctctagtatccaatgtcttactttttgtttctgtcagatcaactttttttttggcttctacatatgacwagtatgtgggagactgcccccatgattcaactgtctctgtctggccctgcctttgatacgtggggattaatacaattcaaggtgggatttggggttgtggagaaatagccaaaccatatcacacacataggataaaatttaatttataaattaggcacaataagagattaacaacaataattaataataaaatggaatgattataatagtatactttaataaaagttatgtgaatatggtttctctcaaaatatcttttaaaaaatattttaatttctaaatgacatattgtacatatttatgatatagatattaattgtattacacatcatawatagtaatcagataagggcaattagcatacccatcatctcaaaaatttatcatttctttgtgtcagacattcaatatcctcctagctatttgaaactatatatcattgttaactatagtcatcctacagtaatgtagaacactagaagttattcttcttatctatctataattttgtgttctttaacaaatctccccctatttccccttccaccacccttcccagcctctagtatccaatgtcttactttttgtttctgtcagatcaactttttttttggcttctacatatgac

SEQ ID NO: 289994 - DNA, 579 bp, Homo sapiens
tccagcatcaagttctttattaacatatgtggaatgaatgagtgaattaacgaagggggccatttagccacaatacttgtgaagcagactgcataatttcagtaccacaacaagctggtctgctttgttctgttcttgaggctgtaaatagcagcactgagcaagggaaagaataatacattataggtcatctagaaactacccattccttgaaaaaacacaacaaaagccactttagcatctgctggagagcttcttttttgcatgcaaacctggcatccaagtcatcccttgggtaagtgtctaaggaatgatttgtgycactaagaaacaatctccacaggttttgtttgtttgtttgtttgtttgtttgtttgtttgttttttaaagtccacttgttggaaatactgccttctctactaaaaatagatgagaaatgtttgtttgttctaaactacctaagctgttcagaacccaggggttctgctccccactccctgtggggctaatggtttctatttttaatctctgttgtgtgcagaaagaaaaacagtgttgaaagaaggtacttttcagat

SEQ ID NO: 289995 - DNA, 632 bp, Homo sapiens
tgttatcttatatacattgactctcttcccttcaagggcatttgaatgtttgtttgcttttgattattagtaatagcctcagagggacagagggatcttggcattcaagaggcagcactgagctcaagagtgcttacaaatggtggaatcaaaatctggttcygttactgatagcaatgtgaaatcaggaaagtcaccggactcatctgtacctcaattgcctcatcaataaaatgaggaataataagccctacatgcacacccggtgtcactcacctataaagaaagagctaccattgtacagggtaccattcacatcaaatgaatagaaatagctttctctggagttgtgcagtgtccaacatgcacagccatatgaggaagccctgtttggcaaaactcccagggaatgcccacagagctctgcatgcactgccctctcccaggcgtcataccaccatcacagcgatggcactgaagtgcagagatgcttctatctttaaaaacaaggaaataaaagaatcccccttgaactcacatgcctctctagcttcttgtccagttgtctttttcccttatagcaggactcctcaaaagaatctacaattcctgaatcccatcttgttgccatc

SEQ ID NO: 289996 - DNA, 632 bp, Homo sapiens
tgttatcttatatacattgactctcttcccttcaagggcatttgaatgtttgtttgcttttgattattagtaatagcctcagagggacagagggatcttggcattcaagaggcagcactgagctcaagagtgcttacaaatggtggaatcaaaatctggttctgttactgatagcaatgtgaaatcaggaaagtcaccggactcatctgtacctcaattgcctcatcaataaaatgaggaataataagccctacatgcacayccggtgtcactcacctataaagaaagagctaccattgtacagggtaccattcacatcaaatgaatagaaatagctttctctggagttgtgcagtgtccaacatgcacagccatatgaggaagccctgtttggcaaaactcccagggaatgcccacagagctctgcatgcactgccctctcccaggcgtcataccaccatcacagcgatggcactgaagtgcagagatgcttctatctttaaaaacaaggaaataaaagaatcccccttgaactcacatgcctctctagcttcttgtccagttgtctttttcccttatagcaggactcctcaaaagaatctacaattcctgaatcccatcttgttgccatc

SEQ ID NO: 289997 - DNA, 632 bp, Homo sapiens
tgttatcttatatacattgactctcttcccttcaagggcatttgaatgtttgtttgcttttgattattagtaatagcctcagagggacagagggatcttggcattcaagaggcagcactgagctcaagagtgcttacaaatggtggaatcaaaatctggttctgttactgatagcaatgtgaaatcaggaaagtcaccggactcatctgtacctcaattgcctcatcaataaaatgaggaataataagccctacatgcacacccggtgtcactcacctataaagaaagagctaccattgtacagggtaccattcacatcaaatgaatagaaatagctttctctggagttgtgcagtgtccaacatgcacagccatatgaggaagccctgtttggcaaaactcccagggaatgcccacagagctctgcatgcactgccctctcccaggcgtcataccaccatcacagcgatggcactgaagtgcagagatgcttctatctttaaaaacaaggaaataaaagaatcccccttgaactcacatgcctctctagcttcttgtccagttgtctttttcccttatagcaggactcmtcaaaagaatctacaattcctgaatcccatcttgttgccatc

SEQ ID NO: 289998 - DNA, 438 bp, Homo sapiens
gtggggtgacactgtcttgctgcacacagatgccagtctggaccatgtggctggagcacttcccccctggcatccctccaacccagttctctctcggtactgggtcatcacacttccttttgaatagccccaggtgaatatctgttatttaccgtccaccttggatatgtctctcctgagatttttaagcaaagtcttacagttaatattgttattacctaatcagcacttcccaggacttattyttactaaaagttttatcaacaagacagagtgtcaaggctatatctaataatgcctgcctgttcagttttggtaactgtattagtccattcacacaccgctatgaagaaatacccaagactgggtcatttataaaggaaagaggtttaattgaatcacagttccacattgctgtggagccctcaggaaacttac

SEQ ID NO: 289999 - DNA, 527 bp, Homo sapiens
atggggcagctacactgagtcctttctgccagatgaaggcagggaatagtmccagtcaaagcattgctgtgaagtttccctggtgacttcagagtttctgtgtctaccacccccagcctggttaacacagcgctctgtaataaagtctaaaattctaaatgatagcaaagagcagcttgcattatcttttctccctggaggataaataggaccccttgcatctagttgtttgtaggtaagaagctggcaagagtcaagacaggtaggaccctataaaggttaggaagaaaaccactgcttcctcacacacagcatgtccccaagccagccagccctgcctcccttctagaacctgcccccgagcttccctggagaagcccttcgccaagtcttcccatcagtgagtttcaatcatcactgaggtcttggttcaaaagtcacaccctcaggaagtcctttctgagctctcctaagtaacgaacctgattcccctccacattgcatctccatcttgcaatttcttcaga

SEQ ID NO: 290000 - DNA, 558 bp, Homo sapiens
gactcagacttggcaataaggagtttgctcagacacaggtacaacttctgccttgaggcattgaamtctttggtcccatgctagagaattgatccccattggcagggacagaatgggatgcaaaatgtagcaagtactccaacagtgacctggtggggtttctttcagaagcttttcctggcgcagtacagctgccctttagaatggcaagagttgaccaccaaccagaaagaagccctgattccaccaagcctgcgggccacatctgttgcaacaggagccacttttcagtcccatcagctccttctcttctagctatgacttttatcatgggctccacttcaatcattagcaataaatagaaaatacccaaaagccccaaaataaaggtccccttttcatttaaaacattcagatttcattgcttgtgctgtggctaacatcaagtcacaaagtggcagggcagttccccaagcccgttctgcttccaagcttgttaaactttggaatgggttttgtcctttgggtgtgcatgtgttttaaagctgttttatgaca

SEQ ID NO: 290001 - DNA, 579 bp, Homo sapiens
cagccttggaaattcctttctgtcctttaagactctgctcaatgaagtcttgtcttaccagctcagtgcctgtgtcaactgacttatagaaaaagggcatcaagagtcttggagaattgcccttccctagcaggctcccattgtccaaggtcagctcatgctctgccccacctcctcaaagaaggcttccatgatttttttttcctctgcttgctcagatctctaactttcctgagtttctatgttatrtaaatctgtgccacacatctgaaccctttttccactccaccaaagatttgaacaaatgccaaaatactgagcaagtcatcctcttccaggaatctgtcctgagtaaataatcaaaaagctgatcaaagatttacaaacatggacattcactgaatttttttaaaagacaggtcctcagcctgccaagtagctaggactacaggagtgcaccaccacacccagctaattttttatttttttagagatggggtctagctatgttgcctaggttggtcttgaactcctggcctcaagcagtctttctgtcttggcctcccaaacactggaatt

SEQ ID NO: 290002 - DNA, 644 bp, Homo sapiens
accatataatctgtatctataactactgctcctgcgacttttcaaatttaataaaactgtctattcagtacagctttcttggatttgcaaggctctgttagtcctcaaaataataaggcaaggctcacaaagacagatggcaattgccaagattacaagtacttttatattgattttaaaaactctagtaaaatatcaaaatatgttatctcctggagaacaacttgaaaataaactagtgaaattgaaagttaggatgagaaacgcttattaaatcttaatcttggmcaaatcttgatctttatcattacagtgaatgtttttagagcttttattgggatcaagtgaaccagtttggaaatgctttgatatttatgtttggattctgtttctacatttactaagatttatgtaactatctaccatctacttagctagatgtaccattgcaagtagtatataccgtgtttaactaataccatttacatatgctttttataaatagtatcacttataggtaatacatgcgtttatctgttgtaatgtcttttgggtttgattgcttaaccaaatgttctaaactatttctgttattttaaagcattatataattttaacctatttatagtttatttcattcagaa

SEQ ID NO: 290003 - DNA, 583 bp, Homo sapiens
acacgttatttctataatagggtgttagaagaaaggcactttccttgtatttatctctttttctctgcttgagttcaatagggttcctgctttgggttttatagcaccaggtaaatactgcgagttcctcaggtctttagatttagctcrtaatttaaaaagttttgtatcattcatcttgttcagggattgagatgcatttttgtataaggccacgtgtataagtctgtttttatactgctataaagaactacctgagacttggtaatttgtaaacaacagaggtttaattaactcacagttccacatggctggggaagcctcaggaagcatacaatcatggcagaatgtgaaggggaagtaaggtacatcctacatggtagcagaagagagagaccgagggggaagtgccacactttgaaaccatcagctcttgtgagaactcactcactatcctgcgaacagcattgggggaaagcacccccatgatccaatcacctctcaccaggtccctccctccacacgtggggattacaattcgagatgagatttgggtgtggcacagagccaaacaatatcacca

SEQ ID NO: 290004 - DNA, 1160 bp, Homo sapiens
acacgttatttctataatagggtgttagaagaaaggcactttccttgtatttatctctttttctctgcttgagttcaatagggttcctgctttgggttttatagcaccaggtaaatactgcgagttcctcaggtctttagatttagctcataatttaaaaagttttgtatcattcatcttgttcagggattgrgatgcatttttgtataaggccacgtgtataagtctgtttttatactgctataaagaactacctgagacttggtaatttgtaaacaacagaggtttaattaactcacagttccacatggctggggaagcctcaggaagcatacaatcatggcagaatgtgaaggggaagtaaggtacatcctacatggtagcagaagagagagaccgagggggaagtgccacactttgaaaccatcagctcttgtgagaactcactcactatcctgcgaacagcattgggggaaagcacccccatgatccaatcacctctcaccaggtccctccctccacacgtggggattacaattcgagatgagatttgggtgtggcacagagccaaacaatatcaccawcaatcacctctcaccaggtccctccctccacacgtggggattacaatwcgagatgagatttgggtgtggcacagagccaaacaatatcaccatgtattagttagcttggctgtcataacaaaacaccacaacctgggtaacttaaacaacaaaaacttattttctcaccattctggaggctagaattccaagatcaaggtgcctacaggtttggtttctcctgaggcttctctttttggctttcagatgcctgccttctcccagcgttgtcacatggcctttcccctgtaaggtgcactccaggcgcctcttcctcttcttttaggaacagcagccctattggattaggacctcatttaaccttaattaccaccttaaaggccctatcttaaaatacagtcacattgagggttaggggttcaatatatgaatttaggagggacacaattcagtccatagcaggtgagataatgactatttcaggcttcagggccacaaggtctctgttgtaactagtcaactttctcactgtattgaagaatcagtcatagctaataaaataaacaagtgtgaatg

SEQ ID NO: 290005 - DNA, 576 bp, Homo sapiens
caatcacctctcaccaggtccctccctccacacgtggggattacaattcgagatgagatttgggtgtggcacagagccaaacaatatcaccatgtattagttagcttggctgtcataacaaaacaccacaacctgggtaacttaaacaacaaaaacttattttctcaccattctggaggctagaattccaagatcaaggtgcctacaggtttggtttctcctgaggcttctctttttggctttcagatgcctgccttctcccagcrttgtcacatggcctttcccctgtaaggtgcactccaggcgcctcttcctcttcttttaggaacagcagccctattggattaggacctcatttaaccttaattaccaccttaaaggccctatcttaaaatacagtcacattgagggttaggggttcaatatatgaatttaggagggacacaattcagtccatagcaggtgagataatgactatttcaggcttcagggccacaaggtctctgttgtaactagtcaactttctcactgtattgaagaatcagtcatagctaataaaataaacaagtgtgaatg

SEQ ID NO: 290006 - DNA, 576 bp, Homo sapiens
caatcacctctcaccaggtccctccctccacacgtggggattacaattcgagatgagatttgggtgtggcacagagccaaacaatatcaccatgtattagttagcttggctgtcataacaaaacaccacaacctgggtaacttaaacaacaaaaacttattttctcaccattctggaggctagaattccaagatcaaggtgcctacaggtttggtttctcctgaggcttctctttttggctttcagatgcctgccttctcccagcgttgtcacatggcctttcccctgtaaggtgcactccaggcgcctcttcctcttcttttaggaacagcagccctattggattaggacctcatttaaccttaattaccaccttaaaggccctatcttaaaatacagtcacattgagggttaggggttcaatatatgaatttaggagggacacaattcagtccatagcaggtgagataatgactatttcaggcttcagggccacaaggtctctgttgtaactagtcaactktctcactgtattgaagaatcagtcatagctaataaaataaacaagtgtgaatg

SEQ ID NO: 290007 - DNA, 629 bp, Homo sapiens
gccccatatgttttgagataacaggaatcttttgatataaaccctttttggaaattcctcttttccttttttctgagaattgcagcagcaacttctagaaggttaaaacagttctaatagcacatcacaagataaattagagtatcacttttggaaatgcacatgggagcaagtggttagccagtgcagattgtagtatggattatgtccaatctgcttaattttargaaggggagatgttaattatgagacacaataattcttccaaatggtctttagtaagggtaatctgagattagtaaaatctaagacaaaaatttagtctgaaatttacaaaggtctttgtgacagctgagtcatgtcccagtggtgatacaggttgtaggaaattctctggatctcacacaaggcggcgaattattttggagcacacttgggtgggaaggctctgctatgaagggtaccaagggcttgccaagtgtgttcattttactcccaccaccattatgttgaattcatctcaagaaaggcttgctctgagtaaattaaaattaattttaagaggttaatgttttatgattataaaattaattcatgtccattctaaaaaatttagaaggaagaaaaaa

SEQ ID NO: 290008 - DNA, 629 bp, Homo sapiens
gccccatatgttttgagataacaggaatcttttgatataaaccctttttggaaattcctcttttccttttttctgagaattgcagcagcaacttctagaaggttaaaacagttctaatagcacatcacaagataaattagagtatcacttttggaaatgcacatgggagcaagtggttagccagtgcagattgtagtatggattatgtccaatctgcttaattttaggaaggggagatgttaattatgagacacaataattcttccaaatggtctttagtaagggtaatctgagattagtaaaatctaagacaaaaatttagtctgaaatttacaaaggtctttgtgacagctgagtcatgtcccagtggtgatacaggttgtargaaattctctggatctcacacaaggcggcgaattattttggagcacacttgggtgggaaggctctgctatgaagggtaccaagggcttgccaagtgtgttcattttactcccaccaccattatgttgaattcatctcaagaaaggcttgctctgagtaaattaaaattaattttaagaggttaatgttttatgattataaaattaattcatgtccattctaaaaaatttagaaggaagaaaaaa

SEQ ID NO: 290009 - DNA, 629 bp, Homo sapiens
gccccatatgttttgagataacaggaatcttttgatataaaccctttttggaaattcctcttttccttttttctgagaattgcagcagcaacttctagaaggttaaaacagttctaatagcacatcacaagataaattagagtatcacttttggaaatgcacatgggagcaagtggttagccagtgcagattgtagtatggattatgtccaatctgcttaattttaggaaggggagatgttaattatgagacacaataattcttccaaatggtctttagtaagggtaatctgagattagtaaaatctaagacaaaaatttagtctgaaatttacaaaggtctttgtgacagctgagtcatgtcccagtggtgatacaggttgtaggaaattctctggatctcacacaaggcggcgaattattttggagcacacttgggtgggaargctctgctatgaagggtaccaagggcttgccaagtgtgttcattttactcccaccaccattatgttgaattcatctcaagaaaggcttgctctgagtaaattaaaattaattttaagaggttaatgttttatgattataaaattaattcatgtccattctaaaaaatttagaaggaagaaaaaa

SEQ ID NO: 290010 - DNA, 586 bp, Homo sapiens
agatccagagctagttatgttccctgaactagggatcaacaaatggataamcattataccacatgaaggttttcaaaccagaggaatgagcaaattactatggaaaatcagaggaggaaatacatgctgtaagggcttactaatatgtgggttaagccttaaataattagtagactaataggcagagaatagaatgagttgggcagggtgagggcagggcaggggcaggatatctggataggggtcttcctaaatctcagaaacataggtgtacacagaatgttatggagaagtcaagcagtctggtgaggggaagacagattgcatgtgggagaaaaggcacagtggtggttgctgaagttgaatggatgggttagtagcccatggccagatcatgcaagccttgaatgtaatgtcagtttaagtagtttggacttcatcctatgaaaaacagcaagccttcaggtggatggaaacaggaaaactccattgtcagacttatgtcatagttgcctctcttctccagccttttgacttggagcccaacaacctcactgtgccttctggctgcttgtgactgatacct

SEQ ID NO: 290011 - DNA, 586 bp, Homo sapiens
agatccagagctagttatgttccctgaactagggatcaacaaatggataaccattataccacatgaaggttttcaaaccagaggaatgagcaaattactatggaaaatcagaggaggaaatacatgctgtaagggcttactaatatgtgggttaagccttaaataattagtagactaataggcagagaatagaatgagttgggcagggtgagggcagggcaggggcaggatatctggataggggtcttcctaaatctcagaaacataggtgtacacagaatgttatggagaagtcaagcagtctggtgaggggaagacagattgcatgtgggagaaaaggcacagtggtggttgctgaagttgaatggatgggttagtagcccatggccagatcatgcaagccttgaatgtaatgtcagtttaagtagtktggacttcatcctatgaaaaacagcaagccttcaggtggatggaaacaggaaaactccattgtcagacttatgtcatagttgcctctcttctccagccttttgacttggagcccaacaacctcactgtgccttctggctgcttgtgactgatacct

SEQ ID NO: 290012 - DNA, 586 bp, Homo sapiens
agatccagagctagttatgttccctgaactagggatcaacaaatggataaccattataccacatgaaggttttcaaaccagaggaatgagcaaattactatggaaaatcagaggaggaaatacatgctgtaagggcttactaatatgtgggttaagccttaaataattagtagactaataggcagagaatagaatgagttgggcagggtgagggcagggcaggggcaggatatctggataggggtcttcctaaatctcagaaacataggtgtacacagaatgttatggagaagtcaagcagtctggtgaggggaagacagattgcatgtgggagaaaaggcacagtggtggttgctgaagttgaatggatgggttagtagcccatggccagatcatgcaagccttgaatgtaatgtcagtttaagtagtttggacttcatcctatgaaaaacagcaagccttcaggtggatggaaacaggaaaactccattgtcagacttatgtcatagttgcctctcttctccagccttttgacttggagcccaacamcctcactgtgccttctggctgcttgtgactgatacct

SEQ ID NO: 290013 - DNA, 646 bp, Homo sapiens
tcagtttaagtagtttggacttcatcctatgaaaaacagcaagccttcaggtggatggaaacaggaaaactccattgtcagacttatgtcatagttgcctctcttctccagccttttgacttggagcccaacaacctcactgtgccttctggctgcttgtgactgatacctgcagactccattctgtcctccactctcctgctgtgctctcaattctcaatatcttaaatcttttcgcagctacagggctgaaaaacaagtttacggtaagagtggcaaatagagtgtgatgttaacaacaaatattgcacattagttgtggtttaatgaagcgtggtgttggagaactgtgtttaggatgaacaggaatgagtctcrtgatcccttataagtgactagtagactggtgggagagggacaagactaagagggtgtgatcactttcagatgagaacagctgactctgccttatttttctacaatctccagaagatatccatattttaaaaaatgtttctggctgggtatgttgactgaggcctgtaatcccagcattctgggaggctgaggtgggaggatcccttgagcccaagagttcaagacaaacctgggcaacatagggatgtggactgctgttgtgaagctt

SEQ ID NO: 290014 - DNA, 668 bp, Homo sapiens
tgatgattttcacattagatctcataagcctcttggttgtcttcagctttcagtttcctgtaagagatacgttattgtcacatttgaaaataaatcttaagaggattgtgttatatttatttatatgcatttattattattataatttaatgtgtcttttcatttattcaatggactatgttggaaagggctcatgtcaactaattcattcatcaaccttaattggtcttcacagcaaattcaacaagtaccaaactgggttctgcacagtgccccggtgttgcgtggtgggacacagggctctgagaagcgggaaggaatgtgttgagttatctaatcccctcagccccaagtcaacattacaactctgcttttgttggttttaaatactggagttaacagtaaggccattctgttcccccaaaaggctacttctattttaaaataaactaagacctgaaaaacaacttctctgtttgcaggaggaaagtctttctcattctaaacctcaraatcgaaatacattgagctttataggactttcaattagacataatggcctataccttttcagcttctactataaaaagttgtcatttgacacgtatttatctacttgagtttaactatatttattaaaaaattttcctcaacttttattaaattga

SEQ ID NO: 290015 - DNA, 505 bp, Homo sapiens
ctttctgcctttccacacaagttacagcatggattctacatttcctartctaacattcaaagatattcactctctggctaggcctagctttgcagcttcttctcctatcactactgcctccccatcaccttgtgttccatctcagaaataataactgctcactcttctcagattatccaagaatggctcagagacattaagcgagtgattctgcaggctgctcaggcaagttccatgcaaataatttattcctatgtgagagaatcagctatgtgagggtagactgagtcaagattttaaaaagacataaacaaaatttatagaaggaaaaaaatgagggagggcctatatatagcctgagaatagtgtactttgtttacataatttttaattaaactgattatttggccactaaaagagaggacagtgtggacattgtgtccttgactagtctaagattataaagaaaacatttccatgcgttgatgattggctagaacactgt

SEQ ID NO: 290016 - DNA, 534 bp, Homo sapiens
ggttgttcctttacccctgagacctggaatacaagccacctggagccaaggccggctactgccagggaaacccagctgaactcagcagtgtcatagctgaccaatggttctcataaaccaggagtgagaaatagacctttgttataagtcactgagattgcggagttgtttgttgctatagcaaaaattagtacaatcttccattttttaaaaattgckgatcagattgataaatgttacgctacattcaaagctattttcttcatacaaattttacacataatttgggttgattagcagtacaataattctttgcaagcaggcctgatgcaaccccctcccctctgccgcctttttttttttaaaacaatctagcattcaagaagataactttgatttatgaatcttggcgacaatgttaaattccaggcatataatattttgtggtgtttaactcaatcaagataaaacaaccacattgcattcttaagatatttgctttctaccaacttcctccaaataaacatcttctaa

SEQ ID NO: 290017 - DNA, 543 bp, Homo sapiens
aagtggaaaggttgtgaatggttggtgtctgctacatccaatgactgtagtttgctttctagatgttcagcaccctacatgagaacacacccaccctgcccaccaccccactctcaaaaagttcatcttgcaaactrtgaagggttcccatttctcaagaaatgctctgagacagactctatgaggtattgtgccagggatacaacaggattacataacattcatttattcatttaacaatcatatattatacaattgttgtaagagatcgagaccatcctggccaacatgatgaaaccccgtctgactaaaaatacaaaaattagctgggtgtggtggtgctgcctgtagtcccagctactcgggaggctaaggcaggagaatcacttgaacctgggaggcggagtttgcagtgagctgagatagcgccactgcactccagcctggggacagagtgagactccatctcaaaataaataaataaatacatacatacatagtggaaatttatttctcacacttctggaggctggaaagtttaag

SEQ ID NO: 290018 - DNA, 470 bp, Homo sapiens
ccactgaacgagcagatgggaggaaacctcaaatctgtctccctgaggaatttggggcaagtgtttttaagggttttggaatggaccaaaatgtggagaccgttgattggtcaatgagtgcagggtaaagtcatgggacaaggagatgaagaaactattctcatgctgatttggttctctgtgaggatcactggaagccaggtcttaaaaacatcttaagcaattcttaaataaaagctttatgattctaacatcagagatcctatccaaaagaataacagaagtgctaattaattattaaacataaatcctatcctattctaacatcagaaatcctatctgtagaaacaatcakggatgcaaatggttagcatctagtgccacctgactttcggtaataagaaagtcggccaaaatatagcctgattagtgcttagttaaaactctatttctgtccagaattcttgtaa

SEQ ID NO: 290019 - DNA, 470 bp, Homo sapiens
ccactgaacgagcagatgggaggaaacctcaaatctgtctccctgaggaatttggggcaagtgtttttaagggttttggaatggaccaaaatgtggagaccgttgattggtcaatgagtgcagggtaaagtcatgggacaaggagatgaagaaactattctcatgctgatttggttctctgtgaggatcactggaagccaggtcttaaaaacatcttaagcaattcttaaataaaagctttatgattctaacatcagagatcctatccaaaagaataacagaagtgctaattaattattaaacataaatcctatcctattctaacatcagaaatcctatctgtagaaacaatcagggatgcaaatggttagcatctagtgccacctgactttcggtaataagaaagtcggccaaartatagcctgattagtgcttagttaaaactctatttctgtccagaattcttgtaa

SEQ ID NO: 290020 - DNA, 641 bp, Homo sapiens
cctttcccagacagcagctttacaaaggctctaggtgacatagcagatcatggaaatctgggagacaacttcatgtrtaatttttccagcccttaatttaatgaaccaaaagctggttgagcacttacagtcctcatggcctcttgacatctcactgtgcagctgatggataacgtcacgtgttccagtcttgattctcagcaaaatttgaggcttgtttcttctcaaccaggacactgcagttttgacaaagctcgctatgcttttgaagcccaaaaccttgaacaccccagctcggctccacgtgcaaatttccacagccttgctcatgaatagatgcagggttacaggacggccaaatgggaagtggcgctcagccactgggtggtccacaaggaaaaggcaactctgccaagatgtgtgggtgatggcagtttgatcataagatctggggaactggtggaggggtggatgggtttctttggctgccaaaacagtaccgcaaactgggtggcttgaaacaacagaaatttattgtctgacagttctggaggctggaagtctgaaatcaatgtgtcagtagggccagtgtcttctggaggctcttgggagcaaccatctgatccctgtgtcatttctgg

SEQ ID NO: 290021 - DNA, 1210 bp, Homo sapiens
cctttcccagacagcagctttacaaaggctctaggtgacatagcagatcatggaaatctgggagacaacttcatgtgtaatttttccagcccttaatttaatgaaccaaaagctggttgagcacttacagtcctcatggcctcttgacatctcactgtgcagctgatggataacgtcacgtgttccagtcttgattctcagcaaaatttgaggcttgtttcttctcaaccaggacactgcagttttgacaaagctcgctatgcttttgaagcccaaaaccttgaacaccccagctcggctccacgtgcaaatttccacagccttgctcatgaatagatgcagggttacaggacggccaaatgggaagtggygctcagccactgggtggtccacaaggaaaaggcaactctgccaagatgtgtgggtgatggcagtttgatcataagatctggggaactggtggaggggtggatgggtttctttggctgccaaaacagtaccgcaaactgggtggcttgaaacaacagaaatttattgtctgacagttctggaggctggaagtctgaaatcaatgtgtcagtagggccagtgtcttctggaggctcttgggagcaaccatctgatccctgtgtcatttctggwatttactggtaaccttaaagagttagagcttgagtttaagcaacaagaaaccatctgtaccagacagagcaaagcaggcaagagtaagaaaatgtttcataaacatgagcttgctctaaatagcagaagttttagtgttgtaggcaacgttagtgcataattcattttccgtgccttgttgctttctgtctggctggctttttctgaggtctgtgcccagccaaaaaaagagaaatccatttgtgggttccatgagagagaagtgataagattgataaacagatgcatttctatttcatgtggttggccattcctttcagttatattattaactgacccacctccctcagatctttgaaatgctttttaatctggtctcctgataaaccctaaggccaagtggctctcggaatttggagagaacagtttttcctccctgtcctgactatggcatttaagataaagagcaaatwgtgccatgtgattaaacgatatatgtaaccttgaaaacttgccatagtggtttcagtgtcatttactcatacatcctaagcactgctagaaagtc

SEQ ID NO: 290022 - DNA, 568 bp, Homo sapiens
atttactggtaaccttaaagagttagagcttgagtttaagcaacaagaaaccatctgtaccagacagagcaaagcaggcaagagtaagaaaatgtttcataaacatgagcttgctctaaatagcagaagttttagtgttgtaggcaacgttagtgcataattcattttccgtgccttgttgctttctgtctggctggctttttctgaggtctgtgcccagccaaaaaaagagaaatccatttgtgggttccatgagagagaagtgataagattgataaacagatgcatttctatttcatgtggttggccattcctttcagttatattattaactgacccacctccctcagatctttgaaatgctttttaatctggtctcctgataaaccctaaggccaagtggctctcggaatttggagagaacagtttttcctccctgtcctgactatggcatttaagataaagagcaaattgtgccatgtgattaaacratatatgtaaccttgaaaacttgccatagtggtttcagtgtcatttactcatacatcctaagcactgctagaaagtc

SEQ ID NO: 290023 - DNA, 582 bp, Homo sapiens
gaggaaggtagcaagactatcctgaggacctcttaggccacccgcaggtccagagatatcccactggtgctggccagagcatggttctactctgcagttgtgttgatatatgctgatcagccagacacacagcaggatgctttcccacacatcctaggagactggtttcccaccctgggactcaggtctgggagacctctgttaataaaactcttcatgatcctttctctatttgcactgttacagaaaagttgaccctcaaagcagtgggaatgaagtcttcggaggaagggcaggcaggtcttggcagtttccctttggcttgttggtgtctttctgctgaagcgtgtgctgaactgtgggccatgctctcctgggtatctttctagtagaagcctcccagcaggttcaggcccaggactgaagccaggggtaacagctggcttcatccagaactgtcaatgacaccctccaaagtccccatggcaccttcttaatgaggarctctgcctagacccacagtttgataaaacctggaaatccagcagggaggggcctttccctggagggtttgtggtagaa

SEQ ID NO: 290024 - DNA, 899 bp, Homo sapiens
tggttctgtgattacacccagtttacaggtggacaaagggagtgtcagacagtgcaagaatctgccaaggtcataaggtgaagatgggttacacctaggatttcaatccccaaagtgtgaagcacagtgtctagcaaaggatagctgctcattgaagagatctgaatgagaagaaatgcagacatggatgtggtgatgccatccttagcagagcccactctaagccagaagcgtcaaggctgccggctgggacgtcaagtcgatggtgattttggggaccctgtcctggggctgctccatcctccatagggacagyacatctccttttacttacccccatggctttagaggggaagcaccaggcttgtggtwatgtgtctttttggtgtaatgatctattttcctttgaatatataccactgctgggccaaatggtagtttccctctaatatctgatgatcctgagacggctgctctagtttattcatggtgtatttaaaacagattaatagaatctgtttgcatatagttttatgattttatgacatctgggtwtcactgtaagtgatttggccagtgcattacaagttcagtttcttaagaccttttccttgggttgtctagaatgcccacagaagacatttccaaatccttgcctgagagtgaagtcattctggaactcaagtgaagggagaaggctgagggcttcaaaattcaatgtgtgagcatttaccgaaaccctcctttttcagtactgggcattcattttcagctgactggtctccttcagatccttgaacctctggtgtactctcttagaaaatatatcttctgtcttctgtctggttgtggaaaaggcaatatcctgtctgtatggagcagaggacaagatccaggag

SEQ ID NO: 290025 - DNA, 587 bp, Homo sapiens
aacccaatgttattaagaacktgagtgtgctaatgtcaaaaataaaacattttaaggccaaattgagggaatttatattatctgctagctttttatctgaattgttcccagtcagcataagtgatcaaaggtgtacttaataaaggctgtggctagcatttgaactctatgtagtatgcagttctcttaatgatcaacagtatgagtcagacttaatgaatttaaaaatgaaacataaaggtcattcttattttgaatttgttttaaacatcatcacataaaatttgtgagtatatcctgaagctgactttagtgtttgaaaagtattgtttagtaaattttgacaaatgtgtatacccatttaaccatcaccccgatcagtacacggaacatttttatcatcccagaaagttccctcatgcctccttaaagtcaacaaccttctccacagagcccatcactattcttattgttatcactgtagattagttctgcctattcttataagtagaatcacacagtgtaatgaaagagaaatatttttccattttaattttatttaactttttatgtatttaggaagagta

SEQ ID NO: 290026 - DNA, 584 bp, Homo sapiens
ctatgtggctattgaccactgagatccaatactaccagccagattgacacagactttgcatgtcaatattcacatgaagtgggatgaaggtctttgggttgctgagattatgtgtgttccaaataaatgaagttagcccccaggtatttattggcttttycagctacataggcacctttctaccaaggataaaatctgtgatctgtgtagagaacttttcttgctaagtctttgtggagtaatcagcaacttcattgcatctaagccttcctctgctaatcccgtgattactggactcacagtttcaccttggtagcttatctgtggtcagatggtactgggggctgctgctatactaccctcaccccacacacacacacttatcttgcaaagaggtacacaggcatccctccctcaggcacttcagtttctttcatgccttttacttgattccagaagtccccactgaggccaagaaatctgagtactattctcaggagaaatttgctctggggtccctcggggataaaaggatggtgtgagggatcctggctgcatggaaggggcctgaggaaacttgttgc

SEQ ID NO: 290027 - DNA, 584 bp, Homo sapiens
ctatgtggctattgaccactgagatccaatactaccagccagattgacacagactttgcatgtcaatattcacatgaagtgggatgaaggtctttgggttgctgagattatgtgtgttccaaataaatgaagttagcccccaggtatttattggcttttccagctacataggcaccttkctaccaaggataaaatctgtgatctgtgtagagaacttttcttgctaagtctttgtggagtaatcagcaacttcattgcatctaagccttcctctgctaatcccgtgattactggactcacagtttcaccttggtagcttatctgtggtcagatggtactgggggctgctgctatactaccctcaccccacacacacacacttatcttgcaaagaggtacacaggcatccctccctcaggcacttcagtttctttcatgccttttacttgattccagaagtccccactgaggccaagaaatctgagtactattctcaggagaaatttgctctggggtccctcggggataaaaggatggtgtgagggatcctggctgcatggaaggggcctgaggaaacttgttgc

SEQ ID NO: 290028 - DNA, 482 bp, Homo sapiens
tgttggggtcatttggtttcaaaatgggagggagaaacacatgcatgtgtggatttgtttgcagagtcamaattctttgaccttgggccaataatcaaattacgctgttggcataggggatgtccaaattatctccataattattcttgattgagatgactcattcaggggcaggtggagagaggtgtgggagggaaaaatggaaaatggttgttttagccagttttatctaattctgatttgtaagcttgtggagatctgttcctaacagcattaaaacactctatatgtattttatgattttgaaaatcttttaagaataagtatttaaaagatgtcttttacatgatctctctaaaataatctcacggggtaagggatggggtggtagtatagataaaacaatattgcatgtgtgttgataattgtaaaagctacccagtttatagtattttgttgtagcagccccaacagactaagac

SEQ ID NO: 290029 - DNA, 556 bp, Homo sapiens
tttcccacctgtgaacaactaaagtggtgttcaaacaaaacaggtattacatttaccccaaattaggagacattatgrcttattttgttgcccaaccttcactgtcctttcattgttatccttcagattcatttccacagtggtagtggtggtaggaaagctctagaagaccaagaaactttgtcattgattatatccaatgtctgcactgttttacacaatgtgcatagagtggtgaacaaacaaattagataaggttcctctctcaagtggagatgacatgttacttaagaaaattaggtggaacaagaccacaagccagtgtatagctatatactcattgttctgtagcgtttgtgttagattttgtgtgggcaggaatgttttgactacctaaggtagtgtttggtagtgtcagggtattgcatttttgtcagggtaatgtagtagctttatgttacctgtgaggtgcatgactgatgtttgcatttctgtgttctaattatagaaagagtaatgtatatggacttcttaagtttgaagttcaaaagagtag

SEQ ID NO: 290030 - DNA, 544 bp, Homo sapiens
gccaatatcttatcagaattctctcttcactattttcttacacctggacaaattggtaagtgtgtaattgtctagtcggtgtargcatttggatttgaaatacttggattattaatgctcattttcttttctaataaatgtcttttatttaaacttcccattttttgaatatggggaaaaaactaatttggggaaacttacagcacctttggtaacctcctgaatttttattaatatattttagtctgttttgagaacattgaacatatatacaaatttacagagtgtagtagagaatttattctctattctttgtttaactctgccttcatcacttattacattataattcataccaaaacctagtggctttaaacaacaacattgtattatttcctatgattccatggatccagaatttgtgcagggctcagatggatgattcttctgccccatctggtttgactgaggtcactcactcagctggcttgagctgccactgggccaagctgaaatatcaaagaaagcattgtgcatgtgtctg

SEQ ID NO: 290031 - DNA, 586 bp, Homo sapiens
acgatgctttaatagttgattttttaatatctcttatggtcacctcagccttcctagtatgtctgctttactatttcccacctcaactgcctgctgatgttactaaaatttaatgaaagagaaaagatttccaggagaatcagacaaccaatcttgttaagtcaataacctgaattatatactctaaatgaattctgttaactctgcccagaaagtagttgccttgctgcttagaataaaatactatgctttatgacagttgtattcttttttcctcaattttatatcctctttcccatcattcaagttgtaacttccaaggcacaaatggtctgtattctgasatcacaatattcattacataagttgctctgtagaattgaatgggaagatggataaatcagtagctcactggagggtaaacaaaggaaggaagtgagggagggacaaagaaaaaaaagaaaggaaggaagaggagagaaagagaaagaaggatgagacaaatgacaaacttacagattcacaactgttgtgaaggattcattggaagtcaacactaaattatccaaatgtccttttaagaacc

SEQ ID NO: 290032 - DNA, 586 bp, Homo sapiens
acgatgctttaatagttgattttttaatatctcttatggtcacctcagccttcctagtatgtctgctttactatttcccacctcaactgcctgctgatgttactaaaatttaatgaaagagaaaagatttccaggagaatcagacaaccaatcttgttaagtcaataacctgaattatatactctaaatgaattctgttaactctgcccagaaagtagttgccttgctgcttagaataaaatactatgctttatgacagttgtattcttttttcctcaattttatatcctctttcccatcattcaagttgtaacttccaaggcacaaatggtctgtattctgacatcacaatattcattacataagttgctctgtagaattgaatgggaagatrgataaatcagtagctcactggagggtaaacaaaggaaggaagtgagggagggacaaagaaaaaaaagaaaggaaggaagaggagagaaagagaaagaaggatgagacaaatgacaaacttacagattcacaactgttgtgaaggattcattggaagtcaacactaaattatccaaatgtccttttaagaacc

SEQ ID NO: 290033 - DNA, 611 bp, Homo sapiens
ttcacatcctctccaacataagtaattaatattttaaaaattagttgtcarcatgatggccaaaaatggaaacgtgcacttcttggatgagaccagatgagtctatttctttcagaggattattcatcctttttcccccttttttgtcaattgttcagtaatatcaaaagagactactggcctggcacggtggctcacccctataatcccaacactttggaaggccgaggagggtggatcgcctgaggtcaggagattgagaccagcctggccaacataatgaaaccccatctctactaaaaatataaaaattagctgggcatggtggcgggcacctgtaatcccagctacttgagaggctgaggcaggagaatggattgaacccaggaggtggaggttgcagtgagccgagatggtgccattgcacactccaacctgggcaacaagagcgaaactccatctcaaaaaaaaaaaaaagagattacttataaatcaactgaaaattcttaattctttattatttgaatctggaaaactaaccatgaaaattagaaacaacctcaaatataaaatcagatttaatgttgcttctattaagaacataggaatag

SEQ ID NO: 290034 - DNA, 611 bp, Homo sapiens
ttcacatcctctccaacataagtaattaatattttaaaaattagttgtcaacatgatggccaaaaatggaaacgtgcacttcttggatgagaccagatgagtctatttctttcagaggattattcatcctttttcccccttttttgtcaattgtycagtaatatcaaaagagactactggcctggcacggtggctcacccctataatcccaacactttggaaggccgaggagggtggatcgcctgaggtcaggagattgagaccagcctggccaacataatgaaaccccatctctactaaaaatataaaaattagctgggcatggtggcgggcacctgtaatcccagctacttgagaggctgaggcaggagaatggattgaacccaggaggtggaggttgcagtgagccgagatggtgccattgcacactccaacctgggcaacaagagcgaaactccatctcaaaaaaaaaaaaaagagattacttataaatcaactgaaaattcttaattctttattatttgaatctggaaaactaaccatgaaaattagaaacaacctcaaatataaaatcagatttaatgttgcttctattaagaacataggaatag

SEQ ID NO: 290035 - DNA, 611 bp, Homo sapiens
ttcacatcctctccaacataagtaattaatattttaaaaattagttgtcaacatgatggccaaaaatggaaacgtgcacttcttggatgagaccagatgagtctatttctttcagaggattattcatcctttttcccccttttttgtcaattgttcartaatatcaaaagagactactggcctggcacggtggctcacccctataatcccaacactttggaaggccgaggagggtggatcgcctgaggtcaggagattgagaccagcctggccaacataatgaaaccccatctctactaaaaatataaaaattagctgggcatggtggcgggcacctgtaatcccagctacttgagaggctgaggcaggagaatggattgaacccaggaggtggaggttgcagtgagccgagatggtgccattgcacactccaacctgggcaacaagagcgaaactccatctcaaaaaaaaaaaaaagagattacttataaatcaactgaaaattcttaattctttattatttgaatctggaaaactaaccatgaaaattagaaacaacctcaaatataaaatcagatttaatgttgcttctattaagaacataggaatag

SEQ ID NO: 290036 - DNA, 1213 bp, Homo sapiens
ttatgctcattgataggagtcagttagaaaagaccacacattattaatatatgatttcctttatatgaagttttcagaattggtaaatccagagacagagagtagataaatggttgccaggggctggaggagagggaaatgaagaataactggggtgttgaaaatgttccaaaattagattgtagtgatagttgtgtaattctgtgaatattctaaaatttactgrcatatacacattccatagatagatttaattgtacggcatgtgaattatacctcaataaagtttttttaaagaaattagtttttaaaaagcattcattacttataaaagatgatactgtattttaatgtagaaaaataatttttagactgtgtattagtttcctagggttgctgtaacagtattacaaactgggtggcttaaaacagaaatgtattgcctcatagttctggaggctagaagttctaagtcaggtgtcagcagggatggttccttctggaagttctgaaggagaatctgttccacgcctctctcttagcttccagtagttgctggcaatccttaatgttctgtggcttgtagatgcatcactccaaaaatctwttatgctcattgataggagtcagttagaaaagaccacacattattaatatatgatttcctttatatgaagttttcagaattggtaaatccagagacagagagtagataaatggttgccaggggctggaggagagggaaatgaagaataactggggtgttgaaaatgttccaaaattagattgtagtgatagttgtgtaattctgtgaatattctaaaatttactgacatatacacattccatagatagatttaattgtacggcatgtgaattatacctcaataaagtttttttaaagaaattagtttttaaaaagcattcattacttataaaagatgatactgtattttaatgtagaaaaataatttttagactgtgtattagtttcctagggttgctgtaacagtattacaaactgggtggcttaaaacagaaatgtattgcctcawagttctggaggctagaagttctaagtcaggtgtcagcagggatggttccttctggaagttctgaaggagaatctgttccacgcctctctcttagcttccagtagttgctggcaatccttaatgttctgtggcttgtagatgcatcactccaaaaatct

SEQ ID NO: 290037 - DNA, 500 bp, Homo sapiens
gagaaaatatttgcaaaagacatttccaataaagaatttgtatccaaactgtacaagaactttcaaagcctagcaataagaaaacaaacactccaattttaaagatgggtaaaatatctgaacagatatttcatcaaagaagatatatgggtggtaaataaatatatgaaaatatgcccagaaccatatgtcattaggaaattgcaaatttaaacaacactgcacgcctataagaatggctaaaattcaaagaactgacaataccaaatgctgacaagaatgtggagcmaaaggaactctcatttattgctggtgaaaatgcaaaatggcacagccactttggaagatagtttctaccaaagctaaatatagctaaaccttgcaatatagcagttgtactagcaaataattatccaattgaattaaaaacatgtctatacagaaacatgtacatgattatttacatcagctttattcataatcactaaaaactgggattt

SEQ ID NO: 290038 - DNA, 576 bp, Homo sapiens
tcttcatttaaaacaggctatttaagtttaattatcctttggctgatcctccaggctgcaaactcatttatcagtacccatagatatagtgtaaaaaaataaagcattttatacttcttaaagatttatttcccaaactatttttaaatttaaaaatattttgataccacaatgtgaaagattacattgttgccttcaatttttgaccattctcmcattcacattctagccatgacctcattgcggatagagtgaactttcttatcccttgactttgggcgtggccatgtgaccccccttaatcaacagcctgtggcaagaaatggcaaaataccatttctgaacttacaacttaaaaagcctcttgttgtcccttttgcaatcatgtagctctgccattgccatgagaagcatatgcctagccttacacactggtatgaggaggatgagagacagagaggggaattgccccagccaccccagagatcttcagtgatgggataagctcccttagctgccccagcctgaagcagagtcacatggagaagcccaaactacatcaggagagctccactt

SEQ ID NO: 290039 - DNA, 630 bp, Homo sapiens
agcccaaagaaagccagtttaatatttgacaatgcttcctctatgactttcataccaaataagccaaatgtcactgttgcattggtgcattattaatgtcagacccaattctctataaaaccttatagataaatctatcctattttaatgtaagattctcataaaccttttataactctttacaattttttgttatacagcagatcagtgctctaagagaaatctgttgtgcttttatttcaatgttcaatttacagaaaaagtgattaataccsctttggttctagccaatatgttcacacacataatttcttttacaagattaatttttcacaaaccttccacaacttgctcaaaccttcagctttatcttatctaacttaaaacaatccttgaaccctttaatttaggcaaaaaaattcatatttccatgccttcttctaatcttttaccaaaagtatattcttcttttcttacatgtcttgcatgtaaaatcatttctttagtagtctcaattacatgttacaatgttaactcttagcaacttttacttttggtgaaaaccttgataagtaagggattttaattatgtactagatgtggagtctaggacatcagacagaagtgcag

SEQ ID NO: 290040 - DNA, 537 bp, Homo sapiens
tcttctgcctcagcctcctgagtagctggtactacaggcatccgccaccatgcccggctaacttttttttgtatttttagtagagacggggtttcaccatgttagccaggatggtctccatctcttgacctcatgatccgcccgcctcggcctcccaaagtgctgggattacaggtgtgagctatggcgccccgcctatttcctatttctcttatgttatttcattacatttttttttgcttctcatgtttcattgtgggtaagttcctcaatgtgacattccagtttactgtttttcatttgattgtgcctgtcagtaatttaccctatttattatgttttcaaaagttgaacaatcatatttttattttaaatgtttttattgktttttcctcatatttgcctattattatttttttctgtctgcttttgtgtcatgtaagttatgtgagtctgtaagcttgttagtttatggtaggctcaacaatttaacatatagatcatgaaatgtgattaataaatcataataattttatt

SEQ ID NO: 290041 - DNA, 628 bp, Homo sapiens
tattgggtcatttgtctccaagtggcctaaaaatgtatttagatatcaatagttgattagactcttatgtagagattcagccatctaagtcaaaagagtgactctaatatcagtctagaatttgctggcaaccacctcctcactccttactgtctcatttttacaactggacttgactattggatagacagacaccaagtctacagaagaataaatgatcagagtgtagtgagtttcagatgaacgtcctttcttccaatgttgtcagtacagagcaatgtactggtcacttggtttatgctgcagtttataagctgcttggattctctgttttggctcctaactgctcattttctatgattcttagtatcccaagagaagattggtatgagaattgcaccaaatatccaagtattaaaggtctagcagtcttacaattctcaaaatgttaatagaaaataaggtctaaagaatatctacaccttcatttgccctgttgtttataagctgagccaatgacatgctgcatgctctgttaccaaggtctccccaayattacaacatgcaaaaggtatatttagcactgttgtctttttgaatagacacatttctagaacctcgctataat

SEQ ID NO: 290042 - DNA, 648 bp, Homo sapiens
cttggattctctgttttggctcctaactgctcattttctatgattcttagtatcccaagagaagattggtatgagaattgcaccaaatatccaagtattaaaggtctagcagtcttacaattctcaaaatgttaatagaaaataaggtctaaagaatatctacaccttcatttgccctgttgtttataagctgagccaatgacatgctgcatgctctgttaccaaggtctccccaacattacaacatgcaaaaggtatatttagcactgttgtctttttgaatagacacatttctagaacctcgctataatactgttcactgtatctaacaattcccctgaaaatttggagaagttccaagagggttatgtgattaaataccaagagataatagagctgcaccaaagatggtctcatggtgcatgccccaagatcgagttgtatgtagargctccaggcaatttctttcaaagggttgaagatctcagtctacaaccagtagctctttccaccccttggcctctgctcatggggtttgtcattgattgcaactttgcccttgaatcctccacaaacagctttgttcagatcttttgttgccggtgtgattcacagctatcgatctttcaacagtctacaagtgtgcta

SEQ ID NO: 290043 - DNA, 596 bp, Homo sapiens
tttatgatttagtatcatttcacttttcatccaggaaaattgtcaaccattccaggaataaaaaataaaatgctatgtacagtagagtataacctctttaaattggcaatttgtagctgtttgataattcattcttaagcaaacctcaaccacttgctacctgctgtattcattagcctgtccatcttcctattccctgtagagcatgtggaactatgattgttagaaaaaggttgtgctgctgtgtatctttgctacttaatacatgtatctatgttcaccatgtatttttatgcaattgttttaraaagatgagcaagcccttttggaggggtgtctgggagatagttattaatcttttctggatgttttgtaccagatccattttagataaataatgcattacacactgtgtcatatgcagtagaattttttttaattcagctattgagcataatatgcaaactcaatatagaaactaccaaattttaggagcaacagctctctgtatgtggcacatttgcaaatatgggtatttcagggtgcaaattaaaatagtttgatgcaccatatcacactttctcaatgaaagggaa

SEQ ID NO: 290044 - DNA, 641 bp, Homo sapiens
gctaaacagatttgaggttgatttcattatttgcaatgactcagttcctattgtctcaaataatagaaattaagctttgtcagttagttattatgtgatacaattatagaggaaaaagctttctattactcacattatacatgtgtgcttgtctccaaaatcacttaagaaggtggcataggctgggagacatcagataaagatgttaggacaggaactagaggaatattgtctctaacactgaataagaaacatattacacatactacaaggacagaatccaggaaggaggcttggtctccatctcagatgtggaatacagaattgccacactgagtagaagatccagctaccaggaccagcagcaccagctgcagtcctttgcttctctcatcaaaactatgcccaaaaaaagtggacatagaacaagtacgccacacatttctgtcttggagttctatgaggagtaagtaccactccccattccccaccaccttccttgctttayttttctcaacagcacttaataccgtcagctgtaccaactatcttacttagttttttctttgttcatagttcatctcctcctgtaaaatgtaagttttagggtacagggatctttgtatttgcacatatgacca

SEQ ID NO: 290045 - DNA, 567 bp, Homo sapiens
actttcagtcatttcactacactgcttcctgatgtctcctcatacagatgctgggaaaaaaaatatacaacatacatttgtagagcactttaaaatgtacaaaactatctctcacctattatcccatcccatttgaacaatttctgcagtcattatcttgagccsgagactaaagtgcctaaaaaatgattctgcaggaagcatcagacacagattttcataggacaaacagaaaatgcagttgaagtgatggctaccattttcttccttcagtctagactgacagtggctagagactcttctggagcaactggaaaacttctccagtctctttattttctctctgctttttcgccgttacacaatcattgctgtccaactcatttcccaactactagataaattataatttaattaggaaattttctgttgcattatactaggttagatctgggctacgccaactgctgataaaaaaaagtcacctttgtcttaagactttttagctagtattttttacaagtaccctcatacctattgttttaacttggaaagtactgtgaaaat

SEQ ID NO: 290046 - DNA, 612 bp, Homo sapiens
ttttgtttctctggacatctctgaccattacagattttggtagcaagaagcagggtcctgctrtaacatatgcctaaaaatgtggaaatgaatttggaattaggtaattggtagaggctagtggagttttaaggcacatgtgagaaaaaggctagattgccttgatgggacagttggtaagcatgtggtcattaaaaataattctggtgaggtctcagatggaaatgaggaacatgttgttggaaactggaggaaaagtgatcctgttcaaaagtggcaaagaaccttgctgagttcttggtattttatcttagtaaattttatcatagtattttatcgtagtaaatatcagtattttctgaaaagttgaagttaattgtggaggaacttaaatatttagctgaagaggtttctaagcaaagtgttaaaggtgcagcctggtttctcttaactgcttacagtaaaatgcaagaaaacagacagataaattaaaggaattgttacacaaaaaggaaccaaaatgtgaatatttgaaaacgttagcctatccatattgcaagaaaagataaagtgtgctctggagagaccatcaagggtgtggctgaacaatca

SEQ ID NO: 290047 - DNA, 611 bp, Homo sapiens
taactagttcagcacctcatccatgacaagagctcagattcttttcttctcccttctttgccatacttagcaaacagcctgctccctttgtggtcaaagatgcttatagtagcaccaggtgtaaggtacatggatgtgctttggtcaaggataggccgaggcagacatcaggcctgtgtgactcaggcagcacacctctacttgttatagaacttgtttgtgtaagttmttgcttggctctgagacactgttgtctgtaaaatgtataattgccctgctgacaccgtgcacagggctcggcttgacatgacttgacattgtataggtgctcttgtgcaggcactggcacccagagagagagagtaaagctactggcccctctaaggaagaatgaccatctatcagagggacagcagggagccaggaaccagcttgtgcccaaagagagaaagagttaaggtgccgaccctgaaggtaaaagagaacaggccgtgtatctgtgcatgggagccaccagctcaagcagccgagacaaggcggactagtgtgagttgttgataagagagctgctgaataaagctatatttcacctacctacgcacccccgagtg

SEQ ID NO: 290048 - DNA, 604 bp, Homo sapiens
ctaaacatgatgagaataaaacatctacttcattctatggttttaaaatgctatttatatagcataatggaggtgactaatacatgttttctgaaataacttattttcagagaatggtttgctcactagatatatcagccttaattttccatctctatttcctaccaatttgtaaacctgaatatttagaactcacaactggcctccatctgaggaaatacaaaaacaaatcttcttagagtcaagatgttcttgagacccccaaaagaaaaggagcttgtctccaagcagaaggaatttgtatgaaaactctgccttcaacrttgttactcctgctagacactggtaagactatttcaggatttccatttatttaatagcagatagaaagtgttaacaatagtcaatattaatacaaacatgttctaatattgtaattataaaaatccagtggaaatcaattttttcaattcagcaatatcaattagtataatattagtagagatggtgaaaggggtaggtgattgcttttctctgtaaggatgcctgactctgcttaaataaataattcactgtgggccgggagcggtggctcacacctgta

SEQ ID NO: 290049 - DNA, 604 bp, Homo sapiens
ctaaacatgatgagaataaaacatctacttcattctatggttttaaaatgctatttatatagcataatggaggtgactaatacatgttttctgaaataacttattttcagagaatggtttgctcactagatatatcagccttaattttccatctctatttcctaccaatttgtaaacctgaatatttagaactcacaactggcctccatctgaggaaatacaaaaacaaatcttcttagagtcaagatgttcttgagacccccaaaagaaaaggagcttgtctccaagcagaaggaatttgtatgaaaactctgccttcaacattgttactcctgctagacactggtaagactatttcargatttccatttatttaatagcagatagaaagtgttaacaatagtcaatattaatacaaacatgttctaatattgtaattataaaaatccagtggaaatcaattttttcaattcagcaatatcaattagtataatattagtagagatggtgaaaggggtaggtgattgcttttctctgtaaggatgcctgactctgcttaaataaataattcactgtgggccgggagcggtggctcacacctgta

SEQ ID NO: 290050 - DNA, 583 bp, Homo sapiens
cccaccccttcctttcacaaactctgtaactgaggcctatgcacatgaacataaatcatttcagagtggtttgcatattggagagtgccataaatttcaaactctagcttttccatgcatcttttgtaaaaagtcctcacagatcttgtgtcttactgaccaagtaatacggcaagaattagaagataaaaggaaaactttgaaataatcatttgactctcagaaatacattgaatatcttggacccactaagcagaattcagagtagaaatcagtatttcatgttaatatatcctgtctctcaagaactaataaagttggaataggtggaccacacctccaatgtatttgaagataatagaatcagtgagacagcccagtatcatctccaactaaaatgggagccttttacaataagaattatttaaaccactgtaaacaactaggaatcaaagtaaggatagaaatcacattttgctctcctttcacaaagcagctgaagaatattatggtgctatttcaataagaataacaccacactgataacagactctaytcaaaatttaataaagcattactctct

SEQ ID NO: 290051 - DNA, 447 bp, Homo sapiens
aatgttggagcaacctgccaaatgacagaaacttggcaatgatgtaagctgcctcaattgagacatattattttgtacgagcactaacatttagaaaattgaaatctctttcagaaatcttttaattaggtagtctttttttgtttacatatgatattgttcatcctgtcactaatagaaattaacttgaatttcatttggaatgtacgttgataattattcttacttctcagataaatgcagcaaagggtagcaataaagaagttttgcattaaaatcaaagttggtgtaaccccaaaaactctgaacrttcattacagacccataagtgacataatttctaaagactacagccaggattgagtgccttgttggctattttttacttccaaagcacaaagaaagcctcctttagtcatggtaaactggcacctaacctacagtctt

SEQ ID NO: 290052 - DNA, 586 bp, Homo sapiens
cctatagacaggagcccacaaactttggatagtaaaaattctattcatttatctttttcaattttatccacctgggtaaattgagcaaaattcctctgcttttaattgttggcaaggaaaaataaagtcagatagacaataaagaattctttacttcaatccagataacaaaatcataatatcaggtattgtcaaaactcttcctttaagtgtcaagatactgtacatgttttctcatggacacttcaaatatcaattcttgtctcatattcagtcacaggacagtgactctgcttctatagtctatcttctttcacttctggtcataaaaatkagcttcatgatattgttttactttcacaaagaataaaaattacaacaaagttcttatctttatataaatagcctgaagtgaatagttaatcaattctttctgtttggggggttaacattacttattttgatataacatcttaaataaaatatcagaaacaaataaacaaaaaaatctactttgatgctgtaagaaaattcacaaatttaagtgatatttgttgactccttcatggagtcttttcaaaatttt

SEQ ID NO: 290053 - DNA, 586 bp, Homo sapiens
cctatagacaggagcccacaaactttggatagtaaaaattctattcatttatctttttcaattttatccacctgggtaaattgagcaaaattcctctgcttttaattgttggcaaggaaaaataaagtcagatagacaataaagaattctttacttcaatccagataacaaaatcataatatcaggtattgtcaaaactcttcctttaagtgtcaagatactgtacatgttttctcatggacacttcaaatatcaattcttgtctcatattcagtcacaggacagtgactctgcttctatagtctatcttctttcacttctggtcataaaaatgagcttcatgatattgttttactttcacaaagaataaaaattacaacaaagttcttatctttatataaatagcctgaagtgaatagttaatcaattctttctgtttggggggttaacattacttattttgatataacatcttaaataaaatatcagaaacaaayaaacaaaaaaatctactttgatgctgtaagaaaattcacaaatttaagtgatatttgttgactccttcatggagtcttttcaaaatttt

SEQ ID NO: 290054 - DNA, 630 bp, Homo sapiens
caacaaagtaaataaaatattttttgaaaaaagaatattaatcccaaacttcagcttcygctgaattcagaaggttgctttctttatggaaacattggtttcaattttatattatgcttcagtttgcaaagttagtcatattaaacatttcaaagaaataaagtatttaagtaacttagataattaaacagataatttgtgttgtcgaaatttgaatgatagaacttgacgtatcagaatttaatgttcaccttaaaaatgttataaacgtggagaccaattaaagaacttctattaggcactagaaattttatgctttaactctattttctaacaattttcttaatagctctatggagaaggccttattatacccccatttatagatgtgggacatgggctcagagaattaaggagcatgactagtcaaagaaagaatagagacaccatcatggattgtcctcattctaagcttttgagcttgccctgtccctaaatacgtttgagaaccatggctctactatgctgactatcctggtctcagctggtgataatgaatgaatgattgtgggccagggtaaaagtggaagcactgaccctcccatcccccacaccaggacagcagagatg

SEQ ID NO: 290055 - DNA, 630 bp, Homo sapiens
caacaaagtaaataaaatattttttgaaaaaagaatattaatcccaaacttcagcttccgctgaattcagaaggttgctttctttatggaaacattggtttcaattttatattatgcttcagtttgcaaagttagtcatattaaacatttcaaagaaataaagtatttaagtaacttagataattaaacagataatttgtgttgtcgaaatttgaatgatagaacttgacgtatcagaatttaatgttcaccttaaaaatgttataaacgtggagaccaattaaagaacttctattaggcactagaaattttatgctttaactctattttctaacaattttcttaatagctctatggagaaggccttattatacccccatttatagatgtgggacatgggctyagagaattaaggagcatgactagtcaaagaaagaatagagacaccatcatggattgtcctcattctaagcttttgagcttgccctgtccctaaatacgtttgagaaccatggctctactatgctgactatcctggtctcagctggtgataatgaatgaatgattgtgggccagggtaaaagtggaagcactgaccctcccatcccccacaccaggacagcagagatg

SEQ ID NO: 290056 - DNA, 619 bp, Homo sapiens
gttttcaactcagatttactatatatttggtaaactrggtgcattgatgtagtgaaaatgaaataatgaaaagagaaatgctggtaagacctggggtgaaagagatcaaagtttggctttgggactgtaattttactaactgtataatattgaataaattacctaagcctttgaaatcactttttctttggtaaagtgaacctaaaacacctacattatagactaattagaaggctcataggagatgttcagcatagtccaaggcaactagtaaatgcttataaaacagagtaattatttctctatgtgtatgtacagttataacctccaaaatatagttaagatatcatagaacaagcattagaagtagacagacaggatcccacatctgtcataaaccaggatcataactactatgatcctgggcaagtattttttaaaatatatatatttaatatactttttctaaatatatatgtgtatgcatatatatacatacatgcatatgcataatgcatatacacctattcaaatatataaatatatttagctatacacaattttatcactagtttaggtctaatgaattacaattctaactttatatctgaattcaaca

SEQ ID NO: 290057 - DNA, 527 bp, Homo sapiens
tatttttaattccctctggctttattttacttaaatggaggagtctacaaatatcacttggagataagctttataaagtttctgtaaaaattcataccttgccagatgttgtttcatctcctacccctaaaggcttcaaagtgaacatcaagaaaatgtcttcaaccacttctactacatctggggctcgggaattttctgaacatttcagtcaaagcttgacacctttagattttctatacaccaaacattatcaggttatgtgatttaccaatacgttattttcagaacaagaaggaatttggcaataatttagtttaaccctatatattgtatatgagaaaaccaagacgtgaaagygtgaagttccttgttcaggtcatagcctttgatactagtagaatgtgaagaattattcagaccagtatgtcttaggacacaccaccctgctccatggacagttggaactagacagattagatagatagatagatagatagatagatagatagatagatagatagata

SEQ ID NO: 290058 - DNA, 563 bp, Homo sapiens
tgagtctctctctctacacacacagacacacacacacaaatacgtagtttacagacactgaattaatgttggaaccttggtgggggagctcttagatatttcaaaattgtggtctttccattttaatctgagattccaatcagcccatacccttagtatcttagtgctacggccatggctgcaatgtgagcccagtgtctgtatgctagaaattgtattagaagcttgaaactctggctattacccaggctacaaatccatgcatatctttatttgaagggcactcagagcttattaacttacagccagcttttctttctccatgaacagtgcatcttccytcattcatgctggaccccaggagcctggcacgttgtttatacaagagtgtaaattcccatttggccaatgcggagctgcccttggaatctatgtctctagccacagttgtgtttatccttagtatctggtttcagttatcttttttgtgccattttggactgtgatctgtttgtttcatttactaagttttccattacagaatgatgaacagggccactaag

SEQ ID NO: 290059 - DNA, 606 bp, Homo sapiens
tcttctaaattacataaactatgtgtaaatatactgggaataggctaactgcatttcaagggtcagcactgaacctgttttactacatgaagggckgtttatgacaatcaatattgccactcatttttaatgatcttttatgtcctctgtgcctcacattaaatgcatcaacatgtttgatttttaatttagccttgttaaagtaatttagttcaaccttcactgaggaaacggtgttatttgcaatgacagtggatgctattcagcttcttagggcaaatggactgtcagccttattgtcaagtatcaaattgacatagtcatgaagctagtgaagaggggaatgttggtccccaacttttaacagtattgggtaagagggacttactgctttttagtttattttttattttcaattcatcacctattttcaatcctgtgaaagttttcattgttctcctcatcacttacgggagaaatctaagtcaattttcatccttctctctcccacatcacctatcccaaattgtgtccatccacgtttcatatctaacccaatgcccttatcctaattcaaacttttgccattttacaactgcgtagttt

SEQ ID NO: 290060 - DNA, 532 bp, Homo sapiens
agaactcaattcttaatattctgttcctctagaaccactcctggtaccaaagtctgtgttagtcagggttctctagagggaaaaaacctatgggatatatttttttacttaacacttaataaactcatatatacatatacatacagatatatatacacacacacatatatacacacacacacacacacatatatatatacacacacacayacacacacacacacatatggtattaactcacacaatcacaaggtcccacaataggccttctgcaggctgaggagcaaagagagccagtccaaattccaaaactgaagaacttggagtctgatgatggagggcgggaagcatccagcatgagagaaagatgtaggctgtgagtgtaggccaattcatgttttcctgcctgctttatatttgctggcagatgataagatggtgcctacctgggttaaaggtggaattgccttccccagcccactgactcaaatgttaatctcctttggcaacaccctcacaggcacacccagga

SEQ ID NO: 290061 - DNA, 660 bp, Homo sapiens
atttattttaatagtgattttcaaattgacaatattaatattttaattccatttttttaaaaaaagtttattttgaaaagtttctccttaactacaattctggagagatagcatattggttcaattaaagcaaaattggttaaagatggtcttatatatttgtctgagctacaatcctaagtcataaaaatctattgaaggggctcaatttagtctcaaaatacttacaaatctattgtttgcttaaaactctaattgaagcttctaaaggacagcccatttccacaaacaaagtgtttgtgagtttttttcaaaattctaaaaagaaaatcgtaaartatttcaagggaggaaatgattgaaacgttttatctcacagaagacatattaacacatttaaaatcctaattctaaagtcaaatctcttagtgaatgtcaaattttagttactgtgttttttattatgtaccataggatatttaattgtcttcatattagtgataaaaatgagtcataatcaataagctagtatttccttgtaaatacttgattaggtctggggctgttttccattattttattgtcattttgttagaatatttctaggaatggtgctacttcagtccaacataaattctaaaagcattaatttgattcatt

SEQ ID NO: 290062 - DNA, 660 bp, Homo sapiens
atttattttaatagtgattttcaaattgacaatattaatattttaattccatttttttaaaaaaagtttattttgaaaagtttctccttaactacaattctggagagatagcatattggttcaattaaagcaaaattggttaaagatggtcttatatatttgtctgagctacaatcctaagtcataaaaatctattgaaggggctcaatttagtctcaaaatacttacaaatctattgtttgcttaaaactctaattgaagcttctaaaggacagcccatttccacaaacaaagtgtttgtgagtttttttcaaaattctaaaaagaaaatcgtaaagtatttcaagggaggaaatgattgaaacgttttatctcacagaagacatattaacacatttaaaatcctaattctaaagtcaaatctcttagtgaatgtcaaattttagttaytgtgttttttattatgtaccataggatatttaattgtcttcatattagtgataaaaatgagtcataatcaataagctagtatttccttgtaaatacttgattaggtctggggctgttttccattattttattgtcattttgttagaatatttctaggaatggtgctacttcagtccaacataaattctaaaagcattaatttgattcatt

SEQ ID NO: 290063 - DNA, 465 bp, Homo sapiens
ctctgtcttcatttcttacttctttactgtctttctttgtggttaagttactttttcttggtatcatttttaaaattattcctttctattagagtttttgcattgtggttaccatgaggcttgcaaaaaatatcttatagataatagcatgttattttaaagagacgacaacttaccttagatcacaatgaaaagaataaaaacaaaaacaaaacaaaattctatgttttaactccrtcttccccacactttgccttttagttttctcaatttacatatttttatattgcctatttattaacagattgttgtagataatataacttttgatagttttgttttgggcttcatactagagttatgaatgggtttcataccacaattccagtatcagagtattctggttttgtccacgtacttaatttgaccagtgggtgttatacctttaattttttgtgtgtgcac

SEQ ID NO: 290064 - DNA, 524 bp, Homo sapiens
aggggaactactgtattgggtacttactaagtacatagaagttatcttggagatactgatttactagtcttatgtaagcagctgagataccartttggtttcctatgacatctcttcatggtgaaagccagccatttttcatccattgaaatgggtgggaacaacacagtaatattaagtcagtagttttctgagtgatgttctgtgtagatcaaaaagtcttttgcagcattttcaccaagcccctgaagagctcagctctgcttgaaaaaattctgcaaacgagtacagtgctacaagactttcagtcaatacagtcaatcatttccactgggtaatactctttaaaggaatagctaatgagtgtatgaaagccaaactaggagaagtgtgtggctggtagactgagttgagctatgcagtggcaccgacatttcatccactaaaggtagaagagttcaatttacattgttttcagctatgcacgatggtaacttctaattagagtgtcatgggtattgtca

SEQ ID NO: 290065 - DNA, 524 bp, Homo sapiens
aggggaactactgtattgggtacttactaagtacatagaagttatcttggagatactgatttactagtcttatgtaagcagctgagataccaatttggtttcctatgacatctcttcatggtgaaagccagccatttttcatccattgaaatgggtgggaacaacacagtaatattaagtcagtagttttctgagtgatgttctgtgtagatcaaaaagtcttttgcagcattttcaccaagcccctgaagagctcagctctgcttgaaaaaattctgcaaaygagtacagtgctacaagactttcagtcaatacagtcaatcatttccactgggtaatactctttaaaggaatagctaatgagtgtatgaaagccaaactaggagaagtgtgtggctggtagactgagttgagctatgcagtggcaccgacatttcatccactaaaggtagaagagttcaatttacattgttttcagctatgcacgatggtaacttctaattagagtgtcatgggtattgtca

SEQ ID NO: 290066 - DNA, 524 bp, Homo sapiens
aggggaactactgtattgggtacttactaagtacatagaagttatcttggagatactgatttactagtcttatgtaagcagctgagataccaatttggtttcctatgacatctcttcatggtgaaagccagccatttttcatccattgaaatgggtgggaacaacacagtaatattaagtcagtagttttctgagtgatgttctgtgtagatcaaaaagtcttttgcagcattttcaccaagcccctgaagagctcagctctgcttgaaaaaattctgcaaacgagtacagtgctacaagactttcagtcaatacagtcaatcatttccactgggtaatactctttaaaggaatagctaatgagtgtatgaaagcyaaactaggagaagtgtgtggctggtagactgagttgagctatgcagtggcaccgacatttcatccactaaaggtagaagagttcaatttacattgttttcagctatgcacgatggtaacttctaattagagtgtcatgggtattgtca

SEQ ID NO: 290067 - DNA, 524 bp, Homo sapiens
aggggaactactgtattgggtacttactaagtacatagaagttatcttggagatactgatttactagtcttatgtaagcagctgagataccaatttggtttcctatgacatctcttcatggtgaaagccagccatttttcatccattgaaatgggtgggaacaacacagtaatattaagtcagtagttttctgagtgatgttctgtgtagatcaaaaagtcttttgcagcattttcaccaagcccctgaagagctcagctctgcttgaaaaaattctgcaaacgagtacagtgctacaagactttcagtcaatacagtcaatcatttccactgggtaatactctttaaaggaatagctaatgagtgtatgaaagccaaactaggagaagtgtgtggctggtagactgagttgagctatgcagtggcaccgacatttcatcyactaaaggtagaagagttcaatttacattgttttcagctatgcacgatggtaacttctaattagagtgtcatgggtattgtca

SEQ ID NO: 290068 - DNA, 590 bp, Homo sapiens
ccagctgaaaattgcgtgtgtttaatggaaaggcatccccttaaagaatagctgagaaaaggtcttagcaccaaaaacaaaacaacagagaaggagtgagaaggcaaacatgggggtatgggcacccggcattctcattagcatacygcagttaaccacttttgttgatgcacatcaaagagttgtcaaattctctgccttgaaaaagatgtcttccatgattagagaattttcatcctcgctcactcaggtgttttgcaaaaacacacagctatttgtcactctcaagttgagaacttttgtcactttggaaagcaaaaacggataatgtcagagaccactgaagagagtcaaaggcaagttttactcactaatttgcacatctgtcaaggaatatagccagctttccacagggtccgatggagcaaaggccaattttcccattctacttttcctgcatcattttgtctatgtctgatgtgtggagggtgccacaaaaggtttggaactcaagtccctcaggaaaagcttcataaagatcctcgtgtaacacccgcatacccaacaaacaacaaacaaaacaacaactt

SEQ ID NO: 290069 - DNA, 590 bp, Homo sapiens
ccagctgaaaattgcgtgtgtttaatggaaaggcatccccttaaagaatagctgagaaaaggtcttagcaccaaaaacaaaacaacagagaaggagtgagaaggcaaacatgggggtatgggcacccggcattctcattagcataccgcagttaaccacttttgttgatgcacatcaaagagttgtcaaattctctgccttgaaaaagatgtcttccatgattagagaattttcaycctcgctcactcaggtgttttgcaaaaacacacagctatttgtcactctcaagttgagaacttttgtcactttggaaagcaaaaacggataatgtcagagaccactgaagagagtcaaaggcaagttttactcactaatttgcacatctgtcaaggaatatagccagctttccacagggtccgatggagcaaaggccaattttcccattctacttttcctgcatcattttgtctatgtctgatgtgtggagggtgccacaaaaggtttggaactcaagtccctcaggaaaagcttcataaagatcctcgtgtaacacccgcatacccaacaaacaacaaacaaaacaacaactt

SEQ ID NO: 290070 - DNA, 590 bp, Homo sapiens
ccagctgaaaattgcgtgtgtttaatggaaaggcatccccttaaagaatagctgagaaaaggtcttagcaccaaaaacaaaacaacagagaaggagtgagaaggcaaacatgggggtatgggcacccggcattctcattagcataccgcagttaaccacttttgttgatgcacatcaaagagttgtcaaattctctgccttgaaaaagatgtcttccatgattagagaattttcatcctcgctcactcaggtgttttgcaaaaacacacagctatttgtcactctcaagttgagaacttttgtcactttggaaagcaaaaacggataatgtcagagaccactgaagagagtcaaaggcaagttttactcactaatttgcacatctgtcaaggaatatagccagctttccacagggtccgatggagcaaaggccaattttcccattctacttttcctgcatcattttgtctatgtctgatgtgtggagggtgccacaaaaggtttggaactcaagtccctcaggaaaagcttcataaagatcctcgtgtaacacccrcatacccaacaaacaacaaacaaaacaacaactt

SEQ ID NO: 290071 - DNA, 547 bp, Homo sapiens
cattattacaacccttgcgtgtgtaaagcatcttctcctcagcagcctcacctcctacacgatgatggyctgtaaagtcagggcatccacaaagtgatttattcccccttttacctttaatatggcgctatagaccacattttggccattgcagtgcagtagctcaggtctacaatcccagtgttttgggaaaccagaacagcaggatcccttgaggccagaagttaaagaccagcctttaaacaaaacaaaacaaaacaaaacaaaacaaaaaaatttcattagccaggtgtgggggtgtgtgcctgtagtcccaggtactcaggaggctgaggcaggaggatcacttgagccaaggagtttgaggctgcagtgagctatcattgtaccactgcactccagcctgggtgactagtgagacctgtctctcaaaaagaaaaaggaaaaaaaaaatgagtatattttgcctaaggtacccaaacactagaaacatattccaaagtgaaatatagcagtataatgcaagttttccaaaggaaggggggca

SEQ ID NO: 290072 - DNA, 547 bp, Homo sapiens
cattattacaacccttgcgtgtgtaaagcatcttctcctcagcagcctcacctcctacacgatgatggtctgtaaagtcagggcatccacaaagtgatttattcccccttttacctttaatatggcgctatagaccacattttggccattgcagtgcagtagctcaggtctacaatcccagtgttttgggaaaccagaacagcaggatcccttgaggccagaagttaaagaccagcctttaaacaaaacaaaacaaaacaaaacaaaacaaaaaaatttcattagccaggtgtgggggtgtgtgcctgtagtcccaggtactcaggaggctgaggcaggaggatcacttgagccaaggagtttgaggctgcagtgagctatcattgtaccactgcactccagcctgggtgacyagtgagacctgtctctcaaaaagaaaaaggaaaaaaaaaatgagtatattttgcctaaggtacccaaacactagaaacatattccaaagtgaaatatagcagtataatgcaagttttccaaaggaaggggggca

SEQ ID NO: 290073 - DNA, 625 bp, Homo sapiens
cctcattacatgttgtatttatatttaaacatgcatttccaggccaggcacggtggctcaggcctgtaatcccagcactttgggaggccgaggtgggtagatcacaaggtcaggagttcgagatcagcctgaccaacatggtgaaacctcgtctctattaaaaatacaaaaattagccggacatggggacgmgcgcctgtaatcccagctactcaggaggctgaggcaggagaatagcttgaacctgggaggcggaggttgcagtgaaccgagatcccaccactgcactccagcctgggcaacaaagcgagactccatctctaaataaataaataaaatgcatttcctaggttaatgaaaacaaatcagcatgtcgtagggattgtgctgggctagaaaaggtcagtcctcaaagtcctgaggggaaggacgagaccaagaaaccaacatgtaaagtcataattaaatttaacatgagagaggctattatagaaacgttggtcaaagcagtctgagcgctcataggaagtagcatcttagctatccagggaactctttaaaaaagtatatcaatttaaatatactgtaggtttcataataaatcaaatttcaaattttagatatt

SEQ ID NO: 290074 - DNA, 545 bp, Homo sapiens
ggagaatagtgttgctgttggacgatgctttggatgacattatatgctcaacattcaaggacaagcttatctaaaatagagaatataatatattcttatatttaatcttatctcttgttataagtaaaatgtttattcagaaacagaatgcttgttcctcggtactgcaaggaaaaatcaccattcagccaaaaagttttctcagcaaggcaaatttactttctgcagaaagggtgctcctcgcagatggaataatggcgagaaggagggaagcaatttttatcccttaaagtgcttgcccttgctactgtgtcctgtctccaytggctggagccagaccacacaatctaaactgaacctgattgactaacaacttaaaattttctaaatagataaaagcaatgtacaacaaacgaaaagtggaagttgtttatgaaaagacttagaaaagtagtaacattcctaaataaggaaggggtataggctgcgagctgggacatgcctgtgagcatgtccagcacagatatcttggttaaagtacaagg

SEQ ID NO: 290075 - DNA, 625 bp, Homo sapiens
cctcattacatgttgtatttatatttaaacatgcatttccaggccaggcacggtggctcaggcctgtaatcccagcactttgggaggccgaggtgggtagatcacaaggtcaggagttcgagatcagcctgaccaacatggtgaaacctcgtctctattaaaaatacaaaaattagccggacatggggacgcgcgcctgtaatcccagctactcaggaggctgaggcaggagaatagcttgaacctgggaggcggaggttgcagtgaaccgagatcccaccactgcactccagcctgggcaacaaagcgagactccatctctaaataaataaataaaatgcatttcctaggttaatgaaaacaaatcagcatgtcgtagggattgtgctgggctagaaaaggtcagtcctcaaagtcctgaggggaaggamgagaccaagaaaccaacatgtaaagtcataattaaatttaacatgagagaggctattatagaaacgttggtcaaagcagtctgagcgctcataggaagtagcatcttagctatccagggaactctttaaaaaagtatatcaatttaaatatactgtaggtttcataataaatcaaatttcaaattttagatatt

SEQ ID NO: 290076 - DNA, 625 bp, Homo sapiens
cctcattacatgttgtatttatatttaaacatgcatttccaggccaggcacggtggctcaggcctgtaatcccagcactttgggaggccgaggtgggtagatcacaaggtcaggagttcgagatcagcctgaccaacatggtgaaacctcgtctctattaaaaatacaaaaattagccggacatggggacgcgcgcctgtaatcccagctactcaggaggctgaggcaggagaatagcttgaacctgggaggcggaggttgcagtgaaccgagatcccaccactgcactccagcctgggcaacaaagcgagactccatctctaaataaataaataaaatgcatttcctaggttaatgaaaacaaatcagcatgtcgtagggattgtgctgggctagaaaaggtcagtcctcaaagtcctgaggggaaggacgagaccaagaaaccaacatgtaaagtcataattaaatttaacatgagagaggctattatagaaacgttggtcaaagcagtctgagmgctcataggaagtagcatcttagctatccagggaactctttaaaaaagtatatcaatttaaatatactgtaggtttcataataaatcaaatttcaaattttagatatt

SEQ ID NO: 290077 - DNA, 574 bp, Homo sapiens
cctctgcaaacagcatgcccagttctcctgttcgttattctctcattccaagtacccaccccctgcccccgcttttgctgcgccttaacctgtctaaacatacttagacatgccacagccccagtccacattcctttccttatgtgggaataggttagctttctagtgccctgtaggtgaccccttccttctccccctctctcctctatcacacacctaccttaactaagaaagtttaaatgtttacccaattgagaccagtttacattgtgcrgtccaagcccaggcaatggggggaaagacacagaggcagaatctgcattaggaagaaaacccccactcttctttgctccgcatgctctcgtgacagccaggtttatgagcagcacccttctgcggaagtaaatttaccttgctgagaaattctttgttttactgctcattttctttgtgaccctgagctcttacttctgacattagcaagataacatataaaagataaagaatatttatttcctggtggccacgagagcactctaaacaaacaaacagtgctagaaactaaaagcattca

SEQ ID NO: 290078 - DNA, 571 bp, Homo sapiens
cctgtttggtggtctcttcacacagacaccgtgacaacatcaatcattatatgtaagaagtaattggtttagtctggaaagggggtgacaacttgaagcaaaggcaggaagactcgaagtgtggggggaacttccaggtcacaaataggtgagacacaaatggttgcattcttttgagtttctgatgagcttttccaaggaaggccatcagatacgcatctatcttagtgaggggagggataacttggaatagaatgggaggcaggtttgccctgagcagtttccarctggagtttcccttagtgattttggaggcccaagatattttcctttcacatttcaccctttttcttttttaaaatcttttggagaaatgattttacaaaaaaacaaacaaacaaacaaaaaacaaaacagactctctggtttcagatttcatctgatttttcattgctaggatggtttactcctagatgggtaggtcccgaaagttcattttagcaggttgtgaagtctcctgtcctgtgaaaagaaaattagggggaggaaggggggaaaagctacaaacaaa

SEQ ID NO: 290079 - DNA, 571 bp, Homo sapiens
cctgtttggtggtctcttcacacagacaccgtgacaacatcaatcattatatgtaagaagtaattggtttagtctggaaagggggtgacaacttgaagcaaaggcaggaagactcgaagtgtggggggaacttccaggtcacaaataggtgagacacaaatggttgcattcttttgagtttctgatgagcttttccaaggaaggccatcagatacgcatctatcttagtgaggggagggataacttggaatagaatgggaggcaggtttgccctgagcagtttccaactggagtttcccttagtgattttggaggcccaagatattttcctttcacatttcaccctttttcttttttaaaatcttttggagaaatgattttacaaaaaaacaaacaaacaaacaaaaaacaaaacagactctctggtttcagatttcatctgatytttcattgctaggatggtttactcctagatgggtaggtcccgaaagttcattttagcaggttgtgaagtctcctgtcctgtgaaaagaaaattagggggaggaaggggggaaaagctacaaacaaa

SEQ ID NO: 290080 - DNA, 534 bp, Homo sapiens
atcttgctgttaaccttcaagctgtccttgttcattcctgaacacaggccaagctaattttgggaaaaacttagtttatagtttagctttgaaacaaagacgataacagttctttccyaaaacaaacctctttattgtctgtggactagactgcctaaagccacaggattagaagttatgataatcttactaaatttgagatacagctattttcattaaacgcatatcaatgtctcacttattaaaaattacacaagcaaagatcattctgtttggggctgggtttacagttttgtaacccatgccaaattttgacacctcatagtatttggcaaggataagtatgaaactgcttgattaataaatgcaaacaaaaatgtgtgctggcaattcttaagacacttataatattactttaccaataattttaaagccagcttatttattaaagattttacttaagttatataacctttaaaagcatgtgactagtcttttttggtatttgatttaagcactttttttaaagccaat

SEQ ID NO: 290081 - DNA, 588 bp, Homo sapiens
tggtaatattttaggaatatattactcctaatatcacagtgggtgtacaccrtgtgaaattatttgtaatatcctaaggagatattactactaatatcacagtgagtgtacaccctgtggtattatttgtaacattctaagaagatattacttttaatatcacagtgggtttacaccaagtctgtgcaccttgttttattatctgtgctatcctagggaaatattactcctaatatcacagtgaatgtacaccatgtgtgtataccctgtgatattatttgtaatatcctagggagatattactcctaataccacagtgagtgtacaccctgtgatattatttgtacgtatcctggggatatattactgctaatatcacgttaagcatataccatttgtgtaaaccctgtaatgtaatttgtaatatcctagggagatattactcctaatatcacagtaggtgtacatcatgagtatacaccttctgtgatattaggaataatatttaggagtaaataattaggagtattatttgtaatatcttaggaagatactactcctaatatcacagtgggtgtacaccatgtg

SEQ ID NO: 290082 - DNA, 588 bp, Homo sapiens
tggtaatattttaggaatatattactcctaatatcacagtgggtgtacaccatgtgaaattatttgtaatatcctaaggagatattactactaatatcacagtgagtgtacaccctgtggtattatttgtaacattctaagaagatattacttttaatatcacagtgggtttacaccaagtctgtgcaccttgttttattatctgtgctatcctagggaaatattactcctaatatcacagtgaatgtacaycatgtgtgtataccctgtgatattatttgtaatatcctagggagatattactcctaataccacagtgagtgtacaccctgtgatattatttgtacgtatcctggggatatattactgctaatatcacgttaagcatataccatttgtgtaaaccctgtaatgtaatttgtaatatcctagggagatattactcctaatatcacagtaggtgtacatcatgagtatacaccttctgtgatattaggaataatatttaggagtaaataattaggagtattatttgtaatatcttaggaagatactactcctaatatcacagtgggtgtacaccatgtg

SEQ ID NO: 290083 - DNA, 597 bp, Homo sapiens
aagttatgataatcttactaaatttgagatacagctattttcattaaacrcatatcaatgtctcacttattaaaaattacacaagcaaagatcattctgtttggggctgggtttacagttttgtaacccatgccaaattttgacacctcatagtatttggcaaggataagtatgaaactgcttgattaataaatgcaaacaaaaatgtgtgctggcaattcttaagacacttataatattactttaccaataattttaaagccagcttatttattaaagattttacttaagttatataacctttaaaagcatgtgactagtcttttttggtatttgatttaagcactttttttaaagccaattaattagagctcttttgtgtatttttagtagtgaaacattgtgtacacaacacctaaaaacgtataaagatgtattaggcatgccgatggaggtacattttatagatttataaccccaccccctttttcctattatagactttcagattcttgataatgtgttttacaaccctaggtagttgtcagctaaatagccttaagtttgcacattaaaggaaacaactcagatgaaaat

SEQ ID NO: 290084 - DNA, 588 bp, Homo sapiens
tggtaatattttaggaatatattactcctaatatcacagtgggtgtacaccatgtgaaattatttgtaatatcctaaggagatattactactaatatcacagtgagtgtacaccctgtggtattatttgtaacattctaagaagatattacttttaatatcacagtgggtttacaccaagtctgtgcaccttgttttattatctgtgctatcctagggaaatattactcctaatatcacagtgaatgtacaccatgtgtgtataccctgtgatattatttgtaatatcctagggagatattactcctaataccacagtgagtgtacaccctgtgatattatttgtacgtatcctggggatatattactgctaatatcacrttaagcatataccatttgtgtaaaccctgtaatgtaatttgtaatatcctagggagatattactcctaatatcacagtaggtgtacatcatgagtatacaccttctgtgatattaggaataatatttaggagtaaataattaggagtattatttgtaatatcttaggaagatactactcctaatatcacagtgggtgtacaccatgtg

SEQ ID NO: 290085 - DNA, 597 bp, Homo sapiens
aagttatgataatcttactaaatttgagatacagctattttcattaaacgcatatcaatgtctcacttattaaaaattacacaagcaaagatcattctgtttggggctgggtttacagttttgtaacccatgccaaattttgacacctcatagtatttggcaaggataagtatgaaactgcttgattaataaatgcaaacaaaaatgtgtgctggcaattcttaagacacttataatattactttaccaataattttaaagccagcttatttattaaagattttacttaagttatataacctttaaaagcatgtgactagtcttttttggtatttgatttaagcactttttttaaagccaattaattagagctcttttgtgtattkttagtagtgaaacattgtgtacacaacacctaaaaacgtataaagatgtattaggcatgccgatggaggtacattttatagatttataaccccaccccctttttcctattatagactttcagattcttgataatgtgttttacaaccctaggtagttgtcagctaaatagccttaagtttgcacattaaaggaaacaactcagatgaaaat

SEQ ID NO: 290086 - DNA, 597 bp, Homo sapiens
aagttatgataatcttactaaatttgagatacagctattttcattaaacgcatatcaatgtctcacttattaaaaattacacaagcaaagatcattctgtttggggctgggtttacagttttgtaacccatgccaaattttgacacctcatagtatttggcaaggataagtatgaaactgcttgattaataaatgcaaacaaaaatgtgtgctggcaattcttaagacacttataatattactttaccaataattttaaagccagcttatttattaaagattttacttaagttatataacctttaaaagcatgtgactagtcttttttggtatttgatttaagcactttttttaaagccaattaattagagctcttttgtgtatttttagtagtgaaacattgtgtacacaacacctaaaaacrtataaagatgtattaggcatgccgatggaggtacattttatagatttataaccccaccccctttttcctattatagactttcagattcttgataatgtgttttacaaccctaggtagttgtcagctaaatagccttaagtttgcacattaaaggaaacaactcagatgaaaat

SEQ ID NO: 290087 - DNA, 597 bp, Homo sapiens
aagttatgataatcttactaaatttgagatacagctattttcattaaacgcatatcaatgtctcacttattaaaaattacacaagcaaagatcattctgtttggggctgggtttacagttttgtaacccatgccaaattttgacacctcatagtatttggcaaggataagtatgaaactgcttgattaataaatgcaaacaaaaatgtgtgctggcaattcttaagacacttataatattactttaccaataattttaaagccagcttatttattaaagattttacttaagttatataacctttaaaagcatgtgactagtcttttttggtatttgatttaagcactttttttaaagccaattaattagagctcttttgtgtatttttagtagtgaaacattgtgtacacaacacctaaaaacgtataaagaygtattaggcatgccgatggaggtacattttatagatttataaccccaccccctttttcctattatagactttcagattcttgataatgtgttttacaaccctaggtagttgtcagctaaatagccttaagtttgcacattaaaggaaacaactcagatgaaaat

SEQ ID NO: 290088 - DNA, 1014 bp, Homo sapiens
aaaaaaaaaaggtggtgtctatttgaagctcttaattttcctccaatctattggggctgaaatggaatgttttcctgcctttggaatccctaaatcactggatttcttagatcatttttgttttgttttgttttgttgagatagggtctcactatgtggcccaggctggtctcgaactcctggactcaaacgatcctcccgcctcagccttmtgagtagctggggctagatcactgttttcttaataacataaactactcctttggtgtgaagcaagcattcattgtgagccagtcgattctaaaatcacagtatgtcagcatgccatctcgattttattttttggttcatttcttaaatactcaaagatgctttgtcctccacgacacagccaaatcctggaaggagctgtctatacctactctttcatagtaccttctacttattccatgaccttcaaactggtcaccatgaaccacgatgaatwagtaattttgtactctaaggacagattttttttttttaattcacattacttcatgttggagaagattcattattatttataaagcagaacaagccccaaagccaatccctttccagtctcacwgtcactttctgcattacaaacaccactaaatttccaaatgagtaggctaattctttccttacagagccaaaaaccttgcttggagttttgctaacttaggtgacagcactttgttcaaaataattctttttttttttttccgagaaagagtctcactctcactctgttgcccaggctagagtgcagtggtgtgatctcgatattgcagccttggcctcccgggttcaagtgattctcccacctcagtctcccgagtagctgggactataggcgtgtaccaccacaccgggctaatttttgtatttttagtagagatggggtttcaccacgttggccacgctggtcttgaactcctggcctcaagtgatctgctcaccttggcatcccaaagtgctgagattaca

SEQ ID NO: 290089 - DNA, 375 bp, Homo sapiens
ggccaacccatgcagaagaaatgtctatgaaagcggtcaaagggaaaaaccttcctcagatgatgtaacattttaaattggaaaggaataaaataaagacttgaggacttttttttttttatcgkgagtactacttttctcttttttaaggaagtaccaaagatgaccaggaaaatccacttttgcagagctactcattttttgataattgggtgtgttaaattaagtttaacttaaagcttcctctttgcatattttaagttctgcttaaaggtttcttcttcgtgtatagtgaactgtaaactaactggatgtgtaaatagactgtaatctgctcttgtaccaaacaccaagttttggtcaagcaaagacagc

SEQ ID NO: 290090 - DNA, 375 bp, Homo sapiens
ggccaacccatgcagaagaaatgtctatgaaagcggtcaaagggaaaaaccttcctcagatgatgtaacattttaaattggaaaggaataaaataaagacttgaggacttttttttttttatcgtgagtactacttttctcttttttaaggaagtaccaaagatgaccaggaaaatccacttttgcagagctactcattttttgataattgggtgtgttaaattaagttkaacttaaagcttcctctttgcatattttaagttctgcttaaaggtttcttcttcgtgtatagtgaactgtaaactaactggatgtgtaaatagactgtaatctgctcttgtaccaaacaccaagttttggtcaagcaaagacagc

SEQ ID NO: 290091 - DNA, 601 bp, Homo sapiens
atttgcaaattattcatctgacaagggattaataaccagattatataaagaactcaaacaactcaataggaaaaaatgtattacgccatttaaaaatgggcaaagatctgaatagacatttttcaagagaagacatactaatggcaacaggtatataaaaaggtgctcaacatcaccgatcatgagagaaatgcaaatcaaaactacaatgaaatatcatttcactctagtgataatggcatttgttcaaaagacaggcaataaggaatattggcaagaatgtctaaagtttttcttaacaggtggaagtgatgaggcatatccttcctacctcttcctgaatttttccttcagtatttatttagctactattatgtctcttgctagttatctctttatcataygtgttctgcctcccctaaggtcatatttatgctaggtctgaaggagagaggtgcaaagtgaaagacaagacttccactcctatgtaagccatggtttcctttcctcctctacccccaccaaccaaagcagaacacaatgtctggcacatagatgctcataaatactaattgtagctggtttgaaagtattactgtgg

SEQ ID NO: 290092 - DNA, 629 bp, Homo sapiens
ggatattttgaagaattctgacttgatgcagttatgtcagttccagcatcttaccttgcatgagccttgrgccatgtcacctgttctcaaatgggcatcccagccctaaacccctaagcagctgtatccagattcaacacccctctgggtgatagcagtatttgctctcattcttattggtttagctttggattctggcttcatttctggcctgcattaagaagaacagttatgtcttacaggtatatgaggtacattcttgtgatggctgccatggcttatattttggaactgaaagaggatctgggtaaattcagactgacatttttaatgtaaattaattcactcacaaaccatttattggccacctatcatgttcctgactttgtcataggtgctggggcacaacaataaataacactgtgtctttgctcctgtatagtttacattctcatgggaaagacaaaacaaacaataagtaaaacatatagtaaaatcagctggagcgatgaagaaaattaaagcaggagaatgggagagagagggactggtttgggtcatgtgctttattagggtggcaaaggaaacctctctgaggagtgacctttgagcacaggcttacatgcagt

SEQ ID NO: 290093 - DNA, 514 bp, Homo sapiens
aaaatttttgttaccaaaaagatacatgcacttgtatgttcattgcagccctattcacaacagcaatagaatcaacmtatgtgcccatcaacagtgggattgtataaagaaaccgtggtacatatacaccatgaaatactacatgtccataaaaataatgaaatcatgttctttgtaggccattatcctaaacaaattaacacgagaacaaaaaacgaaatactgcatattctcaattataagtgggagctaaatattgaatacacattgacataaacgtagcaacgataaacactcaggacgactagatgggagagggaagcacgggctaaaaattcacctattacgtactatgtttaccacctgggtgatgggaccatcatcagcattatgcaatatacccatgtaacaaccccgcacatttaccctctgaatccaaaacaaaaagaacaacaacaaaaatgcctcttctactataatgtaaaatctatgaagggaagaatttaaaaaactt

SEQ ID NO: 290094 - DNA, 514 bp, Homo sapiens
aaaatttttgttaccaaaaagatacatgcacttgtatgttcattgcagccctattcacaacagcaatagaatcaacctakgtgcccatcaacagtgggattgtataaagaaaccgtggtacatatacaccatgaaatactacatgtccataaaaataatgaaatcatgttctttgtaggccattatcctaaacaaattaacacgagaacaaaaaacgaaatactgcatattctcaattataagtgggagctaaatattgaatacacattgacataaacgtagcaacgataaacactcaggacgactagatgggagagggaagcacgggctaaaaattcacctattacgtactatgtttaccacctgggtgatgggaccatcatcagcattatgcaatatacccatgtaacaaccccgcacatttaccctctgaatccaaaacaaaaagaacaacaacaaaaatgcctcttctactataatgtaaaatctatgaagggaagaatttaaaaaactt

SEQ ID NO: 290095 - DNA, 539 bp, Homo sapiens
taagtatatgaatagggaagaggtatttggaattagtattaagtattatttggtttgatattgtgtgggagacctagatcaatgactccaggtcctaaagtgctggacctgaggatataaagattgctgtggttttgaaatggagaattcgctcattgtctcttttgatctgaaaacaggcagtgaagtatgtaagtagagcatgcarcactatgcttagcaaatcatgactagaaactggagatctgtcacatttgtagggagaaggatcgtgtatatatggaagaaataagagaggcaaattgatggcaaaaaaagggaaggacaaacagggtcagattctagtctttgccctttttgttgagagtgagtgtttttttcctgaaagagcatcaaggactacacaggtaaaacttgaactgtaatatttaaaattccttttgcctaataacttctcttttttttgtcaagtaaacaaaagtctaccctaacagtttcgattccctactttcccttgctggaagtacattaaattgctc

SEQ ID NO: 290096 - DNA, 539 bp, Homo sapiens
taagtatatgaatagggaagaggtatttggaattagtattaagtattatttggtttgatattgtgtgggagacctagatcaatgactccaggtcctaaagtgctggacctgaggatataaagattgctgtggttttgaaatggagaattcgctcattgtctcttttgatctgaaaacaggcagtgaagtatgtaagtagagcatgcagcactatgcttagcaaatcatgactagaaactggagatctgtcacatttgtagggagaaggatsgtgtatatatggaagaaataagagaggcaaattgatggcaaaaaaagggaaggacaaacagggtcagattctagtctttgccctttttgttgagagtgagtgtttttttcctgaaagagcatcaaggactacacaggtaaaacttgaactgtaatatttaaaattccttttgcctaataacttctcttttttttgtcaagtaaacaaaagtctaccctaacagtttcgattccctactttcccttgctggaagtacattaaattgctc

SEQ ID NO: 290097 - DNA, 1171 bp, Homo sapiens
ttgccttctgttaaaccagacgttaaagagatttgtgaagagtaaaacaatattactctctttactcaaaaatttttttgttttgggaaatgtagttatttttcataaaaaaagttattttgttagcatgtaatgggcttattactttctcaattaataaatatttttaaattttcctagttttaatttctaatattgttagctgttgctagatatgacccacatacacaaaagatcaggattttcagtaatttttaagaatatgaaggggttctgaaaccamagaaaatttgaggagcactgactgttgttcatctgtcttatttaaatcttacagcatcctaattccgttttcctactttaattgtcttcatagaacttatccttatctgacattatgtcatatatttatttgcgttttatctgttttctccataagccagttatttgcctacttgctctcagatccgttctctatctttcctcagcaaaacgtgtttcccaggctcctttgccaaagacagtgggaagcattggcaggagactggaggagggaagcagacagccagwcagaaaacacagaagtagcagagctgagatgactactccggtcttctgattccaaattccaaattcattcttctaagcgatttcccaaaacgggaaawgggtttatcttctatttatgggaagtgatagtggtattctatttagagaacttatataaaatcttactttaaaataaataatatttcaaaaagtaagcttaatttaaagaaaataatcaagaaagtctggtatatttttacaaatataccaaatgaccttgctctaaaatacatctactttccagcaagccaaagtgaaacaatttgaaataagtggcatttactgaccactccctaaagttcacacaaaagaggtagtactctaacttaaatatacaaggtgaagaaatagcttactcagcctgttgggcttcctcttctacactcttgggaaatgccctccgtgttaaccaagaattctcaggccttggagggagttttccattctcagtaaactgagattgcagttgcggaaattaagaggtatctgtccagcacttcattcccttaaggtcaggatctgtgcttttaataatgacaattagctaacatatacaattaag

SEQ ID NO: 290098 - DNA, 591 bp, Homo sapiens
taggcttaggaactgggcatgtctctggtcattgagacaactgaaataatcagccatcttgatcatctgatctattactcctgtttgtatctggttatgtatgaaggtcagaaaagtaaagctgtccactaagactgacagttttttagtgtccattctttacttgattctttattgacgatcgctgcaattcttcagagagatattactatcaaaaagattttttttccgagtagagtattgaaattccaataataagattaaatktcttgctgatataaaactcataagttagaaaaccctagtgggttgactctgaagcctgtccttttaatgactgtggttgttaaagttggtacactttgctcttagtttatagcttttattaaaattctttaatgggaagagcataaggtaaatatcaattattaaagagacctgagtttctctataataattataataataggcttcgtgtctaatataatcaccatttctttcttccttatgccattcatatctgtgtccagctccatgccagaaactgaactgtgaatgggattttgataattattattctaattaatcgta

SEQ ID NO: 290099 - DNA, 602 bp, Homo sapiens
atgcacaggattattattaaaaataagcagccagaaactgagtagacccttccaaatacgcagaaaagttgacctgctttttggtctgggttcagcgatctgagcaaggtagytatgctagaaatgtcttttccaccttcacccttgccacctaaaatttcacccttttgaaatgccaactcttctgggctaagttagacattgggcaatagaaagaatgcctgttctgatggaggggtggagaaatcttaagagaatctttaagtaataaaaaaaaaaagtgcaatatgatgtgaaagaaatgtagaaacattagacttttttacagtgttgtttaggccagcctccaatacatttgacgggaataactcatgcttacctgtaagcaccatttatgaggccagtcaaccatgtgtgaggtcgtgttgatcgctgtagctttgttagtagttgggagttgagacagtggaggagttttcagcagaaagtgagaggagatggcttgtcttgttttcttctgtatccctggccaaaaacagtgcttcatctaccaagagctacttaaatgccagtggaaggaataaatgacggaacactggccc

SEQ ID NO: 290100 - DNA, 447 bp, Homo sapiens
tatttaactttttaaagtcccagcttcttcatttgaagaactagtataagaatcattcctatctaatagtgtgtaataggaatgaaatgatgtaatatgcaaagattttagctcagtaaatgacacattatacatgagctcacyaataaccaacattatcccaggcagtaatttaatacactttgtcaaatgagtatgtgggagatgtcaactttacatagactttattacattttataaggtaaaatgtcagacacaattcagagttaaaccaaactaagttatacatactttcattgcatacgttatagtaattcgtgcaaaaaggaattgagatttgttcttaattttccttgttctgaccaataacgaacgtgtgggtgtcatcctatcaagagattcacttgaatgctcctggataggtatatttgtttggaaaacatgcag

SEQ ID NO: 290101 - DNA, 582 bp, Homo sapiens
atagtttatcaattttaaaaataagctttcagctttatagatttgtttgtattctattttatttatctctgctctctttatagttctttttgkttttttcctgctttcttccagtaaaacttacttcttcttttctaacttattggaatggataatcatgtcattaatttcttgcctttcttattttagtgctgtactcatttaaggatataaatttccctctaatctatgcttaagtctggttattttctactgctctaattttaagttcacttatccatgtgggtccaatatactcaaaacttatatattgagttcaatttttttttaaatttctagttgattcttttttaaagggactccaattctctagtaaaatttattatcaggtcatctcctttaaaaaaatattaatcacagttatttcaaaagcctaagtcaaagaactccaatgtttggatcaattttgtttttgttttggggcggctccacagatggcagcccccaacacatccaaaatccactgggatgttaatattgatgatgcaacacacccaccaagagggtccagacaggtttatt

SEQ ID NO: 290102 - DNA, 627 bp, Homo sapiens
aaaccctaatactcagaatcactaatgtgatcatccatcagttcagcaccagagtgccttcctttcacccttgagtaaattgctcytctcaattaatccttccccttgcacaatgctgcattcagcaatatttcctgagaggcccatgtgctgatgctggtctagttgctggcaacataaccatgaacaaatcagaggaagttcctgctctcatgggacatgcattctcttgggaaagataagaaagggagaggtaagtgtatactatgtaaggcagaactatgtgctgtagcacaaaattaaacagagtaggatgataaagaatgaaggaggagggcatgtgaggtcgggaaagtcttcccttctaagatgactattaaatggagatgtgaagggagtggaagaacattccagactgtgaaaaaaacaagtccaaagaccccagggcagcagtgtgctttgcaagtttggtagaaaacaaagagaccagtgtgactggagccgagaatgagaggaaaaattacagagattaaattgagagctgggtataaagattttgtagtttactcagatattgagttcattggaaggttttgaacaaaggcatgacataatctgacttccatt

SEQ ID NO: 290103 - DNA, 623 bp, Homo sapiens
ctcttaataactatttagatataaagctagggttttaaaattaactatttataaccttatttaatgcttctgacaaccttatgaagtagccattattttttacttcaaattacagatgagaaacctgaggttttaagaagtttaataattgacccaatgtcacatagctagaaagaggcagaatccatgcataagcccgagtatcccagactccagagaccacattcttagccactgtgccacactgcccccaggctcttattcaaggtatctgtacagcctaaagtctgatccttcatgtaattatttagtacagtttctgtccccaaagtaattgtttaaaaatgttagctgctgatgttggcgtaattgtataggcattaaatttcatatctctgaaatcacattttagagaacagctttattttactgcacataccctgaaagtaatacatattactgcagaagaattcttatatactagtggaacagatcatgcaaactgctttcaggtactgatattgggcagtraactaagctcacccaccagcttcacgagtcttcacctgcacagtttgcatcgttcatatctgttcaaattactaaatgccgcagactttcaa

SEQ ID NO: 290104 - DNA, 610 bp, Homo sapiens
cgttggccagccaggatggacacaaacacctggctggcatggtgtttacagaataggcacaggaaaagtgtgccaatttggatgtaaattgcaaattaggtttttttaagctctacgtaacagagatacttgaagtcacctacttgaaaagacttgactttttgagatacttgattgtggggatgaaaacagcctctttagctgagtgttgtgttgggataggtcccatcacagsctatttttagtttgcaaaactattgatccataaagtactctactgccccactgccgttaacattctccaagtctccagtctctgtgcagaaactgtcatgacattttacagaaaagctgagcaccttttctcatacaggcagcctgaaatccatttttaaagatacattacaggctttaccatccaactaccttgtattctaaaattaagttataaaccactcttttcaaaaaaaaaattaagtaataaaataataagaaaatgtgtgtgggtaagggaaggtgatagagctcatgtgtcttggattcccctcctatcaacttggtaagagaatcatttggttgggatactttacagatttggaagggcaggttt

SEQ ID NO: 290105 - DNA, 602 bp, Homo sapiens
ttgttgaaacgtcctgttgaaaagggttttaagtctgggtgacatcctttctgaagtgtcttcttcctccctttttaaaaaagccttacatgatttttttttccagaacacaatttggaaagcttccaaggatatcaaagaaaactagaagctaaagagaatgcttaagtatcaaatatgaaaacaaggaattcatgcgatgttttgtaatcacctctatrtgggatattcagtggagaacagacttaaaagattatattctagcatatagtctatcacttgaatagatcaatgtaataagcaggtcgagtgtgcacataacacaatctattttcttcaagatagtgtgtttctatgtgtggtatctgagttggttgcatcatactcatctggatagctttataaacatgcaagcctaaaccttacctggggcataatgaattagtctctcttgagtggaggaagctgggaacatgcattctacaaacttcccaagtcactcataggagctctggagtcagaaaaatcctgtgctaagtgcattaagaattcttaacagagtcaagaatgcccttacaaggctgctatggcaacagtccaca

SEQ ID NO: 290106 - DNA, 585 bp, Homo sapiens
gaattcagaggtacttcgatttgacagatttgacatatcatgagataaagtacaagcaaagcaaaaataactaaaaatagctccatggtaatgctaagtataagaattaaattgaagattgaaagactcaaaaatctcaagcatgctacatgattttaccagctctctcaaataaagccgggctcagtaaatgctctggtgactgaaacaatgctaagattgggctttgttcttcagacatggaattcatcaccttcgtggtgatgaatcattggtgaggccctaattattaaacaagatgtcgaatcaaagctatcctcctctatttgcgtgaggatttctgtacttagaattgagtcctgccacattcttataatggtgcgtgcatatgggtagcaggtatacacaccaataaataatgtggctagtatgattctggaaattacaatgccagttagaaattattcagaatggaataaaatatttaaracccctgctataaatcttagccaggaaataaattttcatgagaccagtgattaacccaatagcaaaacggaatttatatcaaccattcattaatcc

SEQ ID NO: 290107 - DNA, 539 bp, Homo sapiens
aagttgctaaatatagagttaccatatgatccagtaattccatttctgggcataatccaagagataggaaaacacacatccacacacacttgcacatgaatgttcatacagcattattcacaacagccaaaaattgcaragaacacaaatgtctgctgcctgatgaatagaaaagcaaaatatggtatagccatgcaatggaatataattcagcaataaaaaagaatgaagtagtaatgcatgctacaacatagacgaaccttaaaaacattgtgctaagtaaaggaagatagtcacaaaagactgtgtattgtacaatttcatttatattacatatccagaacaggcaaatctagagacagaaagtagattagtgactgtctatggctggaggaaagggtagagggaataggaaatgattggtaatgggtaaccaatttattttggggaagataaaagtgtctacatgtagagagtgctgatggttgcacaactctgaactcattaaattgtatgctttgagtgaattttatggcata

SEQ ID NO: 290108 - DNA, 618 bp, Homo sapiens
aacccgtaaattatttggaattaacatcactgtcaaaacagattattggatctccattatattgaagacrgttctttcttctggttcatgcaggacagatagaacattctttctcacagttcaggctggagctgctgggataagatcaactagaattccaagagggctgcagtgatgcttggaggctggcagagagagggagagaaggcatcaatgctgggtcaaggacagaccaataagagtaaacctgttggtttagaaagaaggaaaaatatgaaagaggttcacagaatcatgaaggggagataaaggaagaggcagaagatgaaaaaggagaatagggcttcattcctgaaacctcagtccatgagctacaagtccctaaaagtatgactccacgaccattagcactttgagacagtgggtaaaacaatgaattctagctcctctgcgtacagcaatgtgccttggggcaagccatttatcctttagccaaactgcctagaaaatatatactagataaatgtttattttcttccatctttctgagcttggtttattgactgtaaaatagcaatatgaagatctacttcacaggactattaatgtaatcaaatt

SEQ ID NO: 290109 - DNA, 303 bp, Homo sapiens
aataagagtaaacctgttggtttagaaagaaggaaaaatatgaaagaggttcacagaatcatgaaggggagataaaggaagaggcagaagatgaaaaaggagaatagggcttcattcctgaaacctcagtccatgagctacaagtccctaaaagtatgactccacgaccattagcactttgagacagtgggtaaaacaatgaattytagctcctctgcgtacagcaatgtgccttggggcaagccatttatcctttagccaaactgcctagaaaatatatactagataaatgtttattttctt

SEQ ID NO: 290110 - DNA, 1030 bp, Homo sapiens
gctacaagtccctaaaagtatgactccacgaccattagcactttgagacagtgggtaaaacaatgaattctagctcctctgcgtacagcaatgtgccttggggcaagccatttatcctttagccaaactgcctagaaaatatatactagataaatgtttattttcttccatctttctgagcttggtttattgactgtaaaatagcaatatgaagatctacttcacaggactattaatgtaatcaaattcaataatgtattggaaatgcttcatcacaagcttcatagggtggaatcagaactcattcctcttgttaccccaaatcctgagtatccacccgtggagactgttgattttgaaagcagcctgaacatgaaaactcccaaacattctaaggaaatccatcctaataactccacacagaatgagaataaagaaaaataagatttaaccagagccgaatgattctttccctgtgctccataacccttctaaggatctgcaatccctacctcaattaatctaggcatttcaactacttgaaaaactaccaatacmttaaaatgtacaaagtactaccttaatgaacaaagwtcgggggtgggaggatgcagagaaatccagaaaaaagcaagataaacagctgtgccttgcaggataataaaacaatggaagcaatcaatcgtgcagccaggggctgggatagagctaaggtggaatcagagtaccaatgactcggcatctctcacacaacwtgatttcagtaaggatcaaaaatctgaagacgctccccaccctttaatagatgaactgagtgctttttgcaaggatttgccattctgtgaattacccagtttgttagcctggttccagttacagattttttgtttgtttgtttgtttgttttacggagtcttggcttcttcagtactgtgtttaaattgcttaaatgtctttgaaatgttctgtgaaaattcacaaagttccattagtttgatgattcaccctcctcccctatctctcctacacc

SEQ ID NO: 290111 - DNA, 588 bp, Homo sapiens
ctctcactatctcagatgtattgctctggaaattctcttctctccctcccatttcatcattttttctttctacaaattcagcataaaacatgctattattttttgcatcttaaaaaaaattttggattccattttycccagcagctattgacatacttctctagttcactttacagcaaaactccaaaagcattgtctccactctctgtctttcatttattgcctctccttctctcataaaccctttccaataagtcttttaccttcattccactggatctacactattcttgtcaggttaccaatgatctccatggtgctagatccaatggtaagttctcagtcctcatcttactctacctattatttgacataactgatgagtctcctctttgatatctttcttcacttggcttttcctaccccacactttccttgctttcctgtcatctcagtattgctgcttctctatctcctttgctgcctcttcttctacccaaactctaaatgttggcatgccccagggatcagtctttggtctccttcttttctgtatccacacttactcttacttcattgggtgatcta

SEQ ID NO: 290112 - DNA, 538 bp, Homo sapiens
gggctcttacttcacaccatccacagaaataaactcaaaatggattaaaaacttaaatgtgaaacctgaaattataaacttctagaaaaaacataggggaaaagcttcttgacactggtgtggatgatttcttttaatatgacaccaaagtgaaggcaacgaaagcaaaaatagtcaagttggattgaatcaaactaaaaaaccttctgctcagcaaatgaaacaatcaaaacagtgaagaaggcacctactaaatgggagaaagtatttgcaaactatacatctgacaaggggttaatacccaaaatatataaggaactcgagcaactcrgtagcaagaaaacaacctggttttaaaatgaccaaaggtcttgaaaagacatttctcaaaagaagacatacaaatggctgacaggtatatggaaaaaaaaaatgttcgtttatcaccaatcatcagggaaatacaaattaaaactacaatgtgttaactcctcacacctgttaagatggatattacaaaataaacaaaaaataacaa

SEQ ID NO: 290113 - DNA, 595 bp, Homo sapiens
acttagtcaaatgcctcacagcagtgcagatacactattctgcagtatcctcccatagcccagcacagtaagccttttccaaaggaatggaagttcgtaaggcatggcttattctttgtgaactcttgttagctgctggttttcatcacttttatttattatttgtttatttatttgtttgtttttgagatagggttttgctctgtcacccaggctggagtacagtggcgtggtcatagctcactgcagccytgaacccttgggctcaagggatcctcctgtttcagcctctccagtaactgggactacgggtgcatgccaccatgtccagctactgttttttgttttgttttgttttggtgggggggtggtagagacagggtctcaccatgttgcccaggctaatctgaaactcctgagctcaagcgatcctgccactttggtctcccaaagtgtagggattacaggcgtgagccaccatgcctgggcatcacttttttttttaatacatgctccaggtgaccatgttaataattcctcttaaaacgttgccctgtattaacataaactcattggttaatagcataaaaaatcc

SEQ ID NO: 290114 - DNA, 1052 bp, Homo sapiens
acttagtcaaatgcctcacagcagtgcagatacactattctgcagtatcctcccatagcccagcacagtaagccttttccaaaggaatggaagttcgtaaggcatggcttattctttgtgaactcttgttagctgctggttttcatcacttttatttattatttgtttatttatttgtttgtttttgagatagggttttgctctgtcacccaggctggagtacagtggcgtggtcatagctcactgcagccttgaacccttgggctcaagggatcctcctgtttcagcctctccagtaactgggactacgggtgcatgccaccatgtccagctactgttttttgttttgttttgttttggtgggggggtggtagagacagggtctcaccatgttgcccaggctaatctgaaactcctgagctcaagcgatcctgccactttggtctcccaaagtgtagggattacaggcgtgagccaccatgcctgggcatcacttttttttttaatacatgctccaggtgaccatgttaataattcctcttaaaackttgccctgtattaacataaactcattggttaatagcataaaaaatccwagtgtgagaaatacagctataggggttggggacattgatgctaggtccagggagcattaaacagtaaaacagtgttgctgttatgcaaataatcaccaaccttgcactcttgcatgagagctcagcttgtccagaaaatgaagttttatctttagatttgcagaatggagatttctgtaatgtttttaaaggcaatcccacggagttatctggcttccctagaatcacaagaaaaggactgtcactggtaaagtggactcttctgcacactttattttattcctaaatgggccagtcaagtctagggttgaggtggccttagaaacttttcagggtcagcattcaggcatcaacaaagcagttctgatttagagaactcttgagataagaaccagctacattcatgatttcccaaacttggccaatttwgagtaaatacatgcaaacagtcttgta

SEQ ID NO: 290115 - DNA, 1200 bp, Homo sapiens
gtttcaccatatgaatttgggggaagacacaaacattcagtccatagcatcatgtggttctgcatggtatggtgtgccgcttccttgtaccccttctttaggaaatgtaagtaatgaaaatctttcaatggtattagcctctgatgagtatcatcactcaatcacctctatgataaatttaaatcccgcagatacaaccactgatacaaactcccattcactggtgcttctgaacatgatgctaaatataaatgtgcagtctctgttctctccatgtccatcttccagtgagcctggaccgggctttgaacagttaggttaacatgacatctgacaggggaaaaaggattttctcagctataccagggtgtcagaaaaggtttatctcacaaggaaccagtataattatgcctgcctttccttttrtgctaagaaaaagagggaggttcctgacatacagtagagctctcctaacttctcacagccaggatgtaggcccaggccctccttaccccctgcctgggccactatggtggcctctgaactggcctccctgaccctcacatawtggtaaaacacagaatcaggttaacagttagagacagcgtctcccaacttcccagaaaagtagtgggagatgagtcatgggggtggaggtgaagaagccagtggagggtagggaagaaaggaaagcattgcatattgaagatgggggccacatgcaagtgaccaccagaattgggaggcattttcaaggacttcaagaccagtggaactggatgtagaaacatgttccctggcccacaaatgcaaagcaacttaaaacagagtaaacctgcccatctgaaagaaggtaggaagatttcaatccctcctgctctctaacatcaggtcataaatgcaagttatgagaaaatagcactgccattatgagatgtcttttaaagagaatactatgtacacctccatactagataattttgaagtctctataaaatgagtgtttgtctaggaaaatttaattactgatattgacacaggaaaagtaacaacatawaaagaatggaaaaatgactgtggaataaattaagaaagctgtccataaaataacgccatcctctaaaaagcaagtgcaatgcaaatatagcaaaaagttgagattttaaagattatgaattttcccctcttgtgctgattagt

SEQ ID NO: 290116 - DNA, 521 bp, Homo sapiens
agagaatactatgtacacctccatactagataattttgaagtctctataaaatgagtgtttgtctaggaaaatttaattactgatattgacacaggaaaagtaacaacatataaagaatggaaaaatgactgtggaataaattaagaaagctgtccataaaataacgccatcctctaaaaagcaagtgcaatgcaaatatagcaaaaagttgagattttaaagattatgaattttcccctcttgtgctgattagtatttcctaatctttctaggactgcttttgtaataatataaaagtaaatactattattaattttaaggttyttaaatacaaaataaaatgatatgagaccccattttgtccattagaatggcagaatagatctttttactaccaataattcttctttttttttcttgagacagagtctcgctctgtcaccaggctggagtgcagtggtgcgatctcggctcaccgtaacctccgcctcgtgggttcaggcgattctccttgcctcag

SEQ ID NO: 290117 - DNA, 521 bp, Homo sapiens
agagaatactatgtacacctccatactagataattttgaagtctctataaaatgagtgtttgtctaggaaaatttaattactgatattgacacaggaaaagtaacaacatataaagaatggaaaaatgactgtggaataaattaagaaagctgtccataaaataacgccatcctctaaaaagcaagtgcaatgcaaatatagcaaaaagttgagattttaaagattatgaattttcccctcttgtgctgattagtatttcctaatctttctaggactgcttttgtaataatataaaagtaaatactattattaattttaaggttcttaaatacaaaataaaatgatatgagaycccattttgtccattagaatggcagaatagatctttttactaccaataattcttctttttttttcttgagacagagtctcgctctgtcaccaggctggagtgcagtggtgcgatctcggctcaccgtaacctccgcctcgtgggttcaggcgattctccttgcctcag

SEQ ID NO: 290118 - DNA, 1060 bp, Homo sapiens
agagaatactatgtacacctccatactagataattttgaagtctctataaaatgagtgtttgtctaggaaaatttaattactgatattgacacaggaaaagtaacaacatataaagaatggaaaaatgactgtggaataaattaagaaagctgtccataaaataacgccatcctctaaaaagcaagtgcaatgcaaatatagcaaaaagttgagattttaaagattatgaattttcccctcttgtgctgattagtatttcctaatctttctaggactgcttttgtaataatataaaagtaaatactattattaattttaaggttcttaaatacaaaataaaatgatatgagacmccattttgtccattagaatggcagaatagatctttttactaccaataattcttctttttttttcttgagacagagtctcgctctgtcaccaggctggagtgcagtggtgcgatctcggctcaccgtaacctccgcctcgtgggttcaggcgattctccttgcctcagwtggcagtaaagtgtcttagtcaataataacttaattgtacattttaaaataaaccaaagagtgtaattggattgttgtwacacaaaggataaatgcttgaggggatggataccccattctccatgatgtgattattatgcattacatacctgtatcaaaacatctcatgtatcccataaatatatacacctattatgtactcacaaatattaaacattttttttaaaaagtcttgaaaaagggacagctttttcaaatttgcagtgtaccatttggggtggccccaaagctgtttatagagtctattgtcttcctagactgtgagcccttcaggagaataattaggctggcataatgatctgtgaagatctgtgaagaattgggctggcatagccattggcacacagaaataaaagtcaacacttactgaaaatttactatgagttagacatgttctagggacttgtcactatttaatttattaaagttatttaattctcataacagccatatgagatcactgcaattgtcatcccat

SEQ ID NO: 290119 - DNA, 592 bp, Homo sapiens
tcctgggaacattaaatgaattagtatgtcaagtccttaaaatacagtgactagcatatagtaaatattcacaagtatcattattatatcacctctcctttgtaataggagactrtgctttgggtacttaattttggagactctgcagtttactctgataaggaagatgaccttcttttatatccttcattccctgaaaaatatactaaactcccatttgtcaccctcgctagattttctaggctctaaaccaagcttgtctaacctaacttattttgttgctgttgttctggttttttgtttgtttgtttgttttaggctttaagcagcctgaagccatggtttatagtttctgtctctagtgataagcagaaaagagggatgaggaaggggctttactggcccaatcggaagcagaaactaagaacccatgactgtattctctcccttggacacccctacaaccatagattgcatcttatcatcagaatatccttcctcagagtgtgcttgaccctggattcattctgtctgtgaacatcatcttttttcctcacaacttgctttgttgaggttggtctcatatacaatc

SEQ ID NO: 290120 - DNA, 592 bp, Homo sapiens
tcctgggaacattaaatgaattagtatgtcaagtccttaaaatacagtgactagcatatagtaaatattcacaagtatcattattatatcacctctcctttgtaataggagactatgctttgggtacttaattttggagactctgcagtttactctgataaggaagatgaccttcttttatatccttcattccctgaaaaatatactaaactcccatttgtcaccctygctagattttctaggctctaaaccaagcttgtctaacctaacttattttgttgctgttgttctggttttttgtttgtttgtttgttttaggctttaagcagcctgaagccatggtttatagtttctgtctctagtgataagcagaaaagagggatgaggaaggggctttactggcccaatcggaagcagaaactaagaacccatgactgtattctctcccttggacacccctacaaccatagattgcatcttatcatcagaatatccttcctcagagtgtgcttgaccctggattcattctgtctgtgaacatcatcttttttcctcacaacttgctttgttgaggttggtctcatatacaatc

SEQ ID NO: 290121 - DNA, 586 bp, Homo sapiens
aagtctgcaagggcaaccacagtgccttttccatacttttcatctcactcatgctcttcacttagtaggtgatcaataaatatttattgacaatctctgtgaaattctgccacacagaaagtgttttatagtatttgaaaatgttttaatgcatatatgccatgctctcataattagatttacattctttcaggataggtgcactttatttatatgagtgagatggagtcttgctctgttgcccaggctggagtgcagtggcgtgatcttggctcactggaacctccacctcccgggttcaagcgattctcctgccttagcctcccatgtagctgggattrcaggcatgcgccaccaggcccggctaatttttgtatttttagtagggacggggtttcactgtgttggccaggctggtctcaaactcctggtcttaagtggaatcccctgcctcggcctcccaaagtgctgggattacaggcatgagccaccgcgcctggccaagagcaatcttttatacgttgctatccccacagttactcatgcagtgctgttgaatgaatggcctctgattgaataaccaggt

SEQ ID NO: 290122 - DNA, 545 bp, Homo sapiens
tccagggtagttaggtgaaggctctgcagggctcaatagtgacagcagggatgcagcctccttcttgcttcctactctgcggtagtcattaacatcatgacattcttccatatgatgatcactccatgattgcaagatagctgctgtgcctctgggtattatatctttgtttcaaacaaggagaagggagagtttaaaggatcaaagtcttttcttatgtggctctggctctgcattttattgggcaggaaagtgctcctcagggtattttgtttggagccatggatttgtgtcaggctgctactctcttagcagtaagggaggttggggaaacaagcatttcacctttctggcatgtactatagaaactgcaaggcacaaggggtatgtgaatgacacaggccagcaaatcccagccacyttttgtgttagattgttgtgcgtaatttttttcatcaaatttgttttttataattttttcataaaatttagcttttaatttttttttttgagacagtatcttgctgtgttgcccaggctggagt

SEQ ID NO: 290123 - DNA, 543 bp, Homo sapiens
tggttatttccgttaatcaataacaaaaataaaaggagagtgtaaagagactcactcctctccgtctttttctggccaaaatctgggaagatgtagttggggacatggaacctagagccgaactcaagtttctgaaaagagaaaaagaacaacacaaaaactgaaatcgccgttaaacgaggagaggtgatctgagaggtcgcccccacaccctccccgcactcagactttttttgccacttgggctggaaggcacctaggggttccctggccgcaggctgccgccagcctgcgacgcgcggaggtcagcgcagggcaccggcgcgccaagggtcmtagcccgctgtcaccgcggcaggcgtgcgctcgcctcccgctctggctcggctccgctccgccgccgccagctcacccattctcgtgcgcactctccttctccacctcgatggtctcgtccagctcgctgtcagaggagctgtactctgggtgagctcgctttatgctggctccctgggggttcctggggagggtcggcgcggcggg

SEQ ID NO: 290124 - DNA, 543 bp, Homo sapiens
tggttatttccgttaatcaataacaaaaataaaaggagagtgtaaagagactcactcctctccgtctttttctggccaaaatctgggaagatgtagttggggacatggaacctagagccgaactcaagtttctgaaaagagaaaaagaacaacacaaaaactgaaatcgccgttaaacgaggagaggtgatctgagaggtcgcccccacaccctccccgcactcagactttttttgccacttgggctggaaggcacctaggggttccctggccgcaggctgccgccagcctgcgacgcgcggaggtcagcgcagggcaccggcgcgccaagggtcatagcccgctgtcaccgcggcaggcstgcgctcgcctcccgctctggctcggctccgctccgccgccgccagctcacccattctcgtgcgcactctccttctccacctcgatggtctcgtccagctcgctgtcagaggagctgtactctgggtgagctcgctttatgctggctccctgggggttcctggggagggtcggcgcggcggg

SEQ ID NO: 290125 - DNA, 598 bp, Homo sapiens
caggctcaggtcattctcctatctcatcctttcaagtagctgagactacagttactccccagcatgcctggctactttttgtatttttttttgtagaaaagatatttcaccttgtttcccaggctggtctcgaactcctcccttcaagtgatctgcctgccctggcctcccaaagtgttgggattacaggcatgagccaccgtgcccggcctgcttcttcatctttgagattaggcagctggactggtcagcagtttcagttctcatacaaagtactatgagaagtttgtcaaatatttctaatatttcagaaacttcttagaaatgatccattttccccaaatatgctgcagagggctgaccaacatatcatgtttgctgttttggggcccaaataagctactggattatgagcttcttgtggtcattcatgttcatgtttccagggcttatcatagggtctgacccaatgartaattcgggtaatgttttccaaactaagctatagaaaaccagtatgaagagacaactcatttcatgctcattggaagctcatgtgtttcacatcaagctcaggcattgtttgtagcagtattag

SEQ ID NO: 290126 - DNA, 538 bp, Homo sapiens
tgtctctttggttggtgtttttaatacttgggttttaagggggttggctctgacagtggctgttcaatgtgtaaagctccttaacaccagtcccataacagatcacacttcctggaaggggtaaagctatttaagaacatgcgtcttgcagagggattcatggaacctgtcttctgaaatgatatccagctttaaccatggtagtttcttctggaggcataaaaccatgattttcttctttctcagtaattcatgctaaaccaagaagccatttgggaatagaaaaagtcaagagtgtttatggttttgttcagatgaggaatcaacaatcaggaaaatgaagagagttaacagcaaactgatttttaatacttctctggtggacttccctygtacagtttgatttcccactatttcccccaagtaaatgcttgtgctctgggcatgctgatctgtccacagcagttcacaaagtgtgagtttccagaccaggtgcaccagcatcactagggagcttgccagaatgcaactcatcaca

SEQ ID NO: 290127 - DNA, 395 bp, Homo sapiens
agaagggccatctctaacagaagacatgaaactctgagaaatagaaaacaggaggctcatctaattaaactctcagggctctgatgacaggcacactcctgttttgctctgcatctccaatgcctatcacacaaaggcacttgctactggcgggaagggtractgactgctcagaaaaggattgaggcgtctttctcaaacatcccatttctcaatgcttattccaatttctggaaacggacacagctaaactactcacagctatactgtatattttcaaaggaaaggttttttgaggggataggtgggagacagcatagagagtacaaaagtgaaagacagcatttttcagaagaactccagcacagctcctcctgactcatgggaatgaatat

SEQ ID NO: 290128 - DNA, 658 bp, Homo sapiens
ggggcagctgcagcgccatccagacccttctgtggcatgaccttggctgtgtttccagcacctggactccgttggcacctggacatcgcccaatcttagttctccatgcacattctyggttttgcaagttattccgtctccttccaataacttccttttctgcttaaattaactagaaatagtttctgttgtttgcaaccatggatcctgactagccctgcctccttaaagttgtttcaatggatgagtgactatttaacaagtgagctatgctcatggcatcttattaaaagggactgaaagtaggagagcttcttgattgaagcttgaaggactttcacttctccagctgctggcagtggggaacaggaaaggaggtcattgaaagccagtaggaggtggtggtctatgttaaatcacccatgtgactttgctacagctcccacaccctcagcttaaaaccaggtactgacaggcatcctgtggatttatttttccagctctgccctacctgtttttctggctctcctttccagcccaaagtcaggccccacagctggatgaaataaaatggttatattgggaggccttaaaattagcatggttcaatatgtcttaaagttggggccattccctgggtaaagaatggaggttttct

SEQ ID NO: 290129 - DNA, 556 bp, Homo sapiens
atgaacactaagtctcggcacccccttctcagcagcaggctgagatgtgcagctctcaggttcttgggcatctctgtctctgccatcagaagcatgactcaaagacattcacgtaattaatatgtcacagaaggattggacaagagcagtttatcaaaggtgctgtttccaagagatacaaggaaagctacamatttttagatattaaatgggcaccgattaaggcaatgcacttgttctaatctcagattaagaaatagtatttttagtagacacctataatgaaaggttttggggaacttttcagactgacgttggagtcatttagttaagaggagacaccaaaactggacacagagacaggatagaaatcctaccatgaaaataacaagggaggactgtgagatcccaactagtcatttgggttgagcagaacatctcaaactccgttttccacctcatccatttatcagatttccaaatgtattatatgagcactttcacttatttctttttcatttgtaaaagtatttgttatatatatttaaggtgtaca

SEQ ID NO: 290130 - DNA, 545 bp, Homo sapiens
gatgacactgattacaattgtaatcaaagctgaggacagggaccatggctgctttcgcccaccactgaatcctcagtgcctagaccagagccttgccgaagtttaaatgatttaacttcaatgattgagttgaatgattaagtgatcaattgacagctgaatgaatgaatgcatagataacaacatgtaagagatgattataagaaatgtcagggtttaaaccagctctcattgaaaacatgtctatctaatttgctgcacataaacattataacaaacattattttgtttccttttttaacgtgtrtggtctataatgtctaacttttagtttgtaattctgacatagttattattatcatattagactgcatagtttagtgtcctatacaataatacagatatagtaatgagctttgccattgatctttaaaagtccagatttctacttatatttctatggtgtatgaatctctacaacccatgtgggcagtagaaggggtcctgagtgaggctctaccctttattgttcagagctgactgct

SEQ ID NO: 290131 - DNA, 545 bp, Homo sapiens
gatgacactgattacaattgtaatcaaagctgaggacagggaccatggctgctttcgcccaccactgaatcctcagtgcctagaccagagccttgccgaagtttaaatgatttaacttcaatgattgagttgaatgattaagtgatcaattgacagctgaatgaatgaatgcatagataacaacatgtaagagatgattataagaaatgtcagggtttaaaccagctctcattgaaaacatgtctatctaatttgctgcacataaacattataacaaacattattttgtttccttttttaacgtgtatggtctataatgtctaacttttagtttgtaattctgacatagttattattaycatattagactgcatagtttagtgtcctatacaataatacagatatagtaatgagctttgccattgatctttaaaagtccagatttctacttatatttctatggtgtatgaatctctacaacccatgtgggcagtagaaggggtcctgagtgaggctctaccctttattgttcagagctgactgct

SEQ ID NO: 290132 - DNA, 454 bp, Homo sapiens
cacatgtctctaagtatcatccaaaggctgataaaacctaaaaatatgtctcaagtctagactttttccttgaattccatatttttcactccagctacctactcaacatctctattttgatgtctaataagcatctcaaacttaacacatcaatattcaaatcctcrccaccaaccccgcccccactcttttcttaaaatataacaattccatcttttggtgttcaagcaaaaaaatcttggagttactcttgactcatgtctttctttcaaacctatatctaatcccattagcaaatcctattagctcttcctttgaaataattcaggatctggccacttcttagacctctggtccaagtcttcaacattcttcctaattggcttgtttctgccttccccccataccacccattcttaatactgcatccagggggttcttataaagcaaaagg

SEQ ID NO: 290133 - DNA, 454 bp, Homo sapiens
cacatgtctctaagtatcatccaaaggctgataaaacctaaaaatatgtctcaagtctagactttttccttgaattccatatttttcactccagctacctactcaacatctctattttgatgtctaataagcatctcaaacttaacacatcaatattcaaatcctcaccaccamccccgcccccactcttttcttaaaatataacaattccatcttttggtgttcaagcaaaaaaatcttggagttactcttgactcatgtctttctttcaaacctatatctaatcccattagcaaatcctattagctcttcctttgaaataattcaggatctggccacttcttagacctctggtccaagtcttcaacattcttcctaattggcttgtttctgccttccccccataccacccattcttaatactgcatccagggggttcttataaagcaaaagg

SEQ ID NO: 290134 - DNA, 554 bp, Homo sapiens
gaccatgaatctgaaggaggaggagaagaaatgacctagacaaagggagcaggagatgtctccaagccaggttccagtgcatgtctgggccacatggccagatggagtgtggcacgaatcctactgcagggaagcagtaggagaggaagatagtggctctctgccctggtgacaccctcttggctcacacccttcccaaagctgtcatttacactgtcctttctctctcctctgaggttgtggctactatgagtagtaggtgacagcagccaaccagagcccatcaatttagcaaagccaattttgtctccttcacaaaatgagctactggcagtttcaaacctacacccctcctcttatgtagtttttatgtgttcctgagtgtctcttccaaccagcgagagcaaatgcctctggaaagtcttcctctgctctaagattgtacttgctggatggagaacctgcaatgyggcagctgcagccgggctccagctaggtgtgtgtcacacgtacattctagccttagcccagcggcagataggataggggccact

SEQ ID NO: 290135 - DNA, 562 bp, Homo sapiens
ccaacgtttgcaggatgctctctaacctcatgcattcggtgctacctgtgaaccctttgaaaacccttttttttttttttaaaaaaaaaaaaaaaaaaaaggagaacctcatttggaccagcctctgaccccaggatccctctggggtggcaagtgcttgtcaattcaagaggcccggcatgagctgcagttggtaagatgctatcagctcctcaaccccagaaccacrtaaccctttactcacaagatgtttgaacctaacagacgctccccgagccatgcaacccagccaaagggaggggcaggcaacagcccgtggaggtggttcttgctctgccctcagttatgatgtctctggtactgtctcaagtctaacataggtagcaatgagtccttgtgaggcagttagaaactgattccatttagataacggaaagaattgaattggttgaaactcagatcaaagctcattaaacttgcattgactcttgggcaaccacagataacatcagaaaaatttgactttttttctttttctcctttttgtccctcccccgccacc

SEQ ID NO: 290136 - DNA, 562 bp, Homo sapiens
ccaacgtttgcaggatgctctctaacctcatgcattcggtgctacctgtgaaccctttgaaaacccttttttttttttttaaaaaaaaaaaaaaaaaaaaggagaacctcatttggaccagcctctgaccccaggatccctctggggtggcaagtgcttgtcaattcaagaggcccggcatgagctgcagttggtaagatgctatcagctcctcaaccccagaaccacgtaaccctttactcacaagatgtttgaacctaacagacgctccccgagccatgcaacccagccaaagggaggggcaggcaacagcccgtggaggtggttcttgctctgccctcagttatgatgtctctggtactgtctcaagtctaacataggtagcratgagtccttgtgaggcagttagaaactgattccatttagataacggaaagaattgaattggttgaaactcagatcaaagctcattaaacttgcattgactcttgggcaaccacagataacatcagaaaaatttgactttttttctttttctcctttttgtccctcccccgccacc

SEQ ID NO: 290137 - DNA, 601 bp, Homo sapiens
tatggttagtgatgccatagatgtcttttatttagtgttytagaaagtaatgtagtttatgctagttttaatgttgcttctgtctgtccttactcaaacatgcagagctcccagagtctagcacatagcaggccccagcaactgacagacaggcagactgactgactgaaagaatggaaaatcttttctcctcccatgttctctaaggttaggctggctggaagagggaggtgggttctccaggcatgagggggcgggagaaagcataccaggctaaagatgaggtcttggttataaaagcattacctggacaagtgcatgaccttatggaagccaagtgcaatcacaatgaacctggttgctgtgagacactgcattcagacagatgggacagaccctcatgaattcataatgtgaccggttatgtcatggaggcaagagcaatggtctctgggtgactttttaactggttggtattattaaaataaacaattacaccccttcttttatcttttatcttcttatcttttatcaatttcttttatcaatttaccctggtagtaacctcctaaagctagatcagggactttaatcctaggct

SEQ ID NO: 290138 - DNA, 601 bp, Homo sapiens
tatggttagtgatgccatagatgtcttttatttagtgttttagaaagtaatgtagtttatgctagttttaatgttgcttctgtctgtccttactcaaacatgcagagctcccagagtctagcacatagcaggccccagcaactgacagacaggcagactgactgactgaaagaatggaaaatcttttctcctcccatgttctctaaggttaggctggctggaagagggaggtgggttctccaggcatgagggggcgggagaaagcataccaggctaaagatgaggtcttggttataaaagcattacctggacaagtgcatgaccttatggaagccaagtgcaatcacaatgaacctggttgctgtgagacactgcattcagacagatgggacagaccctcatgaattcataatgtgaccggttatgtsatggaggcaagagcaatggtctctgggtgactttttaactggttggtattattaaaataaacaattacaccccttcttttatcttttatcttcttatcttttatcaatttcttttatcaatttaccctggtagtaacctcctaaagctagatcagggactttaatcctaggct

SEQ ID NO: 290139 - DNA, 559 bp, Homo sapiens
tttgggaagaacaacttgacccatggtatattcaaatctctataataatatctctgttatcatggtatcctgctgaatcttcctccatggttaaaaagtaatactagcagtgactttttcagttcacttttccattcctgaccatcttgggaatgtttaaaccagggcgtagagctgatagaaactggctcccctgaccagcatgaacatatgtggggcagctttgatgtgatggatgggatagaggttgctcatagggcttgctaataatccagtgaggtgatgtcattcttggcagagcccagaaagagaaacaagacgccaaagctctccttggctgataaagtcccttcaggcttccttgactccgctgttgctaagcagatgagattggaaagttctgtgagcccagctgagccatcttacctcctggggacaggagtttttgtcaagaaaccttgggtcactagctggtttacrtaaatccctcagaaaggtttgcactgcctttgaaaatactccctggaatagacatttataatagagttaggagataatt

SEQ ID NO: 290140 - DNA, 546 bp, Homo sapiens
aatataatggatctctttgtttttcttttgatttcctgaatttttcttaaaccaaggacccatggaaccctcatgtttccagtgactatctggtggttttcccccagtacagcctggtcctggtggcatgtgcctccatagccagtgcagttggmctacctcttcctcagtgcctgcacctctgaccctttgacactttaggacatatgctcatcctgatataggagccacatagagccttatctgtactcgttagggaagccctgagaaatattcactgccttgaggaaaagcatccactataaaaatgcaggacctagtctgcaaggaactccatgaaacccaggacacttgatcatgatattccaagctgttgaactttcttcaaggggtggaagtttctacgttggcttacaaatgtgcattatttgccaaattgcctaggaatacaggcctttgtacaaaggaaaaacacattctttttagaatcattgagaataacaggcttgtatgtgtctggtgatattttcagtgatcattctgcag

SEQ ID NO: 290141 - DNA, 542 bp, Homo sapiens
taatgtcagcaaggtgggataagcctgacacttccagctcccaccttctcaaaccaatgcctcatcttttgctgtgtcctcttgggtagatgtgaggaaggccactgatctggagagctgaattctagccctaacactgacactctgtatatggccttagaygagcttcctacctctcttgccatccattgtgtaaaaggaggttccttaacaaatgatctctaaaatttttcagctgaacactttatgattttctgacatacttccctcaggtcaccaatattggtttgctgaagatggagtttaatagagaagagtagggaaggatgggtcattttggaaaagttggctgggagcctaaggagtgggtctttgtgcagcgttggcatctgtctgagatagcataggtttggtcaagtaattcctttggcatctctttctttagatctagtaccactggggaaagaaatatggaaaggagatccaggccatgctgtgaaatgaagttctcttcacttttttggctactaactgaaaactac

SEQ ID NO: 290142 - DNA, 542 bp, Homo sapiens
taatgtcagcaaggtgggataagcctgacacttccagctcccaccttctcaaaccaatgcctcatcttttgctgtgtcctcttgggtagatgtgaggaaggccactgatctggagagctgaattctagccctaacactgacactctgtatatggccttagacgagcttcctacctctcttgccatccattgtgtaaaaggaggttccttaacaaatgatctctaaaatttttcagctgaacactttatgattttctgacatacttccctcaggtcaccaatattggtttgctgaagatrgagtttaatagagaagagtagggaaggatgggtcattttggaaaagttggctgggagcctaaggagtgggtctttgtgcagcgttggcatctgtctgagatagcataggtttggtcaagtaattcctttggcatctctttctttagatctagtaccactggggaaagaaatatggaaaggagatccaggccatgctgtgaaatgaagttctcttcacttttttggctactaactgaaaactac

SEQ ID NO: 290143 - DNA, 607 bp, Homo sapiens
ctactaagtttaattctaaggagacacccttaatcattatattatagtctcttaccacatttgtatgtgtttgcatatgttcttagctaattctttaaaataattgtgcttatatctatacatatatttgtttagtgaagaatatgcataggctcttgaacaagttataaagtgaggacaagaatagaggtcagtagggcatctctctgagaactgtgataatatataccagaggtggctacacaactacctgattcggaatcctcatctctttttctttcctctgtacttttccataccaataaatagtctcccacccttggcacaggggagcactgggcttctgagtgcattcagaaaacaagcaacacttacacctgtttagyctcatgtttcctaacagctttagaagtacaatatggccctaggtctttgtttcagtacagtaggtggagggggcttcttgccagccagaaagcgttaaaagttcatggcagctgcctagaaaccactgcaatgtttcccataaaagatgaataagctagtttagactcccatgtatttccaggaatgtaggagtgttcgatctattgttctttccattcta

SEQ ID NO: 290144 - DNA, 512 bp, Homo sapiens
gatcataatacaaagtattaaatatccacgagtccatactgatayaaatgactgaataagtggggcagaaaagacaaattacccttacaaaagaattttccataatttatacttttaaagttatctctttattaatattctctatttgatgagacattgtcatacctacatttacttttaaaagcatggtttcctgtagtgtattgaagcctttcttctgttaaattcaacatctccctctcacaggcagtttctgtcgcttgctttgctccctgtgtatggttcatacttttttttctccatgtctcaaatttttgatgaaaattggacattttaggtaatatactgtagcaactttggatactaatctccttcccttctttggggcttgtttttgatgttgtctgcttatttctttggctggtccattttagtgaaatctatttcccgctaaatgtgaagcttataatgttatttcttagagggtagagacttggtcacacatagggtaa

SEQ ID NO: 290145 - DNA, 512 bp, Homo sapiens
gatcataatacaaagtattaaatatccacgagtccatactgatacaaatgactgaataagtggggcagaaaagacaaattacccttacaaaagaattttccataatttatacttttaaagttatctctttattaatattctctatttgatgagacattgtcatacctacatttacttttaaaagcatggtttcctgtagtgtattgaagcctttcttctgttaaattcaacatctccctctcacaggcagtttctgtygcttgctttgctccctgtgtatggttcatacttttttttctccatgtctcaaatttttgatgaaaattggacattttaggtaatatactgtagcaactttggatactaatctccttcccttctttggggcttgtttttgatgttgtctgcttatttctttggctggtccattttagtgaaatctatttcccgctaaatgtgaagcttataatgttatttcttagagggtagagacttggtcacacatagggtaa

SEQ ID NO: 290146 - DNA, 559 bp, Homo sapiens
tatgtttgttgggcaaactccaaacctcagtttcctcatctgtaaaatgtaagaaacaattgtgtctacctcatgggttcatggaggattaagagataatacacttggagcattaagagataatacacttgaatttcttagtatgtgcctaacatgtaattaatgtttaaaccaagttagctaatattaactgtataaaatacataactacttgtagatagcacatttgtccccataataatttatattccatccatgtacatttacactcataattcagaaactgcatttgtgttattgaagtgcagagattacagtgcacttcagaggtcatgagtataagtatttttacactgttcygaatcatttatgggttaaaaagtttataataaaatatctcaaaaattaataaaagtataagattaaaattatgtagtctgcttgcttgtgttgatggcataaacccagaatgagataaccccttcattcctttggctctttcagaaatcatccttcagccttagagttttaaactcttccttctttaaaaactgaatca

SEQ ID NO: 290147 - DNA, 556 bp, Homo sapiens
tcccacggagggggagacagaagaagggaagatggtgagcccagccactcctcagcccaattgggtttcctcagcaacatcttaccccagactgtcctctctcttcgctcctctgctccagacaggatggtttccatgtgctgcttctctgcgatctttctttcctcttatgtctttcattatgaaaccaaagtgctagagggatygggaactatgggggacccacaaaatcccatgttcatgaagaaggaagagaatgctcgtgggaggggggctgaggcctgcagacatggggatggaaagttgccgccttagtcatctgaggctgctctaacaggataccatacactgggtggctaataagcaacagatgtttgttcccacagttctgggggctgggaagctcaagagcaaggcaccagcagattcagcatctggtgagggtctgtttcctggtttgtatagaaggtgccttttccctgtgtcctcatatggtgggaagggcaaggcagctctctggggccttttttataagggcactgatcccactcatgag

SEQ ID NO: 290148 - DNA, 556 bp, Homo sapiens
tcccacggagggggagacagaagaagggaagatggtgagcccagccactcctcagcccaattgggtttcctcagcaacatcttaccccagactgtcctctctcttcgctcctctgctccagacaggatggtttccatgtgctgcttctctgcgatctttctttcctcttatgtctttcattatgaaaccaaagtgctagagggatcgggractatgggggacccacaaaatcccatgttcatgaagaaggaagagaatgctcgtgggaggggggctgaggcctgcagacatggggatggaaagttgccgccttagtcatctgaggctgctctaacaggataccatacactgggtggctaataagcaacagatgtttgttcccacagttctgggggctgggaagctcaagagcaaggcaccagcagattcagcatctggtgagggtctgtttcctggtttgtatagaaggtgccttttccctgtgtcctcatatggtgggaagggcaaggcagctctctggggccttttttataagggcactgatcccactcatgag

SEQ ID NO: 290149 - DNA, 556 bp, Homo sapiens
tcccacggagggggagacagaagaagggaagatggtgagcccagccactcctcagcccaattgggtttcctcagcaacatcttaccccagactgtcctctctcttcgctcctctgctccagacaggatggtttccatgtgctgcttctctgcgatctttctttcctcttatgtctttcattatgaaaccaaagtgctagagggatcgggaactatgggggaccsacaaaatcccatgttcatgaagaaggaagagaatgctcgtgggaggggggctgaggcctgcagacatggggatggaaagttgccgccttagtcatctgaggctgctctaacaggataccatacactgggtggctaataagcaacagatgtttgttcccacagttctgggggctgggaagctcaagagcaaggcaccagcagattcagcatctggtgagggtctgtttcctggtttgtatagaaggtgccttttccctgtgtcctcatatggtgggaagggcaaggcagctctctggggccttttttataagggcactgatcccactcatgag

SEQ ID NO: 290150 - DNA, 582 bp, Homo sapiens
cagcaggtcatgcaagtactgactctgctctagcagggccctgagagacagagcccatgtacacaggcttgccttcttaaatttgcamtgtaggcatcttgcctgccttaccctggaccctctttttctcttagctttttttttcatgttcctttctttcttgggtgagttcttctcactcggtgcgcagaagctcaccaaagcaccagacatggttctaccacatcaccagactttttccttatcacctctgcctccctaaaactctttttccatttatttcaggaaagaatgaccccaagacttgggctcattggctcttattagccccacttgagtgtggaagagtcactcaatagaatgtgctccccaaactgtttccttttcctcccgagcacacagctaagcacattccccaggttcctcgcatctaggtctggtcatgtgcacagtgccaggtagggaaatgtaagtaaaaataaagaccatctcctccagacctggacccactccacattcacttcttcactcattgtctgggcatagaacattcagcaggtgacagcgccattagttgaaatg

SEQ ID NO: 290151 - DNA, 582 bp, Homo sapiens
aggaaaagcctataccaagtccagcaacttcagggccatctgtgacactctgtggacccctcatgaaggttttccccctaactcttatgcaagagaagttgaccatgccccaaagccacatcgaccagacgaatccccatgatatgaggggatgggatgaaattttccaaggtgagggtcgtgaagctacctctacccaagagggagcccgttacgtcacattcctattggcctccattcaaacctgagtcctgctgcaccgtgaatttgagaaaacttttgatcctcagattgctgcctcatttgtttctagaaatgtctagaaagtttctagaaaatagtcattttgtgtggaagcctcccaargtcctttactggctagctttggctcctgtcacaatacctttctctcagtcagcatgacaaccatctgcccttgaggctgagaggccaaaacaaatatgatcagggttgctatcttcagagtgctgacagcacccttggtgttggacaactggcatgttggttccagaattgttccccagccaagtgcagccagcccaagtcacaatgccaagggtt

SEQ ID NO: 290152 - DNA, 566 bp, Homo sapiens
gcaaaacatgtaattccaaaacattcgcacatgggaaataccacgcaccatatcccatttctgaaragccatgttgcctgttagcttcttaaaggttctgaggaatcctgcacctaaacaaagaaaacaaaacaacgcaaaaacttttgcttactatttaactttgtttaccaaaattaccaaattatcaaacttattttaccatgaaacacagttgaaaaacagctcttcaaatctgggtgtgtaagaaacacaccttggcaaatgcaaatctagagcttgctatacccacattgaggatttagggcgtttctgagagtttatttacatgcgtgcttgtggtgggttgaatgatgattctcagaaaggtatttccatatcctaatgcctagaacctgtgaaggtgaccttacctggaaaaaggatctttgctgatgtttttaagttaaggatcttaagaagagaaaatcatcttgggataactgcggtaagccctagttccaaggacaagtgtcattatcagagaaagaggaggcgatgacacagggtacagagagaaaggccat

SEQ ID NO: 290153 - DNA, 568 bp, Homo sapiens
catctgtaactaatttttttcttcatcttatgactctctttctgtgtgcttttgttacaggtggaacttttataaaagatatagaagttactttttaaaaatacttctagtgagatcaagaccatcctggttaacacggtgatacctcgtctctactaaaaatacaaaaaatgagccgggcgtcgtagcgggcgcctgtagtcccagctactcggaaggctgagacgggagaatggcgtgaacccaggaggcggagcttgcagtgagccgagaacgcgtcactgcactccagcctgggcgacagagccagactctatctcaaaaaagcaacaacaacaacaamaaaaatacttctagtgatctttctgttttaaatggagagtttaatacgtttacattcaatatgatttctgacgtgtttggctttattgtgtggtagattggattcaccaaaaattctgttttccatccttgaaggaagattctctgaaggagagaatacctcacccacctgaagcagtgccatgtaacttgccagtggaaagtgggagaagtgaggtggcaggtg

SEQ ID NO: 290154 - DNA, 601 bp, Homo sapiens
ttgattttcctgaagtcttgattaaaggggggaacaggatgactaattatctccttcacgtggtaactgtgcagggaaatgaagcctccaccatagcccacatccgtgaatctgtttttagtccatgtaactatgatttacacacagaactgattcttaaagaggctgaatgcctgttttccatatactctactcctcaaaratagaaaagtgaatgagagagagaaaaaagaaaaaccagaatgttatcacactaaaggcctttttttcttcattcaactctgcttcattttgacacacctcactagtcttgactcagtatccacttgttgagttcacttattgaaaataaaaataccttcacaaaaatgtttcagtgccataaagtgaaagggcccttacttccccccagaaatttccagaaaaagtgcctcgagagctataaacatccatacccttctctgggtctggggctggtggatcctggacagtaaatcactgccaaggcccaagaaagagagtggcccgtgggcagagatattcagaatgctgacattttaagggcttttgtaggggaaaatgatttgcaagtgtttggcaa

SEQ ID NO: 290155 - DNA, 568 bp, Homo sapiens
agagagaaatgttcctgatcctgatggatccatcccggggttctcaaaattctcgagcattctgtatttgttgtttcttccctgttccctatggcacttcctatatccctgtayttgcacatattacaatggtttgttgggaaaaggtaaatatatgctcaaatatatacacaattaattaaacaaaaatgcctgcaatgtgattttacaaatcatagaagatatttgaagccagggttactcacatttctaaaccctggaatcaagttttttgggaaaacattactagaaaagagaatacaactggtagagaatacgtggtgtaaagcacaccagagcgcagaaaacatgggaatatttagatgaaagtacctattttccccctctattttgtcatgtctcatgatttatttatgatgtttggcttaagcaagagcttttgatgacaaaaccgtgatttctctcttagacaagtgtgtatgaatctttttttcattatctccctctaaaagcattattagacattttttctctaatcatcccccagtgaaattataataccacagat

SEQ ID NO: 290156 - DNA, 482 bp, Homo sapiens
gtgacaggggccatcaggggaaatacagcagcgggaatacagatgcgcatttcagatactaattaacagctcccacacctcaaagccgaggcaacgtctagcactaaaggaaacagtgtgattgaaacttgccacagtacctgacagcaacggccagcaactctgtagatgccacctytgctaacagcactaattacagaacgcggcatcacttaaaaacagtgcacagctgaatgataacacacttaaacaaacaagccagggttcagtcgtctccagggataattgtgtgggaactaggtaaggagacaggtgagaggtaagttagaatccttgtagattgtcctctatggagccagtaaatatgctgtggaagaaatgactgattttacggttacaaaacacccacataacagcagggggtgggggttttataggatccctcataatgaccaagctattaaacatcaagcagaagttga

SEQ ID NO: 290157 - DNA, 508 bp, Homo sapiens
cactggggtaggtattacaagccggtggcacagggcaaatggcctgatcctacagaaggtgtcaatgtctttaggattataaactagtgtagagaccccaaagcctacaaattgagtgatgaattttaatctggcttaggtctttaaaaattaaactgaaaatctgagctgtaagggtctggtctaatcttccactttacaaaggaaktaactgaggacctgagggttaagtatcctcctcaagatcactcagccgagaatgactcttcttatattcttcagtggctctgaagagattgtaaatgaccagggtaaccctctctcaggatctaggggctcctcaactgctgctcggtggagggactgatttaaagccttctgcttactttgcaataattctggagaatgatcaattctgagcagagatgtttaggttcagagcccccagctaaagctgcgtatttatggagaattccagacattatttattgttttcctttctcaggtt

SEQ ID NO: 290158 - DNA, 559 bp, Homo sapiens
aaaaccagggaacaaatctctcagaaaaacccccaccagtctaggctgagtgtaactattctgttgggattcactgatgtgggattgttgctgcttgctacaatttgcgccatattaaaatcccaatatgtaaactaagatacaaacaaatgtatttttagcaattctcacttttgaaacttccttctttccacattttctcctcaataagaacctagctccaaatagtttccatccttttttgatgtagagttgtatgtaagtttagattattagcaacggtctcacccaacagtaggagataatctgcttatatttgaataaagatatgagcgtttgtatgtgtatgtgtgtgtgtatgtgtaaggtgacacaatagatatgctttatccattgaactttattccctaagtacmttttcattgctctgtggcttggcccatgctgttccccatgcctagaatgccattcctcctatgccttccccatctgatgaatctttgctaatctttcaaacccaatacccactccttgatgccattcaccatggcccaggcag

SEQ ID NO: 290159 - DNA, 558 bp, Homo sapiens
tccatatgattgaatactatttagtcattaaagtggtacaaaattatatatattgataaagaacaactttatatatgtttaagatagaaaagcaggttacaacatggaatatttcatatttttcctatttaggggggaaagtttgagggtgcttgtatatgcacagataaaacaaagacctaaggaaatacctgagtcttttaaaaaataatttcaacttttattttagaatcagggagtacatacgcaggtttgttacatgggtatgttgcatggtgctgaggtttggggtacaactgattctatcacccaggtagtgagcatagtactcgatagttttttaacccttgcttccctccattcccactctagtagtctttagtgtctattgttgccatctttatatccatgtttaatttccacttacaagtgagaacatggagtatttggttttctgttcttgtgttaatttgcttaggataatggcctccagctgcatccgtgttgytgcatagaacatgatttcattgtttttatggttgcatagtattccaaggt

SEQ ID NO: 290160 - DNA, 608 bp, Homo sapiens
aaattatttattgctgatatgaagatatacaattttattttttatatgttgaacttatatctaggaatctaggtgarctctctactaattctaataatttttgtaacaaagaaataggctcagagatgttaattaatttgccccaaatcacatgcctaataaatgtcttcctttctgttgggaagaaaagagaatgtcaggttaagaatttccatatatttagctcaagattcattttctacttctctgactcatttgcttataagcctgcaaggatttattgaaaggctcctgcggactcagctgcatactaagatgtctggacaggggaacaggaggatgcacaaggaagcatggaatcatctaatcccagagaaatcagggatcttggagtaaatctaccctaagcctcatagaaatattttctgaaagtgctccctacaaagccatttactcattcaacacatattctttgagcatctactaaatgacagcttccatgcctgatgttgatgaacaggagtgagcaaacccttaaggcaattataatttagtgaaaaactgtagtgaaataatcacacaaatatatgaccatgcatggggataat

SEQ ID NO: 290161 - DNA, 565 bp, Homo sapiens
ggacataaacattcggcccatagcaataagcaagtgactggggaagagtggtctgggattgagcagtgttgaggtaaaactasctttaaaaatcatgttcttcccaatggtctctccccatggactcgatccagggtctgtgaatagcttcgtcctgcaactagtgatgcatcagagcaaaaaaagaggcaggacataatgcagcacttaggaaggaggacgtgtgtgcgatcatcatcagacttccacttacaggttaaaagagaagtgagagttgtagttgtgggtgaggccagggtaggggaaggaggaagttagggaggggctggcagggaagaccaacactatgtcatggacaacatccctggaaggtatttcccaaatttccttccaagaagatggtctgtttgtacattattactgacattttggacccagattatgtgtctgttttcagagatatttgattgcttgagcccttctccacagccagatcatctccagggtcagtgagatagttaacatattataagtgatattgacttccccctggacgtaataagag

SEQ ID NO: 290162 - DNA, 565 bp, Homo sapiens
ggacataaacattcggcccatagcaataagcaagtgactggggaagagtggtctgggattgagcagtgttgaggtaaaactacctttaaaaatcatgttcttcccaatggtctctccccatggactcgatccagggtctgtgaatagcttcgtcctgcaactagtgatgcatcagagcaaaaaaagaggcaggacataatgcagcacttaggaaggaggacgtgtgtgcgatcatcatcagacttccacttacaggttaaaagagaagtgagagttgtagttgtgggtgaggccagggtaggggaaggaggaagttagggaggggctggcagggaagaccaacactatgtcatggacaacatccctggaaggtatttcccaaatttccttccaagaagatggtctgtttgtacattattactgacattttggacccagattatgtgtctgttttcagagatatttgattgcttgagcccttctccayagccagatcatctccagggtcagtgagatagttaacatattataagtgatattgacttccccctggacgtaataagag

SEQ ID NO: 290163 - DNA, 620 bp, Homo sapiens
attagggactgtgtaaatagttttaaagatccatgaacctcttgattttttttttttggaaaatcaagtatatgtacatagctttccttagattctcaaagggtttaatgatccaaaaataatataagtacaactatattaagttctccagggaaattcagaaaaactccttccatcttaaaagtcaaaccataaaatcacatacataataaaaccatcgccttaaaaacataaaactccatcctttcctatccaaacatttattatgtgttttattatgttccaccaactattttaaaagattaaaatgagaccatttaataaaataattcagttacatatctttggtagaacagttaactcatatagcacttaatacactttcacataaatatmctttaatcgtcaaaataatctgtgaagatatgactattcatgttctacagatatggggataaatttcacaaagttaagaaattttctcaaggtcatagtactagcaagctgaggctgaaaccatcttctgataacaaaatccagagtagcattttgtaaaatactagtttagaaagataccaattgaactatagagacaaaaattagattagtgatagcctagg

SEQ ID NO: 290164 - DNA, 565 bp, Homo sapiens
ccatcctcccagaacttagtctaaggacaaagccactcaagtgccacaaaaatacactgcagaaaaagagttccaagcagagggaagtggatggagtttggagagtatacagtggggaaggtgggaggaagcgctgacgtggagggtaattaggcttaaattcgaagaaggaaaggaagagaaacaaggaaagggaacagagttccaggcagaaagagcagcttctgcaaagaaaggcccctggagggaggagctgggcccacaggaaaagctgtayagcaacctgtgctgaaggcaggatgtcagggaacaacagggtttgaagaccaacccaaaacaagcagccgccagacctgcagccctagtcagttacctgtcttaacattaaaaaagaagaaaaacaaaatcaaaaggcttctgtgacctaggagaaagcagactggatcccaaatcagataacctggatcaagtcgtaactgccagttcaaccacccctgggtgcccaacatccttgagccatctctgtcccatcattgtcaactgatgataagaacacctcactcgg

SEQ ID NO: 290165 - DNA, 612 bp, Homo sapiens
tctgtgttatttttaaaatttgaaacttttattacatacaaccccacatctaaaatggctttcttttcatcagtctggttataaaacagctattcaggaattcctgaaatacctacaattctttttcattcaataccagaaaactcttagtagcttaatgaattggagaaacattactttctaagaagatacttcaagataattcagaggaatttcatcattcagagtctcctaacctgggggaggggaagtagataccattttatatgaaacattaactaaatacactcaacaattttaaagtattccttctaagaacaacataaccaagaaacaaaatggagcttcaaaatagtacaaaatgaccttaattacatgctataaatcagtgacaaaaatctaaaaacttcttygtccccttccatcctaaatttagaggaagacagcttgtaagttaaaaaaatttaagtaaaatttaggacttgacaatgatactgaatcagagtaaatccttacttgcggcacttatcaaatgtattgaactgatcaattttttagaatggcaaagtgtaaactgattttatgttaaaagactgcagcatgatatatttc

SEQ ID NO: 290166 - DNA, 632 bp, Homo sapiens
tcaattttttagaatggcaaagtgtaaactgattttatgttaaaagactgcagcatgatatatttcctttcctttagaggttgaacakaattcagccaaacgcacagtaacaacacagcacgatttacttctctctcaattttgaaacccacatttgctgagatcaataacatgggatataattcaagaactttaataaatcaaaacaaaggagggagagaagttcctcagggcctctggatagaatatagtcccaagatggagctcagagtaaaaacaagttatggttttatattagatactaaaatctgtatttcattcctcatttcacctggaggctgagatattaactcaaacaagatttgagtaaagcaggagttttgtccaagcctcgtgagaaaagagcaacatcaaatcagaggcaagccaaacacacaccaatgtgtggctggttctgttgcagaactaagtgatgtgttacttgctcaaattgggggacattcaagatgtctagggacgcagcatgaacactcacctcccctaccaatcaagcccctgactcatggggatacataccctgcccccagcagtaaacaggctcatcctgtttaagaaaaaggaagaaggaagag

SEQ ID NO: 290167 - DNA, 533 bp, Homo sapiens
tagttcatgtaaactgtaaacaacaaaacaaaaaacaagaatacaagtaattatttatatttatgcagatgcatctgatctttcaggcaggcaaggccccacattaagaaagtgcttattcctgtagctcaagccagctctggggaggtcacacagttttcctggtccgtgtcataactaagctggtggtcacaacaatctgaccaatcctgacatgaacaaaacaaaataaacaaataaagctgattaggactgaaaaataaatgaagactctgcagctaagtctaaagctaaccccaccttcatataaacctactgcaataaggaattccttggggtaagaaagtattcaactaatgtagttaatgacttatagcagttgaaaattggacagtaaataaacaaagatgacaccaacagtgatcctayagaaatggaccacgatatgtgcaggggtggaaatctagaaattgtgggatggtttctgggcacagatttctggtttgtggttcagatatcaataattacataac

SEQ ID NO: 290168 - DNA, 526 bp, Homo sapiens
tccacctggcccgacagagctcctggcgcccaggtagaggcagctgcggacgagaggaggccaaggaggcagttccctttagagggcgctcattgggcgacgtggggaaacaagctccagcccccgaagcgcgaccaaaaggagaaatcaagttcccaccgccagggcgggggagggaagctgggtgccggcaggcgctccgcyggagacgagactcctcccggccccagaagcgccccgccagggccagagagggcgagcgtggcgggagggaagcctctgtcccccagcggccaggcgacccgaagccgagcgccgtgtcacacgtaccccgcctcgccctgcttgcggcactcccgtgtaactcctatgaaaatgtcctcccgtccctgacgccccgcggtgcaacctccacccctcaacgaggagggggtcgccgcaggactgggaatccagtggccggcgtcccagcattttcggacgcgttccgtgcctcccccagtatccccttgagggatcgcctact

SEQ ID NO: 290169 - DNA, 468 bp, Homo sapiens
cgggctcctctcgtagcttcaaacaccctaaacggcgcgcgcatcctccgcctggcccactcaccgactccgccgacacgcaggccaccaagcccaaggtgagcaggatccacgcgcgccgcatattccccagggaccggctgctcccagccgctgcttgcaaccagggcaaaacgaagcctcctgcccagcgctcggcgcagcccgcgcacacgaatccggagcagagtaccgcagcgattgcggctcacgctcggggactcgggctcggggctcggrggcgctcgcttcctcctcctgcgcctgctcccgccgcccgcagctgcgccccgggaacgcggcgccctctcacttgttggtttctgcactcccgacacggagttggtgctccgggaaggctgctctctgaagctcttcttgctctgctgtggttttgctcctccgcggactcctttcccgtgccgaggt

SEQ ID NO: 290170 - DNA, 552 bp, Homo sapiens
gagttgcagctaatccttagagaactgcatcagacctcctctttctctcacagtgaaattgcctggcaccaggcctgttccggctgtttggaccttatgttttcggcacattgcaaacaacatcttcttgtggattcaactctcaacacgccaatgggtttctctgttttgctttttctagctagctctccagaagcaaatacttaaaacataagcacacaccctgtccacaagctgaacatcacatataaacagcttgggaatgtgaggagaggctctggaaaggaaaaggcagtaagactccctgtaaatgaattattactgctcctctaatcactttgacaatcaatacttcaagaaacagtaagagtgagkgaagcagcagaaatcacctttagaaactgctaaatgtatagatctcacgctaatttctaatactaatctggtgttcccataaagtcaccacctttctctacttcagttcgatggcccttgaaagtgacaattatactgtgttttcttggaaatataatgtgactaacaccctagctt

SEQ ID NO: 290171 - DNA, 542 bp, Homo sapiens
ggcctgaaccgaggccacttccactcacacttcattggctcactgraatcacgtggtgatgcctgacttcaagaggggagtgaatgcaattctgctatgagcctgggcagtttccttatagtaaagaggttatggtaatcattacatctatttcataggagtgtcataagaattcaatgagtgattgcatattaaatgcttggcacagagttaagtccttattaaatatcagctgttaatattctccctatgggatgagcaatttgacatatgcaactgtgtggatttattttccttctgcataaagttgactaaatgtctcctaaatattagaccatgtgcaaggtggttagggctatgaaaatggacaacaaaggagccactgtatagcaaggataagttgaaagctgttttagttctgattcccaatcttggtacatgctaagatataccagagaggattctgaaatcttacaaagaacatagagtttgcctaccagttttggcttattttatgtcactgacacctttaaggtattgcc

SEQ ID NO: 290172 - DNA, 529 bp, Homo sapiens
aagttttaaaattttgaatatttaatatatccggattttttgaggggtgttagcagtaagttaggaatctattttatttttacaattagccagtcatctcagcagcattacttgacaattcatcctttcttcacttaaaaaatacctgcttcatcaaatgtaaattattgtatgtggttagtctattcctggactttctgtatattycattaatctgactattctgttactattctggtattgcacagttttgtttttaaaaattcatttttaattgtggtaaaataacccataaaatttatcatcttaaccacctctaactgtattgttcggtggtgttgagtatatgaacactcttgtgcaaccaatttccagaatttttcgtcttccccaacagaaactttatacccattaaacaattccctatctccccccacccagttgcaggcaaccaccattctactttctatttctatgattttgactactctaagtaccatgtatggtagtatcatacagtatttgtctt

SEQ ID NO: 290173 - DNA, 529 bp, Homo sapiens
aagttttaaaattttgaatatttaatatatccggattttttgaggggtgttagcagtaagttaggaatctattttatttttacaattagccagtcatctcagcagcattacttgacaattcatcctttcttcacttaaaaaatacctgcttcatcaaatgtaaattattgtatgtggttagtctattcctggactttctgtatatttcattaatctgactattctgttactattctggtattgcacagttttgtttttaaaaattcatttttaattgtggtaaaataacccataaaatttatcatcttaaccacctctaactgtattgttcggtggtgttgagtatatgaacactcttgtgcaaccaatttccagaatttttcgtcttccccaacagaaactttatacccattaaacaattccctatctccccccacccagttgcaggcaaccaccattctactttctatttctatgattttgactactctaagtacsatgtatggtagtatcatacagtatttgtctt

SEQ ID NO: 290174 - DNA, 439 bp, Homo sapiens
gtactcctcatattgatctacagattcaacgcaataccttttagaaacccaggtggcttccttgtagaaattgacaagctagktctaaaattcatatgaatttttgacacagagtagtcaaaacaaccttgaaaggaagaacaaactcagaggattcacaattccttattttaaaatttactacagggccaagagcggtggctcacacctataatcccagcacgttaggaggccgaggtgggagggtctgttgagctcaggagttcgagaccagcctgggcaatatagtgagacccccacccccctccatctctaaaaagaaaaaagaaattgctacaaagcagtaataaccaaggcagctggtattggtgtgaggataaatgtagatattaacaaatggtgctgtgacacttaggtagccacatgtaaaagaatgcag

SEQ ID NO: 290175 - DNA, 1220 bp, Homo sapiens
gctttaaattctgctttcttctaaagaaaatgtattcaaaatattataacagttgaattttaaaagctgttagcaccaggtactcattaaagaccttcagtttggcacattccaactagcccattgtcatggcaagaggaaatgccacagcaggatatatcaaagtccaaaataaatgactagtatctatttgcaggctttttcattggccctaacctgaaagtccataatattttatgttatcagagcccagggtgcttctagcccttaactataccacttattagcaaacttccttgcttatgagccagctaatcaatactctgaacttcccttttctctgtaaaaaagaaaatagtgcctcttattgatcttgcaatttyagctatagtaaggattaaatcaaataatctatgtggagatattttaagaatttaaaatctctatccatagatatatataggattactatattactgtttgtaagagcaacgacttgtgaaaaaatatttgttgctttgattaccaaggctctaaatattaattccttgctatcatgccactcaagcatcaccaggaagtgaagtcagaacaggwcccttcctcttgcctcttttctgcttatcactagagacagaaacaaaaaaccatggtttcaggctgctaaaagcctaaagcaaaacaaaacagaacagcaacaacaacaaaataaggcaggttggacaagcttatataatgtctttwaaaaaaaatcccatccattgtatctccacctggtacaaattaagcatttgttaaatttaatcggagaaatgaatgaatggagaaatgaatgaatcaaaaaaaagggaactcttgttttaaccaacaattataatcatatttaaaagtacaaatgtatacatgacataagcactaaaatactggatagatatgcacagaatgttaacattgattttattttagtggtgggatttcaatttatttttttctttgtaatttaagaaatttctacaatgatgttaatttcttttcaaatcagaagcaagaaaacactacagaatacactatgctaagtgcatcgttgttaaggaaccaggttatgtctctgctacttaccacccatgtgacctgggggaagtcattgcctcactgactatcagtttcctcatctgtaaagtggggataatcaaagaactgggtggctgtgaggattaagt

SEQ ID NO: 290176 - DNA, 623 bp, Homo sapiens
cccttcctcttgcctcttttctgcttatcactagagacagaaacaaaaaaccatggtttcaggctgctaaaagcctaaagcaaaacaaaacagaacagcaacaacaacaaaataaggcaggttggacaagcttatataatgtctttaaaaaaaaatcccatccattgtatctcyacctggtacaaattaagcatttgttaaatttaatcggagaaatgaatgaatggagaaatgaatgaatcaaaaaaaagggaactcttgttttaaccaacaattataatcatatttaaaagtacaaatgtatacatgacataagcactaaaatactggatagatatgcacagaatgttaacattgattttattttagtggtgggatttcaatttatttttttctttgtaatttaagaaatttctacaatgatgttaatttcttttcaaatcagaagcaagaaaacactacagaatacactatgctaagtgcatcgttgttaaggaaccaggttatgtctctgctacttaccacccatgtgacctgggggaagtcattgcctcactgactatcagtttcctcatctgtaaagtggggataatcaaagaactgggtggctgtgaggattaagt

SEQ ID NO: 290177 - DNA, 623 bp, Homo sapiens
cccttcctcttgcctcttttctgcttatcactagagacagaaacaaaaaaccatggtttcaggctgctaaaagcctaaagcaaaacaaaacagaacagcaacaacaacaaaataaggcaggttggacaagcttatataatgtctttaaaaaaaaatcccatccattgtatctccacctggtacaaattaagcatttgttaaatttaatcggagaaatgaatgaatggagaaatgaatgaatcaaaaaaaagggaactcttgttttaaccaacaattataatcatatttaaaagtacaaatgtatacatgacataagcactaaaatactggatagatatgcacagaatgttaacattgattttattttagtggtgggatttcaatttatttttttctttgtaatttaagaaatttctacaatgatgttaatttcttttcaaatcagaagcaagaaaacactacagaatacactatgctaagygcatcgttgttaaggaaccaggttatgtctctgctacttaccacccatgtgacctgggggaagtcattgcctcactgactatcagtttcctcatctgtaaagtggggataatcaaagaactgggtggctgtgaggattaagt

SEQ ID NO: 290178 - DNA, 596 bp, Homo sapiens
gctttaaattctgctttcttctaaagaaaatgtattcaaaatattataacagttgaattttaaaagctgttagcaccaggtactcattaaagaccttcagtttggcacattccaactagcccattgtcatggcaagaggaaatgccacagcaggatatatcaaagtccaaaataaatgactagtatctatttgcaggctttttcattggccctaacctgaaagtccataatattttatgttatcagagcccagggtgcttctagcccttaactataccacttattagcaaacttccttgcttatgagccagctaatcaatactctgaacttcccttttctctgtaaaaaagaaaatagtgcctcttattgatcttgcaatttcagctatagtaaggattaaatcaaataatctaygtggagatattttaagaatttaaaatctctatccatagatatatataggattactatattactgtttgtaagagcaacgacttgtgaaaaaatatttgttgctttgattaccaaggctctaaatattaattccttgctatcatgccactcaagcatcaccaggaagtgaagtcagaacagg

SEQ ID NO: 290179 - DNA, 601 bp, Homo sapiens
agcactggatcctcacaatcaggggcaagggttgtcattgctattgtgccaatgaggaaatgaagaagaaaatgccttcataaacaggggacatgaattcaaatccagattatttcttccttccttccttcctgcattcattgaaaacatgcatttattaacttcctgttgtgtgccagtgctctgctagctgttggagatgcatggcttattgggaatacacctccgaaaggtcacagttctctgtccttaaagagttagggtgtctgaactgcatgataccaaattcctgtctctttctaccacacacacacctgcacagtcctctgcatgcatagtgggtacccaacaaatatctgctgtactgggcagtctgggcacatcaccaaaggcccttgagaccactgaattgcaatgatggtataatgtttgactgcagtagtcaaatattacaatagtcaaacattacaggctcagaacaactttttaaatgtctaagatttgtttatatatgtatactctctcccactcagaaagcacttaggggctgtaggatstttgcatattcaatgaagtttttgtgttttgaataatagccccc

SEQ ID NO: 290180 - DNA, 549 bp, Homo sapiens
gttgctccagcagtcactgtggagttctgatcagtaagcaataaggaaggggtcccaggtaggggagaaaaactgttccaagagacagctaatcataaacagcccattggcacaactacctcactctgcatgtagccccagcagcactatcttctaaaactttcctccagcccatgcctgtttgcagatagccccttctctgctgtgctgcccattgcttctttgcaatgtactttccctctaataaatctgcctttctttacctacaattgtcttggtaaattcttttcccaygacaccagccccaggcagtcacacccatgatattttggtggcctatatggtgagtgctctgggacttctcccctactctctccctttcctctcctccaactccagcctttcggtggacagtgtccaagcccagagaaaattgaaggttcacatggtaaaacttctgactgctgatgcccaatcaagtgagagttcagcgtttgctttccttttcagtcttcccatgaacaaactctagcatccctctggcaactg

SEQ ID NO: 290181 - DNA, 549 bp, Homo sapiens
gttgctccagcagtcactgtggagttctgatcagtaagcaataaggaaggggtcccaggtaggggagaaaaactgttccaagagacagctaatcataaacagcccattggcacaactacctcactctgcatgtagccccagcagcactatcttctaaaactttcctccagcccatgcctgtttgcagatagccccttctctgctgtgctgcccattgcttctttgcaatgtactttccctctaataaatctgcctttctttacctacaattgtcttggtaaattcttttcccatgacaccagccccaggcagtcacacccatgatattttggtggcctatatggtgagtgctctgggacttctcccctactctctccctttcytctcctccaactccagcctttcggtggacagtgtccaagcccagagaaaattgaaggttcacatggtaaaacttctgactgctgatgcccaatcaagtgagagttcagcgtttgctttccttttcagtcttcccatgaacaaactctagcatccctctggcaactg

SEQ ID NO: 290182 - DNA, 622 bp, Homo sapiens
catgcatgatatatgaatataaagccccatctacctcatgcagttcttgtaagattatttatgtgaaaatacccaacaaatatgaaaaacataaaaaacaaagataagatgatattaatgtttatgtcagggcttgtagtcatccatatttctgaaacttccccccaaaataaaaaaaaaagataggaattgacttccagtataaagtctctactccttctgagttcatgcacataatctccataaaaggaaattacaacatctcaattgtaaaccacctcactgaagctgagttaaagaacaagtggagctatatgagtcacatgatgactgctatgcacctgtagatatatataaggagatgaaagcagaaaatctaaattggtaacagaattttcattgaattctcttaattagctcactccaggggagtgaatataatccactctccccatttccagaggcttccaatgtatcaggactctatttttattacatgaattgctttacaaataagcacagtgtgaagcatcaatgctttataaaaaccrcattaatgcaccaacttgttcagaagccaagaagagaataagatcacacatcctagagagaatttaatggg

SEQ ID NO: 290183 - DNA, 564 bp, Homo sapiens
catcaccattttgcaattcctaatgaaataatagactaagtaatgattattaacagctgataatatagcaaaacaagagataaccaaatatcacctgcctcttaactaaaggacagagcagtttggcaataaataaataaataaataaaatttctaaaaattgaacttgagtctgattaagactctggatccaacaatgaatttacaggaaaggcaaagaacagaataacacgtttaacaacatggtaacatttactgattgtatttcacaggaatatagtcagcaaaatcaccactgtagggaacaatcacaaaacaaactaatttccttaayaaactgcaagtaaaaaaataaagaagagatgaaacctataagttaaaagagagtcaacaaacatatcaaccaattaccctgaagaggccttacatatatcctaattcaaacagagaaagaaagttggaaatttgattactgataaataatttgttcttgggtttttgatggggtttgtctgttttttgagacagggccttgctctgccgcccaggctggagtacaatggc

SEQ ID NO: 290184 - DNA, 611 bp, Homo sapiens
ttctgctcttgaaagaaaatgaaatattttggtagatttctcttaccactaatcttgtttcactgataactgttaataccatttattattatgtgccatatgccagtttactcaatttacaagcattattttatctaatcttcaaaggggaaaattttctctgcacttaacagatgatcagttgaaatccagtgaaggtaggtaacttcctcaaggccacacagcagcgcattgatgaagccaccctttaattcttatgggtaaaggacatgtagggagagaagggcttctgaccacaagagagacaaggggaggtggagttcatattatgttkgtagaatgagtagagtatgaggcaaataggaagctcaaggaggcgagagaaaggaaaatctccttagtggactgaaggagagctagcagggaaggacaaaggaaggagtaacattgttataaaggtcattagttcattaatgtaaaaatccctcttggtgttatttaatactttcatcttgtttcaaaattcatctgattttaatgcaacaattatactgaatgggctgagcttagtagaatacaattataaaacacatttatactatgtcaccact

SEQ ID NO: 290185 - DNA, 651 bp, Homo sapiens
ttctctctggcccttgatagaaaaaatttgctaaccttttccctgtaagacgcgtgcccttgaattcatcacagactttgaggggacctgattggatgaagtaaagaattcattctggagcctcatagagaatgagtttacattgtgaaggccctaactgaagatcttgtatttaatccattagtccttggggagccttcaaagttggtgccaagataaaagcagcacattctagagaatggcatcaatgggtgggargaactgaatgagaggagaattctaaggtagggataccagtggtgaggcataagtgttgagagcttaaagagtgtccaggaagaggaagaactggttagtggtagaatgctgggacaatggcagaggggagcagacaggctgtgatcaaagaagtagagaaaaggaagctgaagccatacacagaatgtagtcatgagacacaaagagcctgtgtctgtgagacatcagaacacttccaagggtaatgagactttgccagctggcatcactcgtaacccagaggatcttgcaggtagatttacttttgctttccactagcatctttaaacatacaatttagcacctgacagattatggacagggagcaaagagaagtagtttgagattgatggg

SEQ ID NO: 290186 - DNA, 651 bp, Homo sapiens
ttctctctggcccttgatagaaaaaatttgctaaccttttccctgtaagacgcgtgcccttgaattcatcacagactttgaggggacctgattggatgaagtaaagaattcattctggagcctcatagagaatgagtttacattgtgaaggccctaactgaagatcttgtatttaatccattagtccttggggagccttcaaagttggtgccaagataaaagcagcacattctagagaatggcatcaatgggtgggaagaactgaatgagaggagaattctaaggtagggataccagtggtgaggcataagtgttgagagcttaaagagtgtccaggaagaggaagaactggttagtggtagaatgctgggacaatggcagaggggagcagacaggctgtgatcaaagaagtagagaaaaggaagctgaagccatacacagaatgtagtcatgagacacaaagagcctgtgtctgtgagacatcagaacacttccragggtaatgagactttgccagctggcatcactcgtaacccagaggatcttgcaggtagatttacttttgctttccactagcatctttaaacatacaatttagcacctgacagattatggacagggagcaaagagaagtagtttgagattgatggg

SEQ ID NO: 290187 - DNA, 651 bp, Homo sapiens
ttctctctggcccttgatagaaaaaatttgctaaccttttccctgtaagacgcgtgcccttgaattcatcacagactttgaggggacctgattggatgaagtaaagaattcattctggagcctcatagagaatgagtttacattgtgaaggccctaactgaagatcttgtatttaatccattagtccttggggagccttcaaagttggtgccaagataaaagcagcacattctagagaatggcatcaatgggtgggaagaactgaatgagaggagaattctaaggtagggataccagtggtgaggcataagtgttgagagcttaaagagtgtccaggaagaggaagaactggttagtggtagaatgctgggacaatggcagaggggagcagacaggctgtgatcaaagaagtagagaaaaggaagctgaagccatacacagaatgtagtcatgagacacaaagagcctgtgtctgtgagacatcagaacacttccaagggtaatgagactttgccagctggcatcactcrtaacccagaggatcttgcaggtagatttacttttgctttccactagcatctttaaacatacaatttagcacctgacagattatggacagggagcaaagagaagtagtttgagattgatggg

SEQ ID NO: 290188 - DNA, 638 bp, Homo sapiens
acggaaataacacaattcaacttgtaggttaatagcgtcactctgctgtgctgagtctaggctgggcgtgggtgcggggcggaatgtgaaagcagagagttcagttaggaggtttaatatagtttggatgttgtctccacccaaatctcatgtcgaaatgtcatccacaatgttagaggtagggcctcttgggagatgactcaattataagggtggatttcccccttggtactgtcgttgtgatagtgagtgacctctcttgagatcttgtcatttaaaagtgtttagtatcttcccccctcatttgctggctcctgcttttgccatgtgaagtgcctgctcccgttttgccttccgccctgggtaaaagctccctgaggcctccccagaagcagatgcttccatgcttcctgtacagcctgcagaaccgtgagtcaattaaacctccataaggctttttatgaccccrataagggcagctttagtggcatggtgaaggtgaaaggctgattagagagggttcaagagtgaaggagaggagagaaacttctgtttgatttggtttggttgtttgttttcacgattggagaaataatgtcatgcttatattagaaacatgagaaacatacagaagagag

SEQ ID NO: 290189 - DNA, 1215 bp, Homo sapiens
acagctctgtagttgttctgtgaggtttataaatagatttttttaactacttaattttctggtttctgcctctgtgttttctgtacctatagaggtagctcttttcagttaagtagagaaaagctcttcccctgggttgaaaataatgcagtcccgagaggctacttaactctacctttctggaggtcatggtagcaattggagatctcccaggcattctaaggggagctactaaagagccccagatactcaatttaccactagaaattcgcttcatctactctctgtcatctggggagaaaagtattataactgrcattcagtatgcacacaataagtgcataataaagagctattgaggggatcaaggagtaaatgggtttgcccataggactccatcagggtccaccaacacagacttacagcaaaaattggaaggctcttttctgctggattctgggaatctgtgttctctagtgtgccagggagagttggaatcaaaacacgtaatataatgtttctattcagagccccatttttttgccaaataaagtagcactgtcaaataataaatcttgtattcacttgggcatgtatgttwtcaaataaatatttaagtgaataaatacatgatagtgtttacactaagtcacatttcatctttaaagtggaataattagacacaggattcaacatcatgtttccagatttatttttctttctctttacaattgtttaatttaatttaaaaatwtatttcttcctaggggtttcaaaaattataggttcctccttgcaagatgtcaaatattacagacatgtattaagaaatgactaataatcttctctcttattatcccacccactgaaacaataaaaattaatacccttttccccagtgcttgcatagcaatacatatctacctagagacacatagatgtagggctggatttgtttgtttgtctttagaatattagactgatactaaatatcaggaatatgactttcagcatggtggttacacaaacggattctaaagtcagactggttggattcaaatttattggatcagcaatctcagacatgttatttgatgcctggttttgcctttgtaaaatggaagtaataagagaagctttccataaaattgctgtgagaagtaaatgacattaattaaaacaacagcaacaacttagaatggtacacatcacgtt

SEQ ID NO: 290190 - DNA, 462 bp, Homo sapiens
gacctactgttcaaatgaagattcctttcaaaatagtactgcttattgccaaagcacctggttactcaagagctctgagggagatgtaccaggagataaatgttgttttcttgttgctaacacaccatccattctgcagcccayggatcaagaagtcattttgactttcaagtcttctgatttcagaaatatatttcataaaattatagcttctatggatacatatgggcaaagtaaattgaaaacttctggaaaggatgcaccattctagatgtcacttataacatttgtgattcatgggaggaagttaaaatagtaacattagcaggagtttggaagaagttgattacaaccttcatggatggctttggggggtttaagccttcattggaggaagtaactgcagatgtggcagaaaaataagagaagtggagcctgaagatgtgactgaattgctgcaac

SEQ ID NO: 290191 - DNA, 389 bp, Homo sapiens
aggaaaaaaatgagaaaatcgagcacattgaagtgaggttttttttttttctttcatatatttgaaagtattccatttaaagggctgaccttttcctaagattttttggcttctctctatctccatacttcttttatttttaattgtacttgtccatgaaatctaaatgtcgggaaccactgctggtatgtctaraaatataagagcttgtcctctgagaattggctgagctcactaaattcacattgtgcaggccacagaaaaactgtcagctttaggtcaataacaatttggctcaactagctgaaaatagccccaaatggtgtccagtctcctaccctcttccttgtctaattaaatccacttcctccccaaatcctgatcgtcat

SEQ ID NO: 290192 - DNA, 365 bp, Homo sapiens
gtctggcaagggattaataaccagaatccataaggagctcaaacaactctaaagaaacaaaatataataatccaattataaaatgggcaaaagatctgaacagacatttctcaaaagaagacatacaatggcaaacaggtatatgaaaaagtgttcaacgtcattgatcatgagagaaatgcaaatcaaaaccaaaatgaggtatcatctcaccccatttaaaatggcttttatctaaaagacagcaaataacaaaygctgtcaaagatgtggagaaaagggaacccttgtacaccattggtgggaatgtaaaatagcacaaccactatggaaaacagtttagagtgtcctcaaaaaactaaaag

SEQ ID NO: 290193 - DNA, 399 bp, Homo sapiens
caacattttttatagtgacacataaaatagaagcttttgccttttctgggtgttggaaagaagagctttttytttccctcccatccctgtcatcatacctgcccaagagaaatgaaatgacctactcaattaatgaactgggattatgaggcatgaactgggggtacagagcacagcctctgtggggtgcagggcacagcctctgtctctctgtatctttcagtccctgtcattcagaatggcctgaaccagaacaaacacattctctgctccaacatgcaggaagtggccttcccctgggagggagattcagcatgcgaaggtccagccctgccagtgtccacatgggtgaactctgttcagggacaagaaatcaggaagcttgtctagccacagata

SEQ ID NO: 290194 - DNA, 399 bp, Homo sapiens
caacattttttatagtgacacataaaatagaagcttttgccttttctgggtgttggaaagaagagctttttctttccctcccatccctgtcatcatacctgcccaagagaaatgaaatgacctactcaattaatgaactgggattatgaggcatgaactgggggtacagagcacagcctctgtggggtgcagggcacagcctctgtctctctgtatctttcagtccctgtcattcagaatggcctgaaccagaacaaacrcattctctgctccaacatgcaggaagtggccttcccctgggagggagattcagcatgcgaaggtccagccctgccagtgtccacatgggtgaactctgttcagggacaagaaatcaggaagcttgtctagccacagata

SEQ ID NO: 290195 - DNA, 599 bp, Homo sapiens
ctgcctgtccaaccttggactgacaccacccttgttagtactgattcttgtagccaagaacaattgatttaaaacagttttgtagtcctcctcatttttcctttcttgtcttccttacctcccagaatacacacatagtttactatggcayatgtattctcattacaatgcccattcccaaataaatatcattttattttagagagactccttttctgtttgataataagtttgacacaagctaatactaaccagctatggcacaccactatctataaagtatgctgaatttgttatttcttgaaaattaaatttcaagaattattgtgtgtcttggtcagttttctgctgctacaaaagaataatatagactgggtaatttataaaaaacagaaatttatttcctaacatttctggaggctgggaaggccaagatcaaggtgccagcacctggtgagcaccttcttgctgcattttcacatggcagaagatagaagagcaagaaaggacaaatgttgtgccctcacatggcagaaaagcagaagggagagaactcactcccacaagcccattttataatggcattaatccatccatga

SEQ ID NO: 290196 - DNA, 457 bp, Homo sapiens
gcaaacatcatagagtgcacttacacaaacctagctggtttcgcctacttactacatacctagaatatatggtacagcctattgctcctagactacaaactggtacagtatgaaactatactgaatactgtaggcaattataacaccatggttaagcatttgtgtacctaaacatatctaaacatagaaaaggtactgtaaaaacacagtgtcctaatcttagggggccaccgacatatgtgcggttggacattgactgaactgtcattaggcaatgcatggctatattagtaaaccttgctactgtgtaagatctctgatccatgtgaggctgatttgatcatctgatcctttctgttatccaatgcccttagcaaattagttaatattttggycatcagtcctctcatctgtaaaatgggaaaagttatggttatctctcataattgttgaaaag

SEQ ID NO: 290197 - DNA, 620 bp, Homo sapiens
acaatgatcttccctcaagcctggtcatagctccagctratgtctatttctatctggtcctcatgtgtaacttggaggggacaagaacatatactaaatagtataggaagaagataaagaagaatttattcataatatctcaaattaagtagaaggtcttggtaaacacttcccctgttaagcatgagcaagaggaaaataaatgatacaatgattacacaaatatattctagcaaaaaacaaaagcggagaacagataagaacaagcatataaaagacaaataaagggcccagtctggaagaaaatataactccacagttagaaaaaactcctgccagcatttcacagtatagaaaaacgtaataagctctcaaaagcaaaatgataaaaccaagaggtaaaatgggaaacagctgagctgagactacaaattgaggaccaaaacaacaccatgagagaactaataaattgggcagagcaagaataaaataggctgaaaatggaattgcagcagtgacagagagggaagatttgatattgttattgcaaattaagaaaaaaagagaaaaaatttttacaagtagagaggaatcgatgtgaaagagagataaagatgatt

SEQ ID NO: 290198 - DNA, 1313 bp, Homo sapiens
ttggcccttattcctctctgctcctttgcagatccacaaacccaccattatgtcattgccatggtgaagagagcaccaacttccagctgagccagctccaaggcaagaagtcctgccacatgggcctgggctggtctgctggatagaacatccccatcaggacactgcttccccctagctcccttgaaaccgatgagccagctggggctgggtgtgcccaggcagggctcctgcactggtcacccgcatgggctgtgctggagtcacactgtcattgtgaagtgtatgtgtccacggcctccaagatggagtgagggtaacctgctttaaatatgyactggctgggtgtgtgcaccagcaactcctgggagctggcagctgagtcttctctgaggaaaggtgtcagtcccaccttcctccttatccctagtcgcttggcttgacaagggccatcactgaggcccactaagaaaagccacctccctcccagcttcccagaaaggctcattggggattctagacacactattggcacccaggcctacatgccttaggtgagggcttgggacatgggcaaggaaagggtgactgggctggcactaggattttttgtgttctccaggctccctgttcagttatgttgaggcacagtaaggwttggcccttattcctctctgctcctttgcagatccacaaacccaccattatgtcattgccatggtgaagagagcaccaacttccagctgagccagctccaaggcaagaagtcctgccacatgggcctgggctggtctgctggatagaacatccccatcaggacactgcttccccctagctcccttgaaaccgatgagccagctggggctgggtgtgcccaggcagggctcctgcactggtcacccgcatgggctgtgctggagtcacactgtcattgtgaagtgtatgtgtccacggcctccaagatggagtgagggtaacctgctttaaatatgcactggctgggtgtgtgcaccagcaactcctgggagctggcagctgagtcttctctgaggaaaggtgtcagtcccaccttcctccttatccctagtcgcttggcttgacaagggccatcactgaggcccwctaagaaaagccacctccctcccagcttcccagaaaggctcattggggattctagacacactattggcacccaggcctacatgccttaggtgagggcttgggacatgggcaaggaaagggtgactgggctggcactaggattttttgtgttctccaggctccctgttcagttatgttgaggcacagtaagg

SEQ ID NO: 290199 - DNA, 656 bp, Homo sapiens
ttggcccttattcctctctgctcctttgcagatccacaaacccaccattatgtcattgccatggtgaagagagcaccaacttccagctgagccagctccaaggcaagaagtcctgccacatgggcctgggctggtctgctggatagaacatccccatcaggacactgcttccccctagctcccttgaaaccgatgagccagctggggctgggtgtgcccaggcagggctcctgcactggtcacccgcatgggctgtgctggagtcacactgtcattgtgaagtgtatgtgtccacggcctccaagatggagtgagggtaacctgctttaaatatgcactggctgggtgtgtgcaccagcaactcctgggagctggcagctgagtcttctctgaggaaaggtgtcagtcccaccttcctccttatccctagtcgcttggcttgacaagggccatcactgaggcccactaagaaaagccacctccctcccagcttcccagaaaggctcaytggggattctagacacactattggcacccaggcctacatgccttaggtgagggcttgggacatgggcaaggaaagggtgactgggctggcactaggattttttgtgttctccaggctccctgttcagttatgttgaggcacagtaagg

SEQ ID NO: 290200 - DNA, 656 bp, Homo sapiens
ttggcccttattcctctctgctcctttgcagatccacaaacccaccattatgtcattgccatggtgaagagagcaccaacttccagctgagccagctccaaggcaagaagtcctgccacatgggcctgggctggtctgctggatagaacatccccatcaggacactgcttccccctagctcccttgaaaccgatgagccagctggggctgggtgtgcccaggcagggctcctgcactggtcacccgcatgggctgtgctggagtcacactgtcattgtgaagtgtatgtgtccacggcctccaagatggagtgagggtaacctgctttaaatatgcactggctgggtgtgtgcaccagcaactcctgggagctggcagctgagtcttctctgaggaaaggtgtcagtcccaccttcctccttatccctagtcgcttggcttgacaagggccatcactgaggcccactaagaaaagccacctccctcccagcttcccagaaaggctcattggggattctagacacactaytggcacccaggcctacatgccttaggtgagggcttgggacatgggcaaggaaagggtgactgggctggcactaggattttttgtgttctccaggctccctgttcagttatgttgaggcacagtaagg

SEQ ID NO: 290201 - DNA, 560 bp, Homo sapiens
tgatgccttcctggtattcgcatgattggtttgttatttaaccactctcattcattcactcaagtatataaaacatgtatttaatgagcacctactatatgccgggccctatgttaggagttaaaggagagataagccctgccttcacagagcttattgtacactaagctggtaactagaaggagacacacaggaacacctacaaaagcacattgaaaactcttgaaggcaggaatggcattgagcatatagcctatatcacacaagcatttaactgatgtttgtaaaatgaaaaatgtctccattaatctccagttttccacattaacagaggactgcacaaatcatggactctaaaagtgtttccttrttggcttatgagcataggctaactctgccacacataacaaataattcaaccttctccctcaacctcaagttcctccttagctcatttttgacattagggtcctagttggaggatacatggagagcaagaggaggccccagacaacagcaactatccaggagagcttatttccagaaagagaaaagggctg

SEQ ID NO: 290202 - DNA, 622 bp, Homo sapiens
tgtaggctgattaaaatttaaaaaaaaaaaaaaaaaagaccggaagtgctaattttcaattagaggttagtaaaaataaggatgtatttttctccccatgcaaagtacatggccttcccagatttgatctacaaattcctttgagaaggtctgtggactcaggtcaagaacccctgacattagatgctgaaaagattctttggaagaaatgcaatatgggccacattttacatatataaattatttttaaaagagccatcaaaaatttggggaaaaaagacaagtagaatcattatttcctgaagcacattctcttttaaaaaaaatgtgaaagagtcacaatattgaatgctatttgtattacctatataattgtgttttaatacctcaacaatgccagattcttgtctttgctggattttttttctccatctcattgctgcaagtgctagtcttcgttgctgtacattgattccagtcaraacatcaagtatggaactacttccccattcatagtcttcttcctagagaatttgtccaacaaacctgagttgttacagtctggggagccactgtgcaacatacagggctcctcaaggagcccaaagtctaataactgtta

SEQ ID NO: 290203 - DNA, 601 bp, Homo sapiens
tgtttgctctgggttatcaaaattttcaaatttcaaaaaatgctttttagtttcattggaaatataaagacttcttattatctgacaaatgttaaggttttatcagactaggttatttgatagattgacaattcatatcacattgaaagtaaagtacaaaaatggtttgttttataaaatctattgatcaattaataaaaattaataattttgttacagaattaagatcagttktatggctatttattttataaattaaaataacataaattcatcaccatgttaataacttctgggagtcgattagctcatccttggaattattccaaacctgaatggtatgagacagtttccattagaaatttaaacagaaatataatctgtttaagaaaattagtcgtatacatttaaaaatgctctgaattacattttgtcaaatattaaaatgccttaattctctcaagtgtctgcaaaatattggagattccttatgactaatgtgcaaaatgaatggataagtatgaaaaaagattagccaatttgattttgttgaaatgtcctatcagattgttaaaaaatttagcatgcaggaaaatattct

SEQ ID NO: 290204 - DNA, 1127 bp, Homo sapiens
tgtttgctctgggttatcaaaattttcaaatttcaaaaaatgctttttagtttcattggaaatataaagacttcttattatctgacaaatgttaaggttttatcagactaggttatttgatagattgacaattcatatcacattgaaagtaaagtacaaaaatggtttgttttataaaatctattgatcaattaataaaaattaataattttgttacagaattaagatcagttgtatggctatttattttataaattaaaataacataaattcatcaccatgttaataacttctgggagtcgattagctcatccttggaattattccaaacctgaatggtatgagacagtttccattagaaatttaaacagaaatataatctgtttaagaaaattagtcgtatacatttaaaaatgctctgaattacattttgtcaaatattaaaatgccttaattctctcaagtgtctgcaaaatattggagattccttatgactaatrtgcaaaatgaatggataagtatgaaaaaagattagccaatttgattttgttgaaatgtcctatcagattgttaaaaaatttagcatgcaggaaaatattctwacattttgaccaaaataactaaaagagagctccatagaacagcaaagaaacagcagaaatctagtagagcacagaaactcwggatggctacatagggaagggaaggaaattcattgcctccgtcaccccattccctgagttgggatcaactcagaaccaggagggacttcttcctgcagagaaaaggtaagcaagaggacccaggtagcctcaatcaccaccatggatgctgcagtttttgctactagagactccttcagtcttcgtaggctctgagcccagctgaagaagctctccagagtccacacactgagctacacccagagaaggagtgtggctattccccatccccatggctcaagttgctactgtgctgtgccaccttgaatcagagccactattagagtgtgtcctgctccaggggtgagtagtcattgtacccttccatccctgagactttgctgcccctgcaatatgcccacctggtagcatgccattcctgagctgatctgctgctattcttta

SEQ ID NO: 290205 - DNA, 528 bp, Homo sapiens
atagttcctaataagtaaaagatgactctttaagaatactaacatttcaatttttggttacactttattgatacattttcatgcatcagttggtatttttagtcatctctaaggatggtataagcctaatgtaacactagatcggccttttactaaaagtttcaaataattcaagtgcacttaccatgttccagccaggatagaggtagtctgtaccaacaaattcaaagtagtgagcaaacccttccttcagccacacgtcttcccaccacacaggcgtsacaaggtcaccaaaccactgcagtaacaaaattaatggtcatcaaataaaataaaatctatccccaaactattttatctaaaattacatgtattaaactatgattattataactggaattcattccccagttgattttgtgatcttaaaatgtgttgtggcaaaactgtattgatttatctgagtacttgggtgacactagtttttttatacatgctttcagagaagaacaaaaaagaataatcaat

SEQ ID NO: 290206 - DNA, 514 bp, Homo sapiens
gacagcttcttatatacacacagkttttataataaatatgaggaaccatgattataaacggcagagtagggaaaaaataaagaaaacattgtatgctactaaccttataaccgtgtattgaagcaacttagattttgttgaagcaactatggagaagtatttttaattgtggctctgttctatgtcttcacaacttaaggaatcttatatgataggtttataatttaagagcacctatatcaagcatatatctacacaaacatttgtacacaaatattcataaaagcctatttccagtagctaaaaactaggaacaactcaaatgtccatcaataggtgaataaataaagtatggtatatccatgcaacaaaatactactcagcaataaaaagaaatgaactatggttacagtccacaacatggttgaatctcaaaacagttatatggaataaaaaaaagaagaaagctatatctactctatgattcatgccatttatgtaaaattccagaaaa

SEQ ID NO: 290207 - DNA, 597 bp, Homo sapiens
tcatgtttttaatgttgtctttcttgagtgctatttctgtaagtgtactattaaaataaactaatcaaaaatcctaagaaattcactaaaaaacaaagactaataaaatagttcagcaagattactagctataagttcaatatgcaaaaaataagctgtatttctatacgtcagaaatgagcaatccaaaaataaaattgagaagacaattccatctacaataacatcaaaaagagtaaaatgcttagagataaatttgacaaaagaaatgcaaaatgtgtatactgaaactataaaatattgagaaaattaaagaacctattaaatacctaaattagttttaaaaagcatcctatgtttatggatcaaaatacatgatattacaattacaatactctccagcctgacacagagattcaaagcattctctatcaaaatcccaacttgtttcttagcaaaaactgacaagctgatcctaaaactcatatgttaatttgagggatccaamgttgccaaaatgaccatgaaaaagactaataaagttggagtagtaacactttaaggtaataggaatcaataaatcacttgtagtaccag

SEQ ID NO: 290208 - DNA, 555 bp, Homo sapiens
atgttccaaaatcaatctctctttctcccttctttttctggctttttctcctttgcctaattttttcagtcccaagcttgttcacattttccttatgagatgatcataaccagtgcttatacttctcagattttacaacctttattttttatatgcatgctagtatgttacttacttctaaataagacattttttttcattcatggaatgaaaacccaaatcatattttctatttaaacaatggcacaatagacaagaatcctggcagaatgaaaagcatgagttagaaacaataagatgtgaatcccatgtctgacacttaggagctggagcacatcattaaacttyctaggcctctatttactaaattgaagataataatttataccttatatgttacaagtgtgggagattaaataagtggatgtccagtggcaaaaagtagctgatactattatcgcctattattgccatcatatagcacactaaaagcctattgtccaaccattttacagaaatgaccacaggtgttatatttaatcaataaatgtaata

SEQ ID NO: 290209 - DNA, 612 bp, Homo sapiens
acactaagaggcacatcatcatgttttttttagaacaactaagagatacagatataaagaaaaatcctaatccaagtaacaatgggaaaaattcatatttgccttatttttatatctagtcattggctcaaaattatttgttgccattgaaagtctagtattttaaaatttcttttgttatgcttagttattcaggaaatgtttaattttcaaaatctcttttaaataatgtttataagatgcatgcatcatgtcattacctatatccatttgcatcagcccatcaaaataagttagtatttaagggcattggtgaaaattaatttgtcactatatgggtcagccctcttattaataataataaaaactgacatttacataacatcatttgtagagcaatttcatatcgagtctccaaatatttattgattaatatttccaatatttctatgcattatttggcaaatattaatctccattttgccaacttttaaagcaaagctgtagctcataaaatgacacgaacctagtgactctgttttctaamtcacagtctatgtctatctgcccggaaaaaaagaaaaatacatacatctaacatgaattagttta

SEQ ID NO: 290210 - DNA, 537 bp, Homo sapiens
acacataccaagagtcttttcaaaaagaaaagtgatgttcactggaaagtgtggccaagtttgggatttccttttaaaagtattctaaccaccagaggtttttgatcagctagttccatgttcactgttaacacatgaggacttcttatcactgctggagctcctgcttatctgttttcttgcttgcatactagttggctagatttcctctttcagattaagatgatagataagtacccaccgtgtgctgctctaaggccttgctcctcagagtakgatcacatgccccacagcattgacagacgtcacctgggagcttttaagaaatgaggattctgagacctccctgtctttcagcagcttttaatcttttgttcattcagcaaatttttgagagcctagtttgtgtaattgaacaagacagatatagtccctgcccccagggggcttctagttcagcaatgtacagaactttctgcaataatggaaatgatttatatctgcacaatttaatatgcagattgaatatggcaagtg

SEQ ID NO: 290211 - DNA, 592 bp, Homo sapiens
gtaatatttaatttatgcaacaatgtcaagaaataaggtagttcacgtaagtggtctacccaatgagtcacctctactctatataaagaaaaaaggtgtattttaaaaattaacataaaataagattaataaaaacatcttgttttatgaagagctttatatcttgatttatgaaaacttcatgaagcacgagtaagacaaaaaggagactagtaaacatgaaaattataagggttaactagtcgctgtatctagttttgatcttccaagcaatgagaaatgtatgctatataatatccatgacagaaaaagggaaacatctgtttctcagagaagatgattattcctaaatttcaaatctgagagaaatayatcatggggacattaaatatgaaacactgaacaatgctcttacgccttaaaaagtatagattcctttccaccatcctacatagaatacaatggacagaatcctttccttaatgactgaagttcattgaaatcactatcagttattatggctatattgcctgagtctccagggcctgactatgaaagaaggcaggatgctatttactacaactaaatagcc

SEQ ID NO: 290212 - DNA, 616 bp, Homo sapiens
aagcgattctgcctcagctacaggaactacaggtgtgcgccaccatgcccggctaatttttgtattttttagtagagacagggtttcactatgttggccaggctggtctcgaactcctgacctggtgatccacctgcctcgacctcccaaagtgctgggattacaggcgtgagccaccacgccaggactgtaaggtttttttgtatctcatttacaaatcccttccctagcctaaggtcgtaaagatcttctataattttgcctraaatttttaagttgattgtcagaaaattatttctgattctttttaggcaatagagcatatgttctacaggagaagcatggttgtggctgattcagtttcacatataacacagcaccttcaacatcaggctcttcattctatttctgtggccaaggtatgcagcttattatgtatttagcataagtatgttatcttttttgtttgttctttcattgttttatatgtgttttctggtttaacctgtttattccattccttcaaacataatatgctcggttatttatctccatagtattttacaatttttacttcaagttattggcattatctttactgtgaaattgcagcatg

SEQ ID NO: 290213 - DNA, 445 bp, Homo sapiens
acagactggaagaaaagaggtaaaaagggaaagagagggtttgcatgaatgtcctccacaaagagggtagaaagaaaactaaaattaccacttactctgtaccacctatgtgctggacgctgtgctgggcactaaacatatgtgacttcatttaattcttctagcaactctccaaggtagattccatggttccattaacttcattttactgatgatgaaactgaggctcatcaaggttaagaaatgtgttcaacctcccactgtaggaatgtggcagggctgggatgtaaatgggtcggcakcactgaggtcaccagcagggtggctctcatcagcgagcatgatctttggtccacagcgtacagccctgactggaggcaggacagggacagactggagctggatgctactaccatgttcccgcccacaatacctgccagagaac

SEQ ID NO: 290214 - DNA, 569 bp, Homo sapiens
tttctgtaattagagtgcctagtacattacctagcacaaaagcagttgcttgataaatacttactaaactataatgtgttattataacttatacatgattgatactccagagtttaaaaaatgttttcatgaatctcatttcatttgatagcacaatgctgcttttgccgttaatcattcactaggtagcaccgactgtgtgttagactcttctctagaagctgaggatataggctgaagcaaaaagtagtccttgccctaatggagtttatattctaatggaggaaataataagaaacaaatacaagttgataagtgtatgataacctttagtaaaggaatagaggatcatgggaagtggaaaggattctttgaggtgtgcaactgttgagctgagaattgaatcagggaagcccagccygaaggaaagaacaagtgtgagggccctgaggcttgctcctctttgaggaggagcagaaaggccaatgtggctaaggacagcgaggcgggaaagagtgggaggagatgaggttgaagagatgccaatcactggctcacagaggacgctg

SEQ ID NO: 290215 - DNA, 542 bp, Homo sapiens
ttttgaaataccttgtatggagttttctagacaggaccctgaataacacatatcacaatatgaacaaaatgctctcaattagatcaattagaccaaaaaaagtagtaaagatataaaagatttgaacagtatgttagcatgcctaatttgatgaaatatatcaaatcttgtactcaacaacagaaaggaggtgggactatgkgtattttttccttagcttcaatttttgctttttcacatcgtacatgcactatttttatcacagaggaggaaatagaagccattttattcttttgataagagtaaaccaaaggacctacaatcattaaaactggcagtgatgagaagctatctaaactgaaacaagctgttagaagcatggagggctaccgctttaaacaacttcatcattgctcatgtaatagcttaattctctcctatccgttaacaacttttcctgatacaatttatcttttccagtgggtacaaagtttaaattattttaaaaggcatggtgacaagttgtccataaagaaatatac

SEQ ID NO: 290216 - DNA, 1230 bp, Homo sapiens
aattaagtgtcttatcctcagagtacacatctttagtatttgaaggtttcagaactttttacgtgttgtgtaatttactcaaactttttgaagtaaaagctcagtagaaagtaaaaatcagttacctgtaagaatgaaataaatctccccatttgaatttggcaatcaccttccaccatgctggcatctgtagctgtaaaaggcaacatgaataagcatatttcattttttaaatttaaactcaatcaataccaaaaaagggggaaaagtttttttttttcattaggacatcttttactctgcatagtattgaaaacagaatttttacaccaaagagaaaaatcagacaatcattaatcaaataattagaagtatttgcttcactatttaatgaattcaaggaaaattctcatctacctacagtacttcgtaaagtacaaagatatcacaaatttgctgctgcttcctcagmttttttacctgtttaccaaacataccaacaaaaaatatgaatacttatttttctcacactattatataatcatagtagtcctaaaattgtctgttaactttttgttcatttcaatatcaaaaaggcatcacaatttggaattttaaacttacctccttctccataaawttctggcagttcctcaaaaagttaaacatagttaccacataacccaggatttccactcccatatatacatatgtataaaatatacacacaatgtacacacattttatatacaatatacttatatatgtctacacaaaatcatgtgcccaaatgctcatagcagccaaatagtagaaaaatccaawgtctatcaactgatgaatggataaataaaatgtggttatccattccttacaatggaatattattcagcaacagcaaaaaaagaaagtactaaaaacatgtgacaacatagatgagccttgaaaacataagttaaagaagccagcaacaaaggagcacatatcgtatgatttcatttatatgaagtgtacagaggagacaaacacatagagataaaaagtagattgactggtggttgcctagggcaggtatgccatggcatgaactgggggttgattatcacacggtacatggtttcttttttgggggctgagaacgttctaacattgactgttgtgatggttgtacaactcagtgaatatgctaaaaacaactgaattatacaatttaaatgagtgaattgtatg

SEQ ID NO: 290217 - DNA, 618 bp, Homo sapiens
gtcctcaattcttctcagttgagaggtatactcctcaagaaatttcccataattcttaagttggacttcggcatgaatttctaagtttaaattttaaaacagtatgtgataagtgcaagtaatgaattgcaggacatttacttcaaataacctcaaaagtcacgcaaagcactgttaattattactctggaatgtctggacttcctgaaaataaagttycaaagttaaacaacaattcagctttcaatcttctctatacacgaaataattttaaaagcagtagatgttaccatatataaagttactaccttaaaaccctaacatattatgaaaaagccactagcccatctacccccataatagagggctttgaaccaatctgaaaagtgccttaaacaattcaatgtcctgattctatcttttagtcatgaacaactcttttgcaaaaacaaatattcatgatctgaaggtgaaaaaaacagtctgtcacagaagtaacacttaaaaatgtagtttttaattctatacacactaatgtttaataatacacctaaatatttttaaatggaggttttatacctgcttgagcatattatttctataatgtctaaaatttaa

SEQ ID NO: 290218 - DNA, 618 bp, Homo sapiens
gtcctcaattcttctcagttgagaggtatactcctcaagaaatttcccataattcttaagttggacttcggcatgaatttctaagtttaaattttaaaacagtatgtgataagtgcaagtaatgaattgcaggacatttacttcaaataacctcaaaagtcacgcaaagcactgttaattattactctggaatgtctggacttcctgaaaataaagttccaaagttaaacaacaattcagctttcaatcttctctatacacgaaataattttaaaagcagtagatgttaccatatataaagttactaccttaaaaccctaacatattatgaaaaagccactagcccatctacccccataatagagggctttgaaccaatctgaaaagtgccttaaacaattcaatgtcctgattctatcttttagtcatgaacaactcttttrcaaaaacaaatattcatgatctgaaggtgaaaaaaacagtctgtcacagaagtaacacttaaaaatgtagtttttaattctatacacactaatgtttaataatacacctaaatatttttaaatggaggttttatacctgcttgagcatattatttctataatgtctaaaatttaa

SEQ ID NO: 290219 - DNA, 613 bp, Homo sapiens
aatgatgtccaatggagccataacccatagctctgtgaaatcggggacaatgagtgtccacttgtttgtacttcttcgcaccttacacagatgtgtgatctgtgacataagaagcttagaatggatgattgtcattcaaattgtattccctggtgacactgagggtccacagagctgtatcaggcaagaagtaagagtttcacctgaagtaacagaagcattggatatcagagtagccctctgagagtaatttattgatattgacatagggtttccggtacatggaccagcttcgtcaattatttcaaattacggaactggcattctgatgttaaagtcccattggccctctgatgagataaatctattttgggtacaccgatggaaccagaattctgagcctaccaaatcacccagggaatgcttttgaaagacagctggctagctttcctaaggcaacccccctacccttggctcttaaaagtctcacttttttgatagagaagagracccatagtcaggaacatctttaaagtgttctgcaaacagaggcttgaagtgaagggcctgtgaaaatggatgaggaattacagatgggtataaacgacattcc

SEQ ID NO: 290220 - DNA, 609 bp, Homo sapiens
caccttggcctcccaaaatgctgggattacagacatgagccatggcacccggcctgtgagatttaagaaaataaaagcaagtaactcaaatgatcaagtctcaaaaaaataagtttacaatcgtataaatacacacacacacatatatacatataggagataatgtaaacatgtaattaaaacattgatgtattaacttcaaacatgtaatgtaaattttgagtgaaaaagaaataatagacatttataataagctccaagaagcaagagaatgtgtttatttccgttttttttaaatctaatcaatttccatgtctaaacttcattagggaaaactttgtttgcaatttagtgatgtttatkttgcaaatggctaatggcactgtgtttctatgaaatgtttagaaatggatcgaaaatgctattgcaaagccaactaaattatagacatgaaataaatgtcaaggacaaaattattatattttgcatgtcaggttaaaaactagtgaacagtatttcaaaaatgtaggttattataaaaggtagcatggtataaagcagactccatgtgaccaagtacatatttttgtttatttatttttaattata

SEQ ID NO: 290221 - DNA, 1127 bp, Homo sapiens
actgattgattttgtgttaaatggtctaaaacatgagttggcaaactrtatactggaaatcaaatctggcccatcagctagtattgtagcttgaaagctaagaatggttttacattttttaaatggttaaaaaatatcaaaataaaatattaatttatgacacatgaaattcaaacacatctctgaccactcatacatgcgttgtctgtagctgcctttgggctacacagccacagagctgaggacctgccttggagaccacaggacctgcaaagcctaaaatagctactctctgactcttcagggaaaaggtttgctcctccccggtacagaactataattatgaaataatttttttgcatttatatggcatttttctttgcatgtatatggcatttcccttaccttgctctttcccattaattctcatgtctttgagttaagcaaattgaaaaagtgctttattatctgcttcctcaccctgaattgaactctttatgcatataactaggttatcattttctcaaagttgctcttcagggtgagatcctcgcccagaatagwactgattgattttgtgttaaatggtctaaaacatgagttggcaaactgtatactggaaatcaaatctggcccatcagctagtattgtagcttgaaagctaagaatggttttacattttttaaatggttaaaaaatatcaaaataaaatattaatttatgacacatgaaattcaaacacatctctgaccactcatacatgcgttgtctgtagctgcctttgggctacacagccacagagctgaggacctgccttggagaccacaggacctgcaaagcctaaaatagctactctctgactcttcagggaaaaggtttgctcctccccggtacagaactataattatgaaataatwtttttgcatttatatggcatttttctttgcatgtatatggcatttcccttaccttgctctttcccattaattctcatgtctttgagttaagcaaattgaaaaagtgctttattatctgcttcctcaccctgaattgaactctttatgcatataactaggttatcattttctcaaagttgctcttcagggtgagatcctcgcccagaatag

SEQ ID NO: 290222 - DNA, 509 bp, Homo sapiens
tggccaaactgtgaagttgaaggtgggtcttaggaaaattttttgaaatgaatatgtggaaaaagatcttatggagtaattaatgtagaaataaatgcagtaagtgtcttaacatgaggcaatgaagattagttattacactattggatgaatgctggtttatatggtccttcctctgttggaggtagtaagctctcgtctcagtgcacagaatgaaatctctgtaaacacactcgctatattggagttctgctttctctatttatcatgtttcctgtgatgttactcatgttcaccaaaattccaattaagaactctcctcagtagtgttaatgtaatattaaagtgccattaaagcatgyattaataatttgaatgtgcttataaggattattgtaattataggggctaatccaagttatctgtattcaattatggcaacgtcctgccaaaaatgttgagtatgtttcatttcaaaggacataaggcattttccagaattttaatcc

SEQ ID NO: 290223 - DNA, 554 bp, Homo sapiens
ctttaaaaaaatgactcagtataacagtggaagctgtatacagaaagagttgaccttacttttgtattccaggtggaaaccagcagctgccacactaatgtcagactggaaatgcaggtagagttggttggaagtactgttcagcagtgccggtactgtggtgcctgtaagaaacaatgcagatagaattgtaacactacaaatacattcacttttctaaatataaaacatatgagaatacttattaggcttacaaatccctacagtttgtctgattaccagatatttaatctgagtgttggttttattatgtattcagccattctatttttctaggtacaataaaaagttacccattgtctgctctgacctgctcaagtcgatgtgacacctttcycttgtacaaaaactcctattgtagcatgaggtttttttgcattgttttatccatgtaatcttctgcttcttaaatttatttttttacttgacatgaacagagaggaaagaaaagttcaacagccaagagtaatgagggttgagggagcagtcggacc

SEQ ID NO: 290224 - DNA, 620 bp, Homo sapiens
gttgtcattaagtattacaattggtgatcacctgaaaagtaaagtcttattttagttattaggatgaacaaagtttagtgtgcagaaaggaaaagccgygatgggttagcaaaaaagtatattggtgttcagacaacaattttgaaatctgagttttatatcaggaaaaaaacatgtcgccaagaagaaggaatttagcttttatgatttatgtaaaatatcttttcactgaaaagtgcttaaagtttcacttattgtgttcatttgtgtttacatttcagaagcagagttattctcttttttcttttaccttagctataaaagaagattaaatgttctcagtaacaaaaccactttcaaagaaagtaagtctgtgaatcaaatcataaatgtgcagccaagaatttcagaagtattccaaatcaacaacttataaaatggtatagttggttcatatatggtaagagagggaggaaacatgatattccatttttggaataaaaaattattaataaatattgaggactggatcctgagaacacaatgatatctgtagagatacccaaagtcaaaactgctctttagtttctgggtcaaagaacaataaaggtcaatatctt

SEQ ID NO: 290225 - DNA, 585 bp, Homo sapiens
gcaagcactttcaaggttgcaggggcagggggtttcctgggtccccaagagctcagggatgctggggtggctgtggctgtgccagggagcacagactcctgccccgccaactcaggaggcagggctctcgcctgttcccagctcccactggttccacagagtacacagccccacttgtgcctccccsactgcagccagtatcctcacagtggccgctccatatgggccattgtcaccatcactattgttgaagttcataaatatacaattcttgaaaaaagcaattgtagttttgatattttcattaacttctttgtactagataaaatgtgaattaagaaggtgctatgatttgaatgtcccctccaaatttcagctcatgttgaaatgtaattgacattgtagcagtattaagaagtggcacctttaagacatgattagtccatgaaggcctgtgccatcccagtgtggtattacagccattataaaagggtgagttcaccccctcctgctctgtcaccattttgtctttgccaggcatgcaatgacactgcaagaaggccctgaccagatgccagcaccaag

SEQ ID NO: 290226 - DNA, 550 bp, Homo sapiens
atagtatcattaaatatttttccaggtcattcaattttatgttaaatacataacaccacaaaagtctgacaggcatgttctaagtaactcttcctttcttcattcttcacaggaactcactaaatctgtttgctttcaaagttaaaatctgaagctcatattaaactcagaagacaataaactttttttatgyttttaaattggaaatatttcataattcagaaaaaatagcatactcttaaattcaagaagtagaaaatctatatagatggccaggtttgctccctaatttataccaggttaatgaagcattaatttttagagcctccaaagggatcagatatcaaagaaaaatatcagagggaatactgaggtgactctcaccaaaaagttaattggagaaaaaacgttatgacacttgtcagttggtatcaaatttattcaggtaaaacaaactgcttttatagtatgaattgagttatctataataaggtggcttcatgtcagaatattgcaaaactaaatactgaaaaataaaaactgaaagcca

SEQ ID NO: 290227 - DNA, 580 bp, Homo sapiens
gaaattttaaaaggccataatagccaaaataatcctaaaaaaatgaacaaagttggtggacttactctaacttcaaaaatcaagacaatatagtatgactttagtctarcaaatcacatgaaaataaaagaaaaatttgaaatttctgatacagactagtctatatttgatcagttgattattttataaagataacagaatgattcagttggaatatgttttgttttttattttgacattcaaaataaaaaacattcaaaataaaaatgctactggggcaactggatagctctatagaaacacacaaaaattaaccacaactgctgactcacacaaaataaaaatgaactcaaaatgtattacgtacctcaatatacaaggtaaaactacaaaactttcaagtgaaaacatagaagaaaatcctcacaacgttgggctggacaaagatttctcagataggtcacaataatgcaaagaacacaaaagaaacttcgatacattggacttcaacaaaattaaaaatattttctctttaaagttactgtgaagggtattagcaagatggctgaataggaacagc

SEQ ID NO: 290228 - DNA, 631 bp, Homo sapiens
tgctattagtggtcttataccctagaatcaagaggaagacacttggcacatgtctcggtagaatgaaaattccttgagagtcactcattttttaacactataaaaactagtcctttatcctctccacctaatccaatgctctagagggcagaacaaaattgactaattttttggcttacttggtttgttttctaagacaagtaartataaaactccctacagagagctattcatacaagtttttattacataagtatttctgaagtaaactgtgctcaagtagacacacataacactgacttttgttttcttttacaaacagcaacaacgtgaaaagtccactgaataatgaagaagaatgacacactggttacaagatgctactgaaaaatatgccacattctgttttctcctgttggagcttcactcttcacatttgtatattaaagatttcaaggaatcttggattaaagaaatcatgtttaacttcgctttactccacatttattagatgacaaaattttttacaaagaataataaataacatcctgaggaacaaacttagggaaagcttatcataaaacaaatagttaaagatggactataccattgagaattgggccttttctgg

SEQ ID NO: 290229 - DNA, 631 bp, Homo sapiens
tgctattagtggtcttataccctagaatcaagaggaagacacttggcacatgtctcggtagaatgaaaattccttgagagtcactcattttttaacactataaaaactagtcctttatcctctccacctaatccaatgctctagagggcagaacaaaattgactaattttttggcttacttggtttgttttctaagacaagtaagtataaaactccctacagagagctattcatacaagtttttattacataagtatttctgaagtaaactgtgctcaagtagacacacataacactgacttttgttttsttttacaaacagcaacaacgtgaaaagtccactgaataatgaagaagaatgacacactggttacaagatgctactgaaaaatatgccacattctgttttctcctgttggagcttcactcttcacatttgtatattaaagatttcaaggaatcttggattaaagaaatcatgtttaacttcgctttactccacatttattagatgacaaaattttttacaaagaataataaataacatcctgaggaacaaacttagggaaagcttatcataaaacaaatagttaaagatggactataccattgagaattgggccttttctgg

SEQ ID NO: 290230 - DNA, 582 bp, Homo sapiens
atttaacaattaccaatatacatgcatccaatatcagagcacctaaatgtaaaaagtgacattaagagatctagaagaagacatagactagaacacaataatagcaggggattgtaataccctactttcaacaacagactgattatccagacagaaagccagtaaggaaacatgggccttcaactatacttcagaccagatacaactaacagacrtagatggaggactccacccaacagaatacattcttctcaaatgcacacagaactttcttcaggataggctatatgttaggtcacaaaactagttttgacatgcttaataagatcaaaattatatgaaattattttctgaccacaagtataggaaactagacatcaataagagaagaaatcatggaaaaagttaacaaatgtgtagaaattaaacaatattctcctgagcaactactaggtctaagaagaaattaaaggagaaattttaaaatagcttaagacaaataaaaatgaaaacaacatatcaaaacttatgggatgcagcaaaaacagttctaagagggaagtttatagcagcaagtgccta

SEQ ID NO: 290231 - DNA, 470 bp, Homo sapiens
cagacagtaactttagtttacacacacacacatacacacacacacgcatacacacaagcactggtaaacataattatgtaattctaaaggatagtataaatgaatagttctcctttcttctcttaaatgatttaaaaggcaattgtatataataatatgtataaaatgtattgttgggcctacaacatatacaaatgtaatctatttcacaataacagtacacaagtggtaggtgggagcraagttgtactgtagaaaggacatgataccagatggtaactcaaatccacagaaccaaatgacgactaccataaagggtaaataagaagattaatataagaaactctctaaatactcaaatttctttcttatatcttcttgaaaggatataaaattatataaagtaataagtataacaatatatggttggatctgtaactcatataaatatgtataacaataatagtatg

SEQ ID NO: 290232 - DNA, 625 bp, Homo sapiens
cagccctttagactgagtgacctaagagtggggtgggaaccaggtccttttctatctctccaaacactggatacaaggcctataataaagtagttcctcagtaaatgtttgttggatgaaaatcagtgtattcagtgagccagtgagctaagtcttttataatgaataaactccagattatttaagtatacatggagccaacagggatttagcacagagtattaggaaacagaaatctctccttttatggaactacgtggacctacagatgctcgttcagaaaaaaatcattgaaattttaaaatggacttatatggaaatatgtraacacaaagtttacattgtgtcactttttggacaccttctctaagggagtattggaatatagcacccagtcatccagtcagtgagcactgtatactgggcctgtgtgggacatcaagaaatacaggggattgctaatcctcctcaagatgtgtgtcaggatgtgcttttcaaaacactgtctcaaaatcactgaaatcactccatcagtcacagacacctgaacaaaaacatgtccttttatgtctttatacaactgttctgatattggggttttaaatatcaacataaaccttgccaa

SEQ ID NO: 290233 - DNA, 532 bp, Homo sapiens
acattgtgtcactttttggacaccttctctaagggagtattggaatatagcacccagtcatccagtcagtgagcactgtatactgggcctgtgtgggacatcaagaaatacaggggattgctaatcctcctcaagatgtgtgtcaggatgtgcttttcaaaacactgtctcaaaatcactgaaatcactccatcagtcacagacacctgaacaaaaacatgtccttttatgtctttatacaactgttctgatattggggttttaaatatcaacataaaccttgccaaattcttgaggcttatgtgaaggcttcagttcagccatttgttgttcgagtatcttcgtcctgtctggcaccttggttttagaaatagacacggcagcctcagaaaatggaatatccataaatcacttatgatgatggagtgtgactttattttcgtgatcatttttgcccaggtgcctgttactgtgttrctaaaacagaagtagacactattccactgtttggcatggaatcttgacaaagaac

SEQ ID NO: 290234 - DNA, 1196 bp, Homo sapiens
tcaattgtgagtgccataagggtggcaacttatcttttattgcgtgtgtattttccccacagcacctattacaacattctgagtgcagagaagttctcattgaatatattgactgaatgaccaagatatttggaaacacattggagtggtgacacgatgtcaatataatctytggcttgtggtgagaaacatacagaattttagctattgtttctccagatgctctggtgtagagtagttgtgttgttttgctttgtgtcatctggccttaccctccattcccttcccttccttttcttcccttttccctttttaaaaaattttcccttgctttcccttctttccctatcatctttttaagaaaatatatctgcatggttcttgaagacttctcagggatatgaggatggagagtttagtatagcaagatgtcataagaacaatgtatgttccacatggtttgcctctcaacctttgagtctcagtttagttttgtgtaaaatggggatatgacatctgtgttgtggagctggttgcaaggattagatattttaaaggtgcctaatgttattagcaattggcatcaaaggagctcaataaatggtatagattcttttgttwgctgtcaaccccaggcaaaacgtagagtccatctgtgtccttccctatagttccagccagtatatcccgcatcacacatcagtcatcaggtacaggttgagcaagaagacgtttctctccagtttgatgatgaacagagtgagttcttttatttttagaattgactagaaacattacagttttcccacatggcattcattaaaagtttaacctatcacttagtaataaaaatgtgaagaataacaagtaacaaaactttgactcaaaaaattaattttttttgtgagacaagaatgtgaagggatttggtgtttttgtgatgtttataccattctcagataatcagctgtcaatgwcttgcagacttataccatgtcttatttgagtaattttcagaaaaataagcccagtgggataagaaagcccaaatgcatactcatatcagggatgcacctgcatctgaaaggagaaaaggaaacaaattaaaaagaggactagaagatttacttggcctgaatgatgagagtcacctgggtagaaccaataataattgttcagatcaaatgatttctgaa

SEQ ID NO: 290235 - DNA, 527 bp, Homo sapiens
aggttgagcaagaagacgtttctctccagtttgatgatgaacagagtgagttcttttatttttagaattgactagaaacattacagttttcccacatggcattcattaaaagtttaacctatcacttagtaataaaaatgtgaagaataacaagtaacaaaactttgactcaaaaaattaattttttttgtgagacaagaatgtgaagggatttggtgtttttgtgatgtttataccattctcagataatcagctgtcaatgacttgcagacttataccatgtcttatttgagtaattttcagaaaaataagcccagtgggataagaaagcccaaatgcatactcatatcagggatgcacctgcatctgaaaggagaaaaggaaacaaattaaaaagaggactagaagatttacttggcctgaatgatgagagtcacctgggtagaaccaataataattgttcasatcaaatgatttctgaaaatgattttaaggatgttttacatagctaatgagttgttccccag

SEQ ID NO: 290236 - DNA, 567 bp, Homo sapiens
tactgctgggtgggcatggatgtttcagctttccactgggcttcactgccacagggccaggggaaagtggactcacagttcctttaaatttttttgttacctggtagggacaagaggctcctcttgcctccagacctctattaggggtcaagaaactacccatgtggggaatatgagcctcactgatggtttctataaggagagaaaccttataggtgggtggaagatgagcgctgtactcagcctcactaaaaccacaggatgggggaatgcagttttttctttaggatttggctgcagtgaggtggtattgccataaatatttctgttggttggacaccctgtcctagtcctttggctgaggagagtaggctttttctgtgcatgttgacggtctcttgttggaagcttctgcagtgccacgtctgggatatatgaggggctaggggaagtaaggggagggaaacttactacagtgtcttttcttaagtcctgagattgctaggcagactgtcttttcctcctctttcagaaaytgagtcagcttgttggtgctgttatggccac

SEQ ID NO: 290237 - DNA, 585 bp, Homo sapiens
tcccccaaccctcttctaccagtcactcacaatcatagtattctggtttaattattttgttgaatatatcactatccacaattatctcactgacctatttgtttgcttgcttattgtatttttttctcttctcccccggcttgactttaatgtaagttccatgagatcagtgacctcatgttcaccacgtattttattcaccactttagcagygacctcatgttcaccacatattttgttcaccaccgtagcacctacagcatagtaggagagccttagatatttgtcagatgaatgaaggaatcatgtttacaaagcatttttttttttctgtaacttcaagggatttgggatattgggaggtaaatctgtgtactcagtctatcatattggttcattttctttcctccttaatacataggattttggcaccattggtagtcactttgacatgtcaataatgataattgcaaagaagactgttgttccaagtaatggataacacagcatctgaacctacctggatactttttcaatatctaaagaattatgttgtataaaaagatgctcgaagcccagaaaaaa

SEQ ID NO: 290238 - DNA, 1608 bp, Homo sapiens
ccagttctttttggacctttttagttgtaatggagcccagcccatgtaagtctaaaattctaatctccttttgttttcctctccctctcagacctatcaaatatagccagtgacttgtagcaaagagcatggtcttctaatttactctatttcccccatctgtttttcacaggcctttgaggcagggagcagggaaatggtgaaagtcaagtgactcttagcttgygctgttgtcatcctctctggactattgctacatttctaggtaactctgattagctactgatgctatctgtaaggctggcatctatccttgggctaaattttgggaaatgaatgagaaaaggaggcatagttaaggtttgggtgccagggaagatgatattgatgtacatggacatgctggaagaaagtgagctggttcagggtaagcataatccaactgagcatcatagaagcttctacatggtgactaaaatggaaatactgtcagcttttgctttatggaactgatgcgctccagctgttcatcctaaaatgaatccaattttccttgttawatcctgttaagcatttatttctgtacctataacaatatcttcatagaatatctatgagaaataaattaaattatatacatgcacatttatatacatatatacatctatgttatatatagcatatatatgttatatatgtatgctcatgtacataaaacacaccatacacatacaattattagctcaaaggttgacatataaaaaattccttataagtaataatagttttaactatttttattataggttataaagcgagttcttcagtagctttagctttagatcaacttgttcatgtgtgatgatgtgcagatcactaaaatgggccattccacttatcatcttccatttcttttcaaagttatctgactgttagaaataaaaagtgcataggcatcagagtctgacaaawcagaatttaaatttgtgctttgccatctataagccatagaacctgttgtaaatacctctctgaatcccaaagtccacatctggataacggtattattttttatttcttagagtagctgggaaacttaatgaggtgaaaagtatgtaacggtgccaagcacattgcttggcattataatwtaccacttttggcatccctcatttacatctagatcttagatatcattgaacccaatgtttcttaaagagggcttctgtgagattcagcaatgagaccgaacagctccacatttattgattttatatattttggtctttttaatatgtctatgccggcaagatttcttttggttagaagagaataccaaatgatatgttttggatatgtccccactcaaatttcatcttgaattgtgactcccacaattcccatgtgttgtgggaggaacctggtgggaggtgattaaattgtgggagcaggtctttcctgtgctgttctcctgatagtaaatgagtcttacgagatctgatggttttaaaaacwggagtttcccagcacaagctctctttttgcctgctgccatccatgtaagagatgacttgctcctccttgccttctgccatgattgtgaggctt

SEQ ID NO: 290239 - DNA, 615 bp, Homo sapiens
attgaagagatgcaaacacaaagttggcattcctttaacattttcaaagataataaaagtatatagtgactgctttcacccaagtaagcctgtcaaaatgttggcaatattgctttcggctgttttctggcagcatatctcatttgaaatattttcctgagttaattttttctatttaataaaaggctaaacatgaagacatgttcttgggtctataaagaatgcattaaacctctcctgatgacttaaaatatcttcaaaacagtggccatggtttgtcataattgcattctcacttgtctatgttcatttttacttcatttggtttgtagagtgaaatgagaactggattcaaaggtgtgccaatgatgttgtctgggaactagattcatctccataagcctcactccttcatctgcaaaagaggtataacaataccaattacacccccttcactgggttgtttagggaaaaatgactaccgcaaactaaagtccttcgaacagagaaaagcataatggaratttaagacatgtactattagtggtgttactatgatttctcttttctaatatagtttatgtcaacagggctccaatgcaagggtttgtgaaa

SEQ ID NO: 290240 - DNA, 568 bp, Homo sapiens
agaagtccactctgaggttatagtggtgctggaagacaagcctagtgaaggagaacaaggagagtttttctagaaaagagaagctgtttgtaaaagcctgaggcaggaaagaaattggcatgttcaaaaaatcagcaagaagccaacctgtttagagctaccaaaaagtataagccaagttcttcgcagttgaggataaattggtttgtttctcaacttaatgaacactaattcatcacctatacatcaaatactctatttgaacaagacaactctctgtgaascttatgttcaaatgagggagatacactctcctgatgtgttatcatagaagcactggaagccattggaatacataggtagttgggggcaggggtgctttttagaatatttttttaaacatcattattttcataatataaaattttcttttttcaacttttaagttcagttttaacttttattttaagaaatatgtgctggtttcttatataggtatactcgtgttatgggggtttgttgtacagattattttatcacccacgtattaaggctagtaccccttagt

SEQ ID NO: 290241 - DNA, 589 bp, Homo sapiens
aaattcgaggttggagctccttcaaagyccataccagagaactatcattagttgaccaggctgcttttccctggaaaatcccattcacaagtctgtgtttatttaacctgacttggaactcacccattaggaaaagcgttttcacttgacatttgtcaaattagaggcagttgtttagaacatctgagatggtggctatgaggtggggcaaacaacaagcagatcaaaatcttaaaaagaaagcctgaggaatgagatattaacagagggctttgaaactccagcatattcctgggaatctctaagaccacacccatgtgtaggaatataaacatgctcagagctatgcatacactcagaagggacatgagagggccatgagccctcagctttggcagacatgaggttctgcacaagcaggaatgaaggctaagacagagaggtaaccacctggctcagagttgaaggtgtgcccaaaacatgcacacataacatcagcaaagattaggagactctgtccatcattatttgaccactaagataatcaagcacagtcttcagtggctaccacaggacaaagaatacagac

SEQ ID NO: 290242 - DNA, 292 bp, Homo sapiens
acaaagttttcatggcactgtaattaaggtggtattaatctgacctacattgctggaaatttagaygctaattaaaacccacaaggtgattactaaggaaataacccccaaagtgataaaataaatgacaaggagataaaaatggcacacaagcaaatatctatttgacaaaaaaggcggcagtaatggaggaacagacaaataaaaatacctaagacataaagactgcaaatagcaatatggcagacttaaatcctaccaactcagtaagtacattaaatgtaaatggtca

SEQ ID NO: 290243 - DNA, 292 bp, Homo sapiens
acaaagttttcatggcactgtaattaaggtggtattaatctgacctacattgctggaaatttagatgctaattaaaacccacaaggtgattactaagraaataacccccaaagtgataaaataaatgacaaggagataaaaatggcacacaagcaaatatctatttgacaaaaaaggcggcagtaatggaggaacagacaaataaaaatacctaagacataaagactgcaaatagcaatatggcagacttaaatcctaccaactcagtaagtacattaaatgtaaatggtca

SEQ ID NO: 290244 - DNA, 535 bp, Homo sapiens
caattaagaggcagaactgacagaatagattttttaaaaagcacaatccatctatatgtgatctgtaagagacacactttagattaaaaaatacaaataggttgaaagtaaaaggatgaaaaaagttacactgtgcaaaaagtaaccaaaagagctgrattggctatgttagtattagaacaaaaaatagactttaaaacaaaaaaatgatagtacaaatcaagaaagacattttatgatgaaaaaaaggtcaatccatcagaaggccataacaattataagcaaaaatgaagctaactgtaagttcccaaaacaaatgaagcagaaaatgacagaactgaaggatgaaatagacaatttaacaataacagagaatccagtgccccactttcaacaataaatagaactagcagaaattaacaaggaaatagaagacttgaaaaatattataaatgaactagacctgacagacaactgtagaatactctgcccagcaacagtagaataaactttcttcttaagtgcacgtggcgtg

SEQ ID NO: 290245 - DNA, 535 bp, Homo sapiens
caattaagaggcagaactgacagaatagattttttaaaaagcacaatccatctatatgtgatctgtaagagacacactttagattaaaaaatacaaataggttgaaagtaaaaggatgaaaaaagttacactgtgcaaaaagtaaccaaaagagctgaattggctatgttagtattagaacaaaaaatagactttaaaacaaaaaaatgatagtacaaatcaagaaagacattttatratgaaaaaaaggtcaatccatcagaaggccataacaattataagcaaaaatgaagctaactgtaagttcccaaaacaaatgaagcagaaaatgacagaactgaaggatgaaatagacaatttaacaataacagagaatccagtgccccactttcaacaataaatagaactagcagaaattaacaaggaaatagaagacttgaaaaatattataaatgaactagacctgacagacaactgtagaatactctgcccagcaacagtagaataaactttcttcttaagtgcacgtggcgtg

SEQ ID NO: 290246 - DNA, 1096 bp, Homo sapiens
caattaagaggcagaactgacagaatagattttttaaaaagcacaatccatctatatgtgatctgtaagagacacactttagattaaaaaatacaaataggttgaaagtaaaaggatgaaaaaagttacactgtgcaaaaagtaaccaaaagagctgaattggctatgttagtattagaacaaaaaatagactttaaaacaaaaaaatgatagtacaaatcaagaaagacattttatgatgaaaaaaaggtcaatccatcagaaggccataacaattataagcaaaaatraagctaactgtaagttcccaaaacaaatgaagcagaaaatgacagaactgaaggatgaaatagacaatttaacaataacagagaatccagtgccccactttcaacaataaatagaactagcagaaattaacaaggaaatagaagacttgaaaaatattataaatgaactagacctgacagacaactgtagaatactctgcccagcaacagtagaataaactttcttcttaagtgcacgtggcgtgwagggggaaggtttgttttgaaaacataaaatgaagtaaattcattggcccatttaacgatgtctttgattgatttttgcttatcaacagttataacaataataatwaaaaaaaaaaacctaaagtaagtcttggttttcaaaaggaaactcaacctaggccacgaatggagagccttggaacagagccctccatgcaagtcttctcagaaaggtgcttagtaggtgctttggaggcccgtgagctcttgcatagtagggaactttagatccgctcagagacctgccttatttctgtttcagcatcagatctgcctgttgtatagtaatctaggacttttctagaaaggtcctggggtgcgaacggacctcagcgtgggccaggccagacttgacaaggctccctccccaagttcggcggagtccccgagatccccactcacccctccccagcctctgtttgctttgcttcccccaagaagtgatgtctggcatggaaaccactgcttctaaaagaatccagtacacgaggggttaacgaaatggcaggaaacccaggctg

SEQ ID NO: 290247 - DNA, 549 bp, Homo sapiens
agtaattaccgcctcattccatttgcttaccctggagcttccaggagtactcctggtgcttacaaagccaaatgctgattcctcaggcagaggtcccttgaggccctgaggggaaccagcttgctgattttcttcagcccctccctggttcaggcccagccccaaggtgagaggtctccttatccttctcagaacagtccttactcatcccatccacattccgctctaaggttccaagattctgtgagtcacaatgctcctcaagtctggaatctttttccacctgctcttccccagtgcaaagtcaggatttccaggaaggcctagctcagctcacctcyggaaaggtctccaagctgtgtgatctggggaatcgtggaggggttttgagctcaggtgtcttctgccagctggactctgagaccctggcctgctggggcgaggatgaggctctgatgtggtctggtcaactctgggttggccatctgcaccacagggctctaacaagggcctgctataggccatgagaaccactgtaagtgtccttgt

SEQ ID NO: 290248 - DNA, 555 bp, Homo sapiens
gccattccctaactttaccatggtattcacaggtgacactcaccgctgcaggcctttcagcctgagagtgccaaggttagaactgcaattttggtgcatcattctggcaggtgctgcagcagaacgtagggcttcctgcagagaggagatgggtggacaygctgtggcacccctgagacggtgaagggggtgccatgcaaggctgctgtcaccaggaagcagaggatggatggaggctgcgccacatcccggacagcgagtctgctgggagacctggatgaaccagggctcaggcagagaggcatggggttggggagtgctgtaagaacaggatctggagcccaatgttgggtttgcagcacagcccctcctctgactggctgcatagtagggtgagcccattgacctgtccagacctggatccctttatttgtaaaatagggaagcaactgtacttatctcagcgtggtggttcttagtgcagaagagcctggagcaccccagtgcctggcccaccccacatgaggggagtcagaatgcaggggtgagcccagg

SEQ ID NO: 290249 - DNA, 555 bp, Homo sapiens
gccattccctaactttaccatggtattcacaggtgacactcaccgctgcaggcctttcagcctgagagtgccaaggttagaactgcaattttggtgcatcattctggcaggtgctgcagcagaacgtagggcttcctgcagagaggagatgggtggacacgctgtggcacccctgagacggtgaagggggtgccatgcaaggctgctgtcaccaggaagcagaggatggatggaggctgcgccacatcccggacagcgagtctgctgggagacctggatgaaccrgggctcaggcagagaggcatggggttggggagtgctgtaagaacaggatctggagcccaatgttgggtttgcagcacagcccctcctctgactggctgcatagtagggtgagcccattgacctgtccagacctggatccctttatttgtaaaatagggaagcaactgtacttatctcagcgtggtggttcttagtgcagaagagcctggagcaccccagtgcctggcccaccccacatgaggggagtcagaatgcaggggtgagcccagg

SEQ ID NO: 290250 - DNA, 451 bp, Homo sapiens
aatgattaaggcaaaagcttctttcctaaacctgcaaccaaagagactagtgatgatggtaatatctgttgttaatgatgctaaaacaagttattgtttggttctccagtggttaaactgaatgaggcccagatcgcttgcaaaaggtacctccaaagagggccacaggtctttggctacaagtcacccataggggtttttctagctgtaatctctgatcatgactaggttataaaatctgtaaagaaagaacaaatttctgtaggccttcarggcatagtgcaagacccagctgttccatcaagttcttatttgattgaagtaaatgggccaacctggctggaaagcatgttaatattttaaatttctacattaacaactgtacacgtgcccagaggatgggtgatgaccacctcacataattgcaaaaaacaaaactgataagaataaa

SEQ ID NO: 290251 - DNA, 580 bp, Homo sapiens
cgaacacacagcctgtgccctcccttcacccctgcsctgggagacattgctcagatgtacgcacacagtgtgcatccttcagctcatgccttactcggtccacagggatccttgccaggtcagggtgcagcagggtccttcatgcctcaggcacccccatgagaagccagacccttggaaacacttacttgagctttctcactcctctccatagctgtcccaggctcccagagtaatgataggcatgaccccagggttcattatcttgacctctcagagatcaacccaggcaggcctgcacctcggctgtgcggtctagctgacattaggatcttaacagcagggtcagggaacagggccatgctcccaccatctctcagctataaatgaagcctgatctcatcatgaatgagagattgccttctgcctagcaatgagaatggcatttaaaattcaatatcagaaaagatattgacgagattaaaggcctagaggaattgatttatgaggaaagacccaaggaattaaatatgtatagcctagtgtaatagcatattaggctgtgaacacaatttcattt

SEQ ID NO: 290252 - DNA, 653 bp, Homo sapiens
ttctttgtatttccattatctttgtttatgtgcatgtatatacatttttatcaaatttatagcatatcatatggacaattttacaacctacatttttctttatcaataatgagcatttgcccatgttattaaataggtttttaaaatgtattttatcagtgcataatagatgtacgtattttcaggtacctgtgatattttcatatattcatataatgtataatgatcaaatcaggacaattggatatcatctgccttaaacacttttctttattctatgaacactcaaattcttctcttttagctatgttgaaatatacaatagattactgttaactcttgtcaacctactgractatcacactctatcctatctaagtgtattcctgcacccaataatcaacctctcttcatccccaaccctaaccctgcctggactctggcaaccagtctactctctaactccatgagatccacttttttagctcccgcatacgagtgagaacacgtggtgtctaacttcctatgtctgggttatttcactttacgtaatcacctccagtttcattcacgttgctgcaaatgacaggattccattctctgtatggctaaatagtattccattgtgtgtatatatatatatcacagtttct

SEQ ID NO: 290253 - DNA, 569 bp, Homo sapiens
aaacagccctaaaggtaaggaagccacaggaataattaagtgaaagcagtagcagaaggattttataaggcagggaagccattttcttggtccttaggggcttgggtaggtggagagaaacaaaaacaaaataacaaagcatgattctagctcaataagctattgaaaaagagctcctctaaatgataaattactttgatcatttctcaaagtaagtgatgaggactcttagaagggaaatttctgccttcaagtakctaactctttaagaagtcttttaaaaagtctgtgacatctagtttccagttactgaaaacctcttctccagccctttaatgattccttctacgtatcacagaaattagagttaaaaggtaggctgagaaaagatttattaggtaatctccaatctcatgtcaagtgcagaattgttagctgcagtgcattttctagtctggtgtgcttttactgtgttcttcccacttcctttgggagactacttcataatccaatagatctcactgagaggaaactcttgatctccatcctaatgttcccgtcccgctgtg

SEQ ID NO: 290254 - DNA, 623 bp, Homo sapiens
gatattgatgatggttgcacaacaatgtgaattaacttattaccattaaaatgtgcacttaaaaatgaccaagatggtaaactttgttatgtgtattataccatgatttaaaatattaatttaaaaataaatgccaaaatttgaaagaagaaaaaaatcccaaattactctctttggtcactagtttagaagatggggtaaatggtgctgctatgaaaacaaagtaaggagatccagcctgacaaggcagaagagcatgaattgtgaaatacgtttgatggggacatctaaatggaaatgtttcataggtttctggagacaagagataagggctctgtggacagaacaggaaatatgttggcttttattttagtgccaccatttcaggggaagaggggagccagttttcatgttcaattctgagccctagattttaacagagatgttttcaaaatagattgctatattaaagtatttttttcacattttgatacctctgaattgggaaggtcttataatgaacagcrtcttttaaaaattatggagacataattgacaagtaaaaatgatatcacaggacacatcttaatggttctcacccaaaacaacaacaacaacaaaac

SEQ ID NO: 290255 - DNA, 371 bp, Homo sapiens
aaggaatatgaaaatgaggtcagacaatggacagttgaattcaatgaatagctttagcctggggacagcaagacttgggaatcctaacagacatgtaggatagaaaataaacactaggacaaaggagtcaaagttacaaggcagtttttggttcaatatagcaagtatcctayagcaatattttattttaaaacatttgtctatgagataatccatttatattattactcaacaaacttgcagagctggaatttaaattttcctttagtagacagaagaccaaaagctaaggaatttgctgaatgcgcaataacaaatagttaatctgtaaaagaatagcagcttgctcccaatgtgcactaggattcaaa

SEQ ID NO: 290256 - DNA, 371 bp, Homo sapiens
aaggaatatgaaaatgaggtcagacaatggacagttgaattcaatgaatagctttagcctggggacagcaagacttgggaatcctaacagacatgtaggatagaaaataaacactaggacaaaggagtcaaagttacaaggcagtttttggttcaatatagcaagtatcctatagcaatattttattttaaaacatttgtctatgagataatccatttatattattactcaacaaacttgcagagctggaatttaaattttcctttagtagacagaagaccaaaagctaaggaatttgctgaatgcgcaataacaaatagytaatctgtaaaagaatagcagcttgctcccaatgtgcactaggattcaaa

SEQ ID NO: 290257 - DNA, 588 bp, Homo sapiens
ctttcagattccagatgcatctgtccaagaaactacatgaaaaggaattcaggaggaaaygaggagatgatgaagaggctggagttctgtgcctgcctccacttctgtcaatagtttggatcagatttgttttaccattcattcattgaatttgcatgaaatttcattaaaaaaattcccatttccagaagaaagggagggagagaggaaagcgggtaaaaaggaagaaggaaaaatacacaagccactcttttagagctttccagaatcctcattctcaatggatccatcattgcactcaaaaactgtgcaatcgaaataatatatgtacacataattaatgttgtcacagagcttaatattatcatggcatttagaaaagtctgttgaaaaacttaagacatgcattaaataaaattaaaagcataagatagagaacggcaataaattatgtaatcactcaggattatatattttcctttaaaacttgtttgtatggtttacaaaatacaaacatggaatatttgggaagaaagctctgaaaggaaaaaatgagaacagatgtcatgttgaaataattatgtataa

SEQ ID NO: 290258 - DNA, 588 bp, Homo sapiens
ctttcagattccagatgcatctgtccaagaaactacatgaaaaggaattcaggaggaaatgaggagatgatgaagaggctggagttctgtgcctgcctccacttctgtcaatagtttggatcagatttgttttaccattcattcattgaatttgcatgaaatttcattaaaaaaattcccatttccagaagaaagggagggagagaggaaagcgggtaaaaaggaagaaggaaaaatacacaagccactcttttagagctttccagaatcctcattctcaatggatccatcattgcactcaaaaactgtgcaatcgaaataatatatgtacacataattaatgttgtcamagagcttaatattatcatggcatttagaaaagtctgttgaaaaacttaagacatgcattaaataaaattaaaagcataagatagagaacggcaataaattatgtaatcactcaggattatatattttcctttaaaacttgtttgtatggtttacaaaatacaaacatggaatatttgggaagaaagctctgaaaggaaaaaatgagaacagatgtcatgttgaaataattatgtataa

SEQ ID NO: 290259 - DNA, 536 bp, Homo sapiens
ggaaggaattgggaatgctggtatatcttcttgcatctaccccatctaatccaatctaataaactggaccccaaagcaccaccaacctccctctgggaacttggtaatcagctacagtatatgggaataaagcttgttttgctagatttagagttactacacttctacaccaagaatacctacatgaagatacttcagactaactttattgcctgccttttttgcctttcaaataattcagccattcaattagaatttattcagttgytcaattttttaaaaaaagtttttcatgaataaccatgctgaacctaaccatgtatttatgaggaaaacaaaattatattgtgtacctgctatatgtttggcactttgacagatgctgtaagcaaattatctcaagattaagtaataacatttggagataggaaatattgtccccattaaatagagaatgaaaaggcacagagatgctaagtaactttctctagatcacagagcctgtaatcaacatctatgctgatcccaaactgtat

SEQ ID NO: 290260 - DNA, 1073 bp, Homo sapiens
ggaaggaattgggaatgctggtatatcttcttgcatctaccccatctaatccaatctaataaactggaccccaaagcaccaccaacctccctctgggaacttggtaatcagctacagtatatgggaataaagcttgttttgctagatttagagttactacacttctacaccaagaatacctacatgaagatacttcagactaactttattgcctgccttttttgcctttcaaataattcagccattcaattagaatttattcagttgttcaattttttaaaaraagtttttcatgaataaccatgctgaacctaaccatgtatttatgaggaaaacaaaattatattgtgtacctgctatatgtttggcactttgacagatgctgtaagcaaattatctcaagattaagtaataacatttggagataggaaatattgtccccattaaatagagaatgaaaaggcacagagatgctaagtaactttctctagatcacagagcctgtaatcaacatctatgctgatcccaaactgtatwggaaggaattgggaatgctggtatatcttcttgcatctaccccatctaatccaatctaataaactggaccccaaagcaccaccaacctccctctgggaacttggtaatcagctacagtatatgggaataaagcttgttttgctagatttagagttactacacttctacaccaagaatacctacatgaagatacttcagactaactttattgcctgccttttttgcctttcaaataattcagccattcaattagaatttattcagttgttcaattttttaaaaaaagtttttcatgaataaccatgctgaacctaaccatgtatttatgaggaaaacaaaattatattgtgtacctgctatatgtttggcactttgacagatgctgtaagcaaattatctcaagattaagtaataacatttggagataggaaatattgtccccattaaatagagaawgaaaaggcacagagatgctaagtaactttctctagatcacagagcctgtaatcaacatctatgctgatcccaaactgtat

SEQ ID NO: 290261 - DNA, 1082 bp, Homo sapiens
tagaaaggcctataacgtaacagttaacgtcatggaaactagagccacgctggctaggttaaaatcgaattcagctattctctagataaataagtttaggcaagtcatttaacttctttgtgcatccattttcttagctgcatatgagaatactttatgagattcctatgagaattgatttgagtgaagccctgagaacattggccgacaacacaaaaacactatttaagtgcttctactattattatctaattcaaagggttaatataattaaatgaggaagcacatttaatataatacaatatctagcagcagaaatatatcaattcaacaatacttattgggggcgttctttgtgcsagacaatgggccagacattaaggatgcaagagtgaattaaacaaagtccctgcctcctagtgcttgcactctattagagacagaacgtgtacaaataaacaatagaagatactgtttcaggtggtgaaaattaaaaacgaaaataacaagtttggaagagagaawatgttggacagcagagggtctatttgtcattgaagaaagttctaataaatagtacttcaccagtgaagtaggagcattggaataggaggagaggtcagagagaattacttggaaagatcatgaaggtccttgwaggactgtcatgaggactgtgatgaggactgcattctgcaagtacgatgggtagcctttgggtagttttaaataggggagggacataattcaatttatatttttaaagtgttactctgctatatagaaaatgaattataagtagggcaagatcagttagttactgcacttgtcctggccaaggaagatgatgggtctttggcaggttattataagagggacagtgaaaagtaaatggatttagaatatattttagagacaggatcaagtggatttcctaatcgactaaaagtaagacaagataaacaaaggaaagaatcaagacccgttccctcttctggggcctgagcaactaggtagatggttatgttctttactgggatgtaacaagattgagaaaatatagtttgggtgggtaggggata

SEQ ID NO: 290262 - DNA, 557 bp, Homo sapiens
atgttggacagcagagggtctatttgtcattgaagaaagttctaataaatagtacttcaccagtgaagtaggagcattggaataggaggagaggtcagagagaattacttggaaagatcatgaaggtccttgaaggactgtcatgaggactgtgatgaggactgcattctgcaagtacgatgggtagcctttgggtagttttaaataggggagggacataattcaatttatatttttaaagtgttactctgctatatagaaaatgaattataagtagggcaagatcagttagttactgcacttgtcctggccaaggaagatgatgggtctttggcaggttattataagagggacagtgaaaagtaaatggatttagaatatattttagagacaggatcaagtggatttcctaatcgactaaaagtaaracaagataaacaaaggaaagaatcaagacccgttccctcttctggggcctgagcaactaggtagatggttatgttctttactgggatgtaacaagattgagaaaatatagtttgggtgggtaggggata

SEQ ID NO: 290263 - DNA, 622 bp, Homo sapiens
taaattcttctgcacttttcctctactcaccacccagacgaaactgtactggcttcacaatagcactacatgccagcttaggcgataaaggcatcaacatgaccagctttatcatgccagtaaaatgttaatgggtcctacagcttatccacttttagaaaggtgactgaagaggaaaaccaactaatagagataaaccagcaaaaargggtaaccttataaattagaagaggaatgttttaacgattatatttttcaccatttatattggggagctatgagggtttttttcatttataatacttgttttctaaattacaaaaggaatgtatgttttttgaaaacaaaattaagcaatatgacaatatggaagaataggccaagtgcagtggctcatgtttgtaatcccagtgttttgggatgccaaggccagagggtcacttgagcgtaagtgttcaaggttacagtgagctatgatcatgccactgcacttcagcctgagtgacagtgacacagcaatatcctgtccctaaaataaaataataaaagaataaaaaattttaaaagggaaaatattttttctttttaacgaacctcattgataacctctgttaataatttg

SEQ ID NO: 290264 - DNA, 622 bp, Homo sapiens
taaattcttctgcacttttcctctactcaccacccagacgaaactgtactggcttcacaatagcactacatgccagcttaggcgataaaggcatcaacatgaccagctttatcatgccagtaaaatgttaatgggtcctacagcttatccacttttagaaaggtgactgaagaggaaaaccaactaatagagataaaccagcaaaaaggggtaaccttataaattagaagaggaatgttttaacgattatatttttcaccatttatattggggagctatgagggtttttttcatttataatacttgttttctaaattacaaaaggaatgtatgttttttgaaaacaaaattaagcaatatgacaatatggaagaataggccaagtgcagtggctcatgtttgtaatcccagtgytttgggatgccaaggccagagggtcacttgagcgtaagtgttcaaggttacagtgagctatgatcatgccactgcacttcagcctgagtgacagtgacacagcaatatcctgtccctaaaataaaataataaaagaataaaaaattttaaaagggaaaatattttttctttttaacgaacctcattgataacctctgttaataatttg

SEQ ID NO: 290265 - DNA, 553 bp, Homo sapiens
ccaagtgcagtggctcatgtttgtaatcccagtgttttgggatgccaaggccagagggtcacttgagcgtaagtgttcaaggttacagtgagctatgatcatgccactgcacttcagcctgagtgacagtgacacagcaatatcctgtcsctaaaataaaataataaaagaataaaaaattttaaaagggaaaatattttttctttttaacgaacctcattgataacctctgttaataatttggcatttttaacgttagtttactgtcttgaaggttgcatctctataggtctccccaaattgtcaaatattattttctagttatatacctatgttactgtgctttgctagagatatatatatatatataatgattctattctagttatatgtagtatacatatataatactatgtgtatatatagtatacatatataatactatatatatactatgtgtatacatagtatacatatataatactatgtatatatatactatgtgtacacatagtatacatattatactatgtgtacacatagtatacatatt

SEQ ID NO: 290266 - DNA, 553 bp, Homo sapiens
ccaagtgcagtggctcatgtttgtaatcccagtgttttgggatgccaaggccagagggtcacttgagcgtaagtgttcaaggttacagtgagctatgatcatgccactgcacttcagcctgagtgacagtgacacagcaatatcctgtccctaaaataaaataataaaagaataaaaaattttaaaagggaaaatattttttctttttaacgaacctcattgataacctctgttaataattyggcatttttaacgttagtttactgtcttgaaggttgcatctctataggtctccccaaattgtcaaatattattttctagttatatacctatgttactgtgctttgctagagatatatatatatatataatgattctattctagttatatgtagtatacatatataatactatgtgtatatatagtatacatatataatactatatatatactatgtgtatacatagtatacatatataatactatgtatatatatactatgtgtacacatagtatacatattatactatgtgtacacatagtatacatatt

SEQ ID NO: 290267 - DNA, 635 bp, Homo sapiens
gttggggtggctgtggcaatttcttaaaatgaaacaacaatggtttggcacatcaatttactcctttcacagaagatttctctgtagcatgtgatgctgtttaatagcagtttacccacagcagaacctctttcaaaattggagtcaattgtgtcaaaccccaccactgttttatcagctaaattgatgtaatatgtcaactcctttgttatttcaacaatattcacaacatttcaccagaaattctatttcattaaaccgctttctttgcttacccataaaaaggaacatctcatctgttgaagttttatcacatgattgtagcatttcagtcatatcttcaggctccacttctaattctggttctcctgctattttcactgtatcttcagtgacttcttccatgtaaatcctgaacctctcaaagatatccatgagggtttgaataaactttttccaaatttttgttaatgttgatattttaacctcctctcttgaatcacagatgtttttaatggcatctrgaatggttactccttttcagaaagttttcaatttactttgcccagatccataagaaaaaaaaaaacactatctatgacagctatagccttacaaaatatatttcttaaaca

SEQ ID NO: 290268 - DNA, 493 bp, Homo sapiens
ttgtgcacaaagaagactagatcaaaatcaaatgaataattcctcagttttcaaaaaatattttatggtcttttgagggcataatattagtgcatgtaaaaactagaacgctttatgatttgaaaagaggagaagatgctgagagagacactcttggaagctgggcaggaaatccagccatgcattgcctcaaggtctgtcattagatcaaaagcactcaggggacgatggtctgtgtaagaggtcctaatgctattcacgaactctcctgacattcattagtttccaagacattgattcttattctttaactttttagcacatttatcattttcacttatacatgtatgctaatagcaatcttatgtgaacttttacctcttatatgaccagaattgattaaaaatgtyggcaagtaagtttgttatttaatatctctgaactttctctattttacattgaatatttgctacattgtaagcattacagtatg

SEQ ID NO: 290269 - DNA, 498 bp, Homo sapiens
cttttgaactactccgttttccttaactctccttatctttttctgaatgaccttaaactcaaggtagtcgttgagtgggagggatgatttttagccatctttttcctccaactcaggtagataggatttaccagcttggycttaatttcctcctttctgttaacattgaaaaccatcatactaactgtaaaaatcaaatactgtaataagagtgagggagtgcatgttttaaagtctgtcgctatattagctcataccacatatgtggcaagaagcagatactgtacaaatcagttcaataatgaggcattgaaacacaagttacatactgtgctaggaataaaatgataaacagagtaacactattctgtccttttggatttttatagtttagtaggaatgtattaagtaatgacaagtacatgaatatgattaaagggatgtaaaatactgaatagcaaagggattttactttgtctatgggaccagtgaaaacct

SEQ ID NO: 290270 - DNA, 498 bp, Homo sapiens
cttttgaactactccgttttccttaactctccttatctttttctgaatgaccttaaactcaaggtagtcgttgagtgggagggatgatttttagccatctttttcctccaactcaggtagataggatttaccagcttggccttaatttcctcctttctgttaacattgaaaaccatcatactaactgtaaaaatcaaatactgtaataagagtgagggagtgcatgttttaaagtctgtmgctatattagctcataccacatatgtggcaagaagcagatactgtacaaatcagttcaataatgaggcattgaaacacaagttacatactgtgctaggaataaaatgataaacagagtaacactattctgtccttttggatttttatagtttagtaggaatgtattaagtaatgacaagtacatgaatatgattaaagggatgtaaaatactgaatagcaaagggattttactttgtctatgggaccagtgaaaacct

SEQ ID NO: 290271 - DNA, 498 bp, Homo sapiens
cttttgaactactccgttttccttaactctccttatctttttctgaatgaccttaaactcaaggtagtcgttgagtgggagggatgatttttagccatctttttcctccaactcaggtagataggatttaccagcttggccttaatttcctcctttctgttaacattgaaaaccatcatactaactgtaaaaatcaaatactgtaataagagtgagggagtgcatgttttaaagtctgtcgctatattagctcataccacatatgtggcaagaagcagatactgtacaaatcagttcaataatgaggcattgaaacacaagttacatacygtgctaggaataaaatgataaacagagtaacactattctgtccttttggatttttatagtttagtaggaatgtattaagtaatgacaagtacatgaatatgattaaagggatgtaaaatactgaatagcaaagggattttactttgtctatgggaccagtgaaaacct

SEQ ID NO: 290272 - DNA, 498 bp, Homo sapiens
cttttgaactactccgttttccttaactctccttatctttttctgaatgaccttaaactcaaggtagtcgttgagtgggagggatgatttttagccatctttttcctccaactcaggtagataggatttaccagcttggccttaatttcctcctttctgttaacattgaaaaccatcatactaactgtaaaaatcaaatactgtaataagagtgagggagtgcatgttttaaagtctgtcgctatattagctcataccacatatgtggcaagaagcagatactgtacaaatcagttcaataatgaggcattgaaacacaagttacatactgtgctaggaataaaatgataaacagagtaacactatyctgtccttttggatttttatagtttagtaggaatgtattaagtaatgacaagtacatgaatatgattaaagggatgtaaaatactgaatagcaaagggattttactttgtctatgggaccagtgaaaacct

SEQ ID NO: 290273 - DNA, 519 bp, Homo sapiens
ccttttatttaattcctcatccaatgataacatgctgacagatgactcaggttctttggagtcagtgtgaatgaagctcatgggatattagaattggagacagaaacagagaggcagtacaggcttcagtgttagacagaaatgggattcagtccaaacttggacacatactaggttgtgactctggatgtgatattcaatttctatgtgtttccatttcctcatgtgtaaaatgagataactacaagccttttgaaactttgatcctgaagaygtcgttttggtagatctaaaatgaatacatggtggatcccatcactgttttatttagaaatacaaaatcaaggttattaattctaagatatgcatccatagctctgcagtatccaaagcacagcattaactttagttgcatgaaaatttcccaagttggtatatggatgtatatgaaattggagtggtcatggaaagcatatgtgactttaaaaaatgaaaattctcactcgaggttatcaacac

SEQ ID NO: 290274 - DNA, 1090 bp, Homo sapiens
ccttttatttaattcctcatccaatgataacatgctgacagatgactcaggttctttggagtcagtgtgaatgaagctcatgggatattagaattggagacagaaacagagaggcagtacaggcttcagtgttagacagaaatgggattcagtccaaacttggacacatactaggttgtgactctggatgtgatattcaatttctatgtgtttccatttcctcatgtgtaaaatgagataactacaagccttttgaaactttgatcctgaagacgtcgttttggtagatctaaaatgaatacatggtggatcccatcactgttttatttagaaatacaaaatcaargttattaattctaagatatgcatccatagctctgcagtatccaaagcacagcattaactttagttgcatgaaaatttcccaagttggtatatggatgtatatgaaattggagtggtcatggaaagcatatgtgactttaaaaaatgaaaattctcactcgaggttatcaacacwtaaggttatgagtacactacaactcaccaattctatttccaggaacatatcacagagaactatctctacatgcatatctggagacacacacaaaawtgtcaatagaggcatgatttgaagtagacaaaaactggaaatcatagatgggagactagataaagaaatcatcttaaattcatatagttgtacataatattggtttgagaatgaactggagtatcaacatggattaaactcaaaaataatattcaggaaaatgtcaccgaagtatacataaaagcataatttattatcagcatataaaagtaaaaaggagataaaaccaaatagtgtattttttaggatgcacatatgtgataaaaccacaaaaaagaattaacggaatgatgaacacaagttttaaaatactgactcccaaaaagtgaagacaggaatgaatggtagtatacttaagttgcagctcattttctactttttaagccaggtagaaagcatatgccaatttgttttattgttctttcttaaattgtacatatatgccaagtctcctcttataaacatttcataata

SEQ ID NO: 290275 - DNA, 540 bp, Homo sapiens
tgccatcctgttggcaacacctttcaccagcatttaacagtcgatactggatataaactttagatcaatatagttacatttggtagttttctctgaaaaactcctgttttttttttttttttttttttttttttgacacagggtctcactctgtggctcaggctggagtgcagggccgtgatcatggctcacagccttaacctcccgggctcaagtgattctcctactttagcctcccaagtagctgggattacaggtgcacgccaccacactgagctaattttgtattttttgtagaaacggggttttgccatgttgcccaggctggtcttgaactcctgagcacaagcaatccacccaccttggcctcccaaagtgctgggattacaggcatgagccaccacacctggtactgatttttaaacttcctgaatatttacccataagtattctgaataagtaactattctgacattgttgagtagcttatgatrtactgctaatatgctgttaatagagaaagcaagctataatgcacat

SEQ ID NO: 290276 - DNA, 465 bp, Homo sapiens
gaaaatttattttgggccaggcacagtggctcatgcctgtaatcctagcactttgggaggccaagatgggtggatcacctgaggtcaggagttagagaccagcctggccaatatggcaaaatcctgtctctactaaaaatacaaaaattagccaggtgtggtggtgcatgcctgtaatcccagctacttgggaggctgaggaaggagaatcacttgaacctgggaggtggaggttgcagtgaaccgagatcacaccactgccctccagcctacatgacgggagtgacactccttctcaaaaaaaataattagaaaaaaaggaaaagaaaatttaatctgaacaataagcactgtttatggatrgttgataagacatgaccagactcgcttagacccaatgatgatgaaggaaatagaacacagaaatatgtaagcaggtacatcaagaacttctttttatggtat

SEQ ID NO: 290277 - DNA, 465 bp, Homo sapiens
gaaaatttattttgggccaggcacagtggctcatgcctgtaatcctagcactttgggaggccaagatgggtggatcacctgaggtcaggagttagagaccagcctggccaatatggcaaaatcctgtctctactaaaaatacaaaaattagccaggtgtggtggtgcatgcctgtaatcccagctacttgggaggctgaggaaggagaatcacttgaacctgggaggtggaggttgcagtgaaccgagatcacaccactgccctccagcctacatgacgggagtgacactccttctcaaaaaaaataattagaaaaaaaggaaaagaaaatttaatctgaacaataagcactgtttatggatagttgataagacatgaccagactcgcttagacccaatgatgatgaaggaaatagaacacagaaatatgtaagyaggtacatcaagaacttctttttatggtat

SEQ ID NO: 290278 - DNA, 527 bp, Homo sapiens
tgtttccgttctgttcactttgctatttatgtgttataacatcgaaggtgatgatggtggcagaaagaaggacataaatgcaacttgggccatttttttattttgggaaaaactgtgcatatccgaaaggaatattcaaatctgaattcaccatattccctcttaaatgtactcctctttatatatgctccctcaattaatggcacaatctacattttattcttaccaaaaacctgggactttctcatattattatattgctattattatttactagattcctctgaatgattctttaaaatcactttctattattctgaaagcactgcagccctttttagaatatgtgttgtgcttctttgaaattgtttagttatatatgtctattatcaggcactgtgtcttttgcagctacttttcagtccccagtatgatgcctggtacatagtagtgcttcaataagtggtttttgaatgaccaaatggaaatygggcctctgtaacttctctgtgtaatagaaagcatct

SEQ ID NO: 290279 - DNA, 636 bp, Homo sapiens
ctctctgtttctctctctttcctacaatgataattttcactggtgctcaacttatctttctgccagccatcttgctgagaaaagagcccagcccctcagcaccgcctgggcactgtagcttttgtttctagtggattgttttctctgatggcaacctcttgtcttgaactgacattctgccctgctcactgctcccagtgtcctctgttatatcaacatctgcagcagctgctgcttctttggctgaaaagtctcaatgtttgcctttaaaatgtcattccttcacctctctcagtactcagacttactcatcagtttgtttccagttgtcctcaaatgtgttcagaataaatgatgcacaaaggacagtttaaacatagcaaagcagctgtaggcaaggcatctccagctcaccgggctattctttcataataaaatgtgtcacattgtcattcgaatgtgtctctggcacagaagacactggctgtgtatyagctgtggcaataacaacatgtttagtggttgccaagccaagagggaaaaaagattaaatgaagaaggtgtagaaagatcagttaatgtgagttgccttcctttgctttttcctaaatttaactttcaaaaatgttgtttata

SEQ ID NO: 290280 - DNA, 587 bp, Homo sapiens
ttattaaagtgacattgctacctcactgccactagggcatgattttgattatttttctagtggctaattgatgagtaaaatagatacatttccactgtgtggtctgcctcttccatgatctatttgcctcatggttagctagggttaagggttcagtctgtggccaagagtagggtgaagccatatgacccatttaggttttaaatctatcacttcaacgtcataaaaaataactaaccacaaacacaggcattagaaagtaaaattcccatcctggcatgttcagtcttaacttttgagatcaaaggagttgcaaaataattatatttttacgcctgtatcactccacaaaagtcgtctcgtgctctttgttaatatgcttcaaataagaaaacatcagcctgccttttattgctatagagcaaacattgtgtacttctttctatgtactaaaagctttacttaaatgccctgtgttaaattggttattccctacaaagctctacraaatagctattattccagtattacagatggataaactgaggcatatagagattaaataacatgataagtggtagaactgg

SEQ ID NO: 290281 - DNA, 627 bp, Homo sapiens
tcctctgttttcaaacctccattggcttccttcctccctccctccctcccttccttccttcctttcttccttccttcctctctttccttctttccttccttccctccttcctctctctttccttccttccttcctctctgtctttccttccttccttcctttcttccttccttcctctctgtctttccttcctttcttcccttcttccttccttcctttcttccttcctatccttcattcgttccttcattctttcttctttcttttttttgagatggaatcttgctctgtcacccaggctggagtgcagtggcacagtcttggctcactgcaacctccacctcccaggttcaagcagttctgcctcagcctcctgaatagctggaattataggcaagtgccgccatgcccagctaattttatatttttagtagagatggggtttcaccatgttggccaggctggtcttgaattcctgacttcaggtgatccacccamcttggcccctcaaaatgttgggattacaggtgtgagccaccacccctggcctcaacctccattggctttcatcacacttagaataatgtccaaagtcattaccatagctctacatgacttgaccctggc

SEQ ID NO: 290282 - DNA, 542 bp, Homo sapiens
tagttctttagattttgaagaatgttactgatataggaataaaacaaaagatttacagacagagcaatggagagagtaattggaaaagagaaagatggagttcttattgttttcaacaatttaaagtgtgaatactgtgttgaaccactttgcatataaagatccactgaaaccttgttaatatgactgataaaaatgataggaatagatatttagatctttttaagcctcagttagtagccagtagatttgaggtaatgccttagactttamactttgccaaggtttgccaaatttgcaatccttttggaaaatgttatctgagcctggctgggtacctgggaaagatttatggaaggagataaacgttacaaataggaggaggaattcattgcattctttgtgggttgcagttgaagcatactggaagttacaagcctctgtgtctttcactttggatacttggctgcatttaaactccataagcaaaaatttgtataaaagtagcatcagctgataaagcctagactcacatagctcaa

SEQ ID NO: 290283 - DNA, 616 bp, Homo sapiens
acaacttgaatgagccttgaagtggatctttcccagagcctccataagagaatgtagtctcaataataccttgatttcaatttcagaattcagctgaatcatgaaagaamccatgggtgttgttttaagccactaagtttttggtatttatttttttacagcagcaatagaaaaaggaagtaaccaatttgttaaaatgcttctcccatcttttcttaacctttgacaagtatccttacaagagtggcaacatttccttccctacatagggaaatgtttatgaaaatatcaaattgcatataaccttcactcgtgcactaacagggcttcacccatctggggaaagtgtccttcagatctttctggaggtctccagtgggatggattacttatgtcctctcaccagttgcccctttctctccttctctggcccctcttgcccatttccagtgcttcgtcaatgtcccagtacatcatgaggtgactgacatgcacgataagggagatgctgcaggatgctccccaagctttgaattccaaggagcaggagcttggttggttctgcacagaggcagggagaacagcctttcctgtctcagagccactcatagtcact

SEQ ID NO: 290284 - DNA, 609 bp, Homo sapiens
agaggaggagtttgtcctggattatttgatgggccccagatccaatgacaagtgttcttctaagagtgaggcagagtggggattttgacagacacaccaggaggaagacagacagaagaggaggcaacatggccttggaggcagagattgaagtgatccaccctcaagccaaaaaaaaaaaaaaaaaatgcctgtagacagcagacactggaagacagaagtacatgattctccccaggtgtctctgactggagggagtgtagtcctcctgagtccttgatttcagactcctggcctccagtatgatgagaaaataaatttctcttgtcttaagccaaggttacagtaatttgttatggcagctgcagaatacyaatatagacaacacactgttagcttttaaaattgtgtaaaacacacaaaactccatctgttctagacacttgtttgtaaacagaggaactttactacacgcaaattagtgttaatactatcagaagttgaacttagaatattaggtgtaagtatttgtcaatgtgatcgctccccttaaaagcctgtaacgttgttgtactggatattgctaatcaatttatattattgaaagct

SEQ ID NO: 290285 - DNA, 545 bp, Homo sapiens
agtgggagaatattgcacctaagctctgttttttctttcctctaatttagatatatgcagatctcaaagtctctgacaatcaaggctctgttcctacatagggcttatgggaaagaatcgcacaccagaacaagatccttttcactggaaggatcgcttgtcggggaggcgaagggggaaagacatggtaatgcctgtttgtttgacttctctcagccccttctttggagcagttttgaattttttggctcggctgccccatcacaggcagatgtttgaagctcttgtgctccatgaaggtgaaagaagcagacaactgcctcttttgtttctctttgttaagtgttttttttctgacagtctcactctgttgcccaggctagagtgcagtggtaagatcttggctcactgcaaactctgcctsccaggttcaagggattctcttgcctccgcctcccgaatagctgggattacaggtgcgtgccactatgtccagctaatttttgtatttttagtagagatgggattttgccacgttagccagg

SEQ ID NO: 290286 - DNA, 560 bp, Homo sapiens
aatttcctgtgtcatcacgaagataaggcttagctgtcaccatggcatcttgcacttgcccatattatggagactattggctactgaacaaactgtgctattggtaaagtccctttatagcaggcaaatactctttcatttgtgaatttattcactccatatttacctcctccaactttggcttctatttgttcaaaattggtagacaaaagttgatatgacttattctgtcaccttttctggagatattatttacagttcattagtagatttgtagatgacacaagtttgacatactaagatataaattcccagtagtagtattatagacatttgattgagtagtgtttargttactttcctcaaaatcattatctctgatgttttctcaaaatcacacttcaaagaggatgatttacttctggggcaacactgcaggtagttctgccctatctcaacaataaatacaaaagagaaacaacaacaacagactccaaaattaccaatattgcatcatcagtaaaagtcactgtttgtggagttaaactgcctttgttaaa

SEQ ID NO: 290287 - DNA, 560 bp, Homo sapiens
aatttcctgtgtcatcacgaagataaggcttagctgtcaccatggcatcttgcacttgcccatattatggagactattggctactgaacaaactgtgctattggtaaagtccctttatagcaggcaaatactctttcatttgtgaatttattcactccatatttacctcctccaactttggcttctatttgttcaaaattggtagacaaaagttgatatgacttattctgtcaccttttctggagatattatttacagttcattagtagatttgtagatgacacaagtttgacatactaagatataaattcccagtagtagtattatagacatttgattgagtagtgtttaggttactttcctcaaaatcattatctctgatgttttctcaaaatcacacttcaaagaggatgatttacttctggggcaacactgcargtagttctgccctatctcaacaataaatacaaaagagaaacaacaacaacagactccaaaattaccaatattgcatcatcagtaaaagtcactgtttgtggagttaaactgcctttgttaaa

SEQ ID NO: 290288 - DNA, 560 bp, Homo sapiens
aatttcctgtgtcatcacgaagataaggcttagctgtcaccatggcatcttgcacttgcccatattatggagactattggctactgaacaaactgtgctattggtaaagtccctttatagcaggcaaatactctttcatttgtgaatttattcactccatatttacctcctccaactttggcttctatttgttcaaaattggtagacaaaagttgatatgacttattctgtcaccttttctggagatattatttacagttcattagtagatttgtagatgacacaagtttgacatactaagatataaattcccagtagtagtattatagacatttgattgagtagtgtttaggttactttcctcaaaatcattatctctgatgttttctcaaaatcacacttcaaagaggatgatttacttctggggcaacactgcaggtagttctgccctatctcaacaataaatacaaaaragaaacaacaacaacagactccaaaattaccaatattgcatcatcagtaaaagtcactgtttgtggagttaaactgcctttgttaaa

SEQ ID NO: 290289 - DNA, 643 bp, Homo sapiens
tgcaatttgttaaaacagtctcaggaaactaacatgctccccagccatcatccgtggtagatagcctcaggaggtgctaagggttcaggctctcaagaggcagaagggctgagagagctgcgcatgcccagatctggctttcagactcacctttcaggcagatcactccactttttgtgggacagagtgactaaagagcagggagagccaaggataygtttagagtaaattcctcttcatagagacttctttttaaaaagttattattcataagcatccctaaattctagctattgcaatgttgaaataatttttaatatttaaatattatggtcattgttaatgctggacaaaggctgaagctgacattaacttatacatcagagagctttgaaggccaatattgagattttatgtttgtttttttgttcaataacaaaggttatccataaagttgaaatttacttatctctctgcctcaaaaccaccttctttgttgcatgtcctcagcaaagaaggcaggggcaggggttgttatcttttatcctgtttaaagaaagaagcaagttaactgatacaaacattatcaaattccttgctcatcttcatccaataaaatggtaccatctacttgtaaatgtcc

SEQ ID NO: 290290 - DNA, 379 bp, Homo sapiens
cagcactttgtgctcacttctggtgctgcaaaacgccacgcaatttattcgattcgcattttaaaaccagcgattcagaagcagggcctagggcgagggtcttccagcgctggagccccggggggcggggtgctcagtgcaaacctcgttccctccgcgagtgtcgcctccaggctgttatttgcaaagaaacgtctttttgacgcagggagaaatggcaaattttaagtacgtcattaatatggcgccaaaagatttttttaagtataagctcgctttttttttttttttaaggttgcggggggcgccgcccgggtctggggcgcgtagggggcggggtgtgagcaraaagtgtgagtgaaagagtggaggggcgggg

SEQ ID NO: 290291 - DNA, 524 bp, Homo sapiens
acaagtgaatagatgagtgaattaatacaatagcttcttaactatttccccttttacaataaatttgcttctaccttaacttatctaaagcacatactggtgagacggtctcttattagaagcaataaaattaaaactttccatctcaaaggtatagaatccagggtctttaggtattgtaagaagtcattttgtgacctgttccccaaactttctacaattgtacaactggagccagcctacattatttacarattatcagattttcctggcttttgatacttcatgattctgattttctctctctttactttgtacttctcttgtgggtttcaccatctgccaaatccctctccaacttctcagagttctttaaagccattttgtgacttcttcctgaccagttccttccctgaatcttctcagctttccagaatgttctggtgagttttcccattctgcttgaattgtaggtatatgtgaacaagagccaacttatctcctagatttaaaaactcccttag

SEQ ID NO: 290292 - DNA, 494 bp, Homo sapiens
aagacaggattacatctagggcacagacatagcaggtattgatttatataactgaagaatggttggatgtgctacagctttttatttgcactcctatttgggtagggtgtaatctgttgcccgagaaaatacatctctgtcaggatctgaatgttttggggattttgcttataactctgtaaaaggctcattagtcacaggagaggaaatgctaccaagtgtttatacctttttggtggaacaaatatcattttatgacaaacataaatytgaataattttttaaagcttggtcgacaatgaatgattgttactgctattcaaaaatattgtttgagcacttcctcatctcccttatgttgctttctgaacttataggagcagaaatatatcaggtttcttctgggatttgtgaaccagtagccaatttttgttgttgttgttgttgttttgttttgacaagtaaaccttgactacaccctacatttgccctag

SEQ ID NO: 290293 - DNA, 589 bp, Homo sapiens
  misc_feature (1)...(589): n = A,T,C or G
nntgataatattaagatttcttgtgctcaaaataaattcttgcaaattatcaaaagtaaatgagtaaaagattgcaagaatcttaaatataagtttggaagtggaagacttaagtctaatttaaaacttaactcttagaatgcatatctatgcctcaggttatattctttacccaggaaatgaaaaaccacttccacctgcatatttggtatgaccagagtctgccatttcaccagtcttaacaacgaagcactgcataaattctccttaaatgacacttcaaatatatgatgttttatgatatggtgtacatattcaagacaattaaggacaattatatagattgaaagttacttttgattccttagcatttttattttattttgttttgagacagggtcttgccctgttgcccagattggagtgyagtggcacaatcacagctcacggcagcctcaaccacctgggctcaagctatcctcccacctcagcctcccgagtagctgggactacagatatgtgccaccatactcaggtcatttttatattttttgtacagtttcgtagttttgccatgttgcccaggctt

SEQ ID NO: 290294 - DNA, 1110 bp, Homo sapiens
  misc_feature (1)...(1110): n = A,T,C or G
nntgataatattaagatttcttgtgctcaaaataaattcttgcaaattatcaaaagtaaatgagtaaaagattgcaagaatcttaaatataagtttggaagtggaagacttaagtctaatttaaaacttaactcttagaatgcatatctatgcctcaggttatattctttacccaggaaatgaaaaaccacttccacctgcatatttggtatgaccagagtctgccatttcaccagtcttaacaacgaagcactgcataaattctccttaaatgacacttcaaatatatgatgttttatgatatggtgtacatattcaagacaattaaggacaattatatagattgaaagttacttttgattccttagcatttttattttattttgttttgagacagggtcttgccctgttgcccagattggagtgtagtggcacaatcacagctcackgcagcctcaaccacctgggctcaagctatcctcccacctcagcctcccgagtagctgggactacagatatgtgccaccatactcaggtcatttttatattttttgtacagtttcgtagttttgccatgttgcccaggcttwtaagtattctattaagtgactttatatatgaaagttttaaaaattgaggctctcactagccagataattacttgactaataaatactagtgatctaaaaatacacaagaatgtagatattcattagttaactcwtttccagttttgtggtttatgtagcaatttaatagacaggcaaaataccttcagaccttcaataagatgatacttcactgtcttaaatttattctggaataaccaaaggtaaaaatttaatagtgaatcacagagcctactctatcacatgaccatgtggtaagatcaaacagatttttgcagactaacatttccagaatgttgtatttttaaataaaatataactgacttttattatgtttctgtttaatattaagataatgttaagaactgatgatataaagaatgaaaagccatgattccaattctcaaagattttaggatttagtagaaatgacacatgtaaatagatgagaagaatacccggtgataaggataaagacagg

SEQ ID NO: 290295 - DNA, 520 bp, Homo sapiens
taagtattctattaagtgactttatatatgaaagttttaaaaattgaggctctcactagccagataattacttgactaataaatactagtgatctaaaaatacacaagaatgtagatattcattagttaactcatttccagttttgtggtttatgtagcaatttaayagacaggcaaaataccttcagaccttcaataagatgatacttcactgtcttaaatttattctggaataaccaaaggtaaaaatttaatagtgaatcacagagcctactctatcacatgaccatgtggtaagatcaaacagatttttgcagactaacatttccagaatgttgtatttttaaataaaatataactgacttttattatgtttctgtttaatattaagataatgttaagaactgatgatataaagaatgaaaagccatgattccaattctcaaagattttaggatttagtagaaatgacacatgtaaatagatgagaagaatacccggtgataaggataaagacagg

SEQ ID NO: 290296 - DNA, 520 bp, Homo sapiens
taagtattctattaagtgactttatatatgaaagttttaaaaattgaggctctcactagccagataattacttgactaataaatactagtgatctaaaaatacacaagaatgtagatattcattagttaactcatttccagttttgtggtttatgtagcaatttaatagacaggcaaaataccttcagaccttcaataagatgatacttcactgtcttaaatttattctggaataaccaaaggtaaaaatttaatagtgaatcacagagcctactctatcacatgaccatgtggtaagatcaaacagatttttgcagactaacatttccagaatgttgtatttttaaataaaatataactgacttttattatgtttctgtttaatattaagataatgttaagaactgatgatataaagaatgaaaagccatgattccaattctcaaagattttaggatttagtagaaatracacatgtaaatagatgagaagaatacccggtgataaggataaagacagg

SEQ ID NO: 290297 - DNA, 625 bp, Homo sapiens
atgtctatacaaaataaagaagcaatgatccttacatgttttgtaaaaccagcttttgatatatattttgctgtaaagatcagctattagcgatttctgacaaggtacttcaatagagatatttttcactaagcctccatttacatgattcagcagtcaacaaagccagagctgcagctgaatcatcctagaggagctgaaasaagacctgcaaatggatggcaacaacacgtgatcaaaggaaacccacgaagagaacaatgatttcccagaaataaaggggtctatttcatacatacaaaggacctacactccaatccattgcacaaataatttatatctgcaaaatgtatgtatggataatgatccttcatgtgaagcttgaggctaaaatataccaatgaagcattcaaggaatatttagctttaggaggtttctatcttgttaaaacttttggaaaaaataagaaaacatacgattttaggaaaactaatgagatcattgccacacagatatattaaataggctagggaaacaatggaggatattacatgtactgatggttgtggtctttggtataggtaaagcaactgtggccagttttccctaaggcggccttcttct

SEQ ID NO: 290298 - DNA, 625 bp, Homo sapiens
atgtctatacaaaataaagaagcaatgatccttacatgttttgtaaaaccagcttttgatatatattttgctgtaaagatcagctattagcgatttctgacaaggtacttcaatagagatatttttcactaagcctccatttacatgattcagcagtcaacaaagccagagctgcagctgaatcatcctagaggagctgaaagaagacctgcaaatggatggcaacaacacgtgatcamaggaaacccacgaagagaacaatgatttcccagaaataaaggggtctatttcatacatacaaaggacctacactccaatccattgcacaaataatttatatctgcaaaatgtatgtatggataatgatccttcatgtgaagcttgaggctaaaatataccaatgaagcattcaaggaatatttagctttaggaggtttctatcttgttaaaacttttggaaaaaataagaaaacatacgattttaggaaaactaatgagatcattgccacacagatatattaaataggctagggaaacaatggaggatattacatgtactgatggttgtggtctttggtataggtaaagcaactgtggccagttttccctaaggcggccttcttct

SEQ ID NO: 290299 - DNA, 1048 bp, Homo sapiens
atgtctatacaaaataaagaagcaatgatccttacatgttttgtaaaaccagcttttgatatatattttgctgtaaagatcagctattagcgatttctgacaaggtacttcaatagagatatttttcactaagcctccatttacatgattcagcagtcaacaaagccagagctgcagctgaatcatcctagaggagctgaaagaagacctgcaaatggatggcaacaacacgtgatcaaaggaaacccacgaagagaayaatgatttcccagaaataaaggggtctatttcatacatacaaaggacctacactccaatccattgcacaaataatttatatctgcaaaatgtatgtatggataatgatccttcatgtgaagcttgaggctaaaatataccaatgaagcattcaaggaatatttagctttaggaggtttctatcttgttaaaacttttggaaaaaataagaaaacatacgattttaggaaaactaatgagatcattgccacacagatatattaaataggctagggaaacaatggaggatattacatgtactgatggttgtggtctttggtataggtaaagcaactgtggccagttttccctaaggcggccttcttctwtcactgtgattatgggtaagatgataatgaccttattccagagggggagtttgtaacctaagctaagtcaataagccctacacacaatcatctgttggttcagaaatggatatgttacaatggtgggctaaacagagagaggttggtgactgttgaaagtgttatgcatataaatttgaaagtggaawaggataggctgagattatgagggaagactgtcttaaaatgaagtcatgaccaatgaagtaaaagctgacagacagtaatatcgctaaactcttgggtcagcccttgcctgaaggctgaaaggaattctagaccttcagattcataagccaatgaatatgctgtattctgtgtgacaattttagttatgtttttattactttcacaataaagtatcttaacacatatgtgaaggc

SEQ ID NO: 290300 - DNA, 422 bp, Homo sapiens
tcactgtgattatgggtaagatgataatgaccttattccagagggggagtttgtaacctaagctaagtcaataagccctacacacaatcatctgttggttcagaaatggatatgttacaatggtgggctaaacagagagaggttggtgactgttgaaagtgttatgcatataaatttgaaagtggaataggataggctgagattatgagggaagactgtcttaaaatgaagtcatgaccaatgaagtaaaagctgacagacagtaatatcgctaaactcttgggtcagcccttgcctgaaggctgaaaggaattctagaccttcagattcataagccartgaatatgctgtattctgtgtgacaattttagttatgtttttattactttcacaataaagtatcttaacacatatgtgaaggc

SEQ ID NO: 290301 - DNA, 586 bp, Homo sapiens
agtccaggctgaggtggcctyagatggagatgaggaacttgttgaactggagtaaagaacactattgccatgcaaagggaatggtcacatgttgcccctaccctagagatctgtggaactttgaacgtgtgagagataatttagggtatctggcagaaggtcaaagggttcaagaggaagcagagcataaagaattggaaaatttgcagcctgatgatgcaacagaaaaaaaaaatggggggggagaaattcaagcaagttgcagaaatttgcataagtaacaagcattcaaatgttaatcaccaaggtaatagggaaaatgtctctggggcatgtcagagaccttcaaggcagcccctgccatcaggcttagaagggaaaaatggttttatggactgggcccagggactcctgctctatgcagactccagacaagtcgccctgtgtcccagctgcttcagctcaagccattgctaaaaggggccaacttgaagctcaggcttgagttcaagctcaagtttcaaagggtgcagtttccaagtcttggcagcttacatgtggcattgggcatgcaggtgcagagaaa

SEQ ID NO: 290302 - DNA, 571 bp, Homo sapiens
acttgagccaaggagtttgaaacagaactggccaacatatcaagacttgtctctgcaatttttttttttaaatagccaatatggtggcatacatctgtattctcagctacctggggggctgaggcaggaggattgcttgagcccaggaggtcaagcctgtagtgagccataatgatgccactgtacttcagcctgggtcacagagtgagtgagacactgtaccaaaaagcaaaacaaataaaacaaaacccacatcaacaacaataaaacattcaaaattcaagtaggttcaaattaaaaaatctgtagcattgtaaagcatcaagttctyttctactccttccctcactgcctacttaatgtccttcctcctcctttccttccttccttccttcctttattctatcagtaaatttaagtaacagtctatggaatttgactcatagaattttatgtctactaatggttaataacattatttatgtagaaaggtaaatcttcttattatttaaatcacattaattttggtatccttaaggattttcaaaattcaattaattatactaatgtt

SEQ ID NO: 290303 - DNA, 566 bp, Homo sapiens
attgaaagagataatagggcttacatttaaaacaagatctagcaggatgagttcagaatataaagccattgaaaggtaagtggtgtcaacttcatgggaaagacagttgaaagaaaaagataaattacattttaatatgttkatttttgaggtaatactatgttacctactcagataactacagtgtgaatggtacatgactgggatgatggaaaaaaatggaataaacttgtgtaggaggtcgtaataggcaatgaatatccaaactggctatcacactaagcagaggtgaggaaaattaagaaagtaaaagtagccattatacttcagaatgagatacaaactgtacaaagtcattaagaacagtaaggaaggagattctgattcactgacaattggtcaatagtgtctaaagctatagataatttaaggacctgaaaaaataaaaatatttttcttttgtttcagtgatatgctgcaactcttaattaggaaagaactagtgtggatgcagttcagcacttgcactacatattttcaaagattatgactgacaaaggaaagta

SEQ ID NO: 290304 - DNA, 608 bp, Homo sapiens
tgcaattaattcaatgtacttgccaaattttacaagttgaaaccaatgcccctgggatcttagccctttttactgacctagttagacatatttttgaattactgaaacaaattttcattaggacctagagaaatttcagagtcctatcttgggtgtaaggggaaaaaaaamacacaacacattgtgttgcagataaatattccatgtagaagtttgatgactgggcacacttacatgtcagaagatgttgctatgtataaaaatgtttttaagtctcaaactgaaagattgtcaaagccaatataactgattttcttctatctacgactgactcatgacctaagaatggatatatacaagcttgtacagtgagtcagattctatatgacaaattctactcttgtattacggctgaaaaaaaaaatccactgtgacatacattatgtgaaggaaaataataaaacaagtcctagagctcaaaaacatctcaactttgtctgcatggaagcaatatacaattaagaattggtgtacactactggctttcttgctgccttgatatctcactgttaggaagcctaattagggtaagtataacacagaggtgg

SEQ ID NO: 290305 - DNA, 608 bp, Homo sapiens
tgcaattaattcaatgtacttgccaaattttacaagttgaaaccaatgcccctgggatcttagccctttttactgacctagttagacatatttttgaattactgaaacaaattttcattaggacctagagaaatttcagagtcctatcttgggtgtaaggggaaaaaaaaaacacaacayattgtgttgcagataaatattccatgtagaagtttgatgactgggcacacttacatgtcagaagatgttgctatgtataaaaatgtttttaagtctcaaactgaaagattgtcaaagccaatataactgattttcttctatctacgactgactcatgacctaagaatggatatatacaagcttgtacagtgagtcagattctatatgacaaattctactcttgtattacggctgaaaaaaaaaatccactgtgacatacattatgtgaaggaaaataataaaacaagtcctagagctcaaaaacatctcaactttgtctgcatggaagcaatatacaattaagaattggtgtacactactggctttcttgctgccttgatatctcactgttaggaagcctaattagggtaagtataacacagaggtgg

SEQ ID NO: 290306 - DNA, 608 bp, Homo sapiens
tgcaattaattcaatgtacttgccaaattttacaagttgaaaccaatgcccctgggatcttagccctttttactgacctagttagacatatttttgaattactgaaacaaattttcattaggacctagagaaatttcagagtcctatcttgggtgtaaggggaaaaaaaaaacacaacacattgtgttgcagataaatattccatgtagaagtttgatgactgggcacacttacatgtcagaagatgttgctatgtataaaaatgtttttaagtctcaaactgaaagattgtcaaagccaatataactgattttcttctatctacgactgactcatgacctaagaatggatatatacaagcttgtacagtgagtcagattctatatgacaaattctactcttgtattacggctgaaaaaaaaaatccactgtgacatacattatgtgaaggaaaataataraacaagtcctagagctcaaaaacatctcaactttgtctgcatggaagcaatatacaattaagaattggtgtacactactggctttcttgctgccttgatatctcactgttaggaagcctaattagggtaagtataacacagaggtgg

SEQ ID NO: 290307 - DNA, 595 bp, Homo sapiens
ttactgacttattatgattacaaaattatatgagctgaatgttaaaaggaatttgaagtcactctgtgtgtatatgtggcggggtggggggaagacctagaatgcaaaacaaagaaataatctattttaaaaagaatctattttattactttaaaatttatttattttaaattgttttaaaacaagaacaattaccaattgagcaatttatttattagcagttgttattagaaaataaattacaattttaaatttagatgaaaatataatgattaacgaaagaaratatatttaacaatataaatagaatatattatatgactggtgtgtctagacttttaaaatcaccagtggtcaattgtactttctggatttgctatgagttgaggataaataatcccatggcttataaaattgacaaaaaaaagaaaagaagtaaaattaagaattttcatagctattttagaaaaaaattcttcacatatatgtagtgtaccattgtataatacagaaaaatagataatagtaacataacatataattcatcaaatatacaatgttacatcttattttccataatttttaaaagcaccta

SEQ ID NO: 290308 - DNA, 595 bp, Homo sapiens
ttactgacttattatgattacaaaattatatgagctgaatgttaaaaggaatttgaagtcactctgtgtgtatatgtggcggggtggggggaagacctagaatgcaaaacaaagaaataatctattttaaaaagaatctattttattactttaaaatttatttattttaaattgttttaaaacaagaacaattaccaattgagcaatttatttattagcagttgttattagaaaataaattacaattttaaatttagatgaaaatataatgattaacgaaagaaaatatatttaacaatataaatagaatatattatatgactggtgtgtctagacttttaaaatcaccagtggtcaattgtactttctggatttgctatgagttgaggataaatartcccatggcttataaaattgacaaaaaaaagaaaagaagtaaaattaagaattttcatagctattttagaaaaaaattcttcacatatatgtagtgtaccattgtataatacagaaaaatagataatagtaacataacatataattcatcaaatatacaatgttacatcttattttccataatttttaaaagcaccta

SEQ ID NO: 290309 - DNA, 361 bp, Homo sapiens
aaaaaattctgtatcttacaggcgatgatgggcttttctacttccactatcamatagtactgaaaatgctacttaatatcccctgtttcttgtacttcaacattctcccaaacaaaatttcttactacatgttaggaaaagagtggcaaaacactttcgtttgagttgaggtattaatatttatgaacagattgagatttcctcaaaatgtagtaagaacatttattaactggcccagaagatagtaagtcacaaagtaaccataaaagtgaggtacataaatcaagtagagattaaagctcattgacaaattcttaacatttttctgacattgtggactaggacctatgggattcgtcca

SEQ ID NO: 290310 - DNA, 879 bp, Homo sapiens
aaaaaattctgtatcttacaggcgatgatgggcttttctacttccactatcaaatagtactgaaaatgctacttaatatcccctgtttcttgtacttcaacattctcccaaacaaaatttcttactacatgttaggaaaagagtggcaaaacaytttcgtttgagttgaggtattaatatttatgaacagattgagatttcctcaaaatgtagtaagaacatttattaactggcccagaagatagtaagtcacaaagtaaccataaaagtgaggtacataaatcaagtagagattaaagctcattgacaaattcttaacatttttctgacattgtggactaggacctatgggattcgtccawgctatatgtgtttcattttctatgaagtgtcacttcagttctgttgcccatttttttctattgggttatttgggcttttttattaattatagaaaaaattttatatatacttgatatatataacaatcaagttacttatacgtacttaataattggtcagttgcgtttgctttatatatattctacgatttttaacttctctttttatcttctttaaggtacatttgaatgaactaactttctcaagtttaacatagtcaaatttatcaatwtttttgcagtaatttttttatgttttaagaatttttttattccaaggtcttatagatgtctaaatatttttctgctaaagtttaaattttgtttttgacatttaagtcctaaatccaaacttcatgacatgagttaggcatccaatttcatctctttccacatggattgccactttattctcggttccatttattgaacagcctctcttttccccactgatctgcagtgcctctcctgtcatata

SEQ ID NO: 290311 - DNA, 639 bp, Homo sapiens
actactaaaaatacaaaaattagccaggcaaggtggcgtgtgcctgtaatggaacggagatagtgccactgtactccagcatgggcaacaagagagaaactccatctcaaaaaaaattttgatgttaaatataagaaataaaatctagataaagtttagggtttkgtaactatgttgttaaattaagaagaaaaaagcttttgtttttgctttggttttttatttgttgttcttttttaattaggaagttattacttagggaatctattttacttgctattagacatatttttatctatagtcataaactttcttttgtagaaaattgtgtaatgggagcaaatgttttcagtctattttctgaggctatccttgaggctgccaagggatcctggaaactagtgtaaggctgctggtaatgcttccagaagtttcaggcactcagcatactttaaatgttttaaatagttaggcaggagcttctgtgaactaatgaccaaataattttgcagtttggtttatgggctgataaacgtagtgagtaagccctgaaaaaataccataaattagcttcaggtctaactgataggaaaacagatctttgtatgaataaagataagaaattggccgggcacggtg

SEQ ID NO: 290312 - DNA, 578 bp, Homo sapiens
agcaacatggatggagctggaggccattgtcctaaaagaattaacacaggaacagaaaaaccaaatacagcatgttgtcacttataagtgtaagctaaacattgagtacacatagacataaagaagaaaaaacagacacaatggcctacttgaaggtggagggtatgaggaagttaagtactgaaaaactaccttttgtgtactattctcattacctgggtgacgaaataatctgcacaccaaacctccacaacatgtaatttacccatgtaacraacctccacctgcccccgtaaacctaaaataaatgttggaaagaaaaataaaataaaatgcagatttctgtacagtagggctgggataaggccggggatagcacatgtctaacaacctggggtgatgccagtgctgtggcccactcgacctcacattgtctgataggcaggtactgtgaggtattttcaacttttctcttgaattaaataaaaagaaatatgagaagaaaacaaaacagacaacaagacacaattcctgccttttgtcttaggatccaggaggggagatatacaaaagcagtg

SEQ ID NO: 290313 - DNA, 411 bp, Homo sapiens
ctactaaaaatttaaaaattagccaggcacaacgccacacaccaatcatcccggatactcaggaggccgaggaagggaattgcttgagtacaagaggtcaaggctgcagtgagctatgattgtgccactgcactccagcttgggtgacagagcaagaccttataaaaaaaaaaaaagaaaaagaaaaaaggaaggaaggaaggaaggaaggaacgaaggaaggaagggaggaaggaaggacagaaggaaggaaggaaaaagaaaagaaaagatcagatyacctcaatgtaattcctatcctctccttgtgactatgaccactaagagcttactaaatatctatctttcccttcatccttactaggtaaccaacaaaacagttgtgtgtgcagctacaacactacgtgcaac

SEQ ID NO: 290314 - DNA, 411 bp, Homo sapiens
ctactaaaaatttaaaaattagccaggcacaacgccacacaccaatcatcccggatactcaggaggccgaggaagggaattgcttgagtacaagaggtcaaggctgcagtgagctatgattgtgccactgcactccagcttgggtgacagagcaagaccttataaaaaaaaaaaaagaaaaagaaaaaaggaaggaaggaaggaaggaaggaacgaaggaaggaagggaggaaggaaggacagaaggaaggaaggaaaaagaaaagaaaagatcagatcacctcaatgtaattcctatcctctccttgtgactatgaccactaagagcttactaaatatctatctttcccttcatccttactaggtaaccaacaaarcagttgtgtgtgcagctacaacactacgtgcaac

SEQ ID NO: 290315 - DNA, 601 bp, Homo sapiens
cagcaaacatcacataaatgggcaaaagcattacccttgaaaagccacacaagacaaggatgccccctctcaccactcctattaaacatagtattgaaagtcctggccacagagatccatcaagagaaagaaataaagcatatacatacagaaagaaagggagtcaaactattcctgtttgcagatgatgtgtttctgtatctagaaaaccccacaatctcagcttgaaagctccttaaactgataaacctcagcaaagtttcaggataaaaagtcaatktacaaaaattactagcaaaatctgtacaaactagcaaaaaatgtacaaaaatcacattaaaaatcctatatggcaatgacagccaagctgagaaccaagtcaggaaagcaatcccattcacaactgtgacaaaatacctaggaatatagttaaccagggaggtgaaagatctctacaatgagaatcacaaaacactgctcaaagcaatcagagatgacacaaacaaatagaaaaacactccatgttcatggatctcatggataggaggaatcaatatcattaaaatggccatactgcccaaagcaatttatagattcaatg

SEQ ID NO: 290316 - DNA, 479 bp, Homo sapiens
gtggcacatatacactatggaaaactatacagccacacacacaaaaaaattagatcatatcctttgcagtaacatggatggagctggaggccatcatccttagcaaaccaaggcaggaacagaaaacaaataccacatgttctcatttgtaagtggaggctaagtgatcagaacacatggacacaaagaagggaaaaacagacaatgaactctaccttaggatagagggtggcaggaggtagaggaacagaaaaaaataaccattaggtacgaggcttagtattccagtgacaaaataatctgtacaacaaacccccatgacacaagtttacctacataacaaacctgctcatgtacccctaaacctaaaataaaagttaaaaaagtgtatataatatgtatgtattmttatgtatgtaattatatgtatatgatacatatgtatataattatatgtgtgtgtgtatatatataatctt

SEQ ID NO: 290317 - DNA, 524 bp, Homo sapiens
gcttcttctgtccttgaaattgtgaagaaagaacaagagatttatgttagttttgctgttgcacctcaaactatgaaagttatgaccaaaatcattcacaagacttcatctcatcatgtaggcattgtattatctcacatcatcacaagaagcaggttaagtacagtacaataacatactttgagagacaaggagactatattcacataacttttattacagtatattgttataattgttctattttattattagttgttgttaatttcttcctgtgcctaagttataaattaaactttatcagaggtatgtatatatagaaaaaaccatagtctatatataaggtttagtactatttgcagtttcaggcatccactggggatcttggaatgtgtccccagttaataaggaggaaatgctgtrtatattatgttcataaatgaaatcagttaatattgtaattacaccagctctttaaaaatttacttaacaatagattgaatgcaattctaactaaaatctaa

SEQ ID NO: 290318 - DNA, 540 bp, Homo sapiens
taagcataaagaaaaaactagaggtatcacattacccgacttcaaactataccacagggctgtagtaaccaaaactgcaaggcactgatacaaaaagagacacacagaacaatggaacagaataaagaccccagaaataatgctgcacacatacaaccttcttatctttaacaatgttgacaatatcaaagactgtaaatagaaatgggttctttcatgactgtctgccaaattaatcgaacatgactgcaattgagtagaaaaataaaaatattacttactgtatgtggcacttggcaatttcaaaatgatttgcaaacattcatcctcaaaatgcttctacaaaaatgcatctgtggaggaagaaaaaatccaaaagagtaaacaatttgtcaagatcacagaaaaactaatacagaccaacacacacttaaacactatatactttaacgtgcttaaataggttttacaaaatgtagacyatatatctaccaaagtataatgggctgatgaacagaagtattcccaactatatgcaaa

SEQ ID NO: 290319 - DNA, 931 bp, Homo sapiens
aaaacttaaaacataataaaagatatatattcttcttcacatataattcaatacaattataaagttataacaattagtaaatctctatatttcttcatactttagcatattcatcctcatagacaagaagactgaggtgaacactaattacatcacttgctcaatctgacacagccaataggaggcaagcctgggctcaaaaccagcttttctgacctgggtttcatcttacygcaatatctgctagtttctaggttgcatccagagcagagattgaaaactgggggcatgaaaaccacatctggcttactgatacatttcgtttgtcccacaccatggtttttaaaatattacataatattcaaaagcagaagatttctcataaaaaatccttwgcagcccaccgcacagcggtgggtgcaactgcgtgcacagattccagaacctcgtgtccaccagcagcccacccctgctgtgccgcttcttctctggcgcaagtgagcwcagtgtacaccggtgtgcccgcccctgtcagcacctcacccatactagtgcaccaccccactgacacaaaagcactccactgcaaggccacagtgactggcaagcacaggtgagcactgataccactgccaacaaccctacgaagcgcttcagccagcattctccttaaagttttggggccagcttatgaggaacgcttcagcacttctagccgtcagggtcataacctcaaggggccagaagacacagctggggcttcccggccccctggaatcttccataatcaaagccagaagactaaaggcaccctataccacaatcaaacaccaaagggcttcaaagaagataaaagcaaaaggcttcgttcaaaggacagcaacttcaaagattaaagaacatcagcccagaaagatgagaaacaaacagc

SEQ ID NO: 290320 - DNA, 514 bp, Homo sapiens
gtctcataactagcaattcaatgtgttaattcagctgtaccatccaattacctacaattcatctcaactttagtgcacaacaataaaagtcttttaaaaatttttgacaaaatgtctgctctaggttaccaaaatagaggaaatactatccataagtctgacagtgggtaccacagaatataaattgttaaaattatttatcacagcctatcaatatcacaatgatttttgaygtgaagtcagtaatctagcataaataatgaaccatatattggttgttttatttttaaaaagtctgaccaagtaatgtgagaaccgtgtggcaagtgaaattggcatcccctcaaataacacggcattcctttggagccatggcctgccacctgccaactgaccacagggcccaagcacacaactctaaaagtagacaaaggtaatgagatgcaaatttagcatccccttccacctgttaaatgacctagatgcaagagctatagtgtctcttacctattca

SEQ ID NO: 290321 - DNA, 514 bp, Homo sapiens
gtctcataactagcaattcaatgtgttaattcagctgtaccatccaattacctacaattcatctcaactttagtgcacaacaataaaagtcttttaaaaatttttgacaaaatgtctgctctaggttaccaaaatagaggaaatactatccataagtctgacagtgggtaccacagaatataaattgttaaaattatttatcacagcctatcaatatcacaatgatttttgatgtgaagtcagtaatctagcataaataatgaamcatatattggttgttttatttttaaaaagtctgaccaagtaatgtgagaaccgtgtggcaagtgaaattggcatcccctcaaataacacggcattcctttggagccatggcctgccacctgccaactgaccacagggcccaagcacacaactctaaaagtagacaaaggtaatgagatgcaaatttagcatccccttccacctgttaaatgacctagatgcaagagctatagtgtctcttacctattca

SEQ ID NO: 290322 - DNA, 514 bp, Homo sapiens
gtctcataactagcaattcaatgtgttaattcagctgtaccatccaattacctacaattcatctcaactttagtgcacaacaataaaagtcttttaaaaatttttgacaaaatgtctgctctaggttaccaaaatagaggaaatactatccataagtctgacagtgggtaccacagaatataaattgttaaaattatttatcacagcctatcaatatcacaatgatttttgatgtgaagtcagtaatctagcataaataatgaaccatatattggttgttttatttttaaaaagtctgaccaagtaatgtgagaaccgtgtggcaagtgaaattggcatcccctcaaataacacggcattcctttggagccatggcctgccacctgccaactgaccacagggcccaagcacacaaytctaaaagtagacaaaggtaatgagatgcaaatttagcatccccttccacctgttaaatgacctagatgcaagagctatagtgtctcttacctattca

SEQ ID NO: 290323 - DNA, 573 bp, Homo sapiens
caaggcagaataaactggtgtcatccttgatgctcacacatattagctgtgtgattctgaggtgakgcctcatttatacaatggcaacagtaacatactattactcatattgttgttataaagataaaacatgttaagacctgccagatgtttacttaccacagtacaaatacaaagtaaacaaccaacgaattttagccactttatcaatttataacccaatacaccatcttaccttcttcataaataagctggaatggatacacctttacatatattttattccatttttctttctttaaactaatggttgtatttcattggggttttgatagtcatataaatctcaccttctctatctgaaactaattatataataataatctcaagaggaaattaagtcagttattatgcttctaagctacataatcctcctcatatgtcaaaatccactttattaacaaaaaagaggtgctttgcttgtaatatcaaggcaattaatataagacaagagactaagttgacatttactactatcttcaagatgttatttggatgatttttgattgtgct

SEQ ID NO: 290324 - DNA, 562 bp, Homo sapiens
aaccttaccgaagtaaagatatatgaactctttgtcctctcatatttaagttctgttattgtgttagagaagaaaattacattaactctgagttatttacttctctcagacatgtgggctgtgaccccattttttctgctcttaggagtgtatggaaatcaatcatcattttgtcttattattttcataaatatcaaagcaaactgattaatctataacttcaaaagtcatccctagtatgtcctccctcttttcctccctccstgtcacccccatctctctctctcttttaatttgaccttcaaggccactaactcccttgcatattttcttattgtaaatactacttcataatgatctcatgatattttcgatcacaggcatgacaaatcagaatcccctgatttgtacacaaccaatatttaaacataacctctctgtacttcatcagccaatttatatcactgcgtaattccatatccagtctctacatcatgggtaggtgccatgttgttgcatttcctaactgaatactctatcatccattcctcctttttattca

SEQ ID NO: 290325 - DNA, 562 bp, Homo sapiens
aaccttaccgaagtaaagatatatgaactctttgtcctctcatatttaagttctgttattgtgttagagaagaaaattacattaactctgagttatttacttctctcagacatgtgggctgtgaccccattttttctgctcttaggagtgtatggaaatcaatcatcattttgtcttattattttcataaatatcaaagcaaactgattaatctataacttcaaaagtcatccctagtatgtcctccctcttttcctccctccctgtcacccccatctctctctctcttttaatttgaccttcaaggccactaactcccttgcatattttcttattgtaaatactacttcataatgatctcatgatattttcgatcacaggcatgacaaatcagaatcccctgatttgtacacaaccaatatttaaacataacctctctgtacttcatcagccaatttatatcactgcgtaattccatatccagtctctacatcatggktaggtgccatgttgttgcatttcctaactgaatactctatcatccattcctcctttttattca

SEQ ID NO: 290326 - DNA, 611 bp, Homo sapiens
aattgggggaggatataacgactacataaaaatattaaacagccacgtttgacaaacatatgatactattaatcataatctagtatgtcaatgccattcttgattatactcatgaaaggcaatttccagagatattatctttatatcttttcgtgagtcaagtatcatttaaatttctatgttaataactgtattaatrtctcctcctacattgtccatcctgccctaccgtcaattatggagcatttaccagagatgcttctgtgcatgtgtgagtacacagggtcccactcataacactctggaatgtctctctactgctctctctagtgaattccagtcctaacatcaggtcactcacctctacatggcatactgagaaaaactgtggaccaggtaaaagattggggttctgatgctgatacagctacttactagtcctatgtttttcaaagacaaataagcccccattcttacatgtttcatctcttaaaaaaaggcgcaattccattttgcagtctttgtgataatatttaacttaggcagaatcataaacttggtaaaatttatttgggtaattggatatttacgtagtcccaaagtatcaccct

SEQ ID NO: 290327 - DNA, 1236 bp, Homo sapiens
aattgggggaggatataacgactacataaaaatattaaacagccacgtttgacaaacatatgatactattaatcataatctagtatgtcaatgccattcttgattatactcatgaaaggcaatttccagagatattatctttatatcttttcgtgagtcaagtatcatttaaatttctatgttaataactgtattaatgtctcctcctacattgtccatcctgccctaccgtcaattatggagcatttaccagagatgcttctgtgcatgtgtgagtacacagggtcccactcataacactctggaatgtctctctactgctcyctctagtgaattccagtcctaacatcaggtcactcacctctacatggcatactgagaaaaactgtggaccaggtaaaagattggggttctgatgctgatacagctacttactagtcctatgtttttcaaagacaaataagcccccattcttacatgtttcatctcttaaaaaaaggcgcaattccattttgcagtctttgtgataatatttaacttaggcagaatcataaacttggtaaaatttatttgggtaattggatatttacgtagtcccaaagtatcaccctwtcatagaagcaaatgtttacaatctttctcacctatacttgtgcagacaaattttctcatcatttatgatgataaacctattacacaatcatttaaaatgtcacaatcagtaaataatatagctacttcaagcataaaatcttttgttaaaatgttgactttatgaaagcaatatctcattaaaagttttaaagttttatttgttttatttggaagtcttatgattcaatatatcttattattataggttttgtaacaataatttcatgacatgaagaaagtataattagttttaaactaagctttatactaatacactcaaatttgctctagtttatcttattatccataaagccttatatcatctgtcatttgcaccaaacacagtggcaaatttacatttttccatgacggtgatttgtatatattttctccactatatagtaggatatatgagagcaaaaaaaatagatttatttgtttatawagggaggtggttgttgtaactttattcaaagcacagtgcctttcgtacagtaaattcctgttgaatggataaataaatccaaccatttatttttttttattatactttaagttttagggtgcatgtgcacattgtgc

SEQ ID NO: 290328 - DNA, 558 bp, Homo sapiens
ttctatggagaaaaattaaatgtattagaattagtctataattagaattagtctataattcattaaaggtctaatgaaaggtattagtattagtcctttaattagaaaaattaaaggtatgtattagtstgttttttcattgatataaaaaattatctgagactgggtaatttataaagaaaagtttaattggctcagggttatacagtctgtacagaaagtatagtggtttctgcttctggggaggcctcaggaaacttacaataatggtggaaggtgaagaggaagcaggcacatcttacatggtcacagaaggaggaagaggagggggaaggtgctacacacttttaaacaaccagatctcacaattcgcccactcactatcatgaaaacagcatcgagagatattgctaaaccattcatgagacacctcccatatgatcctatcacctgccaccaggcccaatctccaacattggggattacaagaacatgagatttgggtaaggacacagagacaaaccacatcagtaggcaacaagactttgtattcaacaa

SEQ ID NO: 290329 - DNA, 558 bp, Homo sapiens
ttctatggagaaaaattaaatgtattagaattagtctataattagaattagtctataattcattaaaggtctaatgaaaggtattagtattagtcctttaattagaaaaattaaaggtatgtattagtgtgttttttcattgatataaaaaattatctgagactgggtaatttataaagaaaagtttaattggctcagggttatacagtctgtacagraagtatagtggtttctgcttctggggaggcctcaggaaacttacaataatggtggaaggtgaagaggaagcaggcacatcttacatggtcacagaaggaggaagaggagggggaaggtgctacacacttttaaacaaccagatctcacaattcgcccactcactatcatgaaaacagcatcgagagatattgctaaaccattcatgagacacctcccatatgatcctatcacctgccaccaggcccaatctccaacattggggattacaagaacatgagatttgggtaaggacacagagacaaaccacatcagtaggcaacaagactttgtattcaacaa

SEQ ID NO: 290330 - DNA, 614 bp, Homo sapiens
aagtctaaaaccaccaaagaacaactgcaatagatggaagaggtggctatttcagcaaatgcacaggaatgaatatgaagacacaagggaaaatcaggaaaacatgacttcaccaaaagaattaacaaagctccagtaatggagccagaagaattaaagatctataacatatctaacaaagaattcagaataatactcaaagaaatgcagagaatcacaagaaaatatktatagaaaattaagaaaaacaacctaggaataaaagcagaaatttgacaaaagcaataaaaaatagaaattttatattatagatacaataaatgaattaaaaacctcaccagaaatcttcaacagcagacttgaccaaaagagaagagaatcagtgagcttgaagacagaacacacaaatttatccaatgagaagaggaaaagaaagaccaagaaagagtgaaaaaggcctacaagcattatgaaacaccataaagggaataaacctttctattactgaaggagacaaaagaaaaaaacagcctagaaagattatttaagacaataatggctgaaaactttccaaatatggagaataacaacaacatccaggtatagaaagctca

SEQ ID NO: 290331 - DNA, 614 bp, Homo sapiens
aagtctaaaaccaccaaagaacaactgcaatagatggaagaggtggctatttcagcaaatgcacaggaatgaatatgaagacacaagggaaaatcaggaaaacatgacttcaccaaaagaattaacaaagctccagtaatggagccagaagaattaaagatctataacatatctaacaaagaattcagaataatactcaaagaaatgcagagaatcacaagaaaatatgtatagaaaattaagaaaaacaacctaggaataaaagcagaaatttgacaaaagcaataaaaaatagaaattttatattatagatacaataaatgaattaaaaacctcaccagaaatcttcaacagcagacttgaccaaaagagaagagaatcagtgagcttgaagacagaacacacaaatttatccaatgagaagaggaaaagaaagaccaagaaagagkgaaaaaggcctacaagcattatgaaacaccataaagggaataaacctttctattactgaaggagacaaaagaaaaaaacagcctagaaagattatttaagacaataatggctgaaaactttccaaatatggagaataacaacaacatccaggtatagaaagctca

SEQ ID NO: 290332 - DNA, 453 bp, Homo sapiens
caacataccaaaacctatgagatacagcaaaaatagttctatgagaaaattttagagcaacataattctacatcaaaaaagaagaaaggtttcaaataaacaacctaatgttatagctcaagacaaaggaaaaagaacaaagtacgcccaaaattagtagaagggaagaaataacaaatatcagagcagaaataaatgagatagaaataaaaacgtataagagaccratgaacagtgttattttttgaaaatacgaacagatacaattttagctagactaaaaacaaagagtaaaaactcaactaaataaaatcagagatgaaaaagaaggtactataaccaatacacataattataatagatacttatgaacaactatataccaacgaattggaaaatttagaagaaatgggtaaattcctggacaaatacaacctttctcttgcctaactg

SEQ ID NO: 290333 - DNA, 453 bp, Homo sapiens
caacataccaaaacctatgagatacagcaaaaatagttctatgagaaaattttagagcaacataattctacatcaaaaaagaagaaaggtttcaaataaacaacctaatgttatagctcaagacaaaggaaaaagaacaaagtacgcccaaaattagtagaagggaagaaataacaaatatcagagcagaaataaatgagatagaaataaaaacgtataagagaccgatgaacagtgttattttttgaaaataygaacagatacaattttagctagactaaaaacaaagagtaaaaactcaactaaataaaatcagagatgaaaaagaaggtactataaccaatacacataattataatagatacttatgaacaactatataccaacgaattggaaaatttagaagaaatgggtaaattcctggacaaatacaacctttctcttgcctaactg

SEQ ID NO: 290334 - DNA, 626 bp, Homo sapiens
ataaaattaaatttatttgataatttgtaaatcttttgaaaaataaaaatgaagtattatgtttgctcaagattattgaacatgtctccaaacatcaaggtagaagttayagcctcatcacggtgcttgttaaaggaaacagacagtggatcttagaatagaacctatattacctgttaaagatagttaagcttctcacctataaaatggtgagagctatctacactgacagatgctatgcagaaactaatctgtctctgtcactattttcccttaggtacattgacttcaacatacaaacttggtgatagatgactactacaacttataacaaaatttgcagttttcagcaacttactcacagattcgtaaagtgacatagcacaatattggtagtacagtagaaaatgctttgtatacatttatagcctctatattttgaaattcatttcacccttccactgaaaacagatcaatatttaaatacatttagcattatttacttactaagatgagccaagtacatttccgtccttgcaaatggatcataaagttttattccacagtataacttctctcagagcctgtcactttgattcctagcatttcacttaactaaaatgata

SEQ ID NO: 290335 - DNA, 626 bp, Homo sapiens
ataaaattaaatttatttgataatttgtaaatcttttgaaaaataaaaatgaagtattatgtttgctcaagattattgaacatgtctccaaacatcaaggtagaagttacagcctcatcacggtgcttgttaaaggaaacagacagtggatcttagaatagamcctatattacctgttaaagatagttaagcttctcacctataaaatggtgagagctatctacactgacagatgctatgcagaaactaatctgtctctgtcactattttcccttaggtacattgacttcaacatacaaacttggtgatagatgactactacaacttataacaaaatttgcagttttcagcaacttactcacagattcgtaaagtgacatagcacaatattggtagtacagtagaaaatgctttgtatacatttatagcctctatattttgaaattcatttcacccttccactgaaaacagatcaatatttaaatacatttagcattatttacttactaagatgagccaagtacatttccgtccttgcaaatggatcataaagttttattccacagtataacttctctcagagcctgtcactttgattcctagcatttcacttaactaaaatgata

SEQ ID NO: 290336 - DNA, 525 bp, Homo sapiens
ccagatatcaacaaacatctacaagcatcaaggacattaggaaaacatagcctcaccacattaactaaataaggcaccagtgaccaatccttgattggcaaagacatgtgacctgttagacagaaaattcaaaatacctgtcttaggaagttcagcaaatttcaagataacacagagaaggaattcagaatcctctcagagaaatttaacaaagtgattgaaataatttttttaaatcaagcaaaaattctagagatgaagaattcaagtgacgaactgaaaaatgccgcagtctctcaaaagcagaaytgatcaagcagaacaaagaattagtaaacttgaagatagactgtatgaaaatatacagtcaggggtgaaaaaataaaaaaagaatgaagtaatcccacaaaatctagacaatagcctcaaaagggataatctaagagttattttattaaagaggatatagagacagggatcaaggtagaaatgacaacataaaccttcctaaacctggaaaaaaca

SEQ ID NO: 290337 - DNA, 507 bp, Homo sapiens
tctctagtgatacagaatataccacagagatatagaatgtaacctatattctagatcacagctatgtaaactgctggtaattcccaaaatatgctatactcaattacctttgggtctccatatattgtcttttgggtggacctcttagcccatctatcttggcctaacaccttctggccttttagatggcagtttacctgtcactttctccaggaaactttccctgatcrctcccctcccctactaaaacgggattgagtccttcacatactcccttaacattttagagcttattcttatcatgacactgaacacattaattgcaactgcctgcttacaagtctgtattcaccaactataaactcctaaagacattaaatttaaaagaaaaagcattcatcattgttttcactttactaagttttaatctctgcagcggttcaccaaaattttatgcactatggaaaaccaaagaaaggaaaagatttctgtactagatttttgaaa

SEQ ID NO: 290338 - DNA, 578 bp, Homo sapiens
ggattaacaatgagttcaaataaccattgacttatggtaatagctgtaattatggaatatccttgatacaatgtgaaacaaaggcaaaaccaattagacaaaatatacaattttttaaaatctgcgttctgctgraaaaaaatatacaattttagatttgatactactgaactgcaagttctaagccatttaaaaattcttgtttcaggtattcaacctcttttagctattatctaaatggtttattcattaactaagcaaaacctgagagaataagggttttaaaaccctgtactttcctccctaccttaaagaaaacttctctgatgaaatggcaagatatttattagaataacaagagtgaaatcaattcccaacagaggctaaaccagaatgacttctgagatcccattcagcactggaaagctcaactagatataacatcacagtaaggttatatagtagcggcaattagcatcaccattccagtaggaggagtgtgtttccaagaaatcccttgtcttcagtatccaagttagactacccccaccaaaaaaaaaaaaattccagtatgtttc

SEQ ID NO: 290339 - DNA, 577 bp, Homo sapiens
atcttgtatttaacatatacaatggtagtatcaggcctagatcttcaagaaacagaacagtgttgtgagcatacagaggaaactagttttacatcccaaagtggttgaaatcattacttattatcctgaatgatgggattaaaattaggcaaacctctatcacatgttctcgattttacctgccagctccaaaaatcacagagaaaagaaaactgaccaccctacatcaaataatagttgggctttaattatggtaatgacaataaaccagtagaatcatsccatcatacctaaactccagaatctaatggcagtatctccccttcaggaaagcagctaataagctatagggggcagcaaagttaagagagtgaaatgtaaatagcaggaggtgaagccagggcaggaaatgttaataggctgggtaatgaaccatgagtatcagagagaaaaggacgaagtctcaattaatgaattaaatcaatagacagacaatgctaacccggtgattctcaatcctggctgcgcgttagaatcaccctgggagcttttaaaaatactgtaagtggattttacc

SEQ ID NO: 290340 - DNA, 563 bp, Homo sapiens
aaagaaaaacttctggtctttctataaaactacagtgggaaaactaattaaatcaaaaccaggcatatcctatccacacttgagaaataatgaaccaaattacgtaagtacagggctagggaagaaatgtctgtgtaccaaccacagcaaataaactagaagtcatagcaggccttctataaaagtgccaagcaacctacaagtaatagcaaatgttcacttgctaccacaaatcagaattaaatatttggttcagcttgtcactatcatacctgctttcaaggagaaaggcaaatatgactaaagtttttttttattgtaacctaatagstataaaaagcagaaacttagcccaaaatgtatcttattagctattaaacaatactatatcaatttaacaccctaaaaataaaaaaggaggattctatcccaaagcaaaaacagtcattcaatgaacatttaggtagccagttaggttgatgtagaagttagaaaagaaaaagggaaaagaaagattgctacattaaattaatagaccttagagcaaacaaaagcactaccag

SEQ ID NO: 290341 - DNA, 629 bp, Homo sapiens
ctgttttcaccttccgtatttgagagtggtacaaataagtgtaaagttttatatgtacacatatacatatttatataattagctaaaatatataacagtgggcaaaaattattgtaaaggtaatattggaaaatagaaggctatccaaataaagagttatcctcaaatctcaaaacataaactaagcattagactgggtgtaagaagggctgaaagttgaagtaaatagtcttgtgcatttcagtggattctttctaatggggataataaaaccaaatatccaagtgtactttagaaaaagcagtgattttktgagaaacctttttaaattattgtacacttattaccccaatttttttaataaggtgccatctctatttgcaaagggaggaacaaaaatatatatcatctgctggcagtggactcaaataagagaatttcaattgttccaaattttaatggcttatttacataattcagtcctatttaaaaatctctgactggtaacaaagacaactgagtttggacccaggtatttgcactaaagcattgacactttagatgtttactttctaatctctcttaaccataaatttttccttctgtatttggggataatatattacaga
